United States Patent Application Publication US 2017/0114356 A1 - sequence listing, part 85

SEQ ID NO: 134382 - DNA, 1811 bp, Zea Mays
tggtctatccttagttggtccgaccttttaagaaacaaaaggtaactgtatgaccagcgcagaagaaaataggatctagatgatgattgagagagaaacgtttcagggggaaaaaatccaatcaattaaaaattagacctgggaacattggcagatcgatctagagggtggacaaggtgggctgattttgatcctgctaaattatatagatagttttgatttatttgctacttttgattctcatacgttgtagaacttaaaatgtgaactcatttgtttattgattctcataaggttggaccaccttaactttaaatcctagatttgccactgggaagtgaccgagagaaaactatctgtgccacttagtggtttgataaactatgttgtgataccaagttaccaacgttttgaaatcaataaatgttgtggcagccattcagggacatgattgaagggatgaggagtgatcttaggaagacaaggtataacaacttcgacgagctctacatgtactgctactatgttgctggaactgtcgggttaatgagcgtacctgtgatgggcatcgcaaccgagtctaaagcaacaactgaaagcgtatacagtgctgccttggctctgggaattgcgaaccaactcacgaacatactccgggatgttggagaggatgctagaagaggaaggatatatttaccacaagatgagcttgcacaggcagggctctctgatgaggacatcttcaaaggggtcgtcacgaaccggtggagaaacttcatgaagaggcagatcaagagggccaggatgttttttgaggaggcagagagaggggtaactgagctctcacaggctagcagatggccagtatgggcttccctgttgttgtacaggcagatcctggatgagatcgaagccaacgactacaacaacttcacgaagagggcgtatgttggtaaagggaagaagttgctagcacttcctgtggcatatggaaaatcgctactgctcccatgttcattgagaaatggccagacctagccaccagagaagctgcaatgcaaggttcaggttaggctagatagaaagttaaatggggcaacatcaggaggccttgatgaaaaacagacaacctggtgaattgttgttgggatcaggcacagaacagataagagccgcgcagccaacctagggcatgtttggtttcaattagttctaggactaaactttagtcctaggactaaactttagtccctatatgtttggttctagggactaaatagattctaaagtcattaaatacattgtccaaagactcaaatacccttagaatatactcatgatattagttatctataaaaaggtaagggcaacatgataattatgagcttttagtctcttttagcacctatgtgaaggactaaagactaaatcattttagtccatattttagtcctagtgtttggcaaaaaagggactaaaagggactaaaaactagagactaatctttagtccctctaaccaaacacccccctagatggatacggaacattcgcctcttattcggagcaatatatgtctctcaaggaaagagcccaacatgtatactgccttctttttctcatcccagatttgggggaaaaacaatgtaaatgccaatggtatcgtaggaagattactagaagtaaatgccaatgtaaaaacagatgagttggcatttacatgataggatggtgggatcatcagactgaaaatgataggggattgtgctcccctgcgactccaactattaaacaaggaatccgtcagcagta

SEQ ID NO: 134383 - DNA, 1858 bp, Zea Mays
aggtccgtgtaggtcgcatgcaagctgggcgacactgcgtgccgggcgtcctccttcctctgctccttccgatccccctcccggcgtggaggtatagcgtccgccatctcccccggccgaccggatccctcacccctctaggtacgtagctagctaggccaggttatcgtcgattcgatagattcaataagcaaaggcgatcaacaacacaattaatggggggcggcggcggcggcaactcgcgggagctggaccagacgccgacatgggcggtggcgtcggtgtgcggcgtgatcgtgctcatctccatcctgctggagaaagggctccaccacgtgggcgagttcttctcccaccgcaagaagaaggccatggtggaggccctggagaaggtgaaggcggagctcatggtgctgggcttcatctccctcctcctcgtgttcggccagaactacatcgtcaaggtgtgcatcagcaaccacgccgccaacactatgctcccctgcaagctcaaggaggccgccgtccctggcaagaagaaggccgccgcagcagcagagcatctcgggggcgtgctggactggccgccgccctactacgcgcacaacggcaggatgctggcggaggcgagcatggcgaccaagtgccccgaggggaaggtgtcgctcatctccatcaacgccttgcaccagctgcacatcttcatcttcttcctcgccgtcttccacgtctcctacagcgccatcaccatggcgctcggcagggccaagatacgcgcgtggaaggagtgggagaaggaagcagcagggcaggactacgagttctctaacgaccctacgcggttcaggttcacccacgagacttcgtttgtgaggcagcatatgaatgtgctcaacaagttcccagcatccttctacatcagcaacttcttccggcagttcttcaggtccgtcaggcgggcagactactgcgcgctgcgccacagctttgtcaacgtccatctggcccctggcaccaagtttgatttccaaaagtacatcaagcggtctctggaggacgacttcaaggtgatcgtggggatcagccctcctttgtgggcttctgctctcatcttcctattcctcaatgtcaatggatggcacaccatgctctggatctccatcatgccggtggtgatcatcctgtccgtggggacgaagctgcagggcatcatctgccgcatggcgatcgacatcacggagcggcacgccgtgatccagggcatcccgctggtgcaggtcagcgactcctacttctggttcgcacgcccaaccttcgtgctcttcctcatccacttcaccctcttccagaatggcttccagatcatctacttcctctggattctgtatgagtacgggatggactcgtgcttcaacgactccgaagaattcgtctttgcacgtctctgccttggggtggttgttcaggtgctgtgcagctacgtgacgctccctctgtacgcgctcgtctcccagatgggctccaccatgaagcagtccatcttcgacgagcagacctccaaggcgctcaagaactggcgcgccggcgccaagaagaaggcccccaccggctccaagcacggcggcggctccccaaccgccgccggcagccccaccaaggccgacggcgacgcgtaggcgtagctagcagagggtcatcgatcgattgatcgatcgatccagctgttcgttctacatataacctgttacttatttgtatgtaattgtaccaatagcaatcgacacgcgtgcgccgcatgcaatgtaccatgaaactgctgatagctagagagcgacatttttcttgtttggttcgtttc

SEQ ID NO: 134384 - DNA, 5892 bp, Zea Mays
gggagcgggatggcggcgccggggcggaggacggcggacgtgtcctcgtcctcgcccgccccctcgccgtccccttccaccggtaggcgcctcctgcgcacgcagaccgtcggcaacctcggcgagtccatcttcgacagcgaggtcgtgccgtcctcgctcgtcgagatcgcacccatcctccgcgtcgccaacgaggtcgaggccaccaacccgcgcgtcgcctacctctgtcgcttctacgctttcgagaaggctcaccgcctcgacccgacatccagtggccgtggtgttcgtcagtttaagaccgcacttctgcagaggcttgagagggaaaatgatcccacgctcaagggaagggtccaccagagcgatgctcgggagatgcagcgcttctaccgcgaatactacaagaagtacatccaggcactgcagcatgctgctgataaggctgaccgagcactgctcactaaagcgtaccagacagctgctgtcttgtttgaggtcttgagggccgttaatgtctcgcagtccgttgaagtcgatcaagcgattttggatacacacaataaggttgaagaaaagaaaaagttgtacgtaccttataacattctcccgcttgatcctgaaagtactggtcaagccattatgcgatatccagagattcaagctgctgtttatgctcttcgcaatactagaggtctgccatggccaaaggaccaagacaagaagcctggcgagaagaatactgggaaagaccttctcgattggcttcaggctatgtttgggtttcagaaagacaacgtgtccaaccaaagggaacatttggtactgttgcttgcaaatgttcatataatgaaagtacccaaggttgaccaacaaccgaagttggatgacaaagctctggatgctgtaatgaagaagctgtttaagaattataagaagtggtgcaagtaccttggccgcaaaagcagcttatggttgccaaccatccagcaggaagtgcagcagcgtaagcttctttatatgggcctctacctgctgatttggggtgaggcggctaacttgagattcatgccagagtgtatttgttacatctaccatcatatggcttttgaactctacggcatgctggctggaaatgtgagcccaatgacgggtgaaaatgttaaaccagcatatggtggtgatgaagaagcctttttgattaaagttgtgactccaatatacaaagttatagagaaggaagctgaaaggagcaagaccatgaaatcaaagcactcccattggagaaactatgatgatctgaatgagtacttttggtcagttgattgtttccggctaggatggcctatgagagctgatgctgactttttcaaaactccaaaagatgcttatctgaatcttttgaatggagagaacagatctgcaggtaatacccattggatgggaaaagttaattttgtggagatacgttcattttggcacatattccgtagtttcgacagaatgtggatcttcttaatattgtccttacaggccatgataattattgcttggaatggtggaacaccaagtgatatttttgatgctggagtatttaagaaggttttgagcatatttattactgctgcaattttgaagttgggtcaagcaatcctagacctcatatttggttggaaagcaagaagaaacatgtcatttgcagtcaagctgcgatatatcttgaagttaatatgtgctgctgcatgggttgtgattttacctgtgacttacgcgtacacttgggagaatcctactggacttgcaagaacaataaaaagttggcttggtgatggtcagaatcagccatctttgtacatattggccatagtgatatatatggcaccaaacatagttgcttctatgctatttcttttcccatttatgagaagattcttagagagttcaaatgttaaggtcataacgatcataatgtggtggtctcagccccggttatttgttggcagagggatgcatgaaggtgcattctccctcttcaagtataccatgttctgggttcttcttttagcaacgaagctgactgtaagcttctatattgagatcaaacctctggtacagccaaccatagatataatgagggaacctatcaggactttccagtggcacgaatttttccctcatggaactaacaatattggtgttgttatatcactgtgggctccaataattctagtatatttcatggacacccaaatttggtatgcactgttctcgacattaattggtggtatctatggggcttatcgtcgtcttggtgagatacggacattaggaatgttgagatctcgctttgaatctttgcccgaggccttcaatgaacgcttgattccttctgatgcaaataagagtaaaggtcttcgtgctgccttttcaagtagacccaaggcttctggtgacgaaagacagaaagagaaaagagctgcaaggtttgctcaaatgtggaatgtcattattacaagtttccgtgaagaagacctcatagacaatagggagatggatctgctactggttccatactgtaaagaccgtgagctcgatatatttcaatggccacctttcttacttgctagcaagatcccaatagcactggatatggcagcagacagtggcggaaaagaccgtgatctgacgaagaggataaaatcagatccatacttttcctttgctatcagagaatgctatgcttcattcaagaacatcatcaatactttagtgtttggtcagcgggagaaagatgtcctagcacagattttcgcagttgtggatcagcatatagaagatgaaactctgataaaggatctcaatatgaggaaccttcctgcactgagcaagaagtttgttgaattacttgaattactgcaaaaaaacaaggaggaagacttgggtcaggtagtcattttgttccaagatatgcttgaggtggtcacaagggatataatggaggaacaggaccagctcggcacactgttggaatctgcacatggtgcaaatagtagaaaacatgaaggaattacaccgctagatcagcaagaccagttgtttgctaaagctattaagttccctgtggatgaatcaattgcatggactgaaaagataaagaggcttcatcttctgttaactgtgaaggagtctgctatggatgttcctactaatcttgatgctaggcggcggatatcattctttgcaaattctttatttatggatatgcccaatgctccaaaagttcggaacatgttggccttctctatcttgactccttattacaaggaagatgttctgttctcattacaaaatctagaagagccaaatgaggatggagtttccattcttttctacttacaaaaaatttacccagatgaatggaaaaatttcctcgaaagggttggctgcaagaatgaagagggactccgtgaagatgaagaactagaagagaagcttcgtctttgggcgtcgtatagggggcagacattaacaagaactgtaagagggatgatgtactatcgaaaagctttggagcttcaggcttttcttgatatggcggaagatgatgatcttatggaaggttacagagcaacagaagtaatgcccgaggactcgcaattaatgactcaatgcaaggctatagctgacatgaagtttacatatgttgtctcatgccaacaatatggaattcagaagcgttctaatgagccttgcgcacatgatattttgagactaatgacggaatatccatcacttcgggtcgcctatattgatgaagttgaagcgcctagccaagatagaaacaagaagattgaaaaggtttactactcagtgttggtgaaggcttctgttacaaaacctgatgagcctggtcagagccttgatcaggtcatctacaagataaagctaccaggtaatgccattttaggtgaaggaaagccagaaaatcagaaccatgcaataatattcaccagaggcgaatgcctccaaactatagatatgaatcaggagcactatatggaggaggctttgaaaatgagaaatctgctgcaagagtttgagaagaaacatggagtgagatatccatcgatacttggagtcagagaacacatatttacgggcagtgtgtcatcccttgcatggttcatgtcaaatcaggaaactagtttcgtaacaattggacaacgagtgcttgccaatccgttgagggttcgttttcattatggtcatcctgatatcttcgatcgccttttccacattacgaggggtggtgtgagtaaagcatccaaaattatcaatctcagtgaggacatatttgcaggattcaattccacattgcgtgaaggcaatgttactcaccacgagtacatgcaagttggcaagggaagggatgtgggtctcaatcaaatatctctgtttgaggcaaagatagcaaatggcaatggcgaacagacgctgagccgtgacatctaccggctgggtcatcgctttgatttcttcagaatgctatcttgctactatacaacaattggtttctacttcagtacaatgattacagtgtggactgtatatgttttcctctatgggcggttatatcttgtacttagtggacttgatgaagcgctggctactggaaggaggtttgtgcacaatgcacctctccaggttgcgcttgcatcggagtcttttgtgcagcttgggtttttgatggcgctacccatgatgatggaaatcggtttggagagaggattcagaacagcattgagtgacttcatactgatgcagcttcagttggcctcagttttcttcacgttctcattgggaacaaaaactcattactacggaaggacattactccatggaggagctgaatacagagccactggacgtgggtttgtggtgttccatgcgaaatttgctgacaactatcgactctattcccgtagccattttgtcaagggcattgagctgatgattctactagttgtgtatgaaatatttagccagccatatagaggggctgtaacttacatcttcatcaccgtgtccatgtggttcatggtgggcacttggctctttgcaccattcctgttcaatccttctggatttgagtggcagaagattgtggacgactggaccgattggcacaagtggatcagcaatcgtggaggtatcggtgtagcaccagagaaaagctgggagtcatggtgggaaaaggagcaagagccccttcgatactccgggaagcgcggtactgttgttgaaatactgcttgcgctgcgtttctttatctaccagtacggacttgtgtatcatctgaatataacgaagaagataactaaggacaaccagagtgtgctggtttattgcttctcatgggttgtaatttttgtgattttgctcgttatgaagaccgtatcagtgggcaggagaaggttcagtgcagagttccagctagtgttccggttgatcaagggtctgatatttataacatttacagccatcgtggtaatcctaatagcgatccctggcatgacggtgctggacatatttgtttgcatccttgctttcatgcccactggatggggtttgctgctgattgcccaagcgatccggcctgtgatccacaagactgggctctggggctcgatcaaggctcttgcccggggctacgagatcctgatgggacttctcctgttcacgcccatcgccttcctcgcctggttcccgttcgtgtcggaattccagaccaggatgctgttcaaccaggcgttcagcagaggtctgcagatctcccgtatcctgggaggacacaagaaagaccgagggacccggaacaaagaatag

SEQ ID NO: 134385 - DNA, 6429 bp, Zea Mays
gggagcgggatggcggcgccggggcggaggacggcggacgtgtcctcgtcctcgcccgccccctcgccgtccccttccaccggtaggcgcctcctgcgcacgcagaccgtcggcaacctcggcgagtccatcttcgacagcgaggtcgtgccgtcctcgctcgtcgagatcgcacccatcctccgcgtcgccaacgaggtcgaggccaccaacccgcgcgtcgcctacctctgtcgcttctacgctttcgagaaggctcaccgcctcgacccgacatccagtggccgtggtgttcgtcagtttaagaccgcacttctgcagaggcttgagagggaaaatgatcccacgctcaagggaagggtccaccagagcgatgctcgggagatgcagcgcttctaccgcgaatactacaagaagtacatccaggcactgcagcatgctgctgataaggctgaccgagcactgctcactaaagcgtaccagacagctgctgtcttgtttgaggtcttgagggccgttaatgtctcgcagtccgttgaagtcgatcaagcgattttggatacacacaataaggttgaagaaaagaaaaagttgtacgtaccttataacattctcccgcttgatcctgaaagtactggtcaagccattatgcgatatccagagattcaagctgctgtttatgctcttcgcaatactagaggtctgccatggccaaaggaccaagacaagaagcctggcgagaagaatactgggaaagaccttctcgattggcttcaggctatgtttgggtttcagaaagacaacgtgtccaaccaaagggaacatttggtactgttgcttgcaaatgttcatataatgaaagtacccaaggttgaccaacaaccgaagttggatgacaaagctctggatgctgtaatgaagaagctgtttaagaattataagaagtggtgcaagtaccttggccgcaaaagcagcttatggttgccaaccatccagcaggaagtgcagcagcgtaagcttctttatatgggcctctacctgctgatttggggtgaggcggctaacttgagattcatgccagagtgtatttgttacatctaccatcatatggcttttgaactctacggcatgctggctggaaatgtgagcccaatgacgggtgaaaatgttaaaccagcatatggtggtgatgaagaagcctttttgattaaagttgtgactccaatatacaaagttatagagaaggaagctgaaaggagcaagaccatgaaatcaaagcactcccattggagaaactatgatgatctgaatgagtacttttggtcagttgattgtttccggctaggatggcctatgagagctgatgctgactttttcaaaactccaaaagatgcttatctgaatcttttgaatggagagaacagatctgcaggtaatacccattggatgggaaaagttaattttgtggagatacgttcattttggcacatattccgtagtttcgacagaatgtggatcttcttaatattgtccttacaggccatgataattattgcttggaatggtggaacaccaagtgatatttttgatgctggagtatttaagaaggttttgagcatatttattactgctgcaattttgaagttgggtcaagcaatcctagacctcatatttggttggaaagcaagaagaaacatgtcatttgcagtcaagctgcgatatatcttgaagttaatatgtgctgctgcatgggttgtgattttacctgtgacttacgcgtacacttgggagaatcctactggacttgcaagaacaataaaaagttggcttggtgatggtcagaatcagccatctttgtacatattggccatagtgatatatatggcaccaaacatagttgcttctatgctatttcttttcccatttatgagaagattcttagagagttcaaatgttaaggtcataacgatcataatgtggtggtctcagccccggttatttgttggcagagggatgcatgaaggtgcattctccctcttcaagtataccatgttctgggttcttcttttagcaacgaagctgactgtaagcttctatattgagatcaaacctctggtacagccaaccatagatataatgagggaacctatcaggactttccagtggcacgaatttttccctcatggaactaacaatattggtgttgttatatcactgtgggctccaataattctagtatatttcatggacacccaaatttggtatgcactgttctcgacattaattggtggtatctatggggcttatcgtcgtcttggtgagatacggacattaggaatgttgagatctcgctttgaatctttgcccgaggccttcaatgaacgcttgattccttctgatgcaaataagagtaaaggtcttcgtgctgccttttcaagtagacccaaggcttctggtgacgaaagacagaaagagaaaagagctgcaaggtttgctcaaatgtggaatgtcattattacaagtttccgtgaagaagacctcatagacaatagggagatggatctgctactggttccatactgtaaagaccgtgagctcgatatatttcaatggccacctttcttacttgctagcaagatcccaatagcactggatatggcagcagacagtggcggaaaagaccgtgatctgacgaagaggataaaatcagatccatacttttcctttgctatcagagaatgctatgcttcattcaagaacatcatcaatactttagtgtttggtcagcgggagaaagatgtcctagcacagattttcgcagttgtggatcagcatatagaagatgaaactctgataaaggatctcaatatgaggaaccttcctgcactgagcaagaagtttgttgaattacttgaattactgcaaaaaaacaaggaggaagacttgggtcaggtagtcattttgttccaagatatgcttgaggtggtcacaagggatataatggaggaacaggaccagctcggcacactgttggaatctgcacatggtgcaaatagtagaaaacatgaaggaattacaccgctagatcagcaagaccagttgtttgctaaagctattaagttccctgtggatgaatcaattgcatggactgaaaagataaagaggcttcatcttctgttaactgtgaaggagtctgctatggatgttcctactaatcttgatgctaggcggcggatatcattctttgcaaattctttatttatggatatgcccaatgctccaaaagttcggaacatgttggccttctctatcttgactccttattacaaggaagatgttctgttctcattacaaaatctagaagagccaaatgaggatggagtttccattcttttctacttacaaaaaatttacccagatgaatggaaaaatttcctcgaaagggttggctgcaagaatgaagagggactccgtgaagatgaagaactagaagagaagcttcgtctttgggcgtcgtatagggggcagacattaacaagaactgtaagagggatgatgtactatcgaaaagctttggagcttcaggcttttcttgatatggcggaagatgatgatcttatggaaggttacagagcaacagaagtaatgcccgaggactcgcaattaatgactcaatgcaaggctatagctgacatgaagtttacatatgttgtctcatgccaacaatatggaattcagaagcgttctaatgagccttgcgcacatgatattttgagactaatgacggaatatccatcacttcgggtcgcctatattgatgaagttgaagcgcctagccaagatagaaacaagaagattgaaaaggtttactactcagtgttggtgaaggcttctgttacaaaacctgatgagcctggtcagagccttgatcaggtcatctacaagataaagctaccaggtaatgccattttaggtgaaggaaagccagaaaatcagaaccatgcaataatattcaccagaggcgaatgcctccaaactatagatatgaatcaggagcactatatggaggaggctttgaaaatgagaaatctgctgcaagagtttgagaagaaacatggagtgagatatccatcgatacttggagtcagagaacacatatttacgggcagtgtgtcatcccttgcatggttcatgtcaaatcaggaaactagtttcgtaacaattggacaacgagtgcttgccaatccgttgagggttcgttttcattatggtcatcctgatatcttcgatcgccttttccacattacgaggggtggtgtgagtaaagcatccaaaattatcaatctcagtgaggacatatttgcaggattcaattccacattgcgtgaaggcaatgttactcaccacgagtacatgcaagttggcaagggaagggatgtgggtctcaatcaaatatctctgtttgaggcaaagatagcaaatggcaatggcgaacagacgctgagccgtgacatctaccggctgggtcatcgctttgatttcttcagaatgctatcttgctactatacaacaattggtttctacttcagtacaatggtattttggtgacctgagtttttgaactgttcttgtccgttcattggttaacctttcttgcattttctgacttgttcgttgtttcaccttaacacctctgttatttctgcatgcacttagattacagtgtggactgtatatgttttcctctatgggcggttatatcttgtacttagtggacttgatgaagcgctggctactggaaggaggtttgtgcacaatgcacctctccaggttgcgcttgcatcggagtcttttgtgcagcttgggtttttgatggcgctacccatgatgatggaaatcggtttggagagaggattcagaacagcattgagtgacttcatactgatgcagcttcagttggcctcagttttcttcacgttctcattgggaacaaaaactcattactacggaaggacattactccatggaggagctgaatacagagccactggacgtgggtttgtggtgttccatgcgaaatttgctgacaactatcgactctattcccgtagccattttgtcaagggcattgagctgatgattctactagttgtgtatgaaatatttagccagccatatagaggggctgtaacttacatcttcatcaccgtgtccatgtggttcatggtgggcacttggctctttgcaccattcctgttcaatccttctggatttgagtggcagaagattgtggacgactggaccgattggcacaagtggatcagcaatcgtggaggtatcggtgtagcaccagagaaaagctgggagtcatggtgggaaaaggagcaagagccccttcgatactccgggaagcgcggtactgttgttgaaatactgcttgcgctgcgtttctttatctaccagtacggacttgtgtatcatctgaatataacgaagaagataactaaggacaaccagagtgtgctggtttattgcttctcatgggttgtaatttttgtgattttgctcgttatgaagaccgtatcagtgggcaggagaaggttcagtgcagagttccagctagtgttccggttgatcaagggtctgatatttataacatttacagccatcgtggtaatcctaatagcgatccctggcatgacggtgctggacatatttgtttgcatccttgctttcatgcccactggatggggtttgctgctgattgcccaagcgatccggcctgtgatccacaagactgggctctggggctcgatcaaggctcttgcccggggctacgagatcctgatgggacttctcctgttcacgcccatcgccttcctcgcctggttcccgttcgtgtcggaattccagaccaggatgctgttcaaccaggcgttcagcagaggtctgcagatctcccgtatcctgggaggacacaagaaagaccgagggacccggaacaaagaatagggctgggctgctgctgattcaaggtttgtgtgcgccactagtatttatgtgtgaatgggtgggtagcatatggctcgagagtatctcctgaatggagattgattgatcctgaagagtagaagagactcgagtgatgtaagatgctgcaggcttgttgctttgttacctaggcgttaggcagaacagatgttttcaggatctctggcctgttaaccacatcttcccctgttcagagtgaattaattcctaatggaaactgatttgtgaattacttcctaatagaggagtgcttccaaactgatttcatgtgtgtgctgtgatattgtttagcatatagtattttaaatgtagctttgaattttcattctttcgcaacaaaaaatgaataggacaagctggtcaaacttgaaaaaaaaa

SEQ ID NO: 134386 - DNA, 471 bp, Zea Mays
atgaagaacgtcgactattacagggagtcgcggacgagggatttccatgtccggcgccgggaacggcggcgcagaagaacagagacgcgggcgaccgacgagctgggatccgacgcgcgcaggagcagagtagtccgagctagaacgtggcacggtggaggagcagtgctttggacgcgccacgggagaggggaatccgagttagggctggacgccggcagagaggagagcagggacgcggcggccatggaagatggctgggcgagcagccatgggagcaggagaaaagcacagcggcgagctcgagggagagaagcagagagtgagcgccgcaaggaagaaagaagcaaggagggcgagcaggagggcgcgacgactggagttcaggccggcgcgcaggaaagctgggcgccgagcgccatcggcgagcagggcgcgggaggaacgccggcgaacctggccagggaatag

SEQ ID NO: 134387 - DNA, 687 bp, Zea Mays
atggaagatggctgggcgagcagccatgggagcaggagaaaagcatcgcggcaagctcgagggagagaagcagagagtgagcgccgcaaggaagaaagaagcaaggagggcgagcaggaaatagggagcaggagggcgcgacgactggagttcaggccggcgcgcaggaaagctgggcgccgagctccatcggcgagcagggcgcgggaggaacgccggcgaacctggccaaggaataggcgcgcgccatgggcgacagaggaggagcgcgcgatgttggactggaggccgagcgctgaagaggctgggcacggtccgcgcgaggcacatcggccatggcagggaattcgcgacgcgagcagggaggaccgcgcgcagagaaatcggctggggagtgggaggccgcggcagagggagctggaagggaccgcggcgctgggaagaaggctaagccagagctccgcagtgcgcagggagaacactgagctcgcacgcaggggaaagggccgagcaggtccgagcgccagccatggagggagccgtggcttgcgatggcgagcagagcagaggccaggagcgcgcggagggagagataaggagaaggaatcggctggaaaaatcagagctggggaagaagtagataagcaccgcgatgaagaaaaaatcctgggcgacggctggagatga

SEQ ID NO: 134388 - DNA, 1911 bp, Zea Mays
cgagcccagcctaccactaccactctcgattaccagccctctcgccttctccgctcctccgtcgtcgccgaaccccatggccccaaaaccctaaactgagcccgccgctgcttctccagtccgcacgaagcgccccacaaaatgccgcggctgacgccggcgcacgccaccctcatcctggaccacgtcctgggcgatccctcgatccccaccgcagtcaccatcgcgttaatcgctgggatcccctctccctccgatccgaccccgcgcctccgccgcggggtccttctccgccgcctcgccaccgaccccgtatccgaatcctctctcgaaaccctccacctcctggcctcgctcccggcctgcgcctcccccatcgcagccgcccacatcgccgtcgcggcattcctcgcggcctccgcgcccgacttcgacgccgtcgccagggctctcttcgcgcgccccgacggccgcgcgcgccaagcggtccacggcggaagttcccccgcgctcgcatccgacgatgccatcgccacagtagaccagttcgaggctgccgtcgggatgtcctcctctcagaccatcctcagggtcctgtggggcaaccgggccgccgtggaggagcgggtccaggagctcctcgctgctgaatgggccgcgattggcccgtcgcggctcgaggcgttggctatgcggatcgtcggggatggggccgtcgatacatggggtgccgcagatgaggccatgcgtgccaatttgcgcatcttggctggggaagcaaaaacgcgcgagattctcgacaaacttgaaaaaactacctgcaacacaaatccaatttcaacaccagctgttgagaaggtgatggatgcgctcaaagcaagctgtgctgacctccacagcattgtggaggatccccttccagctgcaaaggcagttgcagatgagttattgactgcgaggatggaaaaattagttagcctgaatgcccaagaagtaggagggcagccaacaacttgtggcgttgcaggaccgagtattcataatgacaaagacaatggtccaggtataggcaaacctcacagccttatggagcggaacgcaacagcacgaacctctcagtgggaggagtcacttggtcttgatggttcggaaccaccctcaccaccgagaccacacttgcctagcccaaggagactaccaccttctcctttgtcaccgcctgggaacaaaaacaataatcggagaaaggcaaggaggtggagcttgttcgaagaagaaaccttaagaaagggtgttgaagagtatggtgttggcaattggagggatattctagataacaatgctgaggcttttaccggcaggacaccggtggacttgaaggacaagtggaggaacatgcttttccgttgatgtaacggggaaacatgtagctggacatgctttactagggtaaagtacctagcaattagcatgtagtcctcgtacatcacagcagactcttggtcaagcttttctggcagctgcagctacatgattttgtgtctcggtgtagtagcagccgcagcttttctggcagctgcagctacatgattttgtctcggtgtagtagcagccgcagcccaaacggttggctttcctggcagctgcagctacagtattttgtgacggtatgcttaccgagtggctgattcgcgcactgacgtattatggactcgattttgtatttttattatgtacattgtcctgcatgcttgcattgtactagctttactcatatatttggatgaatagggatcggaaaggtgaccccttgtagcagagcaaatttaggtgtcgtttggttcacgaaatgtaatataaatagtaatggtaacgattcacacttgaataccagcactaacaaatttgaat

SEQ ID NO: 134389 - DNA, 942 bp, Zea Mays
agcctaccactaccactctcgattaccagccctctcgccttctccgctcctccgtcgtcgccgaaccccatggccccaaaaccctaaactgagcccgccgctgcttctccagtccgcacgaagcgccccacaaaatgccgcggctgacgccggcgcacgccaccctcatcctggaccacgtcctgggcgatccctcgatccccaccgcagtcaccatcgcgttaatcgctgggatcccctctccctccgatccgaccccgcgcctccgccgcggggtccttctccgccgcctcgccaccgaccccgtatccgaatcctctctcgaaaccctccacctcctggcctcgctcccggcctgcgcctcccccatcgcagccgcccacatcgccgtcgcggcattcctcgcggcctccgcgcccgacttcgacgccgtcgccagggctctcttcgcgcgccccgacggccgcgcgcgccaagcggtccacggcggaagttcccccgcgctcgcatccgacgatgccatcgccacagtagaccagttcgaggctgccgtcgggatgtcctcctctcagaccatcctcagggtcctgtggggcaaccgggccgccgtggaggagcgggtccaggagctcctcgctgctgaatgggccgcgattggcccgtcgcggctcgaggcgttggctatgcggatcgtcggggatggggccgtcgatacatggggtgccgcagatgaggccatgcgtgccaatttgcgcatcttgggtgaggacccattttttgggtggattttgcagcagcgttgtgatcaagaaactagtgtgtagtgggacttttctgtatttttgtgatatagtaaaaatgagaaggaatttagaggtcatattttatcttggctctatgaagcaaccatgggttgaagctatcccaaacagaccttatatt

SEQ ID NO: 134390 - DNA, 1993 bp, Zea Mays
accactaccactctcgattaccagccctctcgccttctccgctcctccgtcgtcgccgaaccccatggccccaaaaccctaaactgagcccgccgctgcttctccagtccgcacgaagcgccccacaaaatgccgcggctgacgccggcgcacgccaccctcatcctggaccacgtcctgggcgatccctcgatccccaccgcagtcaccatcgcgttaatcgctgggatcccctctccctccgatccgaccccgcgcctccgccgcggggtccttctccgccgcctcgccaccgaccccgtatccgaatcctctctcgaaaccctccacctcctggcctcgctcccggcctgcgcctcccccatcgcagccgcccacatcgccgtcgcggcattcctcgcggcctccgcgcccgacttcgacgccgtcgccagggctctcttcgcgcgccccgacggccgcgcgcgccaagcggtccacggcggaagttcccccgcgctcgcatccgacgatgccatcgccacagtagaccagttcgaggctgccgtcgggatgtcctcctctcagaccatcctcagggtcctgtggggcaaccgggccgccgtggaggagcgggtccaggagctcctcgctgctgaatgggccgcgattggcccgtcgcggctcgaggcgttggctatgcggatcgtcggggatggggccgtcgatacatggggtgccgcagatgaggccatgcgtgccaatttgcgcatcttggctggggaagcaaaaacgcgcgagattctcgacaaacttgaaaaaactacctgcaacacaaatccaatttcaacaccagctgttgagaaggtgatggatgcgctcaaagcaagctgtgctgacctccacagcattgtggaggatccccttccagctgcaaaggcagttgcagatgagttattgactgcgaggatggaaaaattagttagcctgaatgcccaagaagtaggagggcagccaacaacttgtggcgttgcaggaccgagtattcataatgacaaagacaatggtccaggtataggcaaacctcacagccttatggagcggaacgcaacagcacgaacctctcagtgggaggagtcacttggtcttgatggttcggaaccaccctcaccaccgagaccacacttgcctagcccaaggagactaccaccttctcctttgtcaccgcctgggaacaaaaacaataatcggagaaaggcaaggaggtggagcttgttcgaagaagaaaccttaagaaagggtgttgaagagtatgttaccttgtcttgatgttcagttgttatcgtttgacatgtcagttttttttattattattgctgttgctgtatgttcctcgttctgtttgtttcacgtgtaggtatggtgttggcaattggagggatattctagataacaatgctgaggcttttaccggcaggacaccggtggacttgaaggacaagtggaggaacatgcttttccgttgatgtaacggggaaacatgtagctggacatgctttactagggtaaagtacctagcaattagcatgtagtcctcgtacatcacagcagactcttggtcaagcttttctggcagctgcagctacatgattttgtgtctcggtgtagtagcagccgcagcttttctggcagctgcagctacatgattttgtctcggtgtagtagcagccgcagcccaaacggttggctttcctggcagctgcagctacagtattttgtgacggtatgcttaccgagtggctgattcgcgcactgacgtattatggactcgattttgtatttttattatgtacattgtcctgcatgcttgcattgtactagctttactcatatatttggatgaatagggatcggaaaggtgaccccttgtagcagagcaaatttaggtgtcgtttggttcacgaaatgtaatataaatagtaatggtaacgattcacacttgaataccagcact

SEQ ID NO: 134391 - DNA, 1995 bp, Zea Mays
caggcccgcgccgcttgcaaccctactctgccttgtcttctcccatcattcccaagcgtgagcaaaaccccaccaccgaagactgccccgccgccgacgcccgcctccatcctctcctccagttcctcctagcgccgccgcccgactccctcctccagcgccggcgcccaaatccctcctccagtgccgtcgccgactctccgcccgcgtccatcctccggttccagcttacattggtccatcctctcctctgccccctcctccatccttcatcagattcagacggtgaagcacccagtcccagttcaggttcaaacagacgctccgcacgagctggagatggaggtggaggtggccaaatattcacgggggcagggtgctgacctgaaggcgctgggggacaagaagttgaaagggcagctcagtgtaaaagagaagctatatggccaatctgcaaaagctgctgcaaatgccgaaaagtggcttatgcctaatgatggaggtattttagagcctggtcatttggagaaaacatatagattttcacaagaggatatattgacagaggtggatcttttgagttcaagaaaaccatttgatatgatcttacctgtactcggtccttataatataggatacacctcaaacggccgctacatgctagtaggcggacgaaaaggccaccttgcaatgatggatatgttgcatatggatcttatcaaggagtttgaggtgagggaaactgttcgtgacgtgacattcttacacaatgagcagttgtatgcggtcgctcaaaaaaagtatccctacatctataatcgacatggtacagaaatacactgtctgaaggaacatggaaaagcactgaagctccaatttctgtctaaacaattcctcttagcatcgataaacagcttcgggcagctccactaccaagatgtgagcactggcgaaatggttgcaaattataggacaggtctgggccgcaccgatgttatgcggggcaatccttacaatgctgtgattggccttgggcatgctggtggcaaagttaccatgtggaagccaaccagtgtgaaaccccttgttaccatgctgtgtcatcatggcccggtgactgctgttgcatttgacaggggtggcaatctcatggcaacagcaggtgttgacaggaagataaagatctgggacctgaggaagtatgaggttgtgcgttcttacccaatgcgcgctcagtctttggattttagccagaaggggctgttagcctgcagcaatggatctcaggtagagatatacagggatttcggtgggcatgactataggctttacatgaagcacaagatagtgaagggctatcaggtcgggaaggttgtgttccgcccctacgaagacattctggggatcgggcactcgatgggcttctcttccatccttgtcccaggatctggtgagccgaacttcgacacctttgttgacaacccgatggaaactaccaagcagaaacgtgagaaggaggtgcatgctctcctggataaactccctccggagaccattatgctgaacccgaacacgatagccactgtacgagctccgaagaagaaagagaagaagaccaaggaggagattgaggaagagatggcagatgccgtggaggcggccaagaacactgagcgcaagaagaagaccaagggcaggagcaaaccgagcaagcgagccaagaagaaagaggaagacgttttcaaggccaagaggcccttcctggagcaatctgataaggtggatgggcgacctgacaagaagcagcggataggtgaactcccaaaggccttgcagaggtttgccaagaaaccacaatcataatcgtcgtcgttaacacagggttgggatttcacattggtatttccaatatgtagaatttccgcgtgagcacagaagaatgtgccgaaattttgtgctgaactattttggtattccagcgagcatggccgtgtc

SEQ ID NO: 134392 - DNA, 2186 bp, Zea Mays
caggcccgcgccgcttgcaaccctactctgccttgtcttctcccatcattcccaagcgtgagcaaaaccccaccaccgaagactgccccgccgccgacgcccgcctccatcctctcctccagttcctcctagcgccgccgcccgactccctcctccagcgccggcgcccaaatccctcctccagtgccgtcgccgactctccgcccgcgtccatcctccggttccagcttacattggtccatcctctcctctgccccctcctccatccttcatcagattcagacggtgaagcacccagtcccagttcaggttcaaacagacgctccgcacgagctggagatggaggtggaggtggccaaatattcacgggggcagggtgctgacctgaaggcgctgggggacaagaagttgaaagggcagctcagtgtaaaagagaagctatatggccaatctgcaaaagctgctgcaaatgccgaaaagtggcttatgcctaatgatggaggtattttagagcctggtcatttggagaaaacatatagattttcacaagaggatatattgacagaggtggatcttttgagttcaagaaaaccatttgatatgatcttacctgtactcggtccttataatataggatacacctcaaacggccgctacatgctagtaggcggacgaaaaggccaccttgcaatgatggatatgttgcatatggatcttatcaaggagtttgaggtgagggaaactgttcgtgacgtgacattcttacacaatgagcagttgtatgcggtcgctcaaaaaaagtcataaaattatttccaaatggttgctgcatgttcctcgtagaaatatcctgaagacatattattttatgcaacattcatttttatgaacaatgaacctatttctggcagctcattgaacttcttgtacataatctgaatcttgatgatgtgaggtaggacttaggagcagctgagaattgccatttgaggtatccctacatctataatcgacatggtacagaaatacactgtctgaaggaacatggaaaagcactgaagctccaatttctgtctaaacaattcctcttagcatcgataaacagcttcgggcagctccactaccaagatgtgagcactggcgaaatggttgcaaattataggacaggtctgggccgcaccgatgttatgcggggcaatccttacaatgctgtgattggccttgggcatgctggtggcaaagttaccatgtggaagccaaccagtgtgaaaccccttgttaccatgctgtgtcatcatggcccggtgactgctgttgcatttgacaggggtggcaatctcatggcaacagcaggtgttgacaggaagataaagatctgggacctgaggaagtatgaggttgtgcgttcttacccaatgcgcgctcagtctttggattttagccagaaggggctgttagcctgcagcaatggatctcaggtagagatatacagggatttcggtgggcatgactataggctttacatgaagcacaagatagtgaagggctatcaggtcgggaaggttgtgttccgcccctacgaagacattctggggatcgggcactcgatgggcttctcttccatccttgtcccaggatctggtgagccgaacttcgacacctttgttgacaacccgatggaaactaccaagcagaaacgtgagaaggaggtgcatgctctcctggataaactccctccggagaccattatgctgaacccgaacacgatagccactgtacgagctccgaagaagaaagagaagaagaccaaggaggagattgaggaagagatggcagatgccgtggaggcggccaagaacactgagcgcaagaagaagaccaagggcaggagcaaaccgagcaagcgagccaagaagaaagaggaagacgttttcaaggccaagaggcccttcctggagcaatctgataaggtggatgggcgacctgacaagaagcagcggataggtgaactcccaaaggccttgcagaggtttgccaagaaaccacaatcataatcgtcgtcgttaacacagggttgggatttcacattggtatttccaatatgtagaatttccgcgtgagcacagaagaatgtgccgaaattttgtgctgaactattttggtattccagcgagcatggccgtgtc

SEQ ID NO: 134393 - DNA, 2614 bp, Zea Mays
caggcccgcgccgcttgcaaccctactctgccttgtcttctcccatcattcccaagcgtgagcaaaaccccaccaccgaagactgccccgccgccgacgcccgcctccatcctctcctccagttcctcctagcgccgccgcccgactccctcctccagcgccggcgcccaaatccctcctccagtgccgtcgccgactctccgcccgcgtccatcctccggttccagcttacattggtccatcctctcctctgccccctcctccatccttcatcagattcagacggtgaagcacccagtcccagttcaggttcaaacagacgctccgcacgagctggagatggaggtggaggtggccaaatattcacgggggcagggtgctgacctgaaggcgctgggggacaagaagttgaaagggcagctcagtgtaaaagagaagctatatggccaatctgcaaaagctgctgcaaatgccgaaaagtggcttatgcctaatgatggaggtattttagagcctggtcatttggagaaaacatatagattttcacaagaggatatattgacagaggtggatcttttgagttcaagaaaaccatttgatatgatcttacctgtactcggtccttataatataggatacacctcaaacggccgctacatgctagtaggcggacgaaaaggccaccttgcaatgatggatatgttgcatatggatcttatcaaggagtttgaggtgagggaaactgttcgtgacgtgacattcttacacaatgagcagttgtatgcggtcgctcaaaaaaagtaatttttttactttgctggtactctaccatgtcatcatcgctcatgaaatatttaacatgtgttaactgttggcctgaaaactatgaaataaagggatattaaagttatctctgatcatggtctcaaatgagaacatatactaaattgttgtgaaatctgttgatcaaccaggtcataaaattatttccaaatggttgctgcatgttcctcgtagaaatatcctgaagacatattattttatgcaacattcatttttatgaacaatgaacctatttctggcagctcattgaacttcttgtacataatctgaatcttgatgatgtgaggtaggacttaggagcagctgagaattgccatttgaggtctgagctctgactgatctggattgcttatctgacctgttcaccattgctttactgaaccattaaattattctacaatttgaaatgtttgtactaggctagatcaagcaaaattgtatatgcttgactgcttgtacttgatgctttattgttctgggcagttcattatcgcttttggtctctgtttcctgtctactattaacatttcgtacttactcatgaaacatttttcaaacaggtatccctacatctataatcgacatggtacagaaatacactgtctgaaggaacatggaaaagcactgaagctccaatttctgtctaaacaattcctcttagcatcgataaacagcttcgggcagctccactaccaagatgtgagcactggcgaaatggttgcaaattataggacaggtctgggccgcaccgatgttatgcggggcaatccttacaatgctgtgattggccttgggcatgctggtggcaaagttaccatgtggaagccaaccagtgtgaaaccccttgttaccatgctgtgtcatcatggcccggtgactgctgttgcatttgacaggggtggcaatctcatggcaacagcaggtgttgacaggaagataaagatctgggacctgaggaagtatgaggttgtgcgttcttacccaatgcgcgctcagtctttggattttagccagaaggggctgttagcctgcagcaatggatctcaggtagagatatacagggatttcggtgggcatgactataggctttacatgaagcacaagatagtgaagggctatcaggtcgggaaggttgtgttccgcccctacgaagacattctggggatcgggcactcgatgggcttctcttccatccttgtcccaggatctggtgagccgaacttcgacacctttgttgacaacccgatggaaactaccaagcagaaacgtgagaaggaggtgcatgctctcctggataaactccctccggagaccattatgctgaacccgaacacgatagccactgtacgagctccgaagaagaaagagaagaagaccaaggaggagattgaggaagagatggcagatgccgtggaggcggccaagaacactgagcgcaagaagaagaccaagggcaggagcaaaccgagcaagcgagccaagaagaaagaggaagacgttttcaaggccaagaggcccttcctggagcaatctgataaggtggatgggcgacctgacaagaagcagcggataggtgaactcccaaaggccttgcagaggtttgccaagaaaccacaatcataatcgtcgtcgttaacacagggttgggatttcacattggtatttccaatatgtagaatttccgcgtgagcacagaagaatgtgccgaaattttgtgctgaactattttggtattccagcgagcatggccgtgtcagctgatttttttttt

SEQ ID NO: 134394 - DNA, 2054 bp, Zea Mays
caggcccgcgccgcttgcaaccctactctgccttgtcttctcccatcattcccaagcgtgagcaaaaccccaccaccgaagactgccccgccgccgacgcccgcctccatcctctcctccagttcctcctagcgccgccgcccgactccctcctccagcgccggcgcccaaatccctcctccagtgccgtcgccgactctccgcccgcgtccatcctccggttccagcttacattggtccatcctctcctctgccccctcctccatccttcatcagattcagacggtgaagcacccagtcccagttcaggttcaaacacaggacgctccgcacgagctggagatggaggtggaggtggccaaatattcacgggggcagggtgctgacctgaaggcgctgggggacaagaagttgaaagggcagctcagtgtaaaagagaagctatatggccaatctgcaaaagctgctgcaaatgccgaaaagtggcttatgcctaatgatggaggtattttagagcctggtcatttggagaaaacatatagattttcacaagaggatatattgacagaggtggatcttttgagttcaagaaaaccatttgatatgatcttacctgtactcggtccttataatataggatacacctcaaacggccgctacatgctagtaggcggacgaaaaggccaccttgcaatgatggatatgttgcatatggatcttatcaaggagtttgaggtgagggaaactgttcgtgacgtgacattcttacacaatgagcagttgtatgcggtcgctcaaaaaaagtatccctacatctataatcgacatggtacagaaatacactgtctgaaggaacatggaaaagcactgaagctccaatttctgtctaaacaattcctcttagcatcgataaacagcttcgggcagctccactaccaagatgtgagcactggcgaaatggttgcaaattataggacaggtctgggccgcaccgatgttatgcggggcaatccttacaatgctgtgattggccttgggcatgctggtggcaaagttaccatgtggaagccaaccagtgtgaaaccccttgttaccatgctgtgtcatcatggcccggtgactgctgttgcatttgacaggggtggcaatctcatggcaacagcaggtgttgacaggaagataaagatctgggacctgaggaagtatgaggttgtgcgttcttacccaatgcgcgctcagtctttggattttagccagaaggggctgttagcctgcagcaatggatctcaggtagagatatacagggatttcggtgggcatgactataggctttacatgaagcacaagatagtgaagggctatcaggtcgggaaggttgtgttccgcccctacgaagacattctggggatcgggcactcgatgggcttctcttccatccttgtcccaggatctggtgagccgaacttcgacacctttgttgacaacccgatggaaactaccaagcagaaacgtgagaaggaggtgcatgctctcctggataaactccctccggagaccattatgctgaacccgaacacgatagccactgtacgagctccgaagaagaaagagaagaagaccaaggaggagattgaggaagagatggcagatgccgtggaggcggccaagaacactgagcgcaagaagaagaccaagggcaggagcaaaccgagcaagcgagccaagaagaaagaggaagacgttttcaaggccaagaggcccttcctggagcaatctgataaggtggatgggcgacctgacaagaagcagcggataggtgaactcccaaaggccttgcagaggtttgccaagaaaccacaatcataatcgtcgtcgttaacacagggttgggatttcacattggtatttccaatatgtagaatttccgcgtgagcacagaagaatgtgccgaaattttgtgctgaactattttggtattccagcgagcatggccgtgtcagctgattttttttttggtgttgttttggttctcatagagtttgttgcattttttc

SEQ ID NO: 134395 - DNA, 171 bp, Zea Mays
atggcgacgtcggacgtcgcactaatggatgaccccacggcggtgggcggccgtgtcttcgtcaaattgccaacccacttctccctcaccgtcaccgccggaaaacttgacgaagggaggatccaaaacagaactaaaggaaaggatacaaacctagagaatcggatctga

SEQ ID NO: 134396 - DNA, 345 bp, Zea Mays
atggcgactgtggagcagaagggagaagataagtgggaacagatgatgaagatgatggatcgagtggtgaagaagttggatacggtggaagctggacaacatcggctggaaggacaagccgagctctcagctacgatggcaaggaaggcagaagaagagtgtactatattggcaaggcagatggaggagacgggcaaggtggtggcgcagttgtgtttggagatgatggcaaaggacttggagggcgatggtgctggatcatcaagggagggtgctgatcaaggtgatccaaatcgaagaagtagagaaccacaacaggagagagtaagagatgaagaagatcag

SEQ ID NO: 134397 - DNA, 1346 bp, Zea Mays
ccccgccctatatatgccgagggaacccggcctgctctttcctctcatctctatcagctcatctccaccggccgccctccatctatcgtcgtcgtcgtcgtcgtcgtcgatccatccatggcggagcagctggacctgccagggttccggttccaccccaccgaggaggagctgctggagttctacctgaagcaggtggcgcacgggcggaagctcaagttcgacatcatccccacggtgcacctgtaccgccacgacccctgggagctcccgggcctggcgcgcatcggcgagcgcgagtggtacttcttcgtgccccgcgacggcggccggcctgccaagcagcaccaccaccagtcgtccggcgcccgccccagccgcaccacggagcgcggcttctggaaggctacgggctccgaccgcgccgtgcgctgcgcccacgaccccaagcgcctcatcggcctcaagaagacgctcgtctactacgagggccgcgcgcctcgtggcaccaagaccgactgggtcatgaacgagtaccgcctccccgacgcctgcaataacaacaacaacaacaataataccgtcgccggcgactcatcggcggcggcggcggcatcctccaccaccaccaacaactcgcccaaggaggacatcgtgctgtgcaaggtctaccggaaggccgtgtcgctcaaggagctggagcagcgagtggccatggaggagctggcgcgcgccacgccgtccgcgtcccacaacgccggatcgcccgccgactccatgtcgtcgtccgaccaggaccaacaaacccagcttgggcagggaggagtggagatcatgataacgatgcccgtcggcggcatctcaccaccaccaccactaccaccgcctgtgatgatgagcatgaagcaagaggaggaggtggccgagcccgaggcgccgctgccggcggtgctgatgaggccgtcgacgctgagcctgccgcagctggaggtggcgaagcagcagcaggagtggatgcaggaccccttcttgacgcagctgcggagcccatggatggagagctggtctccctactaccccagcgtcctcaacttttaaccaatgcaatctcagaatctcagatcgaccgtcgtcctcgatgaagtagctatatatatatggtcattgttccacagacctatactaatagctagcatgcatactgctgctaggtatcttttggtttggcattatcatatatacatactgatgacgagctagtaccgtacccatacatgagtatcttggttgctgctagctcctccaagttggagaccgtatatatatagttcgtgtggatttccttt

SEQ ID NO: 134398 - DNA, 1779 bp, Zea Mays
ctcattgcctactgtttgctcagtactcctatactagccgacgactatcgacagggccatatggatctgctcaatccagtacagtgatcatatgaacaagaaacaaccacgtcatccatgaatgcattatattgcatcgcattgttagctcaaaacatagatgcatgcatgtaatcgatctgtcgatccatgcatcgatcgagatgtatatatatcctggttctagatcccatagagatcatagaactagagccagctccttgttgcccatggccatgacgagagcactggccatggtggccatgttagccactgctgccttgttcttcatgtccgctcgcgcacagcagtgcggtacgcaggccggcggcgcgctctgccccgactgcctctgctgcagccagtggggctattgcggctccactcccgactactgtaccgacggctgccagagccagtgcttcggcagcggctgcggcggcggcggcggtacccctgctactcccccgagcgggccggtgtcagaaatcatctccgaatccctgttcaacgagatgctgctgcaccgcaacgacgtggcgtgcccggccatcggcttctacacctacgacgcgttcatcgcggccgcgaacgcgttcccgggcttcggcaccacgggcggcgccgacacgcagaagcgcgagctggcggcgttcctggcgcagacgtcgcacgagaccacgggcgggtgggacacggcgcccgacgggccctacacctggggctactgcttcaaggaggaggtcggcggcgtgtgggggccggactactgccagcccagcccccagtggccgtgcgccgacggccagaagtactacggccgcgggcccatccagctctcctggaactacaactacgggcccgccggggaggccatcggccaggaccttctgggcaacccaggtctggttgccgccgacgccactgtctccttcgagacggcgctctggtactggatgacgccgcagccgcccaagccgtcctgccacgacgtcatcacgggccagtgggcgccctcgcccgccgacgtggccgcagggaggctgccggggtatggcgtcctcaccaacatcatcaacggcggcctcgagtgcggccatggcgccgacgctcgtgttgccagccggatcggcttctacaaacgctactgcgacatgtttggtctcagctacggcgacaacttggactgctacgaccagagccccttcggaaacacaatcttaagcaccaccaataataccacctcatatcacgttgacgcctaagggcatgtacagtggagagacaccaaaacggttctccaagcacaggagacaactaagagactctattgtacaatggagtgtctataaacgtagtctattaataaatacagaattaaatgtatttgtatagcatcagatcgatagaacagacgacaaattcgtacagtgggaagtgaggcgtctgttgctacttggtttacgagccagagacgtctcttcacggagagacggctctaagatttttttgcaaataacccccttaaacagcttaagagactccacattaaacaccactgtacatgccctaataagtaacaagagctacctgttactacaactgcaagacacagacctcgtgtagtgcacatgtgcgtcaaatctctaaactttgtacgcccagctgaataaaactctgtaatctgaaacttcgcacactacccagaataaaagttttcgatttcaaactctatatata

SEQ ID NO: 134399 - DNA, 444 bp, Zea Mays
atggcgcggcttataagcgtgggcgcggacttgatagtaagaattctgttggtggctgaattggttaagttcagctcttgcgcagcccaacaactggaggcagcgctccgcctgcatcaagggatgtgggctctaggatctaaccgacaacaagggcaagcagatctcacagttcttggatctcgggagagtcgcgcgcgactacgaaggagagcacgaagttctggattagaggcaatctgggagggggaagggagggcggggaggggcgcagatgtgggggaggtggtggacagtggggatgtcgctgtcgagggtctgagattgtttgagagcggcgacaagcgcgcccttgagggccagttgcggcggcacagccaaggagaagcaacatggagcccgcgtacttgcagagctctgcatcggaggattgggcacaaatag

SEQ ID NO: 134400 - DNA, 2433 bp, Zea Mays
ggttcttgggagtgcaaactgaacaggtgactgtacaagtcgcgctttccctgcctcaagataggagatagcagaacgccatctatggccatcatcgtctccacgtcaagcggcaaaccatcgctcccttcccttcccctatggccctatatctcatctccccaagttctcccctttctccaggtcccgcctcacaccacctcacctcatcactacctcacccacccagccccccaagaactacccatcaaccatggcgccgccgtcggtgtccgcctcccacctcctaatcaccgcctcgctcccaaagcccaagccttcctccctccgcccgccgcggctccctctcgccaagccccttcccgcatcggcggcgctcctggcgctcgcggcctcgcccgcgctcgccgccgacgcgccggcgcctgcccccgccccaacccccgcgccggcgccggagctccaggccgaggcgcccaccccgacagtcaaccccttctccagctccctcctcacggcccccaagccctccgccgcggcctccgacctccccgagggcgctcagtggcgctacagcgagttcctctccgccgtcaagcgcggcaaggtcgagcgcgtgcgcttttccaaggacggcggtctgctccagctcaccgccgtcgacggccgccgcgccaccgtcgtcgtccccaacgaccccgacctcatagacatcctcgccaccaacggcgtcgacatctccgtctccgagggcgagtcggcgggcccgggcggcttcgtcgccttcgtcggcaacctcctcttcccttttatcgcgttcgctggcctcttcttcctcttccgccgcgcgcagggcgggcccggcgccgggcctggtggcctcggcgggcccatggacttcggccgctccaagagcaagttccaggaggtgcctgagacgggtgtcaccttcctcgacgttgccggcgcggaccaggccaagctcgagctgcaggaggtcgtggatttcctcaagaaccccgacaagtacaccgcgctcggagccaagatccccaagggttgtctcctcgtcggcccgcctgggaccgggaagaccctccttgcgcgtgccgtcgctggggaggccggggtgcccttcttctcctgcgctgcctctgagttcgtcgagctcttcgtcggtgtcggtgcctccagggtgcgcgacctcttcgagaaggccaaggccaaggcgccctgcattgtcttcattgatgagattgatgccgttggaaggcagcgcggtgccggacttggtgggggtaatgacgagagagagcagaccattaaccagctcttgacggagatggatggcttcgctggcaacagcggtgtcattgtgcttgccgccaccaacaggcccgatgtgctggactccgcgctcctacgaccagggagatttgataggcaggtcaccgttgacaggccagatgttgccggacgcgtcaagattcttgaggtccactcccgaggaaaggctttggcgaaagatgttgattttgataaaattgctagaaggacccctggtttcactggtgctgacctccaaaacctcatgaatgaggctgccatccttgctgctcgccgtgatcttaaggaaattagcaaggatgagatctctgatgctcttgagagaatcattgctggccctgagaagaaaaatgctgttgtttccgaggagaagaagaggctcgtcgcttaccatgaggctggccatgcccttgtcggcgccctcatgccagagtatgatccagtagccaagatttccatcatccctcgtggccaggctggtggactcacattctttgctccaagcgaagaaaggctagaatctggattgtacagcaggagctatcttgagaaccaaatggctgtagcccttggtggcagggttgctgaggaggtgatctttggccaagacaacgtgacaacaggagcttccaacgacttcatgcaagtgtcacgtgtcgcaaggcagatggtcgaaagatttggattcagtaagaagatcggccaagttgcgatcgggggaccgggtggaaaccctttcttggggcaacagatgtcaagccagaaggactactctatggcaacagcggatgttgtggacgccgaggtgagggaactcgtggagaaggcctactctagagcaaggcagataatcaccacgcacatcgacatcctccacaagctcgcccagctcctgatcgagaaggagaccgtggacggggaggagttcatgagcttgttcattgacggccaggccgagctgtttgtcgcttgagatgtcacaaggcttgcggtgcgtatgcttttcggtgttttcttgtaggaaccacatcgatgtatagtagttgatacgcatgtactgactaatttgagcaagtaaaatgttac

SEQ ID NO: 134401 - DNA, 2674 bp, Zea Mays
ggttcttgggagtgcaaactgaacaggtgactgtacaagtcgcgctttccctgcctcaagataggagatagcagaacgccatctatggccatcatcgtctccacgtcaagcggcaaaccatcgctcccttcccttcccctatggccctatatctcatctccccaagttctcccctttctccaggtcccgcctcacaccacctcacctcatcactacctcacccacccagccccccaagaactacccatcaaccatggcgccgccgtcggtgtccgcctcccacctcctaatcaccgcctcgctcccaaagcccaagccttcctccctccgcccgccgcggctccctctcgccaagccccttcccgcatcggcggcgctcctggcgctcgcggcctcgcccgcgctcgccgccgacgcgccggcgcctgcccccgccccaacccccgcgccggcgccggagctccaggccgaggcgcccaccccgacagtcaaccccttctccagctccctcctcacggcccccaagccctccgccgcggcctccgacctccccgagggcgctcagtggcgctacagcgagttcctctccgccgtcaagcgcggcaaggtcgagcgcgtgcgcttttccaaggacggcggtctgctccagctcaccgccgtcgacggccgccgcgccaccgtcgtcgtccccaacgaccccgacctcatagacatcctcgccaccaacggcgtcgacatctccgtctccgagggcgagtcggcgggcccgggcggcttcgtcgccttcgtcggcaacctcctcttcccttttatcgcgttcgctggcctcttcttcctcttccgccgcgcgcagggcgggcccggcgccgggcctggtggcctcggcgggcccatggacttcggccgctccaagagcaagttccaggaggtgcctgagacgggtgtcaccttcctcgacgttgccggcgcggaccaggccaagctcgagctgcaggaggtcgtggatttcctcaagaaccccgacaagtacaccgcgctcggagccaagatccccaagggttgtctcctcgtcggcccgcctgggaccgggaagaccctccttgcgcgtgccgtcgctggggaggccggggtgcccttcttctcctgcgctgcctctgagttcgtcgagctcttcgtcggtgtcggtgcctccagggtgcgcgacctcttcgagaaggccaaggccaaggcgccctgcattgtcttcattgatgagattgatgccgttggaaggcagcgcggtgccggacttggtgggggtaatgacgagagagagcagaccattaaccagctcttgacggagatggatggcttcgctggcaacagcggtgtcattgtgcttgccgccaccaacaggcccgatgtgctggactccgcgctcctacgaccagggagatttgataggcaggtcaccgttgacaggccagatgttgccggacgcgtcaagattcttgaggtccactcccgaggaaaggctttggcgaaagatgttgattttgataaaattgctagaaggacccctggtttcactggtgctgacctccaaaacctcatgaatgaggctgccatccttgctgctcgccgtgatcttaaggaaattagcaaggatgagatctctgatgctcttgagagaatcattgctggccctgagaagaaaaatgctgttgtttccgaggagaagaagaggctcgtcgcttaccatgaggctggccatgcccttgtcggcgccctcatgccagagtatgatccagtagccaagatttccatcatccctcgtggccaggctggtggactcacattctttgctccaagcgaagaaaggctagaatctggattgtacagcaggagctatcttgagaaccaaatggctgtagcccttggtggcagggttgctgaggaggtgatctttggccaagacaacgtgacaacaggagcttccaacgacttcatgcaagtgtcacgtgtcgcaaggcagatggtcgaaagatttggattcagtaagaagatcggccaagttgcgatcgggggaccgggtggaaaccctttcttggggcaacagatgtcaagccagaaggactactctatggcaacagcggatgttgtggacgccgaggtgagggaactcgtggagaaggcctactctagagcaaggcagataatcaccacgcacatcgacatcctccacaagctcgcccagctcctgatcgagaaggagaccgtggacggggaggagttcatgagcttgttcattgacggccaggccgagctgtttgtcgcttgagatgtcacaaggcttgcggtgcgtatgcttttcggtgttttgtgtcagagcgagcaatcacaaagcaatggagagcccagcttgtaggaaccacatcgatgtatagtagttgatacgcatgtactgactaatttgagcaagtaaaatgttactgctcacaattatagcacacggttcatctgtgaaaacaaatatgctcatctcgtgctaatgggctttattaggctatctccaatagatctactatgccttccgataaattaatcttagacaatattaggagtaacaagagaaatttcagtacattgaatcacttcttgaattcctccttggccaaagtcaaggttggacaaa

SEQ ID NO: 134402 - DNA, 2391 bp, Zea Mays
aggtcccgcctcacaccacctcacctcatcactacctcacccacccagccccccaagaactacccatcaaccatggcgccgccgtcggtgtccgcctcccacctcctaatcaccgcctcgctcccaaagcccaagccttcctccctccgcccgccgcggctccctctcgccaagccccttcccgcatcggcggcgctcctggcgctcgcggcctcgcccgcgctcgccgccgacgcgccggcgcctgcccccgccccaacccccgcgccggcgccggagctccaggccgaggcgcccaccccgacagtcaaccccttctccagctccctcctcacggcccccaagccctccgccgcggcctccgacctccccgagggcgctcagtggcgctacagcgagttcctctccgccgtcaagcgcggcaaggtcgagcgcgtgcgcttttccaaggacggcggtctgctccagctcaccgccgtcgacggccgccgcgccaccgtcgtcgtccccaacgaccccgacctcatagacatcctcgccaccaacggcgtcgacatctccgtctccgagggcgagtcggcgggcccgggcggcttcgtcgccttcgtcggcaacctcctcttcccttttatcgcgttcgctggcctcttcttcctcttccgccgcgcgcagggcgggcccggcgccgggcctggtggcctcggcgggcccatggacttcggccgctccaagagcaagttccaggaggtgcctgagacgggtgtcaccttcctcgacgttgccggcgcggaccaggccaagctcgagctgcaggaggtcgtggatttcctcaagaaccccgacaagtacaccgcgctcggagccaagatccccaagggttgtctcctcgtcggcccgcctgggaccgggaagaccctccttgcgcgtgccgtcgctggggaggccggggtgcccttcttctcctgcgctgcctctgagttcgtcgagctcttcgtcggtgtcggtgcctccagggtgcgcgacctcttcgagaaggccaaggccaaggcgccctgcattgtcttcattgatgagattgatgccgttggaaggcagcgcggtgccggacttgatggatggcttcgctggcaacagcggtgtcattgtgcttgccgccaccaacaggcccgatgtgctggactccgcgctcctacgaccagggagatttgataggcaggtcaccgttgacaggccagatgttgccggacgcgtcaagattcttgaggtccactcccgaggaaaggctttggcgaaagatgttgattttgataaaattgctagaaggacccctggtttcactggtgctgacctccaaaacctcatgaatgaggctgccatccttgctgctcgccgtgatcttaaggaaattagcaaggatgagatctctgatgctcttgagagaatcattgctggccctgagaagaaaaatgctgttgtttccgaggagaagaagaggctcgtcgcttaccatgaggctggccatgcccttgtcggcgccctcatgccagagtatgatccagtagccaagatttccatcatccctcgtggccaggctggtggactcacattctttgctccaagcgaagaaaggctagaatctggattgtacagcaggagctatcttgagaaccaaatggctgtagcccttggtggcagggttgctgaggaggtgatctttggccaagacaacgtgacaacaggagcttccaacgacttcatgcaagtgtcacgtgtcgcaaggcagatggtcgaaagatttggattcagtaagaagatcggccaagttgcgatcgggggaccgggtggaaaccctttcttggggcaacagatgtcaagccagaaggactactctatggcaacagcggatgttgtggacgccgaggtgagggaactcgtggagaaggcctactctagagcaaggcagataatcaccacgcacatcgacatcctccacaagctcgcccagctcctgatcgagaaggagaccgtggacggggaggagttcatgagcttgttcattgacggccaggccgagctgtttgtcgcttgagatgtcacaaggcttgcggtgcgtatgcttttcggtgttttgtgtcagagcgagcaatcacaaagcaatggagagcccagcttgtaggaaccacatcgatgtatagtagttgatacgcatgtactgactaatttgagcaagtaaaatgttactgctcacaattatagcacacggttcatctgtgaaaacaaatatgctcatctcgtgctaatgggctttattaggctatctccaatagatctactatgccttccgataaattaatcttagacaatattaggagtaacaagagaaatttcagt

SEQ ID NO: 134403 - DNA, 124 bp, Zea Mays
gcaaaactagttagtccaattatttgtgttgggcaattcaaccaccaaaatcaattaggaaaaggtgtaagcctattttcctttcaggtaggcctgggccgtgaaggacttcgccgagaaagtc

SEQ ID NO: 134404 - DNA, 216 bp, Zea Mays
atggcgcagcgtctctgccctggcgtgctcccgtgccggtgcagccagcggccccgccgggtgcgcgtgtgcgcactccccaacgtgctgtgcgtaggtgcccgccccgccgcgcagttccctcggccccgagcgcaggcgcgctgcatacgtgtggaggagtctcccgcgcgcacgccgtcgaacacctacacccgcgcaccgaagctccgttga

SEQ ID NO: 134405 - DNA, 1898 bp, Zea Mays
aataccaagtgtggagagtagggtgctgtggacgaggcgagctgaggaagggaagggaaccctcttgaccgccggcggcgaggggagatgccgccggagaggacgaggaagtcgaggacggaggagctgtgggagcgcgaggtcggcggtctcccacccaagcgcttcgccaactccgtcatggcctccaaggagtttgtgcagtctctcaacatccaaaagcggctacggaagcacaggagctgcgtcaacacgataagcttcagcgcggacgggaggctgctcctctccgggtccgacgaccggaccctcgtgctgtgggactgggaggaggcggcgccggccttgtcgctccacactgggttcagcagcaacgtgtaccacgcgctgttcatgcctgtctccggtgacaggagcatcgtctcgtgcgctgctgaaggggatgtgatccattcacagatacaggaaggggggcgtgtggttacacacacacacaaacttgttgagttgggctttgcagtacacaggttggctgttgagccagcaagtcctcacacgttctactgctgctgtcaagatagctccgtgtggctttttgatctcagggcgcgaaatgccatggaattgtttaaatgtagggctgcgaactatcacactgctgaaaatatcgcactctatgctatttccttagacccaaggaagccctgttgttttgcagttgctggatcagatcagtatgtaaggatatatgatacccgtaagatttttgtggatgggaattctagtttcagtcgcccaactgagcacttctgccctccgcatttgattggtcgagtggaagaagaaataactggtttggcctactcacagaccagcgagctattagcgtcctatggtcaagaagatatctaccttttctcaagagagcatggtttacacttcaacaatgttgaggtcaataaacgactcctggaggatatgattgagccttcatttagtgataagttgcctgtacctaagaaattcaagggacaccggaatgaggaaaccgtgaagggggttgacttccttggccccaactgtgattttgttacctctgggtcagactgtggcagcatatttatttggagaaagaaggatgcagaactgatcagagcgatgcgtggagataagcgggttgtaaactgtgtcgaacagcacccttctgggattgttctagcaagtagtggcattgagaatgatatcaagatttgggaacctggtgaaggtgaaaaccgctccatcgttcaagctgacgaggacgatgacaatactgtttggatccacggcagcagtgattctgatgacttctttgacgacaatggtttcggtttgatggtcatggaaccgatccatttatatgaaaacagcgataatgattcatatgaggaggatacatcgtcagaggaacatgacagtgatggtgacagcagtgccggagatgaagattccgatgggggaaacagtgcaggagatgagggcgacgattgatgatcaaggacacggatccatgcctattcccagggagcaaatcttcatccgagaacagctgattcttttgtggttgtggttgtggttgtagccttgtaggttattttgggaggagcaaggcttacccaaaaaaacaaaaaaaaaaacgtttttagttaggattatcatgggttactgtttggtgttcctctgtgtatatatttttcgtcggaattggggtagtctaccgtaccgatgcaaacgtactgtggaagctaatgttcgaacgggagactgaaatggtcatgatgttgaatggcatcaagtattcaaccatttcatacaatagtttggtggaaagtttataaaaaattgtctcctcttcgtgg

SEQ ID NO: 134406 - DNA, 167 bp, Zea Mays
atctcacgccacgcctgctccagcacctcgctctccgctccgttggccccatggagtccgtcgcgtccgccgcgatcgccaccacctcccgctctctcccgctccccttctcttctgccccggtccaccgccggcgccgtgccgccttcctccccgttgccgcctcc

SEQ ID NO: 134407 - DNA, 2535 bp, Zea Mays
gtttgttttgggctctcacactgtcacagtggcctccccccaacaggccccaaagccgtaggcctgacacgggagcacggcggcggcggcggcggcggaggaggaggaggaatggcgagacgaagcagaggcggcggcatcgtcacggaagcggcgttgaaggcgcacgcggcggcggtgcgggtggtgtcccgcaggggcgccgtgcggctggtgctcgtgtcggccatcgcctgggccatgctcgggctcgtcgcactcgccttccacctccggccctgcagctcccccgtcgcgttcctctcagccctttgtgaaaaggacagtaaagttttctcggtgttggactcgatggggctctcatcgaaaccactccaccgctgcccgatacctgttgcgaatgatccaaatgctattgccatcccaaagaggactcccaacacaatcgtgaagaagttgtcatatataacggttgacaagcaggacaaagatccttcaccgctgtttggagggcaccaaaactggaaacagagggaggagagctttaaactgaactctaccatgaagatatggataccattgatctcaagtacatacagaaatgcagatttgtggttgcctctggtatttttgatggctacgacattccccatcagccatccaatattagtcatcggtctcagaagttgttctgcttcctgatggtggtagatgaagtatctcttgattttgttcaaaagaacgcaagtgtcaagattgacagtgctggggggaaatgggttggtatatggcgacttataagggtacatcgcctcccatttgacgaacctagaaggaatggaaagataccaaagattttaacacataggctgtttcctgaagcttggtatagcatttggattgatgggaaaatggagctcatagttgacccacttcttattctcgagagatatctctggcgtggaaaaaacacatttgcagtagctgcccataagcatcataggagcatctatgaagagggtgatgcaatcaaacggcggaagcgatatgctcgtcctttggttgatcttcagatgaaattatactattatgaggggatggagccttggagcccaaagaaaaagatgcctagtgatgtgccggagggagcagtgctgatccgggaacatacgacgatgaccgatctcttcagctgcctctggttcaacgaggtcaatcttttcacgccgcgtgatcagatcagctttggctacgtggtgcataggctcggaggcgctctcaagttcttcatgttccccaactgcgaatacaattcgctgttcatcctgcacggacacacgagagaacactcctctaaagtcgagtgggccaaaacaaccgatgagattgtgaagaagggactgaaggagagtagaggaggattagggctatggactccgtatcctgcagatctcagctccgtggaagtccctgctgtaaaaaggacttcaccggcaggctaggctgggattttttggtcttctattcgttcatggttgtaaaaagtagaacactactgatttcccccccttttcttttctcgcttaatcagacgagatcatgtaattcctgtagattctgtggtaactgaaccccgggggtaccgtaggctaatgcttggagcttgttgcttccagccggttctgtgcaatttaacactcatttacatatgtgccataaaaataaaaatagaagattcatggttcatcacatctgctatagggatatcaaatcaacattataagtcaacgcctgaaaaataattataacaactggaaataatcagcaccaaagcatcatgcactttcaaatgaatcatttgcctctttcagctgatacaatctcatcagcattctgtgatctaccaaaagttcctacaccagaatcacaaggaccaactcgagtggaatacgagaccaggtctgcacctccggccatccacgttgaacacgatgccaggctgcacggcagcagccttccccagatgcaagttcagaaatccctccacctgaaacagttgcggtttttcctcagtgcctctacgcaagctcacgccccatccaaggtcaccttccggcgtatctgacagtgtgagggcccatctcagcaaacgtgagcttgacttcttgttcaactcgatccaggccccgattctggagtcctcatcaatttccagctcaagaccaacgcaacctccagcagttggtttcctcttccgaggaactacactgggtccatgcaaagcagcagacagggtcaactttatgtcatcagggaactggtacgagatttgcccaaactctgtacagactctgctggcttcaccgccgtttactggcctcgcggcaactgagatcagctgcgctatagaaacagcgaagttcttcgatctcagtattaggccgccagcatatctgtggcttttactcagcaaaggtggcctcagcgaagatcgcaaactggccagccaatgttcctgttaagcaaactgttacc

SEQ ID NO: 134408 - DNA, 2569 bp, Zea Mays
gtttgttttgggctctcacactgtcacagtggcctccccccaacaggccccaaagccgtaggcctgacacgggagcacggcggcggcggcggcggcggaggaggaggaggaatggcgagacgaagcagaggcggcggcatcgtcacggaagcggcgttgaaggcgcacgcggcggcggtgcgggtggtgtcccgcaggggcgccgtgcggctggtgctcgtgtcggccatcgcctgggccatgctcgggctcgtcgcactcgccttccacctccggccctgcagctcccccgtcgcgttcctctcagccctttgtgaaaaggacagtaaagttttctcggtgttggactcgatggggctctcatcgaaaccactccaccgctgcccgatacctgttgcgaatgatccaaatgctattgccatcccaaagaggactcccaacacaatcgtgaagaagttgtcatatataacggttgacaagcaggacaaagatccttcaccgctgtttggagggcaccaaaactggaaacagagggaggagagctttaaactgaactctaccatgaaggttcactgtggatttatgaaaaatagtggtgcagatatggataccattgatctcaagtacatacagaaatgcagatttgtggttgcctctggtatttttgatggctacgacattccccatcagccatccaatattagtcatcggtctcagaagttgttctgcttcctgatggtggtagatgaagtatctcttgattttgttcaaaagaacgcaagtgtcaagattgacagtgctggggggaaatgggttggtatatggcgacttataagggtacatcgcctcccatttgacgaacctagaaggaatggaaagataccaaagattttaacacataggctgtttcctgaagcttggtatagcatttggattgatgggaaaatggagctcatagttgacccacttcttattctcgagagatatctctggcgtggaaaaaacacatttgcagtagctgcccataagcatcataggagcatctatgaagagggtgatgcaatcaaacggcggaagcgatatgctcgtcctttggttgatcttcagatgaaattatactattatgaggggatggagccttggagcccaaagaaaaagatgcctagtgatgtgccggagggagcagtgctgatccgggaacatacgacgatgaccgatctcttcagctgcctctggttcaacgaggtcaatcttttcacgccgcgtgatcagatcagctttggctacgtggtgcataggctcggaggcgctctcaagttcttcatgttccccaactgcgaatacaattcgctgttcatcctgcacggacacacgagagaacactcctctaaagtcgagtgggccaaaacaaccgatgagattgtgaagaagggactgaaggagagtagaggaggattagggctatggactccgtatcctgcagatctcagctccgtggaagtccctgctgtaaaaaggacttcaccggcaggctaggctgggattttttggtcttctattcgttcatggttgtaaaaagtagaacactactgatttcccccccttttcttttctcgcttaatcagacgagatcatgtaattcctgtagattctgtggtaactgaaccccgggggtaccgtaggctaatgcttggagcttgttgcttccagccggttctgtgcaatttaacactcatttacatatgtgccataaaaataaaaatagaagattcatggttcatcacatctgctatagggatatcaaatcaacattataagtcaacgcctgaaaaataattataacaactggaaataatcagcaccaaagcatcatgcactttcaaatgaatcatttgcctctttcagctgatacaatctcatcagcattctgtgatctaccaaaagttcctacaccagaatcacaaggaccaactcgagtggaatacgagaccaggtctgcacctccggccatccacgttgaacacgatgccaggctgcacggcagcagccttccccagatgcaagttcagaaatccctccacctgaaacagttgcggtttttcctcagtgcctctacgcaagctcacgccccatccaaggtcaccttccggcgtatctgacagtgtgagggcccatctcagcaaacgtgagcttgacttcttgttcaactcgatccaggccccgattctggagtcctcatcaatttccagctcaagaccaacgcaacctccagcagttggtttcctcttccgaggaactacactgggtccatgcaaagcagcagacagggtcaactttatgtcatcagggaactggtacgagatttgcccaaactctgtacagactctgctggcttcaccgccgtttactggcctcgcggcaactgagatcagctgcgctatagaaacagcgaagttcttcgatctcagtattaggccgccagcatatctgtggcttttactcagcaaaggtggcctcagcgaagatcgcaaactggccagccaatgttcctgttaagcaaactgttacc

SEQ ID NO: 134409 - DNA, 198 bp, Zea Mays
ggtggaaatatcttgcacaaggagatgaggccaaagtttcagacatcacacgcagagctaatcaaagaaatgtgtgtgcatgagagagagagagagagagagagagagagagagagagagagtatatgcattgttcgcggaaatcctcaaattaaagtgcttcgcttttgactcaccatctccgcctgtataaacatc

SEQ ID NO: 134410 - DNA, 963 bp, Zea Mays
cgcgcgccggcaaatatatataaagcaattgcattagcagcagctagctcagtgctgccaaagctagctgagctgcactgcactgcaccacagcatatatccaagcagcagctagaaagtagaggaagcaccactacgattacatatatccaagccaagcgccctagcttgctggtgttgttggtgctccggccggccctctctcgtctccttactagctacccgtcatggcggccaactaccaccactaccagatggcggtgcacgcggcggcggcggcggcggcgtggaggagggagccggacagcccgcagctgagcttcgtgagcgggtgcagctccctcttctccatctccacgctgcaggacgacgacgacgaccgagccgccgccgtcgtcatcgccgccggccacgcgctgccctccacgcccgtctcgctcgcgggcttcgtcggcgacgaggtcgacatggaggtgcagcaggccagcggcgacgatcggaggagcatcaggatgatgaggaaccgggagtccgcgctccgctccagggccaggaagagggcatacgtggagaacctggagaaagaggttcgccggctagtggatgacaacttgaagctcaagaagcagtgcaaagagctgaaacgggaggtagcggcactggtcctcccaaccaagagctcacttcggagaacctcatccacccaattctgaaggggcgaagggaaatgaaatatatagatttatatatttggtggtagcagtagcagtacaaagttaagatcgagaaggaatatggttgttggacttgtgctgtgtgcattttttcagtgccagtgtgtgtcggtgtgtgaagcaggggcaaggggacatatatatgaattaggcaatgtgctatgacctatatatatatataatatatatatattgttagctcaaatgatatagggttttataaaaaaat

SEQ ID NO: 134411 - DNA, 2010 bp, Zea Mays
ctctctctcccgtcgtccagagacccagaaggagagggagacagagccacagaggcaggggagaggaggagcagcgtggcgacgcccaaatcgagcgacctgatcgaggcccctcgcccctactcgctgaatcccaatccgagcccgccaattgggcgcccccccccgcccacgcaaaggacagatagaagaaaattattggcgctctgacaaatccaactgaggttttcttggactacagatgaagcgggctcgaagggcgtatgtgcaagagatgactgatgagggatgctagtgaaattgatgaacttgttacgggcgtgctggcgaccgtcatcgaaccggcatgcccgaacaggctcagatgttaccggtaggcaggatggacttctatggtacaaggacgccgggcaacatgtcaatggggagttctccatggctgttgttcaggcaaataacttacttgaggaccagtgtcagatcgagtcgggcccactgagttttctagattctggaccatatggcactttcgttggtgtttacgatgggcatggtggtccagagacggcctgctatatcaatgatcatcttttccagaatctgaaaagatttgcatctgagcagaatgcaatgtctgctgatgtactgaagaaggcatatgaagctacagaagatggattcttctccattgttaccaaacaatggcctgtaaagcctcagatagcagctgtcggctcatgctgcctggtcggtgtaatttgtggtggcatgctttatgttgccaatgttggggattcccgtgtcgttttaggaaaacatgttaaggccactggagaagttttggctgtccaactgtcagcagaacataatgttagtattgcgtccgtgagaaaagaactgcagtcaatgcacccagaagataggcacattgttgttctcaagcacaatgtttggcgtgttaaaggactaattcaggtttgtagatcaattggtgatgcatatctcaaaaagcaagagttcaacagggaacccctatatgcaaaatttcgcctccgtgaaccttttcacaagccaatactaagttcagaaccatcaatcagtgtgcaaccactacaaccacacgaccagtttctcatatttgcatctgatggactttgggagcagttaaccaaccaagaggcagttgatattgttcgaagtagcccccgcagtggctgtgctaggaggctgataagagcggcactgcaagaggcagccaagaaaagagagatgaggtactcggacctcaagaagattgaccgcggtgttcgccgccacttccacgacgacataacagtcatagtagtgttccttgactccggcctcgtaagccaggcgagcacacaccgaggtccaactctttccttgcgaggcggtggcggcagcgctggcctgcgcagcaacacacttgcacctacgtgactataaagtgcctggtggagtggaggctactgactgaaggtggttttctttccttgtgtcgaatgtgttatatatgtacttgtaccagccaagatcattcatccccccccctaaaatggtgtaaagaagtaggagaggcgccgaagttcctcaccagcgtatctgaatgccctcaatggtgtcaagttgtggactcaagtggatagcttcgctgaatcttctgatgatgctctgtggaaagctcgaatcctttccacctgaaaaagcaagtaatatgtcttccagtgctggaattaacccctagtgcatatatatatgtatgaaataataataaggcaaaaggaggagtaacttatttaactaatgctgtgaggtgtatttatgttttgtatgtgtactgctttttgactgctactgcatctactgttgttaattgaccactggtgaagtgaaatcactggtttcgtcttgctgtctcactgttactagttgttcacagcattgctggtttgactgttcctactatatacatatagtttatatattata

SEQ ID NO: 134412 - DNA, 1948 bp, Zea Mays
ctctctctcccgtcgtccagagacccagaaggagagggagacagagccacagaggcaggggagaggaggagcagcgtggcgacgcccaaatcgagcgacctgatcgaggcccctcgcccctactcgctgaatcccaatccgagcccgccaattgggcgcccccccccgcccacgcaaagatgaagcgggctcgaagggcgtatgtgcaagagatgactgatgagggatgctagtgaaattgatgaacttgttacgggcgtgctggcgaccgtcatcgaaccggcatgcccgaacaggctcagatgttaccggtaggcaggatggacttctatggtacaaggacgccgggcaacatgtcaatggggagttctccatggctgttgttcaggcaaataacttacttgaggaccagtgtcagatcgagtcgggcccactgagttttctagattctggaccatatggcactttcgttggtgtttacgatgggcatggtggtccagagacggcctgctatatcaatgatcatcttttccagaatctgaaaagatttgcatctgagcagaatgcaatgtctgctgatgtactgaagaaggcatatgaagctacagaagatggattcttctccattgttaccaaacaatggcctgtaaagcctcagatagcagctgtcggctcatgctgcctggtcggtgtaatttgtggtggcatgctttatgttgccaatgttggggattcccgtgtcgttttaggaaaacatgttaaggccactggagaagttttggctgtccaactgtcagcagaacataatgttagtattgcgtccgtgagaaaagaactgcagtcaatgcacccagaagataggcacattgttgttctcaagcacaatgtttggcgtgttaaaggactaattcaggtttgtagatcaattggtgatgcatatctcaaaaagcaagagttcaacagggaacccctatatgcaaaatttcgcctccgtgaaccttttcacaagccaatactaagttcagaaccatcaatcagtgtgcaaccactacaaccacacgaccagtttctcatatttgcatctgatggactttgggagcagttaaccaaccaagaggcagttgatattgttcgaagtagcccccgcagtggctgtgctaggaggctgataagagcggcactgcaagaggcagccaagaaaagagagatgaggtactcggacctcaagaagattgaccgcggtgttcgccgccacttccacgacgacataacagtcatagtagtgttccttgactccggcctcgtaagccaggcgagcacacaccgaggtccaactctttccttgcgaggcggtggcggcagcgctggcctgcgcagcaacacacttgcacctacgtgactataaagtgcctggtggagtggaggctactgactgaaggtggttttctttccttgtgtcgaatgtgttatatatgtacttgtaccagccaagatcattcatccccccccctaaaatggtgtaaagaagtaggagaggcgccgaagttcctcaccagcgtatctgaatgccctcaatggtgtcaagttgtggactcaagtggatagcttcgctgaatcttctgatgatgctctgtggaaagctcgaatcctttccacctgaaaaagcaagtaatatgtcttccagtgctggaattaacccctagtgcatatatatatgtatgaaataataataaggcaaaaggaggagtaacttatttaactaatgctgtgaggtgtatttatgttttgtatgtgtactgctttttgactgctactgcatctactgttgttaattgaccactggtgaagtgaaatcactggtttcgtcttgctgtctcactgttactagttgttcacagcattgctggtttgactgttcctactatatacatatagtttatatattata

SEQ ID NO: 134413 - DNA, 1947 bp, Zea Mays
ttttccccccatccctcccgctcccccttcttggagccgcgtaccccagcccccaggattggtgacaggcaccctccctcctgatctcaatcagttctcggcgcttgagtgccgtggacagatagaagaaaattattggcgctctgacaaatccaactgaggttttcttggactacagatgaagcgggctcgaagggcgtatgtgcaagagatgactgatgagggatgctagtgaaattgatgaacttgttacgggcgtgctggcgaccgtcatcgaaccggcatgcccgaacaggctcagatgttaccggtaggcaggatggacttctatggtacaaggacgccgggcaacatgtcaatggggagttctccatggctgttgttcaggcaaataacttacttgaggaccagtgtcagatcgagtcgggcccactgagttttctagattctggaccatatggcactttcgttggtgtttacgatgggcatggtggtccagagacggcctgctatatcaatgatcatcttttccagaatctgaaaagatttgcatctgagcagaatgcaatgtctgctgatgtactgaagaaggcatatgaagctacagaagatggattcttctccattgttaccaaacaatggcctgtaaagcctcagatagcagctgtcggctcatgctgcctggtcggtgtaatttgtggtggcatgctttatgttgccaatgttggggattcccgtgtcgttttaggaaaacatgttaaggccactggagaagttttggctgtccaactgtcagcagaacataatgttagtattgcgtccgtgagaaaagaactgcagtcaatgcacccagaagataggcacattgttgttctcaagcacaatgtttggcgtgttaaaggactaattcaggtttgtagatcaattggtgatgcatatctcaaaaagcaagagttcaacagggaacccctatatgcaaaatttcgcctccgtgaaccttttcacaagccaatactaagttcagaaccatcaatcagtgtgcaaccactacaaccacacgaccagtttctcatatttgcatctgatggactttgggagcagttaaccaaccaagaggcagttgatattgttcgaagtagcccccgcagtggctgtgctaggaggctgataagagcggcactgcaagaggcagccaagaaaagagagatgaggtactcggacctcaagaagattgaccgcggtgttcgccgccacttccacgacgacataacagtcatagtagtgttccttgactccggcctcgtaagccaggcgagcacacaccgaggtccaactctttccttgcgaggcggtggcggcagcgctggcctgcgcagcaacacacttgcacctacgtgactataaagtgcctggtggagtggaggctactgactgaaggtggttttctttccttgtgtcgaatgtgttatatatgtacttgtaccagccaagatcattcatccccccccctaaaatggtgtaaagaagtaggagaggcgccgaagttcctcaccagcgtatctgaatgccctcaatggtgtcaagttgtggactcaagtggatagcttcgctgaatcttctgatgatgctctgtggaaagctcgaatcctttccacctgaaaaagcaagtaatatgtcttccagtgctggaattaacccctagtgcatatatatatgtatgaaataataataaggcaaaaggaggagtaacttatttaactaatgctgtgaggtgtatttatgttttgtatgtgtactgctttttgactgctactgcatctactgttgttaattgaccactggtgaagtgaaatcactggtttcgtcttgctgtctcactgttactagttgttcacagcattgctggtttgactgttcctactatatacatatagtttatatattata

SEQ ID NO: 134414 - DNA, 1731 bp, Zea Mays
cccccatccctcccgctcccccttcttggagccgcgtaccccagcccccaggattggtgacaggcaccctccctcctgatctcaatcagttctcggcgcttgagtgccgtggacagatagaagaaaattattggcgctctgacaaatccaactgaggttttcttggactacagatgaagcgggctcgaagggcgtatgtgcaagagatgactgatgagggatgctagtgaaattgatgaacttgttacgggcgtgctggcgaccgtcatcgaaccggcatgcccgaacaggctcagatgttaccggtaggcaggatggacttctatggtacaaggacgccgggcaacatgtcaatggggagttctccatggctgttgttcaggcaaataacttacttgaggaccagtgtcagatcgagtcgggcccactgagttttctagattctggaccatatggcactttcgttggtgtttacgatgggcatggtggtccagagacggcctgctatatcaatgatcatcttttccagaatctgaaaagatttgcatctgagcagaatgcaatgtctgctgatgtactgaagaaggcatatgaagctacagaagatggattcttctccattgttaccaaacaatggcctgtaaagcctcagatagcagctgtcggctcatgctgcctggtcggtgtaatttgtggtggcatgctttatgttgccaatgttggggattcccgtgtcgttttaggaaaacatgttaaggccactggagaagttttggctgtccaactgtcagcagaacataatgttagtattgcgtccgtgagaaaagaactgcagtcaatgcacccagaagataggcacattgttgttctcaagcacaatgtttggcgtgttaaaggactaattcaggtttgtagatcaattggtgatgcatatctcaaaaagcaagagttcaacagggaacccctatatgcaaaatttcgcctccgtgaaccttttcacaagccaatactaagttcagaaccatcaatcagtgtgcaaccactacaaccacacgaccagtttctcatatttgcatctgatggactttgggagcagttaaccaaccaagaggcagttgatattgttcgaagtagcccccgcagtggctgtgctaggaggctgataagagcggcactgcaagaggcagccaagaaaagagagatgaggtactcggacctcaagaagattgaccgcggtgttcgccgccacttccacgacgacataacagtcatagtagtgttccttgactccggcctcgtaagccaggcgagcacacaccgaggtccaactctttccttgcgaggcggtggcggcagcgctggcctgcgcagcaacacacttgcacctacgtgactataaagtgcctggtggagtggaggctactgactgaaggagaggcgccgaagttcctcaccagcgtatctgaatgccctcaatggtgtcaagttgtggactcaagtggatagcttcgctgaatcttctgatgatgctctgtggaaagctcgaatcctttccacctgaaaaagcaagtaatatgtcttccagtgctggaattaacccctagtgcatatatatatgtatgaaataataataaggcaaaaggaggagtaacttatttaactaatgctgtgaggtgtatttatgttttgtatgtgtactgctttttgactgctactgcatctactgttgtt

SEQ ID NO: 134415 - DNA, 1655 bp, Zea Mays
atcctctccctcagtgctcacgtctccaccggtccaccccctcggcagctcaatggcagctgcgacggcgccaccgccggcggcggttgccaccaccctctcgggcctcatgcgctgccagaacatccgtagcagcaggcctagagccttctacgcgaggtgcgcctcctccaacgcgagcgcggaggcggcggagagccggaagggaggccacggcgggacgcgcctggaggaagccgtgcccgtcggcgaggggcgctcgagggtagacgcctggatatcggcgcgtctcggcggcgggggcgttagccgcgcgcgcgtgcaggccagcatccgggccgggcttgtcgccgtcaatggccgcccggtctccaaggtttcgcatactgtgaagggaggggacttggtcagctgcacggtgtcagagctacagccgctgagggcagaggcggaggacatcccgctggacatcgtttatgaggatgaccatgttcttgttgtcaacaagccggctcatatggttgttcacccggcgccaggaaatgccaaaggcacattagtcaatgctatacttcatcactgcaagatctccacatttacctgtttagcacgcagctcagctggtgatgaatgcccggattctacggatgaagacactgatgtatttcatgtggatcagtttgctgctgaagatgtaagttcagaagtccggaatgctcttgtgcgccctggtattgtgcacaggctggataaggggacaagtgggcttcttgttgttgctaaggatgagcattctcatgctcgattagcagaacagttcaagctgcatacaatccgtagggtatacatcagtcttacttgtggcgcacctaatccaaattctggcaggattgaggcttctattgcacgtgatcctaacaatcggattcgtatgactgctattgctggatcaggccacagatatgcacggaatgctgctagtaggtacaaagtaagagaggtctttgctggtggcggatccgcactagttgagtggagactagagacaggacgcactcatcagatccgggcgcatgcaaagtacatagggatccctcttctcggcgacgaaacatatggaggtacccagagcatggcgttatcgctcctgagaccaaggagtccttcgaaatatcacagcggcctttcgaatctgttgtctaaagtggacaggccttgccttcatgctgcatcgcttggttcaggatgtgattaccgtcttctgatcttctccccccagattcaagcacccacgttcaggaaaggtccttgagttctcgtgccccccgccagatgatttcttggaggtgcttggtgaattgcgacgtgttacgtctaggtccagtgatgccccaaatggtgatggtgttttccggtgagggagatggatagaaccaaggctgaggatgtggaacaagacatgggaacccttggagatttgttccaggctcctagaaagagaaaagtgtttcgtacgagttttcctgatggctggtggaagtgagagggaaatgagtaggagaatctgtatgctttcggctgggctcatcagtacacacgcatttgttttgggctccgattcatgggcttccagcaggaagaacttcacgggattc

SEQ ID NO: 134416 - DNA, 1357 bp, Zea Mays
atggcagctgcgacggcgccaccgccggcggcggttgccaccaccctctcgggcctcatgcgctgccagaacatccgtagcagcaggcctagagccttctacgcgaggtgcgcctcctccaacgcgagcgcggaggcggcggagagccggaagggaggccacggcgggacgcgcctggaggaagccgtgcccgtcggcgaggggcgctcgagggtagacgcctggatatcggcgcgtctcggcggcgggggcgttagccgcgcgcgcgtgcaggccagcatccgggccgggcttgtcgccgtcaatggccgcccggtctccaaggtttcgcatactgtgaagggaggggacttggtcagctgcacggtgtcagagctacagccgctgagggcagaggcggaggacatcccgctggacatcgtttatgaggatgaccatgttcttgttgtcaacaagccggctcatatggttgttcacccggcgccaggaaatgccaaaggcacattagtcaatgctatacttcatcactgcaagatctccacatttacctgtttagcacgcagctcagctggtgatgaatgcccggattctacggatgaagacactgatgtatttcatgtggatcagtttgctgctgaagatgtaagttcagaagtccggaatgctcttgtgcgccctggtattgtgcacaggctggataaggggacaagtgggcttcttgttgttgctaaggatgagcattctcatgctcgattagcagaacagttcaagctgcatacaatccgtagggtatacatcagtcttacttgtggcgcacctaatccaaattctggcaggattgaggcttctattgcacgtgatcctaacaatcggattcgtatgactgctattgctggatcaggccacagatatgcacggaatgctgctagtaggtacaaagtaagagaggtctttgctggtggcggatccgcactagttgagtggagactagagacaggacgcactcatcagaattaccatactgctctatcagttctagcaggaattaaataaactcacgaataactgcaaattactaatatcggtgtgttgcttgtttggatgttattggccggttgagacctgcgaatcacgattctcacgagcaactgtttaaactttcttgtcaagatagatagtgttcttgtatatgtttattttatttggcatgcagatggaaaacgaacaacaaacaagaggatcgctgggacctagtcaggcggttcatgtgaatgatagctattgtgatatatataacataaccagtcagtttgccagcaataaacatgtatttagatattacacttgttgtcttgtt

SEQ ID NO: 134417 - DNA, 1629 bp, Zea Mays
cgggattcccctccgccgcctacgcgcccaacacgcccccgtccagattcatccacccttccccttcgtctccctccctccatccaatccaccccctctcccccttctcgtcgtcgccgccgccgccgcccatccggggcttggactgtcctttccccgttctgctggtaggtaaggaattcctcttctggctccgacggattctctcgctccgtttgtctctggtacaattcgttcgctgctgcgagccctcgaatccgtttgtatccggagcagcggcggagtagtaatactagtacaattccttagtcgtgttcccaagtgggtggatgcgtctttgactgcccggcgcccgcccgcaccccgcagcagcaatggacgacggggacctggatttctccaacccggacacgtacctgtgtccggccctcggcaccgacccgcccagcagctgctccatggacagctacttcgacgagatcctcaaggacacggagcacctcgcctgcacgcacacccacacctgcaacccgccggtgcacgacctctcgcacacccacacctgcgtccacgtccataccaagatcgtcgcggcctcgccgggcgacgccgagtcgccgtccgagaacaacagcaacggcaacgccgcctctaagaagcgcccgtcggggaaccgcgccgccgtcaggaagtaccgggagaagaagaaggcccacaccgcatcgctcgaggaggaggtggtgcacctccgggcgctcaaccagcagctcatgaaaaagctccagagccacgccgcgctcgaggcggaggcggccaggctccgctgcctgctcgtcgacatcaggggcaggatcgagggggagattggtgcgttcccgtatcagaggccgccggcggtcaagaacgtcgacctcctgtctagtgttgaccaggaaagcctccttggcagcgctgctgcccaggttgccaactcctgtgattttagatgcaaccatcagatgtactgcaaccctgggatgcagggcgctatcagcggtcaggtgttgggacaaggtgcctgtgatgtcgccagtatgcaatgcattggaagcaccaagtctggatccactaagctacctgtttgtgggggtctggatacactacctgctgtctgcttaccaaatgttgaaaagaagtgatggactcctggcggtgtttatggtctctcctttccagagacatgctgtataaactgctagcttttctatgtaggactgcatctggttcaaactgctatactgctatgttagtatgtcactgagtttgtcgcccatgatgcttctatggtgtctgaggcgattcaagtttgttagctctaaagctgacaggacatcctcgtttactttgcctagtttccagacggtctatgatcaagtgcagaactgaaccggatcgtaaggagttgaacatgaacttgttaaaatctggcatatgtagatgcatggatcgcgaaatccctcgtgtaggtgcagtgtccctcttctgctatgtgcgagatctgagggaacctggattcatttattgtttgaatgtttcactgtttctgtcgcaagtaaataatttattgcatgggaagtttataactctaga

SEQ ID NO: 134418 - DNA, 1476 bp, Zea Mays
ctccgccgcctacgcgcccaacacgcccccgtccagattcatccacccttccccttcgtctccctccctccatccaatccaccccctctcccccttctcgtcgtcgccgccgccgccgcccatccggggcttggactgtcctttccccgttctgctggtagtcgtgttcccaagtgggtggatgcgtctttgactgcccggcgcccgcccgcaccccgcagcagcaatggacgacggggacctggatttctccaacccggacacgtacctgtgtccggccctcggcaccgacccgcccagcagctgctccatggacagctacttcgacgagatcctcaaggacacggagcacctcgcctgcacgcacacccacacctgcaacccgccggtgcacgacctctcgcacacccacacctgcgtccacgtccataccaagatcgtcgcggcctcgccgggcgacgccgagtcgccgtccgagaacaacagcaacggcaacgccgcctctaagaagcgcccgtcggggaaccgcgccgccgtcaggaagtaccgggagaagaagaaggcccacaccgcatcgctcgaggaggaggtggtgcacctccgggcgctcaaccagcagctcatgaaaaagctccagagccacgccgcgctcgaggcggaggcggccaggctccgctgcctgctcgtcgacatcaggggcaggatcgagggggagattggtgcgttcccgtatcagaggccgccggcggtcaagaacgtcgacctcctgtctagtgttgaccaggaaagcctccttggcagcgctgctgcccaggttgccaactcctgtgattttagatgcaaccatcagatgtactgcaaccctgggatgcagggcgctatcagcggtcaggtgttgggacaaggtgcctgtgatgtcgccagtatgcaatgcattggaagcaccaagtctggatccactaagctacctgtttgtgggggtctggatacactacctgctgtctgcttaccaaatgttgaaaagaagtgatggactcctggcggtgtttatggtctctcctttccagagacatgctgtataaactgctagcttttctatgtaggactgcatctggttcaaactgctatactgctatgttagtatgtcactgagtttgtcgcccatgatgcttctatggtgtctgaggcgattcaagtttgttagctctaaagctgacaggacatcctcgtttactttgcctagtttccagacggtctatgatcaagtgcagaactgaaccggatcgtaaggagttgaacatgaacttgttaaaatctggcatatgtagatgcatggatcgcgaaatccctcgtgtaggtgcagtgtccctcttctgctatgtgcgagatctgagggaacctggattcatttattgtttgaatgtttcactgtttctgtcgcaagtaaataatttattgcatgggaagtttataact

SEQ ID NO: 134419 - DNA, 1472 bp, Zea Mays
ctccgccgcctacgcgcccaacacgcccccgtccagattcatccacccttccccttcgtctccctccctccatccaatccaccccctctcccccttctcgtcgtcgccgccgccgccgcccatccggggcttggactgtcctttccccgttctgctgtcgtgttcccaagtgggtggatgcgtctttgactgcccggcgcccgcccgcaccccgcagcagcaatggacgacggggacctggatttctccaacccggacacgtacctgtgtccggccctcggcaccgacccgcccagcagctgctccatggacagctacttcgacgagatcctcaaggacacggagcacctcgcctgcacgcacacccacacctgcaacccgccggtgcacgacctctcgcacacccacacctgcgtccacgtccataccaagatcgtcgcggcctcgccgggcgacgccgagtcgccgtccgagaacaacagcaacggcaacgccgcctctaagaagcgcccgtcggggaaccgcgccgccgtcaggaagtaccgggagaagaagaaggcccacaccgcatcgctcgaggaggaggtggtgcacctccgggcgctcaaccagcagctcatgaaaaagctccagagccacgccgcgctcgaggcggaggcggccaggctccgctgcctgctcgtcgacatcaggggcaggatcgagggggagattggtgcgttcccgtatcagaggccgccggcggtcaagaacgtcgacctcctgtctagtgttgaccaggaaagcctccttggcagcgctgctgcccaggttgccaactcctgtgattttagatgcaaccatcagatgtactgcaaccctgggatgcagggcgctatcagcggtcaggtgttgggacaaggtgcctgtgatgtcgccagtatgcaatgcattggaagcaccaagtctggatccactaagctacctgtttgtgggggtctggatacactacctgctgtctgcttaccaaatgttgaaaagaagtgatggactcctggcggtgtttatggtctctcctttccagagacatgctgtataaactgctagcttttctatgtaggactgcatctggttcaaactgctatactgctatgttagtatgtcactgagtttgtcgcccatgatgcttctatggtgtctgaggcgattcaagtttgttagctctaaagctgacaggacatcctcgtttactttgcctagtttccagacggtctatgatcaagtgcagaactgaaccggatcgtaaggagttgaacatgaacttgttaaaatctggcatatgtagatgcatggatcgcgaaatccctcgtgtaggtgcagtgtccctcttctgctatgtgcgagatctgagggaacctggattcatttattgtttgaatgtttcactgtttctgtcgcaagtaaataatttattgcatgggaagtttataact

SEQ ID NO: 134420 - DNA, 1463 bp, Zea Mays
ctccgccgcctacgcgcccaacacgcccccgtccagattcatccacccttccccttcgtctccctccctccatccaatccaccccctctcccccttctcgtcgtcgccgccgccgccgcccatccggggcttggactgtcctttccccgttctgctggtagtgggtggatgcgtctttgactgcccggcgcccgcccgcaccccgcagcagcaatggacgacggggacctggatttctccaacccggacacgtacctgtgtccggccctcggcaccgacccgcccagcagctgctccatggacagctacttcgacgagatcctcaaggacacggagcacctcgcctgcacgcacacccacacctgcaacccgccggtgcacgacctctcgcacacccacacctgcgtccacgtccataccaagatcgtcgcggcctcgccgggcgacgccgagtcgccgtccgagaacaacagcaacggcaacgccgcctctaagaagcgcccgtcggggaaccgcgccgccgtcaggaagtaccgggagaagaagaaggcccacaccgcatcgctcgaggaggaggtggtgcacctccgggcgctcaaccagcagctcatgaaaaagctccagagccacgccgcgctcgaggcggaggcggccaggctccgctgcctgctcgtcgacatcaggggcaggatcgagggggagattggtgcgttcccgtatcagaggccgccggcggtcaagaacgtcgacctcctgtctagtgttgaccaggaaagcctccttggcagcgctgctgcccaggttgccaactcctgtgattttagatgcaaccatcagatgtactgcaaccctgggatgcagggcgctatcagcggtcaggtgttgggacaaggtgcctgtgatgtcgccagtatgcaatgcattggaagcaccaagtctggatccactaagctacctgtttgtgggggtctggatacactacctgctgtctgcttaccaaatgttgaaaagaagtgatggactcctggcggtgtttatggtctctcctttccagagacatgctgtataaactgctagcttttctatgtaggactgcatctggttcaaactgctatactgctatgttagtatgtcactgagtttgtcgcccatgatgcttctatggtgtctgaggcgattcaagtttgttagctctaaagctgacaggacatcctcgtttactttgcctagtttccagacggtctatgatcaagtgcagaactgaaccggatcgtaaggagttgaacatgaacttgttaaaatctggcatatgtagatgcatggatcgcgaaatccctcgtgtaggtgcagtgtccctcttctgctatgtgcgagatctgagggaacctggattcatttattgtttgaatgtttcactgtttctgtcgcaagtaaataatttattgcatgggaagtttataact

SEQ ID NO: 134421 - DNA, 1416 bp, Zea Mays
ctccgccgcctacgcgcccaacacgcccccgtccagattcatccacccttccccttcgtctccctccctccatccaatccaccccctctcccccttctcgtcgtcgccgccgccgccgcccatccggggcttggactgtcctttccccgttctgctggtagcagcaatggacgacggggacctggatttctccaacccggacacgtacctgtgtccggccctcggcaccgacccgcccagcagctgctccatggacagctacttcgacgagatcctcaaggacacggagcacctcgcctgcacgcacacccacacctgcaacccgccggtgcacgacctctcgcacacccacacctgcgtccacgtccataccaagatcgtcgcggcctcgccgggcgacgccgagtcgccgtccgagaacaacagcaacggcaacgccgcctctaagaagcgcccgtcggggaaccgcgccgccgtcaggaagtaccgggagaagaagaaggcccacaccgcatcgctcgaggaggaggtggtgcacctccgggcgctcaaccagcagctcatgaaaaagctccagagccacgccgcgctcgaggcggaggcggccaggctccgctgcctgctcgtcgacatcaggggcaggatcgagggggagattggtgcgttcccgtatcagaggccgccggcggtcaagaacgtcgacctcctgtctagtgttgaccaggaaagcctccttggcagcgctgctgcccaggttgccaactcctgtgattttagatgcaaccatcagatgtactgcaaccctgggatgcagggcgctatcagcggtcaggtgttgggacaaggtgcctgtgatgtcgccagtatgcaatgcattggaagcaccaagtctggatccactaagctacctgtttgtgggggtctggatacactacctgctgtctgcttaccaaatgttgaaaagaagtgatggactcctggcggtgtttatggtctctcctttccagagacatgctgtataaactgctagcttttctatgtaggactgcatctggttcaaactgctatactgctatgttagtatgtcactgagtttgtcgcccatgatgcttctatggtgtctgaggcgattcaagtttgttagctctaaagctgacaggacatcctcgtttactttgcctagtttccagacggtctatgatcaagtgcagaactgaaccggatcgtaaggagttgaacatgaacttgttaaaatctggcatatgtagatgcatggatcgcgaaatccctcgtgtaggtgcagtgtccctcttctgctatgtgcgagatctgagggaacctggattcatttattgtttgaatgtttcactgtttctgtcgcaagtaaataatttattgcatgggaagtttataact

SEQ ID NO: 134422 - DNA, 1413 bp, Zea Mays
ctccgccgcctacgcgcccaacacgcccccgtccagattcatccacccttccccttcgtctccctccctccatccaatccaccccctctcccccttctcgtcgtcgccgccgccgccgcccatccggggcttggactgtcctttccccgttctgctggtagcaatggacgacggggacctggatttctccaacccggacacgtacctgtgtccggccctcggcaccgacccgcccagcagctgctccatggacagctacttcgacgagatcctcaaggacacggagcacctcgcctgcacgcacacccacacctgcaacccgccggtgcacgacctctcgcacacccacacctgcgtccacgtccataccaagatcgtcgcggcctcgccgggcgacgccgagtcgccgtccgagaacaacagcaacggcaacgccgcctctaagaagcgcccgtcggggaaccgcgccgccgtcaggaagtaccgggagaagaagaaggcccacaccgcatcgctcgaggaggaggtggtgcacctccgggcgctcaaccagcagctcatgaaaaagctccagagccacgccgcgctcgaggcggaggcggccaggctccgctgcctgctcgtcgacatcaggggcaggatcgagggggagattggtgcgttcccgtatcagaggccgccggcggtcaagaacgtcgacctcctgtctagtgttgaccaggaaagcctccttggcagcgctgctgcccaggttgccaactcctgtgattttagatgcaaccatcagatgtactgcaaccctgggatgcagggcgctatcagcggtcaggtgttgggacaaggtgcctgtgatgtcgccagtatgcaatgcattggaagcaccaagtctggatccactaagctacctgtttgtgggggtctggatacactacctgctgtctgcttaccaaatgttgaaaagaagtgatggactcctggcggtgtttatggtctctcctttccagagacatgctgtataaactgctagcttttctatgtaggactgcatctggttcaaactgctatactgctatgttagtatgtcactgagtttgtcgcccatgatgcttctatggtgtctgaggcgattcaagtttgttagctctaaagctgacaggacatcctcgtttactttgcctagtttccagacggtctatgatcaagtgcagaactgaaccggatcgtaaggagttgaacatgaacttgttaaaatctggcatatgtagatgcatggatcgcgaaatccctcgtgtaggtgcagtgtccctcttctgctatgtgcgagatctgagggaacctggattcatttattgtttgaatgtttcactgtttctgtcgcaagtaaataatttattgcatgggaagtttataact

SEQ ID NO: 134423 - DNA, 1417 bp, Zea Mays
ctccgccgcctacgcgcccaacacgcccccgtccagattcatccacccttccccttcgtctccctccctccatccaatccaccccctctcccccttctcgtcgtcgccgccgccgccgcccatccggggcttggactgtcctttccccgttctgctgcagcaatggacgacggggacctggatttctccaacccggacacgtacctgtgtccggccctcggcaccgacccgcccagcagctgctccatggacagctacttcgacgagatcctcaaggacacggagcacctcgcctgcacgcacacccacacctgcaacccgccggtgcacgacctctcgcacacccacacctgcgtccacgtccataccaagatcgtcgcggcctcgccgggcgacgccgagtcgccgtccgagaacaacagcaacggcaacgccgcctctaagaagcgcccgtcggggaaccgcgccgccgtcaggaagtaccgggagaagaagaaggcccacaccgcatcgctcgaggaggaggtggtgcacctccgggcgctcaaccagcagctcatgaaaaagctccagagccacgccgcgctcgaggcggaggcggccaggctccgctgcctgctcgtcgacatcaggggcaggatcgagggggagattggtgcgttcccgtatcagaggccgccggcggtcaagaacgtcgacctcctgtctagtgttgaccaggaaagcctccttggcagcgctgctgcccaggttgccaactcctgtgattttagatgcaaccatcagatgtactgcaaccctgggatgcagggcgctatcagcggtcaggtgttgggacaaggtgcctgtgatgtcgccagtatgcaatgcattggaagcaccaagtctggatccactaagctacctgtttgtgggggtctggatacactacctgctgtctgcttaccaaatgttgaaaagaagtgatggactcctggcggtgtttatggtctctcctttccagagacatgctgtataaactgctagcttttctatgtaggactgcatctggttcaaactgctatactgctatgttagtatgtcactgagtttgtcgcccatgatgcttctatggtgtctgaggcgattcaagtttgttagctctaaagctgacaggacatcctcgtttactttgcctagtttccagacggtctatgatcaagtgcagaactgaaccggatcgtaaggagttgaacatgaacttgttaaaatctggcatatgtagatgcatggatcgcgaaatccctcgtgtaggtgcagtgtccctcttctgctatgtgcgagatctgagggaacctggattcatttattgtttgaatgtttcactgtttctgtcgcaagtaaataatttattgcatgggaagtttataactctaga

SEQ ID NO: 134424 - DNA, 2348 bp, Zea Mays
gcgacgaactcatcactgcactggtggtgtccgtggtgctccacagagtgaagcgatatccaggagaggcgacgatgcgcaagtgggcgctctcctccacgctcctcctcctctttctcctcaccacactccccgacccagctaagaagctacaagtgaatgccgaggagagcagccatgacttggctaacccaccgaaggtagaggagaagtttggtgctgtccctcatggcctgtccaccgactctgaggttgcccagagggaagccgagtctatctctaggaagactctcaggagctcagccgagaagtttgagttccaagctgaggtttccagactcatggacatcatcatcaactcactctacagcaacaaggatatcttcctgagggagctcatatctaatgcctctgatgcgttggataagattaggttcctttcccttactgataaggaagttctgggtgaaggggacactgcaaagcttgagattcagattaagttggacaaagagaagaaaatcctctccattcgggataggggtattggtatgaccaaggaagatcttattaagaaccttggaacgattgctaaatctggcacttcagcttttgtggaaaagatgcagtctggaggtgacctcaatcttattggacagtttggtgttggcttctactctgtgtacttggttgctgactatgttgaagtggtcagcaagcacaatgatgataaacagtatgtgtgggaatcaaaagctgatggatcatttgccatctctgaggatacatggaatgagccccttggccgtggaactgagataagattgcatctgcgagatgaggccaaggagtacttggaagaggataagctaaaggatttggtgaagaagtactctgagttcatcaacttccctatctatttgtggtcgaccaaggaggttgatgttgaagtgccaactgatgaggatgagacaagtgaagaagaggattcaactccagaaactacagaggaagagacagaagaagacgaagagaaagagaaaaagcccaagaccaagacaataaaggagactacttctgagtgggaacttctgaatgatgtgaaggctgtatggcttcgcagcccaaaggaggttaccgatgaagaatactcgaagttttaccattcactagccaaggacttcggtgatgacaagcctatgggttggagccacttcactgccgaaggagatgttgagttcaaagctttgctctttatccccccgaaggctccacatgatctctatgagagttactacaacagtaacaagtcaaacctcaagttgtatgttaggagagttttcatctctgacgaatttgatgatcttcttcccaagtacctgagctttttgaagggtattgttgactcggacacgctgcccctgaacgtgtcacgagaaatgcttcaacaacatagcagtctcaagaccatcaagaagaagctgatccgcaaagcccttgacatgatcaggaaacttgctgaagaagaccctgatgagtacagcaacaaggataagacagatgaagagaaaagcgagatggaggagaagaagggccagtacgccaagttctggaatgagtttggcaaatcaatcaagctgggtatcatcgaagacgcgactaacagaaaccgccttgcgaagcttcttagatttgagagtaccaagtcggatggcaaacttgcctcccttgacgagtacatctcacggatgaagtcagggcagaaagacatcttctacatcacgggaagcagcaaagagcagctggagaagtctccattcctcgagaggctaaccaagaagaactacgaggtcatcttcttcaccgaccccgtggacgagtacctgatgcagtacctgatggactacgaggacaagaagttccagaacgtgtccaaggagggactgaagctgggcaaggactcgaagctcaaggagctcaaggagtcgttcaaggagctgactgactggtggaagaaggccctggagagcgggttcaacctccccgaccccaaggagttcgcgtccagcatctacaagtcggtgcagaagggcctggacctgagccccgacgcgaccgtggaggaggacgaggccgaggagcagccggaggtggaggagaaggagccggagccggagccgtcgtcctacgacaaggacgagctttaggctttcggatttgttttcaagtctagctagctcccgctttactaggaatgtgatgatatcggtgactgcctggttcaagtcacgtgatggttcttgagagacgcccatttttttcccatgcaacgtgatacgggatttttg

SEQ ID NO: 134425 - DNA, 2585 bp, Zea Mays
gcgacgaactcatcactgcactggtggtgtccgtggtgctccacagagtgaagcgatatccaggagaggcgacgatgcgcaagtgggcgctctcctccacgctcctcctcctctttctcctcaccacactccccgacccagctaagaagctacaagtgaatgccgaggagagcagccatgacttggctaacccaccgaaggtagaggagaagtttggtgctgtccctcatggcctgtccaccgactctgaggttgcccagagggaagccgagtctatctctaggaagactctcaggagctcagccgagaagtttgagttccaagctgaggtttccagactcatggacatcatcatcaactcactctacagcaacaaggatatcttcctgagggagctcatatctaatgcctctgatgcgttggataagattaggttcctttcccttactgataaggaagttctgggtgaaggggacactgcaaagcttgagattcagattaagttggacaaagagaagaaaatcctctccattcgggataggggtattggtatgaccaaggaagatcttattaagaaccttggaacgattgctaaatctggcacttcagcttttgtggaaaagatgcagtctggaggtgacctcaatcttattggacagtttggtgttggcttctactctgtgtacttggttgctgactatgttgaagtggtcagcaagcacaatgatgataaacagtatgtgtgggaatcaaaagctgatggatcatttgccatctctgaggatacatggaatgagccccttggccgtggaactgagataagattgcatctgcgagatgaggccaaggagtacttggaagaggataagctaaaggatttggtgaagaagaagaagacgaagagaaagagaaaaagcccaagaccaagacaataaaggagactacttctgagtgggaacttctgaatgatgtgaaggctgtatggcttcgcagcccaaaggaggttaccgatgaagaatactcgaagttttaccattcactagccaaggacttcggtgatgacaagcctatgggttggagccacttcactgccgaaggagatgttgagttcaaagctttgctctttatccccccgaaggctccacatgatctctatgagagttactacaacagtaacaagtcaaacctcaagttgtatgttaggagagttttcatctctgacgaatttgatgatcttcttcccaagtacctgagctttttgaagggtattgttgactcggacacgctgcccctgaacgtgtcacgagaaatgcttcaacaacatagcagtctcaagaccatcaagaagaagctgatccgcaaagcccttgacatgatcaggaaacttgctgaagaagaccctgatgagtacagcaacaaggataagacagatgaagagaaaagcgagatggaggagaagaagggccagtacgccaagttctggaatgagtttggcaaatcaatcaagctgggtatcatcgaagacgcgactaacagaaaccgccttgcgaagcttcttagatttgagagtaccaagtcggatggcaaacttgcctcccttgacgagtacatctcacggatgaagtcagggcagaaagacatcttctacatcacgggaagcagcaaagagcagctggagaagtctccattcctcgagaggctaaccaagaagaactacgaggtcatcttcttcaccgaccccgtggacgagtacctgatgcagtacctgatggactacgaggacaagaagttccagaacgtgtccaaggagggactgaagctgggcaaggactcgaagctcaaggagctcaaggagtcgttcaaggagctgactgactggtggaagaaggccctggagagcgagaacgtggactcggtgaagatcagcaaccggctgcacgacaccccctgcgtcgtggtcacctccaagtacgggtggagcgccaacatggagaagatcatgcaggcgcagaccctgtcggactcgagcaagcaggcgtacatgcgcggcaagagggtgctcgagatcaaccccaggcaccccatcatcaaggagctccgcgacaaggtcgcccaggacaacgagagcgaggagctgaagcacacggcgaggctggtgtaccagacggccctgatggagagcgggttcaacctccccgaccccaaggagttcgcgtccagcatctacaagtcggtgcagaagggcctggacctgagccccgacgcgaccgtggaggaggacgaggccgaggagcagccggaggtggaggagaaggagccggagccggagccgtcgtcctacgacaaggacgagctttaggctttcggatttgttttcaagtctagctagctcccgctttactaggaatgtgatgatatcggtgactgcctggttcaagtcacgtgatggttcttgagagacgcccatttttttcccatgcaacgtgatacgggatttttgcctgtctttgtacctactctacaagctttagttcagtgattcagtctaattaattagtggtttgcagttaccttgcaatcttcct

SEQ ID NO: 134426 - DNA, 2842 bp, Zea Mays
gcgacgaactcatcactgcactggtggtgtccgtggtgctccacagagtgaagcgatatccaggagaggcgacgatgcgcaagtgggcgctctcctccacgctcctcctcctctttctcctcaccacactccccgacccagctaagaagctacaagtgaatgccgaggagagcagccatgacttggctaacccaccgaaggtagaggagaagtttggtgctgtccctcatggcctgtccaccgactctgaggttgcccagagggaagccgagtctatctctaggaagactctcaggagctcagccgagaagtttgagttccaagctgaggtttccagactcatggacatcatcatcaactcactctacagcaacaaggatatcttcctgagggagctcatatctaatgcctctgatgcgttggataagattaggttcctttcccttactgataaggaagttctgggtgaaggggacactgcaaagcttgagattcagattaagttggacaaagagaagaaaatcctctccattcgggataggggtattggtatgaccaaggaagatcttattaagaaccttggaacgattgctaaatctggcacttcagcttttgtggaaaagatgcagtctggaggtgacctcaatcttattggacagtttggtgttggcttctactctgtgtacttggttgctgactatgttgaagtggtcagcaagcacaatgatgataaacagtatgtgtgggaatcaaaagctgatggatcatttgccatctctgaggatacatggaatgagccccttggccgtggaactgagataagattgcatctgcgagatgaggccaaggagtacttggaagaggataagctaaaggatttggtgaagaagtactctgagttcatcaacttccctatctatttgtggtcgaccaaggaggttgatgttgaagtgccaactgatgaggatgagacaagtgaagaagaggattcaactccagaaactacagaggaagagacagaagaagacgaagagaaagagaaaaagcccaagaccaagacaataaaggagactacttctgagtgggaacttctgaatgatgtgaaggctgtatggcttcgcagcccaaaggaggttaccgatgaagaatactcgaagttttaccattcactagccaaggacttcggtgatgacaagcctatgggttggagccacttcactgccgaaggagatgttgagttcaaagctttgctctttatccccccgaaggctccacatgatctctatgagagttactacaacagtaacaagtcaaacctcaagttgtatgttaggagagttttcatctctgacgaatttgatgatcttcttcccaagtacctgagctttttgaagggtattgttgactcggacacgctgcccctgaacgtgtcacgagaaatgcttcaacaacatagcagtctcaagaccatcaagaagaagctgatccgcaaagcccttgacatgatcaggaaacttgctgaagaagaccctgatgagtacagcaacaaggataagacagatgaagagaaaagcgagatggaggagaagaagggccagtacgccaagttctggaatgagtttggcaaatcaatcaagctgggtatcatcgaagacgcgactaacagaaaccgccttgcgaagcttcttagatttgagagtaccaagtcggatggcaaacttgcctcccttgacgagtacatctcacggatgaagtcagggcagaaagacatcttctacatcacgggaagcagcaaagagcagctggagaagtctccattcctcgagaggctaaccaagaagaactacgaggtcatcttcttcaccgaccccgtggacgagtacctgatgcagtacctgatggactacgaggacaagaagttccagaacgtgtccaaggagggactgaagctgggcaaggactcgaagctcaaggagctcaaggagtcgttcaaggagctgactgactggtggaagaaggccctggagagcgagaacgtggactcggtgaagatcagcaaccggctgcacgacaccccctgcgtcgtggtcacctccaagtacgggtggagcgccaacatggagaagatcatgcaggcgcagaccctgtcggactcgagcaagcaggcgtacatgcgcggcaagagggtgctcgagatcaaccccaggcaccccatcatcaaggagctccgcgacaaggtcgcccaggacaacgagagcgaggagctgaagcacacggcgaggctggtgtaccagacggccctgatggagagcgggttcaacctccccgaccccaaggagttcgcgtccagcatctacaagtcggtgcagaagggcctggacctgagccccgacgcgaccgtggaggaggacgaggccgaggagcagccggaggtggaggagaaggagccggagccggagccgtcgtcctacgacaaggacgagctttaggctttcggatttgttttcaagtctagctagctcccgctttactaggaatgtgatgatatcggtgactgcctggttcaagtcacgtgatggttcttgagagacgcccatttttttcccatgcaacgtgatacgggatttttgcctgtctttgtacctactctacaagctttagttcagtgattcagtctaattaattagtggtttgcagttaccttgcaatcttcctaagactgtcttcaacgcttccctctactgcttcccctcgctacttcagcggctacagttgaacgctaaatgtcacaggttctctctacgagcccctctacccggtagcattcttccctctccctcta

SEQ ID NO: 134427 - DNA, 2262 bp, Zea Mays
gctttagaatcagacctcaaggcatcaaatctatgcttatgcagattaagttggacaaagagaagaaaatcctctccattcgggataggggtattggtatgaccaaggaagatcttattaagaaccttggaacgattgctaaatctggcacttcagcttttgtggaaaagatgcagtctggaggtgacctcaatcttattggacagtttggtgttggcttctactctgtgtacttggttgctgactatgttgaagtggtcagcaagcacaatgatgataaacagtatgtgtgggaatcaaaagctgatggatcatttgccatctctgaggatacatggaatgagccccttggccgtggaactgagataagattgcatctgcgagatgaggccaaggagtacttggaagaggataagctaaaggatttggtgaagaagtactctgagttcatcaacttccctatctatttgtggtcgaccaaggaggttgatgttgaagtgccaactgatgaggatgagacaagtgaagaagaggattcaactccagaaactacagaggaagagacagaagaagacgaagagaaagagaaaaagcccaagaccaagacaataaaggagactacttctgagtgggaacttctgaatgatgtgaaggctgtatggcttcgcagcccaaaggaggttaccgatgaagaatactcgaagttttaccattcactagccaaggacttcggtgatgacaagcctatgggttggagccacttcactgccgaaggagatgttgagttcaaagctttgctctttatccccccgaaggctccacatgatctctatgagagttactacaacagtaacaagtcaaacctcaagttgtatgttaggagagttttcatctctgacgaatttgatgatcttcttcccaagtacctgagctttttgaagggtattgttgactcggacacgctgcccctgaacgtgtcacgagaaatgcttcaacaacatagcagtctcaagaccatcaagaagaagctgatccgcaaagcccttgacatgatcaggaaacttgctgaagaagaccctgatgagtacagcaacaaggataagacagatgaagagaaaagcgagatggaggagaagaagggccagtacgccaagttctggaatgagtttggcaaatcaatcaagctgggtatcatcgaagacgcgactaacagaaaccgccttgcgaagcttcttagatttgagagtaccaagtcggatggcaaacttgcctcccttgacgagtacatctcacggatgaagtcagggcagaaagacatcttctacatcacgggaagcagcaaagagcagctggagaagtctccattcctcgagaggctaaccaagaagaactacgaggtcatcttcttcaccgaccccgtggacgagtacctgatgcagtacctgatggactacgaggacaagaagttccagaacgtgtccaaggagggactgaagctgggcaaggactcgaagctcaaggagctcaaggagtcgttcaaggagctgactgactggtggaagaaggccctggagagcgagaacgtggactcggtgaagatcagcaaccggctgcacgacaccccctgcgtcgtggtcacctccaagtacgggtggagcgccaacatggagaagatcatgcaggcgcagaccctgtcggactcgagcaagcaggcgtacatgcgcggcaagagggtgctcgagatcaaccccaggcaccccatcatcaaggagctccgcgacaaggtcgcccaggacaacgagagcgaggagctgaagcacacggcgaggctggtgtaccagacggccctgatggagagcgggttcaacctccccgaccccaaggagttcgcgtccagcatctacaagtcggtgcagaagggcctggacctgagccccgacgcgaccgtggaggaggacgaggccgaggagcagccggaggtggaggagaaggagccggagccggagccgtcgtcctacgacaaggacgagctttaggctttcggatttgttttcaagtctagctagctcccgctttactaggaatgtgatgatatcggtgactgcctggttcaagtcacgtgatggttcttgagagacgcccatttttttcccatgcaacgtgatacgggatttttgcctgtctttgtacctactctacaagctttagttcagtgattcagtctaattaattagtggtttgcagttaccttgcaatcttcct

SEQ ID NO: 134428 - DNA, 761 bp, Zea Mays
tttttttttccaaagaattcagctattctagcaaaacgtggggggagggcgggtgcgagtacgacgaagtcagtctatccaaatccaagccatcaattacatcaaggtccatggccgcgtcacgacccacggcgggggtcttgctgcccaacgccctagccggcgagccgccatggctccggcacaagccccagctccggcgagccaggctccgtcggccaggcggcggaggctcgcagctctggctcctgccgtaagtcgccctcctgaagcccaggtggtccagcgccgcccgctcgcagtccgacagcgggctcgaagccacgcggctgttcacgggcgacgtgttgcgcctcgtctccgtctccgtctccgggtggaggccaggtgccgccttgcgggaccgggacgaggcgtcatgctcgtgcctcgatggcttgccggtcccgtagcctctgctcttcacctgcatcaccaggtggtggaggagcaccaccagctccagcatgtagtgctcggttttcgccttgtcggcgtggtgcagcgtctggatgcggatgacgctgtgcctgtgctggtagcctgatttcttgcccatgtcaagattagcccattcgccaacccatccaaaaccttggtgcgccctggtcgggtcgatgaatcagtagggaaaacaaaaataattgttagcgcatagtactgcagccaagtcagattgtcacagtacgtatactaaaacaagctcaggctaccttattgta

SEQ ID NO: 134429 - DNA, 852 bp, Zea Mays
atgtcgaccgtctcgagcctgcgctcatcccctcgcatctataaaacctcgatcccgctattcccatccaaatcggacacctgtcgcccaacccctattgcagaccgccatggagggagaaggaggaaaccgcggaccatcacggcggttgtcgggggatcacggtgcctcaacggtttgggcctcgaaataacatctagggatgatctccagaccccgtggatgttgtacgcgcgcttgattcgaacaaaggttggccgggacccaggcgctacagcccgcacaacgggaggtggagaagctgcggtggaagtgactcgctcgggggagagggatcgcaagctctccaccctccgggccaaggctgatcgtctcgatagtgaggcaacacgcctccgctcgaggcgcgatgagaatgagcatcgcgtccgtgaggctgccggagtcccgcaacagtttggacctcccagccacgccacctatgacgccgctaccggctccgaggacgagccagaccgagcgcccaagattccggttcatgggagagttaccttcttgcccatcgtgctctactgggtgtacaccgacggctaccagttgatccttcacccgcttgagcagtacaggctccacacactggacgaggaggaggagaaattcgtcagcctctgcaccgttgtatgtggcatactcctacagcatcttgtgcatgtcatccacgtgatgatcttgttcatgttgcctcttgtgatggagaatgatgttattgctcgctattacggacaaggcaaggggattgttgttaaggctatatacgatcgcgaggcaacaccctacaacttctatgtgtag

SEQ ID NO: 134430 - DNA, 408 bp, Zea Mays
atggacattgatgttgttcagctgaagaagatgcaccaagaaaagcagctggacacacttgtcgacaagggcctggagagcaaatatgaccgcattgagctagaggagatggtgcaagtggcgcttctatgtactcagtccttccctggtcacaggaccaagatgtcagaagtggtcaggatgctggagggcgatgggcttgcaaagcagtgggaggcatcacaacacacaaaagagtcacacaaattcaaggtgcccaatttttccttcagtcgctgccactctgacctgatgggcgattcgtcactgctgttgcaagcagtggagctttctggacccagatgcggcctgaacatgtttgcacattatgtggcacacactttctttttactactactttcaggatga

SEQ ID NO: 134431 - DNA, 1694 bp, Zea Mays
caccgagatgcttcaagcttcaagtatcactcactcactcctgccgtcacccctagctgcatcggatggcgatcgtacggacaggataccacgacgaacggaacctacgccggctgcgaacgcgaatctgaatacaacgaggtagatcctcctccgtaaagcgaaagcaaaaaccaaccaaacaagctagctagagctagccaagccgcggcgtgcctccgctccggccggcccgcccctgtcagagcccccaccgccgctgccacctccgccagccgtcaccccaggcgttggatcggggccctctcgatccgcgcccggcgaatccagacggacccgcattggggttggggccccttcgatccggcgcttggtgggggtttggctgggagctccaggctgaggggacggggcggggggacctgatccttcattccgttcggatttcgcttttcccccgtggggtctcgactgccggagggggaggaggacatggatttggcgtcggtcaacgaggagctggccgagatcgacgggcagatcggcgatatcctccgcgtattgcaaaatgggttccagaagctggagaagatcaaggatgccaaccgccgcagcaggcagcttgaagagcttactgataagatgcgagactgcaagagactcatcaaagacttcgagcgagttagcaaagctgaggctgagcatactgatccagcaacagcaaaaatgttgcatgacagaaagcagtcgatgatcaaagaattaaactcctacgttgctctaaagaaacagcaggcaagtgaaaacaagagaatcgatctttttgatgggccaagtgctgaagatggctttggtgaagaaaatgtcctgttagcatcaaatatgacaaaccagcagttaatggatcaaggcaatcaactaatggatgaaactgatcaagctattgcacgatctaagcagactgtccaagaaaccgtcaatgtgggcacagaaactgcagctgctctgaaagcacagacagaacaaatgagcagagttgttaatgagttggattccatccatttctccatcaaaaaggcatctcaattggtgaaagaaatcggtcgacaggttgcaactgatcgatgcatcatggccatgctttttctcattgttgctggagtcatagctataataattgttaagattgtgaacccacacaacaaggacattcgcgacatccctggcttggcaccacccgtcagcaggcggctgttgcgatagaggacaggtgaattgcatacctggtgtaaaaattgatgtggcgcggcgccttggcaagcccatctgtattctacgtcttgtaaaacgctgctccagtcatgtggtatattgctgtaaaacttctcatgggatccactcctactccttggctacacacagtgcgtatatgttcctcctagttcgccttcctgtttttgcaaaactaactctgaacggtgttctgttagaatcatgtgcacacatgatggttgagatgtgtctatgatgttcattgtgacgaacgattcttaaaaatctcatcggctttagttgaattgaacacatggttgagttgagttgaacacatggttgagcataatatatttcttatgatgagtgatcctcaaggaggatcagctttagttgagttgagactaattttgacgcgagtg

SEQ ID NO: 134432 - DNA, 1605 bp, Zea Mays
gaaagcaaaaaccaaccaaacaagctagctagagctagccaagccgcggcgtgcctccgctccggccggcccgcccctgtcagagcccccaccgccgctgccacctccgccagccgtcaccccaggcgttggatcggggccctctcgatccgcgcccggcgaatccagacggacccgcattggggttggggccccttcgatccggcgcttggtgggggtttggctgggagctccaggctgaggggacggggcggggggacctgatccttcattccgttcggatttcgcttttcccccgtggggtctcgactgccggagggggaggaggacatggatttggcgtcggtcaacgaggagctggccgagatcgacgggcagatcggcgatatcctccgcgtattgcaaaatgggttccagaagctggagaagatcaaggatgccaaccgccgcagcaggcagcttgaagagcttactgataagatgcgagactgcaagagactcatcaaagacttcgagcgagttagcaaagctgaggctgagcatactgatccagcaacagcaaaaatgttgcatgacagaaagcagtcgatgatcaaagaattaaactcctacgttgctctaaagaaacagcaggcaagtgaaaacaagagaatcgatctttttgatgggccaagtgctgaagatggctttggtgaagaaaatgtcctgttagcatcaaatatgacaaaccagcagttaatggatcaaggcaatcaactaatggatgaaactgatcaagctattgcacgatctaagcagactgtccaagaaaccgtcaatgtgggcacagaaactgcagctgctctgaaagcacagacagaacaaatgagcagagttgttaatgagttggattccatccatttctccatcaaaaaggcatctcaattggtgaaagaaatcggtcgacaggtaaattcatctaatagtttctttacttcattagccaactatgttcttatctattatcaatttttttaaataggttgcaactgatcgatgcatcatggccatgctttttctcattgttgctggagtcatagctataataattgttaagattgtgaacccacacaacaaggacattcgcgacatccctggcttggcaccacccgtcagcaggcggctgttgcgatagaggacaggtgaattgcatacctggtgtaaaaattgatgtggcgcggcgccttggcaagcccatctgtattctacgtcttgtaaaacgctgctccagtcatgtggtatattgctgtaaaacttctcatgggatccactcctactccttggctacacacagtgcgtatatgttcctcctagttcgccttcctgtttttgcaaaactaactctgaacggtgttctgttagaatcatgtgcacacatgatggttgagatgtgtctatgatgttcattgtgacgaacgattcttaaaaatctcatcggctttagttgaattgaacacatggttgagttgagttgaacacatggttgagcataatatatttcttatgatgagtgatcctcaaggaggatcagctttagttgagttgagactaattttgacgcgagtg

SEQ ID NO: 134433 - DNA, 975 bp, Zea Mays
acttgaatccactactgaagttctcaatattcctcaatgattctaacttctatgaaacaatttgttgtggactctcaagtcttccacaaatttgctgtgcttatgctctctcagtggcagtgtattcacgcttgattgcttgatgctgatctgttgtctattttgtagactgtccaagaaaccgtcaatgtgggcacagaaactgcagctgctctgaaagcacagacagaacaaatgagcagagttgttaatgagttggattccatccatttctccatcaaaaaggcatctcaattggtgaaagaaatcggtcgacaggtaaattcatctaatagtttctttacttcattagccaactatgttcttatctattatcaatttttttaaataggttgcaactgatcgatgcatcatggccatgctttttctcattgttgctggagtcatagctataataattgttaagattgtgaacccacacaacaaggacattcgcgacatccctggcttggcaccacccgtcagcaggcggctgttgcgatagaggacaggtgaattgcatacctggtgtaaaaattgatgtggcgcggcgccttggcaagcccatctgtattctacgtcttgtaaaacgctgctccagtcatgtggtatattgctgtaaaacttctcatgggatccactcctactccttggctacacacagtgcgtatatgttcctcctagttcgccttcctgtttttgcaaaactaactctgaacggtgttctgttagaatcatgtgcacacatgatggttgagatgtgtctatgatgttcattgtgacgaacgattcttaaaaatctcatcggctttagttgaattgaacacatggttgagttgagttgaacacatggttgagcataatatatttcttatgatgagtgatcctcaaggaggatcagctttagttgagttgagactaattttgacgcgagtg

SEQ ID NO: 134434 - DNA, 253 bp, Zea Mays
ttttttttattaagtgctttcttgttaaaaaccttttttttttattttaatatttatctttttttacccacttccttaatattaaattcagtgagtttttttggttttttttttttttttttttttttattttttttttttttttttttttttttttttttttttttttttttttttttttttttttttttttttattttttttctttttttttttttttttttttttatttttttttttttttttttttttt

SEQ ID NO: 134435 - DNA, 123 bp, Zea Mays
gttttaagtctaaccgtaataagatacgccggaaacgaaaataattattaccgctatgaatcattatccctgtcatttatgttaccgtccataaaccaaacaacaccttattgttgtcttggc

SEQ ID NO: 134436 - DNA, 91 bp, Zea Mays
tcttgttctagaaatgttgactgagttggcaagaagggagaagacaaccaacatcaagccagatcatgatattgatgtctatatgaaggtg

SEQ ID NO: 134437 - DNA, 393 bp, Zea Mays
atgggtgttcaccggctgaagaagcagcactcgtccgcgccgtcgctgggcggcgggtccgggtcgtcgatgccgcccaaggggtgtatggcggtgcgcgtggtggggcccgcgggcggcggccataaggaggaggaggaggaggaggagcggttcgtggtccccgtggggtacctgacgcacccgctcttcgtggcgctgctcaaggcggcggaggaggagtacggcttcgagcagaagggcgccatcaccatcccctgcggcgtcgaccacttccgccgcgtccagggcatcatccaccaccaccgcgtctccggcggcggcggcggcggcggtggaggaggacaccacaacagcaaccacttccacatcgccggctgcttccgcgcctga

SEQ ID NO: 134438 - DNA, 222 bp, Zea Mays
gttagggtttcttaacaaggagcagcggcagcggcgaggtctatggcgtcgacggcggggtacctggctcggcgggcggcgcagaaggagcgggtgcgcctgctctaccgcagggcgctcaaggacacgctcaagtgctcaactgggccatccaccgccacatcttctaccaggacgcgtcggatctccaggacaagttcaaggcctaccgccacgtggtaa

SEQ ID NO: 134439 - DNA, 1276 bp, Zea Mays
ccccaagtcgcctccgcgcctccgcatataggcagcgtcgcccctctccgctttcccgaattagcgccaccgccacctccgcctccgatcccgcctctcccgggaacgaagccgagccgcccgaatcgccctccacccacccatatagccgggccccggaccgctccccaccggctcgcgcccccgacccctccgccgtccgccgccgcatcgcgtgggagggggaggaggaggaggaggaggaggccatggccgctgccgtagcttgcaggcgcgcggcgctcctgcacgggcaccagcagtggccgcagcggtgggcggccgcgccctgcccccgctccatctcgcagctcgtcaagaccaacggccgccgcgccttcctcgtagacaccctcgccctggtcaggaagctggagtcgcagggcgtgcccaccaagcaggcggaggcgatcacctccgccatcacggaggtcctcaacgacagcctcgagagcatctccgagtccttcgtctccaaggccgagatgcagaagagtgagatgctgcaggagtccaatatctccaagttcaagtcccaagtgcagagctcgcaggaaaaccatttctctttactacagcgggagactgagaaacttcgcggagatattgataagatgaggagtgaactgaagtatgagatcgacaaggtcaccgcaggacagcgattggatctgaatcttgaaagagggcgcatacgtgatgagcttgccaagcagaatgaggaaaccactgagcttaccacaaagcttgacaaggaaatccactcactgaaggcccagttggaggcagcaaagtacgatgtcatcaagtactgcataggtaccattgtttcgatctcagccgtcggcctcgccgtcctccgcatcgtgatgtgaaggcagcaaagcaaatacgttctttggttttacccatattcgtcgcccgtccgtggaaacccgcaagaagagaataggttctaattctgttcctagtttttaaaggggacaaaacgtgctcaggggagggggacacttggtagtagggagatgttgctcaaacttgtaaaaatagattgcccgtggaagaaatgcatccgaaatgattctttacctgtgctgaagcgtgcctggtctccagagctgctgaagccactgttactgtgggggatcctgaactgtgttagcctcgtcctgtgttggagccagcaatttgggctctgccatctggccgttatcagttctgcccactcgtttgattt

SEQ ID NO: 134440 - DNA, 126 bp, Zea Mays
aatcgcgttactttatcggatgccaaaatggattaaaggtatgtttggatctagaagctaaaacaaaaatggctaaaatttagtcaataaagatctaaacagaaagagttaaaaataaataaaata

SEQ ID NO: 134441 - DNA, 1235 bp, Zea Mays
caagatctcgcctctccccgtcatggcggataatttaatcccaccacccccatgctctgttacattattgcctcttcctctcgccgcacccatcccaccatgtcctcttctctgttcctctccagcccccttttcaacctttgacgctgtagcttgagagcgagcttagtgcctaccatattctcctcctgagcgactgagcgctggtctccgataggctcgccatgcaggtgctctgcgacgtctgcggcggcgcgccggccgccgtgctcttctgcactgacgaggccgcgctctgctccgcctgcgaccgccgcgtccaccgcgccgacaagcgccgccgcatcccgctcgtccagccctgcggcgacgactccgccgccgccgccgccgcgccgctctgcgacgtctgcaaggagcggaggggcctcgtgttctgcgtggaggaccgcgccatcctgtgccccgactgcgacgaccccatccacagcgccaacgacctcaccgccaagcacacccgcttcctcctcgtcggggccaagctctccgccgcgctcgtcgaccaggcgcccccctcccctgacgacgacgacgacgacgtcgccgagcccgacgctgtccccgccgcctgcgcggccaaggcctcgtctcttgagtccggcggcggcagcagcatctccgactacctcaccaacatctgcccgggctggcgcgtcgacgatcttctcttggacgactcgtcgttctcagcgccatctaagaccggctacagcgacggccacgatcaggtgccgtccgtggatgccgacctcttcgacgtggtggccagcggccggccaggcaagcgcgtcggcggcgcagcgctgggcttcgacaaggccccggcctccgttgtggtcgtcccgacgcaggggtgcgtgacggagaggacttggaacagcgacagcgacgtgttcgcggtgccggagctcccgcagccgccgccggccaagaaggcgcggccggcgccggcgccaactttctggtgcttctgagctgtactgtatcagtccggcccggccggacagtgtgtgtacttgtcgtgacttctgtgaccgctgtgtgtgagcttgcttacataatactcaccgctagtggttagcagtgctcaatcccaattaattaggtttgctgtgtcgtgtatcactcacagatcatgaggtggcaaaaaaaagcttcgaattaccgatctcaga

SEQ ID NO: 134442 - DNA, 852 bp, Zea Mays
atggcctccacgaagaggctgaggctgcgcgccggcggcacatacagcgtcagcggggtcgccgagaaggccagcgccatcaggagttgcagcatcttggacgaacgcatgcctcctggtctaagaatgtatacatggtttttattgtgctttccttcacaaagtcgccactttggactgaccaggtggcaggcggcggcgcttgcggcgctggccggctgggtgtgggcggcctccttctacgacctcacgcgccgggcgcgcgcgctcgtccagccgtgggtcacgcgccaggtgcacgccgagacgccaaccatcctcaggttccagaagttggagcacaagatgctggacaatttcttctctgtgctgtcatgtgttgtctccgtgcccttctacacgggattcctccctctcctgttctggagtggacacggtaggctggctgggcagatgaccctcctcatggctttctgtgactacctcagcaactctgtcaaggatatggtgtcagcccctcggccatgctcttcgcccattagaagagtgacagctacagaagatgagagggaaaatgccatggaatatgggctaccgtcatcgcatgctctcaacactgtttgtttgacgggatatttgttacactatgtcctgacatacggagaacatggcagtcttatagttgctgcgggtttatctctagctctctactccaaatttgcttcatgtccagccaagtatgtcacatttccccttttttttcttttgcaaatattgctacatggtgatcttttgaatttttgcacgtgagaacacgcagtgatatgaacagattatgctacgagagaagag

SEQ ID NO: 134443 - DNA, 2975 bp, Zea Mays
tcgcaaccaaaccctcgcatcgtacagcagccgcaccaaatctcaccgccacctccgggtccggggactcaagcgccccgccgccgccgctgccggggaccacgaaaggacgcgccgaccccggatctgcgactcgccggtctccgaacgcacgctactgaacggacgcggggcttggctgctcgatcgcaccgcccgggaaaaaaagggagagcccgccggatttaaccggacacaccgaacgcgcagctcctccgggccaggggccggacagaatccatgcagccgaggtcccgcattcggggccgcgacccgccgccgccgccgccgccaggaggacgctaccgtcgccgatccccgccccctccatcaccgcgccaccagcgccgcccacgtgatccgccccctccacagcggaagaggcgcagctccgagctgcccccgccacggcgatacgaggaggatcctctccttaacggcttcgcccccgctgccgagaggcgttcacgcggcgacatcctgctcgaggccggccgtctggccgctcactacttggttgccaaaggcctcctctccgagcaccttctcctggcaagggaggacccaaatcacaatcccatttaccgccctgagccccccgctcccgctcccgctcctcctccgactctagctccctctagttacgggaggaagagagacgaggacgacggcccgaggtggcggcggagtggaagtggagccgaggaccaggggcgtggctcaaggtgggacgacgacagggaagccaagaggtcggggtgggacaggaggagccacagctttgatggaaggcgtaaatgcaacgatgacggtggcggtgatgctgaccgtagcggccgccggacacgcgactacgatgagtcgaagagaccaccgatgtcaaggtcctattcgcataacgatcgttgggcttcagctgatgccagagtagatcgaaggaggagaagtaggagcaggaccaggagctactacagtggcagcaggagagatccagatttgctagcaggcacccgtgatttggatcgcaccaaggtgccagactctggcattgttcctgctgctggtggtgatggaggcgtgcacgatgcggatgccgatggaacacgaaagcagctgaaggttcctagttcaatgttggtttcggagatgaatgacagtgctgtcgaagctgcgcctatagaagaggatcatgctcaagacatgtctgaaggtgaggacggtgagtttgcagaagagatttctgaagacgaggatggtgagtttgcagcctctgatttgaatgatgaagatggtgatgaaatggatgacacccaaagacaaccgtctcacatgcatgttcatgcatctgaatctatcgaggaacctgtccatagacagtcccagctcagcaatgctgaagagggaatggaaactggcattgcacacgtggatgcatatatggtagagccattggcagagaacaatgttttctctgaaacaaggtatgaaatggaggctccacaaaatggagctgaaactgctgttgttgatctttacagagatgcagaagagcaaccattgacagagaataatgattgctccgaagcagagaatgagatgaacaagagtgagtttgaaactggtgttggcaatcttgatagagatgaacaagagcaactattggcagagaataataatggctctgaagtaaggtatgacatggaggctccacaaagtgaggttgaaactggtgttggcagtcttaatagagatgaccaagagcagctgttgacagtgactgatggttactctgaattaagatatgaaacagggactccacaaactgaagttgaaactgttattgatgatatcagtagggatgagcaagagctgccagcttggtacaaaatttttgatctcaacgtcattgaaactccattgggctgtgaggtttccgagatttcttgtggtcatccagcagatggtctttgtgattctgtgcctgattcagttggtctggtgaaccaagaagcaaacaatgatacctctgaaattcaaggtcaagatggtcatgcaggggccaatcaagtgttagaagatgagtctgatttgaatagctatgatctgaacaatgaagctgatgaagatgcacaggatgatactttagaaaatcaagttcaagacgagaatgtagaggataatcacttactggaggatgggcatgatttgacgaggtatgatgtgaacaatgaggctggtgagcatgcacatgataaccacctggtgaaaaatgcggaaatacttctaaatcatattatggttgcatgtatatcagataattgccatatgaacaatgagaaaatgcttctaaagcaaaatgtggatgagcaacagatggagaacgagcagatgcttatagatcaggtcactagtgttcaagttttggatagtcaccatgtgcacgatgaacagttgctggtaggtcatgctgcagatgatcatcaccaaatggaaccaaatcccatggctttttctttgggcgttcatgatctggataactactatttgagtagcaagcaaatacttctgtataatgatgcaggaggtatacaccatttgaaggatgggcaaattattttagatgaggctgcagatggacaagctagagttcacaatatgggccatggacgaacgattcctggaattgatctggaagatgattatgcacaggtgtctgccatcagaaatacaggagaatgtctagaatctgcgtaagtttcttttagattcttttctatggtagtttcgagggggagaggaaaatccatgacacctggacatgtttgctgtactgtacagaagtgatacctcgcacgaatacacggataatgttctacaagaacatatgtgttctcaagactagcaaacctcaagttttggtgacaatcctaagacta

SEQ ID NO: 134444 - DNA, 2975 bp, Zea Mays
atgcagccgaggtcccgcattcggggccgcgacccgccgccgccgccgccgccaggaggacgctaccgtcgccgatccccgccccctccatcaccgcgccaccagcgccgcccacgtgatccgccccctccacagcggaagaggcgcagctccgagctgcccccgccacggcgatacgaggaggatcctctccttaacggcttcgcccccgctgccgagaggcgttcacgcggcgacatcctgctcgaggccggccgtctggccgctcactacttggttgccaaaggcctcctctccgagcaccttctcctggcaagggaggacccaaatcacaatcccatttaccgccctgagccccccgctcccgctcccgctcctcctccgactctagctccctctagttacgggaggaagagagacgaggacgacggcccgaggtggcggcggagtggaagtggagccgaggaccaggggcgtggctcaaggtgggacgacgacagggaagccaagaggtcggggtgggacaggaggagccacagctttgatggaaggcgtaaatgcaacgatgacggtggcggtgatgctgaccgtagcggccgccggacacgcgactacgatgagtcgaagagaccaccgatgtcaaggtcctattcgcataacgatcgttgggcttcagctgatgccagagtagatcgaaggaggagaagtaggagcaggaccaggagctactacagtggcagcaggagagatccagatttgctagcaggcacccgtgatttggatcgcaccaaggtgccagactctggcattgttcctgctgctggtggtgatggaggcgtgcacgatgcggatgccgatggaacacgaaagcagctgaaggttcctagttcaatgttggtttcggagatgaatgacagtgctgtcgaagctgcgcctatagaagaggatcatgctcaagacatgtctgaaggtgaggacggtgagtttgcagaagagatttctgaagacgaggatggtgagtttgcagcctctgatttgaatgatgaagatggtgatgaaatggatgacacccaaagacaaccgtctcacatgcatgttcatgcatctgaatctatcgaggaacctgtccatagacagtcccagctcagcaatgctgaagagggaatggaaactggcattgcacacgtggatgcatatatggtagagccattggcagagaacaatgttttctctgaaacaaggtatgaaatggaggctccacaaaatggagctgaaactgctgttgttgatctttacagagatgcagaagagcaaccattgacagagaataatgattgctccgaagcagagaatgagatgaacaagagtgagtttgaaactggtgttggcaatcttgatagagatgaacaagagcaactattggcagagaataataatggctctgaagtaaggtatgacatggaggctccacaaagtgaggttgaaactggtgttggcagtcttaatagagatgaccaagagcagctgttgacagtgactgatggttactctgaattaagatatgaaacagggactccacaaactgaagttgaaactgttattgatgatatcagtagggatgagcaagagctgccagcttggtacaaaatttttgatctcaacgtcattgaaactccattgggctgtgaggtttccgagatttcttgtggtcatccagcagatggtctttgtgattctgtgcctgattcagttggtctggtgaaccaagaagcaaacaatgatacctctgaaattcaaggtcaagatggtcatgcaggggccaatcaagtgttagaagatgagtctgatttgaatagctatgatctgaacaatgaagctgatgaagatgcacaggatgatactttagaaaatcaagttcaagacgagaatgtagaggataatcacttactggaggatgggcatgatttgacgaggtatgatgtgaacaatgaggctggtgagcatgcacatgataaccacctggtgaaaaatgcggaaatacttctaaatcatattatggttgcatgtatatcagataattgccatatgaacaatgagaaaatgcttctaaagcaaaatgtggatgagcaacagatggagaacgagcagatgcttatagatcaggtcactagtgttcaagttttggatagtcaccatgtgcacgatgaacagttgctggtaggtcatgctgcagatgatcatcaccaaatggaaccaaatcccatggctttttctttgggcgttcatgatctggataactactatttgagtagcaagcaaatacttctgtataatgatgcaggaggtatacaccatttgaaggatgggcaaattattttagatgaggctgcagatggacaagctagagttcacaatatgggccatggacgaacgattcctggaattgatctggaagatgattatgcacaggtgtctgccatcagaaatacaggagaatgtctagaatctgcaagtgatacctcgcacgaatacacggataatgttctacaagaacatatgtgttctcaagactagcaaacctcaagttttggtgacaatcctaagactaacacacaagcagcttcttcttcaactgtcaccagattttcaaaactggtgtactggaaatgatgctgtgaaggcacaggtaagagcgctattttggttagacatgtgtccttacttcttcttggaccgagaaaatcagtttcttttataagagcatcgagtaaagcattatgattggcaactatattgttagtagatcacttgctgtctaatgctaggagttcgattttgatcttgaacacttcatatgttccaaggcaaaattcatgcccatgtatattgtcgtttgttattacttgcaattactgtcgctgttcttcttgactgcacacggtaacattgcattaatctatgtgatccatttcttc

SEQ ID NO: 134445 - DNA, 2984 bp, Zea Mays
atgcagccgaggtcccgcattcggggccgcgacccgccgccgccgccgccgccaggaggacgctaccgtcgccgatccccgccccctccatcaccgcgccaccagcgccgcccacgtgatccgccccctccacagcggaagaggcgcagctccgagctgcccccgccacggcgatacgaggaggatcctctccttaacggcttcgcccccgctgccgagaggcgttcacgcggcgacatcctgctcgaggccggccgtctggccgctcactacttggttgccaaaggcctcctctccgagcaccttctcctggcaagggaggacccaaatcacaatcccatttaccgccctgagccccccgctcccgctcccgctcctcctccgactctagctccctctagttacgggaggaagagagacgaggacgacggcccgaggtggcggcggagtggaagtggagccgaggaccaggggcgtggctcaaggtgggacgacgacagggaagccaagaggtcggggtgggacaggaggagccacagctttgatggaaggcgtaaatgcaacgatgacggtggcggtgatgctgaccgtagcggccgccggacacgcgactacgatgagtcgaagagaccaccgatgtcaaggtcctattcgcataacgatcgttgggcttcagctgatgccagagtagatcgaaggaggagaagtaggagcaggaccaggagctactacagtggcagcaggagagatccagatttgctagcaggcacccgtgatttggatcgcaccaaggtgccagactctggcattgttcctgctgctggtggtgatggaggcgtgcacgatgcggatgccgatggaacacgaaagcagctgaaggttcctagttcaatgttggtttcggagatgaatgacagtgctgtcgaagctgcgcctatagaagaggatcatgctcaagacatgtctgaaggtgaggacggtgagtttgcagaagagatttctgaagacgaggatggtgagtttgcagcctctgatttgaatgatgaagatggtgatgaaatggatgacacccaaagacaaccgtctcacatgcatgttcatgcatctgaatctatcgaggaacctgtccatagacagtcccagctcagcaatgctgaagagggaatggaaactggcattgcacacgtggatgcatatatggtagagccattggcagagaacaatgttttctctgaaacaaggtatgaaatggaggctccacaaaatggagctgaaactgctgttgttgatctttacagagatgcagaagagcaaccattgacagagaataatgattgctccgaagcagagaatgagatgaacaagagtgagtttgaaactggtgttggcaatcttgatagagatgaacaagagcaactattggcagagaataataatggctctgaagtaaggtatgacatggaggctccacaaagtgaggttgaaactggtgttggcagtcttaatagagatgaccaagagcagctgttgacagtgactgatggttactctgaattaagatatgaaacagggactccacaaactgaagttgaaactgttattgatgatatcagtagggatgagcaagagctgccagcttggtacaaaatttttgatctcaacgtcattgaaactccattgggctgtgaggtttccgagatttcttgtggtcatccagcagatggtctttgtgattctgtgcctgattcagttggtctggtgaaccaagaagcaaacaatgatacctctgaaattcaaggtcaagatggtcatgcaggggccaatcaagtgttagaagatgagtctgatttgaatagctatgatctgaacaatgaagctgatgaagatgcacaggatgatactttagaaaatcaagttcaagacgagaatgtagaggataatcacttactggaggatgggcatgatttgacgaggtatgatgtgaacaatgaggctggtgagcatgcacatgataaccacctggtgaaaaatgcggaaatacttctaaatcatattatggttgcatgtatatcagataattgccatatgaacaatgagaaaatgcttctaaagcaaaatgtggatgagcaacagatggagaacgagcagatgcttatagatcaggtcactagtgttcaagttttggatagtcaccatgtgcacgatgaacagttgctggtaggtcatgctgcagatgatcatcaccaaatggaaccaaatcccatggctttttctttgggcgttcatgatctggataactactatttgagtagcaagcaaatacttctgtataatgatgcaggaggtatacaccatttgaaggatgggcaaattattttagatgaggctgcagatggacaagctagagttcacaatatgggccatggacgaacgattcctggaattgatctggaagatgattatgcacaggtgtctgccatcagaaatacaggagaatgtctagaatctgcaagtgatacctcgcacgaatacacggataatgttctacaagaacatatgtgttctcaagactagcaaacctcaagttttggtgacaatcctaagactaacacacaagcagcttcttcttcaactgtcaccagattttcaaaactggtgtactggaaatgatgctgtgaaggcacaggtgattcccatttctcagtgatgatgtgttgtatattggattcaacaatatgccattagaacttgtgaatgtctgggacctgccatcctctgagcttgggaaatccttgtgagctctggcaccctgttgtctgtgcattcagatcctaacacaccggaccatgggaggtctgcaccggaccgatcgctggagctagttagtcgactgagcttttcattgacaagtcggtttagtgacacttctgccttcccgagatatagctgcgatgtcagtatgtctcagtagctgaatatgtcat

SEQ ID NO: 134446 - DNA, 785 bp, Zea Mays
gagacaacggcgtagatgtatttattttccaaacaagtaatggtggatgggaatgtactcatgagaactataatgtagtggccacaaaccccccatgctagttgtgatgagctttttagtccaaagagtcgcacttctgcattggaatcttacatgtagcatttcaatacacatacaagcacctgtaaatagcaaaggcatggaatttgttctgtaactgaagaaccatgtttatccggaaacagcaaataatggatttatggtgtttttagatgcctgaactccgcatgcttcgataatcgacacatagcatttgactgtgcagtgaaccctgggctatatatctaagtgatgaaaaaatgctgttcattactggatgaacatacatattaacgtgtttccgctatgatataaactggaatctgtttctgaaacgaagtaaccgaatacttgaatgtttattggtttgcacccattagtttgtctatatgttcctgcatgctcaatgactggttcgctagttaatgaacaaaggctctcttttttcttcttggatatctgagaatatgacagtttacttacgtgtacgtggtaactgcattttctgcagcgttgctttccccatcaacaccacttaataacttgtcttcctttatgtttcctcagaacttgtgaatgtctgggacctgccatcctctgagcttgggaaatccttgtgagctctggcaccctgttgtctgtgcattcagatcctaacacaccggaccatgggaggtctgcaccgg

SEQ ID NO: 134447 - DNA, 433 bp, Zea Mays
aaagaagatccctcagcccagctcggatcctctgcaagctcgctgtagagcttcgcttctccaatcgtcacatcctcccggcctcctgctcgatgggcttagcttcgagctcgcccagctcggccgtccttcaagtttcgcccagcccagtcgcgcgtctgctctgcttgccgacatgcgttcctctctccggtgccgcgtgcgcccttgatttcccatgtcgagcagctcgctggctctctgattgttccagctcgcggcggttctccctgccgcgctcggtcttcgtctctgtcgcgcgcgcgaattttcttcgcttggccttaattctcatcgcgtcgtcgactccgccgttccaataattttgccgcatcatccttcaaatccgagtcctcatccataggatcgtcgttgacctcacaacttcagctcg

SEQ ID NO: 134448 - DNA, 1449 bp, Zea Mays
acggcacccacaatacggcacgcgggcgggcgggcgggcacggtgccccacgcctttcacggatcgggcagctgtccccgtccacgccgcgcaccgcgccccgtcctcgccaccccgaaatgcacacgcacacgccttgtccttgcttgcttccttggcaccaccgcctcccctcctctccttattaccaccacctagctagcagcggcagcggcagcaccggcctgttgtgctgctcgctcagacagctctgctagctgcatcctcctaactctccaggtctctctctcctctcccaactcccaagtcccatccggatcgagacgctggaggcggagcgcccccccgggacggcggcggcgacgatggggcgcggcaagatcgagatcaagcggatcgagaacgccaccaaccgccaggtgacctactccaagcgccggacggggatcatgaagaaggcgcgcgagctcaccgtgctctgcgacgcccaggtcgccatcatcatgttctcctccaccggcaagtaccacgagttctgcagccccggaaccgacatcaagaccatctttgaccggtaccagcaggccatcgggaccagcctatggatcgagcagtatgagaatatgcagcgcacgctgagccatctcaaggacatcaatcgtggtctgcgcacagagattaggcaaaggatgggcgaggatctggacagtctggacttcgacgagctgcgcggcctcgagcaaaacgtcgacgcggctctcaaggaggttcgccataggaagtaccatgtgatcagcacgcagactgatacctacaagaaaaaggtgaagcactcgcacgaggcgtacaagaacctgcagcaggagctaggcatgcgggaggacccggcgttcgggtacgtggacaacacgggcgccggcgtcgcctgggacggcgcggcggcggcgctgggcggcgccccgccggacatgtacgccttccgcgtggtgcccagccagcccaacctgcacggcatggcctacggcttccacgacctccgcctgggctagcgcatccatcaccatgctgggtggtgctgctcgatcctactgcatggcaatgcaagctggttggttagttcgctcatgcatcgtccgtcaacaaagcaagtaagcaatgcaatgcaaccgaggtactgtaatagccaataaaatctactgcatactgcaaacccaattactggtagcttagctaccgcgtgtgtacgaatcaaccgattaattaccgcgcccttagcttgcatgtcgtcgtcgtctgtgcttttggcgttcgtagacatgtgtgtattgtatgcatgggtcctgttcatctgcatccatgcatgttgtttatgattgtaattgttgtgtgaaatggctgtactttgttatgatcacgtgaaattatatctacattcgtgagacttaacca

SEQ ID NO: 134449 - DNA, 880 bp, Zea Mays
ctaaagctctaaacgattttccatgctttattggttttgatctctctgcagaatatgcagcgcacgctgagccatctcaaggacatcaatcgtggtctgcgcacagagattaggcaaaggatgggcgaggatctggacagtctggacttcgacgagctgcgcggcctcgagcaaaacgtcgacgcggctctcaaggaggttcgccataggaagtaccatgtgatcagcacgcagactgatacctacaagaaaaaggtgaagcactcgcacgaggcgtacaagaacctgcagcaggagctaggcatgcgggaggacccggcgttcgggtacgtggacaacacgggcgccggcgtcgcctgggacggcgcggcggcggcgctgggcggcgccccgccggacatgtacgccttccgcgtggtgcccagccagcccaacctgcacggcatggcctacggcttccacgacctccgcctgggctagcgcatccatcaccatgctgggtggtgctgctcgatcctactgcatggcaatgcaagctggttggttagttcgctcatgcatcgtccgtcaacaaagcaagtaagcaatgcaatgcaaccgaggtactgtaatagccaataaaatctactgcatactgcaaacccaattactggtagcttagctaccgcgtgtgtacgaatcaaccgattaattaccgcgcccttagcttgcatgtcgtcgtcgtctgtgcttttggcgttcgtagacatgtgtgtattgtatgcatgggtcctgttcatctgcatccatgcatgttgtttatgattgtaattgttgtgtgaaatggctgtactttgttatgatcacgtgaaattatatctacattcgtgagacttaacca

SEQ ID NO: 134450 - DNA, 522 bp, Zea Mays
atgttcctacccgtggcccagcgccgcctaccacaagtccgtcgcctaccgtgtcggttccactcgctggtgctccagctcgacgacgacgtcgccgacctgcggacgctggtgggccgcctggcgtcgcgggcctccatggaggccgtggccgaggccgcgacgcggctggaccgcgtgctcgtgtcgctctccggcctgctggaccacccgcaggcgcaggatccgctgcgccgcctcagcccgtccccgttcgcggagcggatgacttcctctgcctcgccgacgcgcacggcggcttccgcgacgccctggtcgcgctcgccgcactccaggccgaggcccgcgccgcgctgcgcagggaggagccggcccgcctcgcgtcggctgcgcgcgcgctgcgccggtgttgttgcttgcctgctcttctactttgatatgcctgcccgttttcccttttttttctacgcgtgtcagctccagaagaacatcgcattcggcgttaccattagattacaataa

SEQ ID NO: 134451 - DNA, 1916 bp, Zea Mays
acggcccacaacgcccagaaataaaaaggaaaaatccgggagaggataacaaaaaagaaaaaaaccacaaagagattcctctcaccaccaccaaccctagacgatcctcctccgccatgatgcgggacggcgtgcctccgtcggtggccggctccggcggcgcggcgggcggcgacgggcccaggcgatgctcgcagtgcgggcaccacgggcacaacgcgcgaacctgcacggcgcggcccgtcaagctcttcggcgtgcgcatcggggacaagcccatccggaagagcgccagcatggggaacatcgcgcacctcgccgcggagggcagcggcggcagggaggaagggtacggctccgacggggagcgcccgcacaagaagcgaggtgaggcatggactgaagaggagcacaagaagtttctgcttgggttgaataagctagggaaaggcgattggcgtggtatatcccgtaaatatgttgtttcaaggacacctactcaagtggctagccatgcgcaaaagtatttcaatcgccaaacaaatgtgcatagaagaaagagaagatcaagcctattcgatatggtgattgatgacccgtctgatcaacttccgctctcgcgttcatcttcacaagaaatggagcagcaacatttagatgatccacagcctgttgcagccctgcctgcacctgtggtctctccagctactgtggtacctcctgtgcctgtggaagtgtctgcttcagttccatcgccagttcaggtcccagttccagtttcagccccagtgatgacatctcagcctatggaacaggactcagataccacaagttcaattgctggagaggcaggaacggtgatgccaggagccatgcccccctatctttatccaatgatgattcctcctccatactaccatactgcttttgtaccaatgccctgctacggttatgttcctttttactgtgagccacaaggtgctgcacaggctccgcatgaggttgtcaagccagtggctgttcattcaacgcctccactgaatgccaaagacctttacaacatgtctgaattgagcctgaagggcgactcgaatgcaaacggtggtgtgcctgcttcccccttgcctccgaagccgatcggtagaccagagaggcaatctgctttccatggcaaaggacctacacctaccggtggctcgtcaggtggactgattcctgcagtcaagtgaattcgattatgctcctaaacatgccttcatgtgtatgtaatactagaaatagccaaatcgtaatagccgcctgtgctgctaaaatggtggtgtgttttctagcaaaatatctatactgctcattttagccttcaccagtttggaagtcatgatccgagggtaaatatattgttagcttgttgtttttgcaatagtcttctttttttccccatcaatttgccccaattttcttcatcaatccttaaagttatcaattattatttgttttgccttctgttctcatcaatttgctccggttttcatctacccccaacattatcaatcgtgtatcatttcctcgctttctttctgcacataattttgttgaattctttgtagttggcacttgttacaattagttactagtcagtagctttgttcttgaaagaacttaccattgcacatgttgtgtatcccttgattttctaacacctgaatgtacatattgtttcttttgcaatggctactaggaacccaatcttcctttactaatcagatgacaataccatagtgcaaagcataacaacgtcccaattaatctactattgagtgtagacaatttgtctcgctttgctgtacattacacacaactgctacttgattttgtgctcctggtgtctccaattccccaattgtctacaaaattgg

SEQ ID NO: 134452 - DNA, 314 bp, Zea Mays
aggtgttgactgttgacttgatggatcagattatggattttcctgttgacccaatcatggcagctaaggcctataagtataaagcagaaatacttcttaaggaatacttgctagcagattcatatgttctatacacttctgtgctcgcggggcttctgatgtgcaagttgtcgtatgacttcacacacataatcagttctgtctacttcaaaggttatgcctctcttacaaagatgaaaaaaattgaatggaacaacagaggaatgtccactgtccatgcaatattcattacaatgatgtcagtatacctaggc

SEQ ID NO: 134453 - DNA, 2575 bp, Zea Mays
ccacctttctcccactgcctcgtattctattcccctccctcgccatctccgccgtcgttgccttctccaatccactagtcgacaacgcacgcgcgcaccttctcccgcggcggcgacccccgcggcgtcgtcctagggttaggattcaggcgacttccctcccttccgtgtcgcggcgaacgcgtgggagataatacgccctatgtcgtctgacccttcgcgccacctcccgtcgccggtggctccgccggacgcggcggaggtggatacccattccgccgagccgccagaggtgatgcaccggacgagagccgtcgacttccttggacgacgcacgcccatcgtctaccagaacgacaacgggccctgcccgctcctcgccatctgtaacgtgctgctgctgaagaatgtgatcagcatgaaccctgacgcggaggaggtgtcgcagcagaggttgctctcgctcgtggcggagcgcctcatcgatccaaacatcgctggacaggtcaaggatgaggagtatgttaacaaccgggagcagaacatcgcggatgcgattgatcttctcccgtgcctcacgacaggcattgatgtgaacgtgatgttcaggaagattgatgacttcgagttcacccgagaacgtgctatatttgatcttctggatatcccgctatatcatggatggattgtggaccctcaggatactgaaactgctactgctattggatcgaagtcctacaatgctcttgcttccggacttgttgaattcaagtcaggtaaaccaacagaagaaaataaacctgtggaggaagaaactgttgattttgctgccgcaacagctgcagctttaaagattccgtctcccagtgtttctcttgggagatcatttgatgaacatagtctctcaaactcagttgaaccacataaaaggcgaggtgaccttgaggaagaagaggaattgatgagggtcctcacattgtccaaaggagaaagtggggatgcagttgatggagaagtttctcttgacacctcacatagtcattcattgtccaacatggatacaccacaaactgagaatcttcagtcagaaacacctgagttagtaggggcagcaaaagaagaggaacatggtaatcacactgtgagtgatgatggctccatcctaccagtcataaatggtgttgttaatggtagtgaagctgtgaccaaagaatctcaaaaaactttgacatctaaagaaccagaggctagtggaataaagaatatgttaccaggggaccttaatatactcgttcaatcttcagaatgtactcccaattgtcagtctcatgaatcctttgctactagtgacccccagcctgctgttcctactcttgttgaaggtggtaaagaaaacaatagagaacagttcgatgcacaaattcatggccaatctaatgatactgaggttgcttgtgactcgacgactgcaacttgtgaagctgttccaggtcatgctaaaacagaactggatgtgaaaagtgattctttagaaaattctgagcctctacctttaagcattcaggaatatgaaccaatataccaaggtgaagagcacatacttggcaccacaaatatggtgtatgaaaatcaagaaccagtgtatgagggggaggtggttcttgctaagcagcttgacaagatggaggaaagcagtccttccgtggatgacaaggccacagaacatcattgggagttgatcgataattttctgtggtccactgctaaccagctgactgtctatggtctcttctgcttacaagaggaacttaaggaaaatgagctttgtgtcttcttccggaataaccacttcaacactatgttcaagtacaacggaagtctatatctcctagcaactgatcaaggttttataagccaaactgatttggtatggcagaggttggatgaggtgaatggagatgggggttttcttactagcaacttcacaccatttaaggctgaaactccaagaaatgattcatggaatgaacagcaagctatgacgagtactgctgattatcttgctcaatttgacaactccacttctggaaactctgatctggagctagctatagcacttcaacagcaagagtttgagcggcaaccacaaaggttccaagctccaccaccacagcagcagcaacaacaaccaccacctcagacgcagcaccaaccagctcaatctggccgaccaggacttgttgttggtccaaggatgtccaatgtgccgcctccgtcaagaagtgaatccaagaaagagaggtgcatcgtgatgtaaaaataccttcaacagaaaagtagtagaaaaaaagaagagataagagacgcatggcattatactgtaaagaaatggtttcttctgcgtttagtcacctcgagccatcccccatttgagcttctttggttttacgtcgcctgatgtatgtaaataacttcaataaataaagtgtaggaacagatgctgtcaaagtgatggccctcatgcaatgtgattttatttgtcgctcttgcaattgattgattctgttcgttcatc

SEQ ID NO: 134454 - DNA, 773 bp, Zea Mays
aaaacgagacaaagttcacgatccagacccgatccaagcgtgtctggcgatccagcaactcacccgaatgagaagaggatgcagcgggcggagatccgcgtgatccacatgagccggcggcgccacgccggcataggcccgccgccctcccgcggcctcacgtgcgtgtccgcccatccgcggagagccacccacgtggccgcgtaaccgatggcgatggcgagcccgaacagcgccagccgcaccgccgcgaccggcaggagcagcagcgtcctcgcccacgcgtacgcgccgccgcaccacgccggcgtgccgttgcggaacgggtcggccggggacggcccacggtcccgcggcggccgatcctccgagaggaacgcgaacgggtcccccgcgtcgccgcacacggaggccgcgacggcgccgtcgtggtggtgccgatggttggctgcgtgcccgttggcggcgtgggcgggcgagatggagtcggagagcaagggcgcggagagagaggccgggttagggcttgtagaggccatggacgacgaagctggcggtcggtcgccggagacggcggcggcggcgagcaatggacggccgggagtaatggcttttatcaaagcaaaagcgataggcagcaacaagtgagagacgctgttttgtttgtggtcgtcgtttcgtttttgcttattggcccttgcagtttcggagtcgttttcacgggtctctatttccctcctttaaaaaaatccacgtgtctccatgtgttagag

SEQ ID NO: 134455 - DNA, 1036 bp, Zea Mays
gattacaaaagccattccttcaatcactcaaatccactgtgactccgtgagctctccctgcctgctgccctgcacactccccgcccagccgcaccagctcagctcagcagtcatggctcgcccctgccgcagcagcagcagcgccgctgcccgcctcctcctgctgctcgccgccgtcgcagcggcgctccaggcagcggccgccacgccgccggtggccagcggcttcatccgcaaatcctgccgcgcgacgcagtacccgtcggtgtgcgagcagagcctcgcggcgtacggaggctccccgccgccgcggagcccgcgggagctggcgcgcgccgcgctggcggtgagcgcggaccgcgctcgggcagcgtccgcgtacgtcggccgcctgtgcggctcccggtccggatccggcgacggcagcccccgccgcggcgccggcgccggcgcgaagaaggggtcggcggccgcgggtcccgtgcgcgactgtctggagaatctagcggacagcgtgggccacctccgcgacgcggcgcaggagataggcggcgccgggatggcccgcgccgggacgcgcgcgttcaggtggcacctgagcaacgtgcagacctggtgcagcgccgcgctcacggacgagaacacctgcctggacgggctctcgtcccgcgccgtggacgccgccacgcgcgccgccgtccgcggcagggtcgtcgaggtcgcgcaggtcaccagcaacgcgctcgcactcgtcaacaaggtcgggcctgggtactagtagcccagggcggcctgggtgctactactactactgcctcctccacgacgttggttgtttcagcctcggcagttaactagttctgttattatcaatgtgtgtgtttctttgcatataagtatatgctttgtatctgttgtgtgaggtaatttatatatagttaaggccttaagggtaatttgtatattgtattatgggtggcgagaggtacacgaagacggataatccttcttatgaattgtcaccatgttcactgta

SEQ ID NO: 134456 - DNA, 211 bp, Zea Mays
ctcgccccaatccaaaactttggatataaataatgggtgaaaattcatctgactctgaaatattcaccaaattaaatccggttccaaatattattgacggtcttattttgttcgacccttttatacatcttttagatcctgattttataacctcaaaatatcaaatatctgcatttcgctttagtctaaaaaaatgagaaaaaaaaacaaa

SEQ ID NO: 134457 - DNA, 126 bp, Zea Mays
tatacttttatggcatatttgtgggcatcaagttgctctggaatgtgcttccttttttcagagggaagatgctacatcccaaagttctttcagtggacatggtcaaaagcgcaattctgttaataa

SEQ ID NO: 134458 - DNA, 249 bp, Zea Mays
atggccatttcgtcgaagaccgttgctgtgtccatgctgcttctcagtgctgtcttcttcgtgctgctctccgcgccagctcatgctaggaagctggggacgatgagggcgcctaccagcagcgtgcgtcgtcctccggcggctccatgcactccaaggagtattctgcaggaggtcgctactcagaccgaatctaccactactccaggtcacagccccagcattggccacaacagccctccgaattga

SEQ ID NO: 134459 - DNA, 347 bp, Zea Mays
atgcttatatatgtggtgtttgttcccttgaaatcgtatggtttgtttgaacttgaaaggcaacctgaatttttttgtttcttttctcttttagaatccaccaccagtaaatccagagcatgcatgcatgtggttcatatgctttattttttcccccacttttgtgtgaaagacttgctaaacatgaggaggccaggggcggtgtagccgtgtgtgtctcttctgtaaggtgttactcgatgctgtaaacttgaggaggtgtattgtcacctgatcttgtttaaagttttgatctacctttttgtgtgtatcccttcgattcaataaacatcagatttgtgccattc

SEQ ID NO: 134460 - DNA, 1315 bp, Zea Mays
acatcaaagaccaaaccgaagctggcaaatgtaccaatcctcctcctccgatcactgttctccttcctcctctccgctccgttgccgacggccctgcgcccccgccccggctccccgccgtgccctgcgcctccgccgcgcccttacctccacacctcaaatctgctttgtagcataagctcgctgcttgttagggtcgatggcagagagggagcatcgaacagtatttgtcacggtggggaccacgtgctttgatgcccttgtcatggccgtagattctccggaagtgaagaaggctttactgcaaaaaggttacagtaatcttctcattcaaatgggccgaggaacatatgttccatccaaggtctcaggagatgctacccttcaagttgaccatttcacattttcaccaagcatcgctgacaatatgagaacagcttccttagttatcagccatgcaggttcaggaagcatatttgagacgctgcggctgggcaaaccgcttatcgtcgttgtaaacgaggatctgatggacaatcaccagagcgaactagcagaagaattggctgaaaggaagcacctcttctgcgcacgcccacaaacactgggagagaccatccgggcaatggacctggagacgctggttccttacgagccaggggatgccaagccagtcgtcgccctgatcaacaggtttcttggcttcccagttgcctgacaaataaacgacgagatacctccattaaggcgtcagttcctgtacctgtttgatgtaaaatggattaactggcatatggaaacagcaagactgtcctcgatcgttgcagttgggtttaattggggtggggggcgtcgattcgttgttcttgtcatgcccttgacacgagaaggcaatactgtgtggttggacggcatcactgaagccaatactttatgatcgtgagagggccgaaggagacggaagtcacgtcacccttcttcatagtgatttgaaaagtaccattgaaatgatagccagcaggggccaacgaaaccaagaaagttgtagtaactgacaatgaattcgctgcaattgaatgctagttgccaaatacaatctccactggttcagctgccatcctcaatgcactatgatgaccagcttatgctaatttttttttcatatttctgaccattcgtcttttgtaataattatttgtgtagatagacaaacgcatgcatgaaatgcctaataattatttgtgtagatagacaaacgcatgcatgaaatgcctaataacatgcatatattgtaaggaaaatggatcccagtcta

SEQ ID NO: 134461 - DNA, 1285 bp, Zea Mays
gggtttgttaattgcaactagaatataacttaacctttctgagctgatttggtgaccagggaattgaaaggatccatggttttgaatgggaataggattcctcccccatggtttctctccaattcactgattgctcagaatccgctccatcttttgctactatcaatttgttttttccatttctgtatcattgaatactctgcataaggactattctgcagcagtgaatcaaaacttccaggcagcatgagtttttttgtttcaggttcgtgatgctcaaaatgatcagcaagctttaaagccagaccgaccttgcgatcgacaaagtcttttgtttgaaatatcttgtgtgtctattctatttattgttttgtttctcaaggtttggcactggcaggttcaggaagcatatttgagacgctgcggctgggcaaaccgcttatcgtcgttgtaaacgaggatctgatggacaatcaccagagcgaactagcagaagaattggctgaaaggaagcacctcttctgcgcacgcccacaaacactgggagagaccatccgggcaatggacctggagacgctggttccttacgagccaggggatgccaagccagtcgtcgccctgatcaacaggtttcttggcttcccagttgcctgacaaataaacgacgagatacctccattaaggcgtcagttcctgtacctgtttgatgtaaaatggattaactggcatatggaaacagcaagactgtcctcgatcgttgcagttgggtttaattggggtggggggcgtcgattcgttgttcttgtcatgcccttgacacgagaaggcaatactgtgtggttggacggcatcactgaagccaatactttatgatcgtgagagggccgaaggagacggaagtcacgtcacccttcttcatagtgatttgaaaagtaccattgaaatgatagccagcaggggccaacgaaaccaagaaagttgtagtaactgacaatgaattcgctgcaattgaatgctagttgccaaatacaatctccactggttcagctgccatcctcaatgcactatgatgaccagcttatgctaatttttttttcatatttctgaccattcgtcttttgtaataattatttgtgtagatagacaaacgcatgcatgaaatgcctaataattatttgtgtagatagacaaacgcatgcatgaaatgcctaataacatgcatatattgtaaggaaaatggatcccagtctatttgacttaatgagttttggtgtttgatgatcaa

SEQ ID NO: 134462 - DNA, 707 bp, Zea Mays
gccgtctcctcagctcgacgcggctatagctgcactgaccgcacctcgaccgcgtgcccaccggcaccgctcagtgctagcgcgcgctcatggcgtcgcttggccagctcctcctcgtcgccggcctggccttcctggtgctgctgctgggtgcccaggatcacgggcgtggagagcaagcgaccggcggcggcccggccgttggagcagcagccgccgccgctgctcctcccgcgcgggaggctgtaatcatcagccggcaccagcattcgcagccgtcggccgcggcgatggcggagagcaagcggctccccatccctccgtccgggccgtccactaagtggaactacgaggcgaatcacgagaagccgtcgtcgtcggagtcgggctcgggccgccgccgcctcgggtggtggtggtccccgtgacgcggccggtggcggtgggttcttgagagctgcagagatctcaaggctcagctagcgtcgtgtgtgtcgtctgcttcgttcaccatcttctctcctactagaaagaaatttgcgcagatctcatggagtactggcagtattgctgctctgattagtttcttgtcgagtgtgcatgaaatggctgtgagatctgctgatgtttctttccggtgtagaatggaatcgtctcccctaataataattataataataatacattctgaagctaagattggtgct

SEQ ID NO: 134463 - DNA, 1732 bp, Zea Mays
cttaattctccgaggaaacgccagagcaagcggcagcggcagcggcagcggcagccaagagcaggcggcagcccaaccccaggtccccaagcaaagatgctgtcgtcttccacctccaccctacgcctccaccaaccaacccgcccccacccgccggctgcggccgcgggaggcgccacccacctgacctccccgcggcggtggcgcgggcactccccggcgcccctccgcgcgctggacgccgcccagccgttcgactacgagtcccgcgcggcggggccgctggaggagcggcagcggctgaagatcgccatcgtggggttcggcaacttcgggcagttcctggcgcgcacgttcgcgcggcaggggcacacgctgctggcgcactcgcggacggaccactcggcggcggcgtccgcgctgggcgccgccttcttcaccgacccgcacgacctgtgcgagtgccacccggacgtggtgctgctcgccacctccatcctgtccgcggaggccgtgctgcggtcgctgcccctgcaccggctccgccgcagcaccctcttcgcggacgtgctctccgtgaaggagttccccaggaacctgctcctgagctcgctgccgcccggcttcgacgtgatctgcacgcaccccatgttcgggccggagtcggcgcgcgacgggtgggacggcctgccgctggtgttcgagcgggtgcgcgtcggggactgccccgcgcgccgcgcccgcgccgacgcgttcctcggcgccttcgagcgcgaggggtgccggatggtggagatgtcctgcgccgagcacgacgcgcacgccgccgagacccagttcctgacgcacaccgtcgggcggatgctggccacgctggagctgcgctccacgcccgtcgacaccagggggtacgagacgctgatccgcctcgtggacaacacctgcagcgacagcttcgacctgtacaacggcctcttcatgtacaacaagaactccaccgagctgctcaaccgcctcgagtgggccatggactccgtcaagaagaggctcttcgacggcctccacgacgtgctccggaagcagctcttcgagggctccccgcacgcccccaacgtctcctcctcctcctccaacgtgcgcaagtagccatcctcccaatgtcatatgtttattagtaaaaagtaaaagatccagccccaattctccttctcttctccgaccaccaccgtgcttgcctgccgctcatgtcacggtcgacagcctgtatctgtatctgttattgggaatttggcagctggccgttgggatttgtgatatggtgatgtagagaatgaataaagcggcagtctttgtgcattgcgagttcctgatagcaggacgagggaagatcagaagcaacctcaaatagcctgctgcttgcgtatgttttgcactgaggatcttggatcaggagcaatttccagccaaaaaccagatggcttttggtctcttgtgtgtaaaatttataaattctttaataatacactgataaatttgaaagaaaaaaagttatatcatatagagaagttgagctcaataactctgaataatatttttggctagattcgtcgttgtcattgtgggtccatggacgctgctgattacggttggtaagctgctttcttgattgacagcggtgtcaggaacactgctagggatcaaaaaagtactattgccactaaaaaaacaaaac

SEQ ID NO: 134464 - DNA, 1905 bp, Zea Mays
atcaaaaaaagctacagccacggccaaagcagagcaggagcaggccgcgcggaacgagggaagcagcaggccgctagactagggagcggtcgccggcctcggcggcggagggatggggcgtgggggtgcggtgatggaggacggcgacagggaggagggaagctatccgacgctgctgcagcggtggtcctcgtcggtgtgggccgtcagcggcagcgggcgcctgctgtgggcgggcaacgaggcgtggcgggcgcacgtcgggatggccctcgtccaggtcgcctacggcggctaccacgtcctcaccaagtccgtcctcaacgtcggcatgaaccagatcgtcttctgcgtctaccgcgacctcgtcgcgctcgcgctcctcgcgcccatcgccttctttcgcgagaggatcttcgggaaccagctcctcttcctcctgggcctcggcttcaccaacgcctcctacgccgcggcgttccagccggccataccggtgttcacgttcctcctggccgcaatcgtcggcgtcgaggtgatcaacatcttcacgaaacacggggtcgtcaaagtcctcggcacagccgtgtgcgtctctggcgccgtcctgatggtcttctaccgaggcccatctctgatcgggaccggaggcgcggccgatgcaactgccctgtcagtggttattgaccacagccatgcctataactatgctcctcagtggctggccgcggccatgctccggaacggcgtggaggcatggcatctcggcgtcgtctgcctcatcggaaactgcttcctgatgggcgcttacctcgtcatccaggccccggtgctgatcaaataccccgcgagcttatccctgaccgcctactcctactccttcgcaaccttgttcatggtggtcaccggcgcgttcgccaccagtgggctccacgagtgggcgctgacagcgaccgagatcttagccatcttgtacgctggagtcgttgcgtcctgcctgaactacgcgatcatgacctgggcgaacaagatcctcgggccgtctctggtcgccctctacaacccactccaaccggcatgctctaccttgctctcgaccatgtttcttggaactccaatttacgttggaagtgtgattgggggactcttcatcatcgctggcctttacctggtcacttgggctcgctacaaagaggctcagagcgctctggtagccggttatctgcgacctcttcttctgccgaccaccaaggcagaaggaagctccttcagggggctccattgatccttttacaccccaggcagagaggcagatggatttttgcctcaagtgtttctctaggccagcggcgtcagcagatttagttttcatgtctttgttgtataccaatcttgcatatatttgagatggccagtactagtaccattttttcaagcattcaagcaaggttccattgtcagggaagaacggcagggcactgaagaaaatatcgtatcctgaacattgtattctggtgtcccaatcggcatttttgtatatcaacacccaaaactcatgtatactcgcaaatgatttattattagtattatttttgctatggttttttcctaacttgggcttatgttttgcgtttgcagaatatgaatatcattttcatgcctaagaagtgaagctgcagtgcgctagagctatcgtgctcgtggcaagatgaactattcttctgtgatgatggaacctaacccgttccctgtattcaagggagagtcaaaataatactccaaagttcacgtactcgtgtatcagattttggaacaattggacaaagtagtctcgtattgtgccctttttgttctactctttttgttctactatatgcgtttatatcttctctgttacctatgctg

SEQ ID NO: 134465 - DNA, 2032 bp, Zea Mays
atcaaaaaaagctacagccacggccaaagcagagcaggagcaggccgcgcggaacgagggaagcagcaggccgctagactagggagcggtcgccggcctcggcggcggagggatggggcgtgggggtgcggtgatggaggacggcgacagggaggagggaagctatccgacgctgctgcagcggtggtcctcgtcggtgtgggccgtcagcggcagcgggcgcctgctgtgggcgggcaacgaggcgtggcgggcgcacgtcgggatggccctcgtccaggtcgcctacggcggctaccacgtcctcaccaagtccgtcctcaacgtcggcatgaaccagatcgtcttctgcgtctaccgcgacctcgtcgcgctcgcgctcctcgcgcccatcgccttctttcgcgagagaaacgtgcggcgcccggtgactcctcgcctcctcgcgtccttcgctctcctcggattcactgggatcttcgggaaccagctcctcttcctcctgggcctcggcttcaccaacgcctcctacgccgcggcgttccagccggccataccggtgttcacgttcctcctggccgcaatcgtcggcgtcgaggtgatcaacatcttcacgaaacacggggtcgtcaaagtcctcggcacagccgtgtgcgtctctggcgccgtcctgatggtcttctaccgaggcccatctctgatcgggaccggaggcgcggccgatgcaactgccctgtcagtggttattgaccacagccatgcctataactatgctcctcagtggctggccgcggccatgctccggaacggcgtggaggcatggcatctcggcgtcgtctgcctcatcggaaactgcttcctgatgggcgcttacctcgtcatccaggccccggtgctgatcaaataccccgcgagcttatccctgaccgcctactcctactccttcgcaaccttgttcatggtggtcaccggcgcgttcgccaccagtgggctccacgagtgggcgctgacagcgaccgagatcttagccatcttgtacgctggagtcgttgcgtcctgcctgaactacgcgatcatgacctgggcgaacaagatcctcgggccgtctctggtcgccctctacaacccactccaaccggcatgctctaccttgctctcgaccatgtttcttggaactccaatttacgttggaagtgtgattgggggactcttcatcatcgctggcctttacctggtcacttgggctcgctacaaagaggctcagagcgctctggtagccggttatctgcgacctcttcttctgccgaccaccaaggcagaaggaagctccttcagggggctccattgatccttttacaccccaggcagagaggcagatggatttttgcctcaagtgtttctctaggccagcggcgtcagcagatttagttttcatgtctttgttgtataccaatcttgcatatatttggtttgtactttgcacggcagtttacacggtagagatggccagtactagtaccattttttcaagcattcaagcaaggttccattgtcagggaagaacggcagggcactgaagaaaatatcgtatcctgaacattgtattctggtgtcccaatcggcatttttgaagatgcccttttggttgtcctttcgacttcaacacttgtgtctgtaaggctagctgcagctgggtttaacgtcaccaacgaaagaatatgaatatcattttcatgcctaagaagtgaagctgcagtgcgctagagctatcgtgctcgtggcaagatgaactattcttctgtgatgatggaacctaacccgttccctgtattcaagggagagtcaaaataatactccaaagttcacgtactcgtgtatcagattttggaacaattggacaaagtagtctcgtattgtgccctttttgttctactctttttgttctactatatgcgtttatatcttctctgttacctatgctgtctgtgcttctttgggcattatgctccaataaaaattcaactttgacaga

SEQ ID NO: 134466 - DNA, 2213 bp, Zea Mays
tcaaaaaaagctacagccacggccaaagcagagcaggagcaggccgcgcggaacgagggaagcagcaggccgctagactagggagcggtcgccggcctcggcggcggagggatggggcgtgggggtgcggtgatggaggacggcgacagggaggagggaagctatccgacgctgctgcagcggtggtcctcgtcggtgtgggccgtcagcggcagcgggcgcctgctgtgggcgggcaacgaggcgtggcgggcgcacgtcgggatggccctcgtccaggtcgcctacggcggctaccacgtcctcaccaagtccgtcctcaacgtcggcatgaaccagatcgtcttctgcgtctaccgcgacctcgtcgcgctcgcgctcctcgcgcccatcgccttctttcgcgagagaaacgtgcggcgcccggtgactcctcgcctcctcgcgtccttcgctctcctcggattcactgggatcttcgggaaccagctcctcttcctcctgggcctcggcttcaccaacgcctcctacgccgcggcgttccagccggccataccggtgttcacgttcctcctggccgcaatcgtcggcgtcgaggtgatcaacatcttcacgaaacacggggtcgtcaaagtcctcggcacagccgtgtgcgtctctggcgccgtcctgatggtcttctaccgaggcccatctctgatcgggaccggaggcgcggccgatgcaactgccctgtcagtggttattgaccacagccatgcctataactatgctcctcagtggctggccgcggccatgctccggaacggcgtggaggcatggcatctcggcgtcgtctgcctcatcggaaactgcttcctgatgggcgcttacctcgtcatccaggtgacgcagacttggtgacgcagacttggcagcactggggttggatatatatttattgaaatttcctttctgttactgatggattggtggatgcttactactgtaatcgtattttaatatctacgatgttcacgcctgatgcaacaaaatcgccgtccttttcctgacgcgacaacctgcaggccccggtgctgatcaaataccccgcgagcttatccctgaccgcctactcctactccttcgcaaccttgttcatggtggtcaccggcgcgttcgccaccagtgggctccacgagtgggcgctgacagcgaccgagatcttagccatcttgtacgctggagtcgttgcgtcctgcctgaactacgcgatcatgacctgggcgaacaagatcctcgggccgtctctggtcgccctctacaacccactccaaccggcatgctctaccttgctctcgaccatgtttcttggaactccaatttacgttggaagtgtgattgggggactcttcatcatcgctggcctttacctggtcacttgggctcgctacaaagaggctcagagcgctctggtagccggttatctgcgacctcttcttctgccgaccaccaaggcagaaggaagctccttcagggggctccattgatccttttacaccccaggcagagaggcagatggatttttgcctcaagtgtttctctaggccagcggcgtcagcagatttagttttcatgtctttgttgtataccaatcttgcatatatttggtttgtactttgcacggcagtttacacggtagagatggccagtactagtaccattttttcaagcattcaagcaaggttccattgtcagggaagaacggcagggcactgaagaaaatatcgtatcctgaacattgtattctggtgtcccaatcggcatttttgaagatgcccttttggttgtcctttcgacttcaacacttgtgtctgtaaggctagctgcagctgggtttaacgtcaccaacgaaagaatatgaatatcattttcatgcctaagaagtgaagctgcagtgcgctagagctatcgtgctcgtggcaagatgaactattcttctgtgatgatggaacctaacccgttccctgtattcaagggagagtcaaaataatactccaaagttcacgtactcgtgtatcagattttggaacaattggacaaagtagtctcgtattgtgccctttttgttctactctttttgttctactatatgcgtttatatcttctctgttacctatgctgtctgtgcttctttgggcattatgctccaataaaaattcaactttgacaga

SEQ ID NO: 134467 - DNA, 2825 bp, Zea Mays
atgcagcctcgtagggctcgaggtagtccgcaagctcctagtggggactcgatgagtccggcggcaatgttagccgcgatgcaggccatgcagcaggagttggcccttctgaggcaaaccattcctgtcgcccctgcgggtgctcttagggtgctggaggtggagaagtgcccggggcgccgtccctgcgggtgctgttccagtggtactccggtcgaggcggcagattggttgacttatgtggaggataagatgaatgtcttcgagattgcttatggagatcgggttcgctttggcactcagctgctgaagggagaggctcaaatttggtggagaggcgtgcaggcagcgcactcctcctcactaggagtcctatcttgggatgttttcatcaggcagtttgaaaggagattctacccggtcacctttctggagaaaatgaagattgacttgcagtcctacaagcaggagaagaagtctgtcacagagtatgaggtgggcttcaacaagatggtccgctttgtccctcatgtggcttatactgagatggagaaggcgagccagttccgtcagggtctgaagccttctatcaggcatgcactgggggcctttccgttggtggacttccgtaccacgcctcgtcgccaggacgcgaggaggagcaacactggaggtccagcccacaagaggggcaagtctcagcatcagcgccaccatccttaccgtggcaaatcttctgactcgggtacttcgggaggaagtactcagaggtttcgggccattcctaagcccgggctggggctggtgtgtttccgctgtggtgatgcgcatcgccgtgcagagtgccagtggagtgggaggtgttgtatctgcagtcaagaccataaggatgtggtgtgtaggaggaatcctaatgggaagctcagatgggagccggtgacttcgtcctcttctcagggcaccatcaacatgatgtcaagtgctgagcagcagttttcagttcctcttccttcgcagcagctctatgtgcctgggacttctcagttcgtgctgatgcagggttttcctcagtatcaggccgcgcctactcctgcaccgtctactcctatgtcgtctcagtttgaagctccgcgcctgcctcatctagtggctcagtggggttcttctgttaatttcactccgggggcttcctcttctgcgggtcctggatcacaatgcgtttgcaaggatccaacaggtccacaacttgtccacaaagggacagtacaacagaggatccggaaatttgatctactagctatgctccatgccattgtacataaactaccgacacgtaaaacagaaatcatcaaccaatgcaaaagtctggacaaaaagcacaatccaataacagagaagtattggccaaaagacaggaacgtcgaatacagagaagaaggtcatgacaaaggcaatgcaaaaggcttttgtgacggcatacctgaaacaagaagcggttggttagctattttcagctacacacttccattggaaaaaaaggataggaaactacaagccactgaaacagcaaagcttgattcaaacattgagtagcctagtaacacgatgttcctaatgtatgtagtctacaataataaagataacaaattgttcacataaaatagcaaatgtctttctaaattgagcttgtcagatccccaggggaaagcagtgccgcgaaggcatccattggctcaaaaacttctatattatctgcagactgcaagctacatggtgatagactgttcaattccatcattccatgcaaatcatacagaaagtagatgactgctggcaacacaatataacttaaaaggagtgaaaaatgcattgcactataaaactagaacatcaaaagatgaactaatattcaatatgaaagtaaaaacaatttacacaatgaaaattgcacaaaagtacatcagttccacaaggaaatgcagcctatacttctcagacaatgcgttacaatgtacaggcgtaagtactaagaattctgatggagtgataataagaatgtactatgttcttttcataggaataaactgtgcataggccttcactgggatatatttctcaatagcgcacacatagcatcggttaatgaaaagctacatgtttgttttccagcagttgaacaattactgataaacaaatacaaacaggaaaaaatgctttcagatgcaacaggcagaccatgagacaaactaagctggttggttagtgaagggtgagctaattaagcaccaatggacgaagccacaaactcggcatatcttataatcccttctacaaatcatacctaagctgcatagcatcgagcactactaggaaaactaccatatcagccggtggactgtacattctgttctgtaagaaacattggctatctggttggttggtgaatacctgaatgatgaagattaaggccctgtttgtttccttcctggattatataatccagcttatagattatataagcacctattgacctgcttatggattatcataatctaggtatctagattacataatccacctaataatctatattgtttgtttacctctcaacttatttaagctggattatataatctagagagtaagggcctgtttgtttacccccatggattatataatctggattatatagatgtaccagaagccacacataaaaataaatagatgttccacacataaacaataaatagatgttccacacatgaaagtaaatagatggtcctaacacacgaaaataaatagatgttcctaacataagccatcct

SEQ ID NO: 134468 - DNA, 1034 bp, Zea Mays
aattcccaccacgtgagcagaagcagcacaaccaagagccaacagagcaacgcccaggcacaaacgacacgaaccaggcaaccagctgccgagggaggaaccctagcggaacaggtgacggcggcgcgctaccggtgacgggggatacggcggcatcgtccccctcggcccctcctccatccccggcgcggcggcgccagcagccggcctgcagctttataatggatcccaacatgaagcagcttcaagaggctctggttgatattgagactgatgcagaaaaagttcttctggctagacatcagttggtggaaaatgataagataagaaatggtaacagggaggctctgacagcccttcggaaacaagctaggacgtccaagactagcgtgccatctccctttgaggtcataatgaaagagatggaaggaagctctggcaagcagctgataaaggagatatgcccaacttgtggagatcatgaccccaaggaacatacttggctaatgtttcctggatcagatatgttttctcgtgttccatttcatgtggcacacactgttgtggaaaaagaccaagaacgcctggatttggataccaagaaactgcaaagctttgtcaaggagaaatcacttgtgattgcggagaaaggcgccctagcaggcagattcggtgctgacactgtaaaatctttggtcagccttacagacacaactaaatcaacacgggagggcggggaggtgaagtaccagttttgttgagtcgtcaactgttcagccacaatatatttcttggatatccggtgtttgttcggtatatcccctgccggaagggattgaaggggattggtgttgtttaactcaattacctgcagtccacaccaaactgaacaaggctatatgtatagattttctttgcttttgtttggaacaaaattttgcatggttgttagcaattgcgaaaaaattgttctcgattgatgtgtgtattcttatttgctgtgagattgtggcatagtcagtgtgtagttcctg

SEQ ID NO: 134469 - DNA, 1197 bp, Zea Mays
aattcccaccacgtgagcagaagcagcacaaccaagagccaacagagcaacgcccaggcacaaacgacacgaaccaggcaaccagctgccgagggaggaaccctagcggaacaggtgacggcggcgcgctaccggtgacgggggatacggcggcatcgtccccctcggcccctcctccatccccggcgcggcggcgccagcagccggcctgcagtttttcagctttataatggatcccaacatgaagcagcttcaagaggctctggttgatattgagactgatgcagaaaaagttcttctggctagacatcagttggtggaaaatgataagataagaaatggtaacagggaggctctgacagcccttcggaaacaagctaggacgtccaagactagcgtgccatctccctttgaggtcataatgaaagagatggaaggaagctctggcaagcagctgataaaggagatatgcccaacttgtggagatcatgaccccaaggaacatacttggctaatgtttcctggatcagatatgttttctcgtgttccatttcatgtggcacacactgttgtggaaaaagaccaagaacgcctggatttggataccaagaaactgcaaagctttgtcaaggagaaatcacttgtgattgcggagaaaggcgccctagcaggcagattcggtgctgacactgtaaaatctttggtcagccttacagacacaactaaatcaacacgggagggcggggaggtgaagtaccagttttgttgagtcgtcaactgttcagccacaatatatttcttggatatccggtgtttgttcggtatatcccctgccggaagggattgaaggggattggtgttgtttaactcaattacctgcagtccacaccaaactgaacaaggctatatgtatagattttctttgcttttgtttggaacaaaattttgcatggttgttagcaattgcgaaaaaattgttctcgattgatgtgtgtattcttatttgctgtgagattgtggcatagtcagtgtgtagttcctgatgatgagctgggtgtagtcaaaggttctcaatctgtagtagtcatgtttgaaactgaagtaaaggtgggtggcgtatgaatttattcattcagctattccctctgtcccagaatagttgatgttttagggttgtacatatgaatttataagtat

SEQ ID NO: 134470 - DNA, 588 bp, Zea Mays
actgcgcagccaatcagacgcatgaaaactgccttccctcgctagtcaacccaaacccgtcggttccgattccgacctccaagcccgcggggacatcgcgaaacgaaatgggtggcgctagcgtcgatgtcgatggggcggcggaggcgtcctcgcctctcctcttgccccgctccgctccacgccccgcggtgtcggcggaggtgacaaggcaggtggggctcgcggcgccgctggtggcgtgcagcctgctgcagtactgcctgcaagtggtctccgtcatgttcgccgggcacctaggggagctctccctctccggcgcctccgttgccgcgtccttcgccaacgtcaccggattcagcgtcctggtacgtgcagttcagtgataactggtaacctcgcttcgctcagccgtttgtgcacctcgatattgtactagtgctcttgagagcagagggggaatgcggatcggaacaagtacgctctaggagctggttgtttaagaaatttatatccaaaaatcagtacgaattttttgaatgccttcgcgttactccaattaagaggaggtgtatgagttttgactta

SEQ ID NO: 134471 - DNA, 1995 bp, Zea Mays
gttccgattccgacctccaagcccgcggggacatcgcgaaacgaaatgggtggcgctagcgtcgatgtcgatggggcggcggaggcgtcctcgcctctcctcttgccccgctccgctccacgccccgcggtgtcggcggaggtgacaaggcaggtggggctcgcggcgccgctggtggcgtgcagcctgctgcagtactgcctgcaagtggtctccgtcatgttcgccgggcacctaggggagctctccctctccggcgcctccgttgccgcgtccttcgccaacgtcaccggattcagcgtcctgctgggcatgggaagcgcgttggatacgttctgtggacaatcatacggagcaagacaatatgacatgctggggacacacacgcaaagggcgataattgttcttatgttcacgggtcttcctctggcctttgttttggccttcactggtcaaatccttatcgctcttggtcaaaaccctgagatatcattcgaagctggattgtacgctcagtggttgattcctggcctgttcgcgtatggtttgcttcagtgccttaccaggttcctgcaggcccaaaacattgtccacatattggtagcttgctctggacttaccttgctacttcatgttatgctatgctggttgctggttcaaagtttcggccttggccacaaaggcgctgctctggcaacctcagtatcttactggttcaatgtggcactgctagctgtgtatgtgaaattctctgaagctggcagaagaagttggcatggatggtcaggggaggcactaaaattgaaggatgccaaagtgtatctaaagctagcaatcccatctacatttatgacctgcttggagtattgggcatttgagatggtggttctcctagcgggatttcttccagatccaaaactggaaacttcaattttgtcagtcagcctaaacacaatgtggatggtctatacaattccaagtggcctaagcagtgcaataagtattagagtgtccaatgaactaggtgctgggaacccacatgcagcacgcctatcagtttatgtttcagggatcatgtgcctagctgagggtctttttttcgctgtcatcacagtattagtgcgagatgtctggggttatttgtacagcaatgaggaagaggtcgtgaagcatgtatcgattatgatgccaattcttgctacttctgacttcatggatggaatacaatgcacactatcaggggcggctcgaggatgcggctggcagaaagtatgctcggttatcaatctgtttgcttactatgctattggtctcccttcagctgttacttttgcatttgttctgaagattggtggtaagggcctttggttgggaatcatatgtgctatggcagtgcaaatatttgctctggtcgtcatgatgcttcaaaccaactggaatgaagaggctgaaaaggcccgagctagagttcagtgttcagatggcagcattacattgatctgaatgttatcagttgtgattacacctcccttaaagatgactggaataattggtcttgtagttgtaggtctatgtgagtccttcagaccttgcccttgggttcaagacagtaggctgtaggcagcagctccaagcttgacgccctgccctggatctggtaggaaaggatgaactatcatcctaaaagcagggcacttgccgtacatgtgtcttggagtacgtttctttgtggttttctgcagctcaatgatgacaccgtgaaagccgacgaagaagcaacacaagtttggtaactctggaagtggacctgtggaaggtgtcgtggacgctggctgtttccatatctaagtactcgtgcctgggtgaatcattctcgtatgaaagatatttactagtacttcctccattccaaattgcaaatcattttactatatatctatagacatagcatatatcttctttgctgaccacatgaataaattcaaacgataatta

SEQ ID NO: 134472 - DNA, 1166 bp, Zea Mays
agctctcaccacgccactgccgtgcgcccgtgccgtttcatttccccgtcacacacctttcgctttctcccagtccacacccccaactgcctccccacttcgcaccgccaccgtctcccgaccgcgacgccggcgacctccgcaccgcatcgctccagccgatcgttccgagatttgttgatcaaagaaccatggaaggatcgttccagttgaatcccaacgccagtcctttcatacctggattgctgggttcatctgcacaaaaagccccagaaaaacaaggagggtcatcatcaaagggagagccttctggtagcacctttgatccttctgagtatgaggaaaatgacatggatgaacttgctctagtcaaaatggtcttttcaatgttcccaaatgtctccacggacttcattgatgagttaatcaaggcaaatgattttgacatgaatctgactgttgatatgctttatgagctgaactcacaagatatggttcatgatgattctgaggttatcaatcattttcatgatgattctgaggctaccaatgaccttcatgatggcaagggcgtacctggtgctgattaccacaagactgtggtgcccgagagtagcagcaacatgaatcaagacctgcagaacgaggagtcagcaacaacttctgatgtgaaatctgtgctgccaaagttctcacagatcaatttgcttcacaatgacctgggcctgcctgatgatgataagtcagcggggacttctattgcaaattgatctttcatatcaaggcgctccgtttgacccgagttagtgggttatggtgtacatactagttgcacccagaagtagaagtgtggcttggaaggtcaaagcagcggaagcaactgtcccatttccgtttgccggaccagttaactgtttctggtggttatcctgactttgaaatcccctgttcagctccttttgggccgagtagttaggtatttctggtggtggttgtcatgagtttttacatctagttcgctcttcaagactgagtagtacttggtggtcatcctgattttgcatgtcagggttagctgtgttgggtttggtacccagttagtacaaacaatccaagttatggcgtggctgtccgttatgtgtgatgttgtgggagggttgcatcca

SEQ ID NO: 134473 - DNA, 1184 bp, Zea Mays
agctctcaccacgccactgccgtgcgcccgtgccgtttcatttccccgtcacacacctttcgctttctcccagtccacacccccaactgcctccccacttcgcaccgccaccgtctcccgaccgcgacgccggcgacctccgcaccgcatcgctccagccgatcgttccgagatttgttgatcaaagaaccatggaaggatcgttccagttgaatcccaacgccagtcctttcatacctggattgctgggttcatctgcacaaaaagccccagaaaaacaaggaggtcttatcatttctgcagggtcatcatcaaagggagagccttctggtagcacctttgatccttctgagtatgaggaaaatgacatggatgaacttgctctagtcaaaatggtcttttcaatgttcccaaatgtctccacggacttcattgatgagttaatcaaggcaaatgattttgacatgaatctgactgttgatatgctttatgagctgaactcacaagatatggttcatgatgattctgaggttatcaatcattttcatgatgattctgaggctaccaatgaccttcatgatggcaagggcgtacctggtgctgattaccacaagactgtggtgcccgagagtagcagcaacatgaatcaagacctgcagaacgaggagtcagcaacaacttctgatgtgaaatctgtgctgccaaagttctcacagatcaatttgcttcacaatgacctgggcctgcctgatgatgataagtcagcggggacttctattgcaaattgatctttcatatcaaggcgctccgtttgacccgagttagtgggttatggtgtacatactagttgcacccagaagtagaagtgtggcttggaaggtcaaagcagcggaagcaactgtcccatttccgtttgccggaccagttaactgtttctggtggttatcctgactttgaaatcccctgttcagctccttttgggccgagtagttaggtatttctggtggtggttgtcatgagtttttacatctagttcgctcttcaagactgagtagtacttggtggtcatcctgattttgcatgtcagggttagctgtgttgggtttggtacccagttagtacaaacaatccaagttatggcgtggctgtccgttatgtgtgatgttgtgggagggttgcatcca

SEQ ID NO: 134474 - DNA, 612 bp, Zea Mays
atggagaaactcgccgactccgggagcgggtttggagacgggacctcgctggatttttggagcagggagcagggagcagggttcagcgccctgactgccagcagccaagagagcagagagaacacaggggggaaaatggagcaaggcagcgccagagatggtgtccgtgccagcactccaccatggaggagcagaggtagggggacccggcgtagggagctcggcgtccgagcagaggggagctggagagttgtggccgtggggagcgcagagccatgtgttgcggccgcgcgcaaggaagttgcaggtccggcagagctcgagcagagcgcgcttgaggagcacggctgccggaaggagggatcccggcgccatggggaagaaggccttggggagggaggagggcagggcgtcggcaaggggctgcaacagtggagtgctcggccttggtcgagctccaagcgagggagcctagggagctccatgcgtgctgggagaatggcgcctgctctccctgctgggtttcgaggggagcaaggaaccggccatggtgcagagggggaggaggggatgtcgacccccatggctggtggcgagaggaatggaagctag

SEQ ID NO: 134475 - DNA, 168 bp, Zea Mays
atccatgcctcaatccatgccccaaaataatccatgactacttaattttttttattcggttaaacccatcatggaatataacccaaaagtttgggaattttttaaactatggaagacatggattctatccatagcctattaggtatggaacaaatccatgggatattg

SEQ ID NO: 134476 - DNA, 97 bp, Zea Mays
atggagcaaccagctccagctattccgctcacagcgctccacatagcgatcgcgaactctagcctcagctccctggcattcatttcaaatgaaggaa

SEQ ID NO: 134477 - DNA, 2060 bp, Zea Mays
tcagtgaggctatttgtggtgatggcagcgtgggacgtcatttctttgaaccgcatgatcactggtttcattcgagatggtaccagcaaccgagcacttgtagtttacaagtggatggttgcttcaggcctgagagagacccctcacaccttctctgcagttctcggtgcgtgcaacagctgcgaggggctgcaactgcatggccgggtactggcattgggcctgcgctccaacccgttcgtcatgtctgcgttggtcaacctgtatatgcgcgttgaaacaccttgtgctgccctcctgctgtatgacgagatgccattgcagagcacagccatgtccaacgctgttctgggtggcttgtgcaacctgaagttggccgaggacctcttccgatctttgctagacatgagacggcgtggtctggagttgaatggcctttcctactgctacgcgatgaaagcatgctaccaagatgaggactggctggaacaaggcaggcagctgcacggagtggttctcaaggcagggtgggttccgtcgaacattttcctgtcgaactcgcttgtggatctctacgcagcaaccggagacttggtggacgctaagagttctctcgatgacatcccttctgaggacgtcatctcgtggaactccatcgtctctgtctgcgcgagcaaagggcgtacgaaggaagcaactggttacttgaggcagatgctttggcacggcaagacgccctcagtccgctcctttgttgggctcttcgccttatctggtcagaccggacacctccaagttggggttcagatgcacggtatcgctcttaagctcgggttcagctggagcagcgcgcacgtccagactgcactcattagcatgtatgggaactgctgccattttgattgttgcttggcaatcttcaacgaaaccccaagccttgcactggagtgctataatgcaatgatcacgtcatcaattggctgcaaggttttccactccgcgctggaggtcttgtactgtatggttgtcgagggagttatgcctgacaacgtgacgctatctgcgaccatgaaggccatatctttgtcagcttcgccgagtctaatcagctgccagatgctgcattcctgggtcttcaagctgggcttcgaagcggacatggttgtgtgctcctccttgatcagcgcatacgctcgagccggtcaggtgcacagctcccgctcggtgttcgaaagcctgcggagcccaaacgtcgtctgcttcacttcgatgatatctgcgtgcgcgcgacacggagatggcgcaaaaggagtggagctgctcagggagatggtttgtagggggctcaaacctgatgacgtcaccttcctgtgcgcgatcactggatgtgatcaggcaggactgattgaggaaggcaggctggtgtttgagtttatgagagcgacccgcgagctgggccctgacgagaggcacttggcctgcatggttaaccttctcggccgagacgggtttgtggaggaggcgatgaaggtgatgatggagcagcactcgccgctgcggcactacaccaaggcgtggagctcgctcgtccagagttgcaaggcacatggcgaagacgcgctgggaaggagagcggcagatacgctggtagacatgggacgagaggacgcggccaccagcttgcaggtgtcgagatacttctacgagattggggacggcgagaatgtctcgaggattaaaggcatggcaagtgggcaacgggtgaaggagatcagcggtcgcagctcggtcgagatcggccacggaataatctagcagccgaggttaaagaacggtatggattgttcaattccgtagttggctggctggttggttggttcacaatgtttaatatacaactgatggtctgaacggatgggagataggaaataccaaagtagaatctctttaggtggatcggggaattgttgtgtttagtactcatcaatatgtgattatcgaagcttcacaacttgaacatgataacaatttctggtgaaaacaatcgagttccaattcaa

SEQ ID NO: 134478 - DNA, 1894 bp, Zea Mays
tggcctgaaatgaaaagacagacagcgcatggatacccaactgtgtggcacaaacaagcagtgaaacaatgtgaatcaggaaacaaaagagaagaaaagaaaataaaggagaaagattcagtggtggtgctgggtgcggggtgtatcaaatatttccctgagccccggataaccggattccagagcggcggcctgcgacaggaacagtgggtggggccgggagcgcctctcgctctccactaccagtccaccacctcgctcgcagctctttcctcctccttttccttccttttttctttttttcccagcccacctcgctcgctcccttcccttcccagtggaagtggattggttgattgatcgcacagagctcgcctcacatccacacagcccgagctgctgcccgcccacccgcctgtagctcccctcctcacggagcaggcaggcaggcaggctgggattcccgtcgaagcagggcaggtacggcacggcccgcccggttgaatccctcggcctccctccgcgggggctaatttgtctcgctcgttcccgtctctactgctgctgcaggagctagggcgggtggaggagcctttgcccgggaacgaggagaggaggtggcagtggcaccccgcggctagggcagcgagagaggggcgaagaggaaggcggcgggcgcgtccgccatggctagcgaggaagtactccacaaggtccagaatcttatagagcgctgccttcagatgtacatgaacaagaaagaagtggttgatgccctctcccaccactccaggatagagccttgtatcactgaacttgtttggcaacaacttgagcaacagaatcctctgtttttcaaagcatacgatatgaggctaatgcttaagaatcaaataatggtcttcaacaggcttctccaggatcagttcgagattatgaataaagagttttcttcagggatcccttctatgtctcttcctaatgactctaattccaacctattgaagcaagattcatgctttttgccagagactgctcctggaaatgcaatgccagatggtataatgcacaatggaagttcaagtggtataataaatgacacaccatctggcgatcagttacttaatgctagtaaagacttgcatggccttcatagtcaaatagatgcttcaactagtctacagtcagaccagaatgcaactgctgtgctgtatggtgtagacaacgagacaagcgcaacaataaagaccgagtcttgctactcgagtaatgctgattttgccttctgtgggaacactttcctggaatcatgccagtcgataggtgatgcatctggtggtggatccttcagcagctcagagttgaatgggcaaccactaaacgattcaattttggatatggagtcatcatcatttagcttcttgaaccaaatgccccaaagcttcatgttttcagacctggcagatgatttcaaccaaaatgcagaaataacaccatttctcactcctgagacaaatttctccgattcaacagggggagaccatacaggttgagcgggtcatgcacagcgtaccaaccatttgtacataggcacatgggcagtcgaatctgcattggtgaagaacttgaggaccttttgatctagcttgtttatttctctagtttttgcgtcttgatattgtggtagtttggggcttcgggtctggtgggttgtctagcccatcagaacgcgtaatgggtacggagtattggtcttccagtatgttttcagcgttaatttggctaatttcccccgcttggcttgtacaacaaattttatcagtactgagtaccatgagttgtactgctgtatatgctgcttcccactctctgaattggcagaatgattgatgag

SEQ ID NO: 134479 - DNA, 1541 bp, Zea Mays
aggaacagtgggtggggccgggagcgcctctcgctctccactaccagtccaccacctcgctcgcagctctttcctcctccttttccttccttttttctttttttcccagcccacctcgctcgctcccttcccttcccagtggaagtggattggttgattgatcgcacagagctcgcctcacatccacacagcccgagctgctgcccgcccacccgcctgtagctcccctcctcacggagcaggcaggcaggcaggctgggattcccgtcgaagcagggcaggagctagggcgggtggaggagcctttgcccgggaacgaggagaggaggtggcagtggcaccccgcggctagggcagcgagagaggggcgaagaggaaggcggcgggcgcgtccgccatggctagcgaggaagtactccacaaggtccagaatcttatagagcgctgccttcagatgtacatgaacaagaaagaagtggttgatgccctctcccaccactccaggatagagccttgtatcactgaacttgtttggcaacaacttgagcaacagaatcctctgtttttcaaagcatacgatatgaggctaatgcttaagaatcaaataatggtcttcaacaggcttctccaggatcagttcgagattatgaataaagagttttcttcagggatcccttctatgtctcttcctaatgactctaattccaacctattgaagcaagattcatgctttttgccagagactgctcctggaaatgcaatgccagatggtataatgcacaatggaagttcaagtggtataataaatgacacaccatctggcgatcagttacttaatgctagtaaagacttgcatggccttcatagtcaaatagatgcttcaactagtctacagtcagaccagaatgcaactgctgtgctgtatggtgtagacaacgagacaagcgcaacaataaagaccgagtcttgctactcgagtaatgctgattttgccttctgtgggaacactttcctggaatcatgccagtcgataggtgatgcatctggtggtggatccttcagcagctcagagttgaatgggcaaccactaaacgattcaattttggatatggagtcatcatcatttagcttcttgaaccaaatgccccaaagcttcatgttttcagacctggcagatgatttcaaccaaaatgcaggttgagcgggtcatgcacagcgtaccaaccatttgtacataggcacatgggcagtcgaatctgcattggtgaagaacttgaggaccttttgatctagcttgtttatttctctagtttttgcgtcttgatattgtggtagtttggggcttcgggtctggtgggttgtctagcccatcagaacgcgtaatgggtacggagtattggtcttccagtatgttttcagcgttaatttggctaatttcccccgcttggcttgtacaacaaattttatcagtactgagtaccatgagttgtactgctgtatatgctgcttcccactctctgaattggcagaatgattgatga

SEQ ID NO: 134480 - DNA, 1788 bp, Zea Mays
aggaacagtgggtggggccgggagcgcctctcgctctccactaccagtccaccacctcgctcgcagctctttcctcctccttttccttccttttttctttttttcccagcccacctcgctcgctcccttcccttcccagtggaagtggattggttgattgatcgcacagagctcgcctcacatccacacagcccgagctgctgcccgcccacccgcctgtagctcccctcctcacggagcaggcaggcaggcaggctgggattcccgtcgaagcagggcaggagctagggcgggtggaggagcctttgcccgggaacgaggagaggaggtggcagtggcaccccgcggctagggcagcgagagaggggcgaagaggaaggcggcgggcgcgtccgccatggctagcgaggaagtactccacaaggtccagaatcttatagagcgctgccttcagatgtacatgaacaagaaagaagtggttgatgccctctcccaccactccaggatagagccttgtatcactgaacttgtttggcaacaacttgagcaacagaatcctctgtttttcaaagcatacgatatgaggctaatgcttaagaatcaaataatggtcttcaacaggcttctccaggatcagttcgagattatgaataaagagttttcttcagggatcccttctatgtctcttcctaatgactctaattccaacctattgaagcaagattcatgctttttgccagagactgctcctggaaatgcaatgccagatggtataatgcacaatggaagttcaagtggtataataaatgacacaccatctggcgatcagttacttaatgctagtaaagacttgcatggccttcatagtcaaatagatgcttcaactagtctacagtcagaccagaatgcaactgctgtgctgtatggtgtagacaacgagacaagcgcaacaataaagaccgagtcttgctactcgagtaatgctgattttgccttctgtgggaacactttcctggaatcatgccagtcgataggtgatgcatctggtggtggatccttcagcagctcagagttgaatgggcaaccactaaacgattcaattttggatatggagtcatcatcatttagcttcttgaaccaaatgccccaaagcttcatgttttcagacctggcagatgatttcaaccaaaatgcagaaataacaccatttctcactcctgagacaaatttctccgattcaacagggggagaccatacaggttgagcgggtcatgcacagcgtaccaaccatttgtacataggcacatgggcagtcgaatctgcattggtgaagaacttgaggaccttttgatctagcttgtttatttctctagtttttgcgtcttgatattgtggtagtttggggcttcgggtctggtgggttgtctagcccatcagaacgcgtaatgggtacggagtattggtcttccagtatgttttcagcgttaatttggctaatttcccccgcttggcttgtacaacaaattttatcagtactgagtaccatgagttgtactgctgtatatgctgcttcccactctctgaattggcagaatgattgatgagaagacactgcttggaggagttgcctcagtttcacactgcatgtatgcagcaagttttggacaagaactcatcagctgcttggaatttcaatagtaaacacctggacacaaaatacaacacaactacatttcctatttactgtgataacagtctaaaaaaatcatccagtttctttgacgagaa

SEQ ID NO: 134481 - DNA, 917 bp, Zea Mays
ccacctcgctcgcagctctttcctcctccttttccttccttttttctttttttcccagcccacctcgctcgctcccttcccttcccagtggaagtggattggttgattgatcgcacagagctcgcctcacatccacacagcccgagctgctgcccgcccacccgcctgtagctcccctcctcacggagcaggcaggcaggcaggctgggattcccgtcgaagcagggcaggtacggcacggcccgcccggttgaatccctcggcctccctccgcgggggctaatttgtctcgctcgttcccgtctctactgctgctgcaggagctagggcgggtggaggagcctttgcccgggaacgaggagaggaggtggcagtggcaccccgcggctagggcagcgagagaggggcgaagaggaaggcggcgggcgcgtccgccatggctagcgaggaagtactccacaaggtccagaatcttatagagcgctgccttcagatgtacatgaacaagaaagaagtggttgatgccctctcccaccactccaggatagagccttgtatcactgaacttgtttggcaacaacttgagcaacagaatcctctgtttttcaaagcatacgatatgaggctaatgcttaagaatcaaataatggtcttcaacaggcttctccaggatcagttcgagattatgaataaagagttttcttcagggatcccttctatgtctcttcctaatgactctaattccaacctatgtaagacctttctttccagccttatcatgggcagggattgctcataattatttaacttagtgttctgatttgccttccggagtgaagtgctgtaacaatctgatggaatataaggcgtacatgttactttgcaaagtgatttaaccattgtataagttcaacaaa

SEQ ID NO: 134482 - DNA, 1204 bp, Zea Mays
aaatttattttgcagtttatcatattgaaattgaatctgcgcttctgctctccacaaagacgccaacaaaaagtatggcagtgaaaaaatagcttatgaagtttcactgattctctcaaaatggctcacctacagccttgcattctgtagttttttttgtgttatagaaatcccttatggttgcaggctaattggcacttttttctctctctgtccttttcagtttggcaacaacttgagcaacagaatcctctgtttttcaaagcatacgatatgaggctaatgcttaagaatcaaataatggtcttcaacaggcttctccaggatcagttcgagattatgaataaagagttttcttcagggatcccttctatgtctcttcctaatgactctaattccaacctattgaagcaagattcatgctttttgccagagactgctcctggaaatgcaatgccagatggtataatgcacaatggaagttcaagtggtataataaatgacacaccatctggcgatcagttacttaatgctagtaaagacttgcatggccttcatagtcaaatagatgcttcaactagtctacagtcagaccagaatgcaactgctgtgctgtatggtgtagacaacgagacaagcgcaacaataaagaccgagtcttgctactcgagtaatgctgattttgccttctgtgggaacactttcctggaatcatgccagtcgataggtgatgcatctggtggtggatccttcagcagctcagagttgaatgggcaaccactaaacgattcaattttggatatggagtcatcatcatttagcttcttgaaccaaatgccccaaagcttcatgttttcagacctggcagatgatttcaaccaaaatgcaggttgagcgggtcatgcacagcgtaccaaccatttgtacataggcacatgggcagtcgaatctgcattggtgaagaacttgaggaccttttgatctagcttgtttatttctctagtttttgcgtcttgatattgtggtagtttggggcttcgggtctggtgggttgtctagcccatcagaacgcgtaatgggtacggagtattggtcttccagtatgttttcagcgttaatttggctaatttcccccgcttggcttgtacaacaaattttatcagtactgagtaccatgagttgtactgctgtatatgctgcttcc

SEQ ID NO: 134483 - DNA, 2835 bp, Zea Mays
cgaacaactcgctgctgctgctgctgatgctacaggaggagaagaaagaatccgcggagcctttgaatccaatccgatcgaacgcaaccaaacctcgaaatggagcaacttttaaactactacaacaagtgagaaaaatagcggggcgggagggaaagaacgagcgctacagtgcaagatgtactgaagcgtcacggcgactcttgtcactggccgtggccggtggatcagcgcgcggccagctagttgctcttgtacggcggcgggggcgacgcgtaggacacggggtacacgggcgggagcggcggcgggggcgacgagtaggacacgccgtggacgggcgagaacgacggcgggttccccgctgctgggtcggacggcggcggaggcggcgacgagtaggccacgccgtgcacgggcgggaacggtaggacgccgccgctgctgccaggtgccgatggcggggtgtgctcctggctgctgccgtggtcgcctggggacggagggtggtagccgggcgtgggtggcaacgaccctggcgcaccgggagtcgtcggcgggaacgtcgatcctggagtcgtcggcgtgggtggcaacgaccctggtgcgcccggggtcgtcggcgggaacgtcgaacctggcgtgcccggagtcgtcggcgtggatggcaacgaccctggtgcgccgggggtcgtcggcgggaatgtcgaacctggcgtgcccggagtcgtcggtgtggacggcgatcctggtgtgcccggcgggtacgctgatcctggtgtgccgggagccgttggcgtgtgcggcggccagacgccaccggggtgctctgtgggtggtggtacgcctacgggttgacccgacggtgcccactgggaccacggcggcggctggtagcctgacggcggagccgagccaccatgggacgaaggcggcattgatggcttggggctattgccgtctgcgggcggcgacgggtacgacggcgtggtggagctccctggtggggatgggtgcgacggtgttgtggagctccctggcggggacgggtgcgacggtgtcgtggagctccctggtggcgacggggtggtagagctccctggcggggatgggtgcgacggtgtcgtagagctccctggtggcgacgggtatgccggtgtgttggagctccctggcggagaagggtacgacggcgtgttggagctccctggcggggatgggtgcgacggtgtcgtggagctccctggtggcgacggtgttgtggagctccctggcggggacgggtgcgacggtgtcgtggagctccctggtggcgacggggtggtagagctccctggcggggatgggtgcgacggtgtcgtagagctccctggtggagacgggtatgccggtgtgttggagctccctggcggagaagggtacgacggcgtgttggagctccctggcggggatgggtgcgacggcgtattcgagctccctggcggggacagtggctgtgaaggtccaccggggcccgacccaggcgggccggacgtcggaggcggctggcattgcgccgtcctgcagtcgaacggcgcggccgcggcggcgcactgtggcggtgggcgctgcgcaggagcgccagggatgcagttccagcgcccgtcagccgtggcgaccgcgcacccagggcgcgaggtgaagaagttgtcctcgtaggtgaagttcctgagcgtcccctgcaggccgcacaccgccggcggcacggggcccctgagcaggttcccggcgacgttgagctgctggagggcggccatcccgccgacggcgggcgggagcgggccctggaggtggttgccgctgacgtcgaacaccgtgagcttcgtgagcaggccgacctgcggcgggacgcagccggtgaggtcgtcgtcgatgaggacgatctcgttgagcgtggccgccatcctccctatcgacggcgggatgcagccgccgaggcggttgtgcgcgagcacgagcacggaggccggcgagttgccgaggttggccgggatgggcccgcggaggcggttggagttgaggaggatggcgtcgagcgggcggtcgaagagcggcggcgggatggggccctcgaagtcgttgaagcggaggtcgaggtagcggagcgaggggagcgcgagcacgacggcggggaaggcgccgacgaagcggttgttgctgaggtcgagctcgtggaggaggcgcaggtggagcagcgtgtccggcagcaccccgcagaagcggttggagttgaggtggagcagcgccaggtcgggcacgccgagggggaggtcggcggggatgtggcccgcgatgtcggcgtggttgaggtcgatgccggccacggccagcgccccgtcggagggccgcggcgcgcagtagatgccgttgtacgcgcacacgttggggcccgcccagttggaggtgaagttggacgggtcggagaagatggccgtccgcttccacgcctgcagcgccgcgtacgccgcctgcagcgccgggctcgtcggcggctgcgctgctgcggggcgcgcgagggtgagtgtgaggaggaggaggaggaggaggaggttgcgccacccgctggtgatgctgcctcctgcgctggaagcgggaggagcggggatcatggccggcagccgcggcggtgtgccggtggcggcgcggtggttttggtgggggagagactggagagagaggggagtggacagtggagtgaaggaggcgggcgcgggtggcagtgatgtgcagcgcacggtgtccctttgtcaggggcggggtcaggtcacatggcaagcgtaactacgcggaggtccg

SEQ ID NO: 134484 - DNA, 1358 bp, Zea Mays
ggcaacatgcacggagctggcgcgtgtggatcgctcgcgttgcccgccaaattaaggcaggcgcgagggaagacgaggacgaacgagcgaacggccaaatgatcagccacataccgttcttccggagaattcatcgctggatcctccctagctgcggcgacgtccaccagccgcgcccgtcgtcccgccgtcgaggtacgcacctggcctcaaggaatgaggccccgaggccggcggcggccccttcgaagctgaggaaggtggggtcggaggggaagctggtcctggccgtgcccaaggacgtggaggagttccggaccatgtcggcgccgtacggccacctcagtctcttctcgtacgacgagctcaggaaggccaccggcgactttaacccggggcagatcgtcggcgaaggaggcttcggcgtcgtctacagagggctcatcgacggcgccgtgcgcaaggggtacccgccgaccacggaggtcgccgtcaaggtgctcaacccggaggggatccagggtgacaaggagtggctgacggaggtgagctacctcgggcagtacaggcacccgaacctggtggagctcatcggctactgctgcgaggacaaccaccggctgctggtgtacgagttcatggccaagggcagcctggagcaccatctgttccgccgcgcctgcagcctgacgtggacgacgcgggtagccgtcgcgctccacgtcgccaggggcctcgccttcctccacggctccgaccgccccatcatctaccgggacttcaagacctccaacatcttgctagacgcggaattcaacgcgaagctatcggacttcgggctggccaaggaggggccgatgggcgacgagacgcacgtatccaccagggtcatgggcacctacggctacgccgcgccggagtacatagccaccgggcacctgacggtgatgagcgacgtgtacggcttcggcgtggtgctgctggagatgctggtggggcggcgcgcgctggagccgagccgggcgggggcccgcgacggcagcctggtggactgggcgcggcccatcctgatccggcccaacaagctggagcggatcctggaccggcggatgggcaaggtggacccggagatggggctagagcgcgtggcccgcctcgcctacgactgcctcagccacaaccccaaggtccggccctccatggcgaaggtcgtcgccacgctcgaggccgtcctcgccgccggcgacgccgccccgccgcgggtagaggaaaaaaagaaggcttcacctgaacctaacagtaacagtaacagaaccccaaacgccaaagctcgcaagatgaacttgatgctggtttag

SEQ ID NO: 134485 - DNA, 170 bp, Zea Mays
taacttgccgcttggtagaacaatatgtgttttcccaagcttcaggcgaatggaacggaaccaccagaacagcggatcgaattgatctgcgacgcgctcggatggttgagcagacttcactaggacccttttcagcccttcgcacacaggagctgtctatttggaggatc

SEQ ID NO: 134486 - DNA, 3502 bp, Zea Mays
tcactgacagacacggctcttcaattgttaacgtagaagtataggatggctgtatcactatgctatttctgccccgggctcacaacacggtcccggatgcccgtgaagcggtacaagaagatccttgctgaaatcttccccaaaacacaggatgaagagcctaacgagagaaggattgggaagttgtgcgagtacgcttcgaaaaaccctcttcgagtgccaaagatcacagtttacttggagcagcacatttaccgggacttaagaagtgagcagtacggctttgcaaaagtggtgatgttgatatatcgcagactgtcggtttcctgtaaagaacagatgcctctgtttgcaagtagcctattaagcattgtgcacactcttttagaccaaaagaggcaggacgatttgcgcattgttgggtgtgaaaccttgtttgattttactgtcaatcaggtggatggtacatatcagttcaatttggaagggctggtcccaagactgtgtgaaatagcccaagaagtaggagaagatgaaagggcaagtgccctacgagcggcagccctgcaatctctttcagctatgatctggtttatgggggagctttctcatatctcgtcagagtttgacaatgttgttcaagttgtactggaaaactacaaacctcagaagatgcaaaatgatgatcaaagtaccaatgatgctgacaaccagttggtgcaggaagaccagaaggctgagcacccgccttcccctttcattatcactccggccccctcttgggagaacatagttaatgccaagggaggaatcaacctgccagaggaagatgttagggatcctaaggtttggtccagaatctgtgtgcacaatatggccaagctttctagggaggcaaccacattccgccgcatcttggaatgtttgtttcggtactttggtaacaatagttcatggttatcagaaaatggacttgctttgtgtgtcttgttggacatgcaacttttagtagaaagttcaggacaaaatatgcatttaatgttgtcacttttgataaaacatattgagcacaagacaatgttgaagcagccagacatgcagcttagcatcgtggaggtggcagctacccttgcagaacaatccagtgctatcgcttcaccagcaactgtaggtgccataagtgatcttgtgaggcatttgaaaaggacattccatattactcttggcagcaaagatatggaattagtaaaatggaacgaaaaattccggaagggcatagatgaatgcctagttcagctgtcaaagaaggtgtctgatgctgggccagttcttgacatgatggctgttatgctagaaaacattgcgagcactcctgttgtagctagatcaactgcagctgctgtttatcgcacagctcagataatcgcttctgtgccaaatttgcaatatcagaataaggtgtttcctgaagctctgtttcatcagttgctgttaacaatgatccaccccgaccatgaagctcgtgttgctgcacaccgcatatttgctattgtcttagtcccatcttctgtttcaccttcgattcaagccagtccctcaggccaggtaaagaaacatgacatgcagaggacactctctagggccgtctctgtgttttcttcttcggctgctatctttgacaagatgaaaaaggacaagcactcagaaaattcacaaggagaaagcaaggacaatagtttgcatagcgttggtgaagggaccggacaaccaaagaatcaaaaccttcatgtgtctcaaagccgacgtagtagcatgagaatttctaatttttccatgaaaagaggcccttcaatggccatgagagctccttcagtagctatcagagctccttcaatatctctgagaggtccttcaatgtcttcaagagcatcttctgtgtctgtaaaggaagaccaaatttccccaaagaaatccgacgaggaaacggaatcagtgttggtgaagctgagcgcccgtcagatcacacttttgctatcatccatttgggctcaagcaacatcccctgaaaatactcctgtgaactatgaagccattgctcatacttacagtttgcttctactgttctctggatccaaggcatcaacttttgaggctcttacccagagttttcaggttgcattttctttgaggagctatgcgctcactgaagcagattcattacaaccgtctcggcgtcggtcattgtttactctgtcgacagccatgattattttctcgtcaagagcttacaatgtgttgccactcattccaatctgtaaacaaatgatcaatgatcgcgcggccgatccattccttcgtttggtggatgagagcaaacttacagctgtcaaggattgttcaaatgatccttcaaaaatatatggatcaccagaggacaacgctaatgcactgaagtccctctcagaaatagaactgtcagaaagtcaatctcgagaatgcatagtctccacaatcatgaacaacattgcaaatatgatggatgcggagttgcataatgtgagaagccaactgctaagtgatttcactcccgatgacatgtgtcctacaagcactcagttctttgaaatgcatgttgataatccttcagggtttcatgagactggtcaccatgaagagcagggtttgctgattgacctggggaatgaccatgatgcttttggggaagcttcggaaggcgcagaagctcgcacatcttctgtacctgcatcagatcttctgagtatcgatcagctccttgaaacggttggtgcagaaccagcacctcaggctggagtagtgtcggcagacattggattcaaggatatgactagccactgcgaagccctgacgatcgggaaacagcagaaaatgtctgccttcatgagcttccagcaaagcgtgcaagctgcaggggtgccaggcagccagcccaaccagacgacggagctggaccttttccaagacctgcagttgcctcaggccggggcgcagagcacaaacccattctctgatgagagcgttcagggatacccacagtacatgaacgggcccaacggcgacaacgcacagccaggccaggacttccaacagcagtctctgaagctaccggcggcgagcccgtacgacaatttcctaagggctgctggctgttaggagtccagttacatggacgacaaccacctcacctcaagatagtcccaacggaagatcctgcaatttttccacattttgcagggaaagaagaggggtatgtccgcgtgtgaggtcttagctagagactcaaaccgggttcgacacccattctttatgtatagctgtacgtggttgggctttgagccctttgctgctgctgctgttgttttcaccaatgcaacgtgtagagagggactgtgggggagcagtgccttctaccagactgtacatgtaacatgttgcagaaatatatgaagaaaaaatgacgttt

SEQ ID NO: 134487 - DNA, 3581 bp, Zea Mays
tcactgacagacacggctcttcaattgttaacgtagaagtataggatggctgtatcactatgctatttctgccccgggctcacaacacggtcccggatgcccgtgaagcggtacaagaagatccttgctgaaatcttccccaaaacacaggatgaagagcctaacgagagaaggattgggaagttgtgcgagtacgcttcgaaaaaccctcttcgagtgccaaagatcacagtttacttggagcagcacatttaccgggacttaagaagtgagcagtacggctttgcaaaagtggtgatgttgatatatcgcagactgtcggtttcctgtaaagaacagatgcctctgtttgcaagtagcctattaagcattgtgcacactcttttagaccaaaagaggcaggacgatttgcgcattgttgggtgtgaaaccttgtttgattttactgtcaatcaggtggatggtacatatcagttcaatttggaagggctggtcccaagactgtgtgaaatagcccaagaagtaggagaagatgaaagggcaagtgccctacgagcggcagccctgcaatctctttcagctatgatctggtttatgggggagctttctcatatctcgtcagagtttgacaatgttgttcaagttgtactggaaaactacaaacctcagaagatgcaaaatgatgatcaaagtaccaatgatgctgacaaccagttggtgcaggaagaccagaaggctgagcacccgccttcccctttcattatcactccggccccctcttgggagaacatagttaatgccaagggaggaatcaacctgccagaggaagatgttagggatcctaaggtttggtccagaatctgtgtgcacaatatggccaagctttctagggaggcaaccacattccgccgcatcttggaatgtttgtttcggtactttggtaacaatagttcatggttatcagaaaatggacttgctttgtgtgtcttgttggacatgcaacttttagtagaaagttcaggacaaaatatgcatttaatgttgtcacttttgataaaacatattgagcacaagacaatgttgaagcagccagacatgcagcttagcatcgtggaggtggcagctacccttgcagaacaatccagtgctatcgcttcaccagcaactgtaggtgccataagtgatcttgtgaggcatttgaaaaggacattccatattactcttggcagcaaagatatggaattagtaaaatggaacgaaaaattccggaagggcatagatgaatgcctagttcagctgtcaaagaaggtgtctgatgctgggccagttcttgacatgatggctgttatgctagaaaacattgcgagcactcctgttgtagctagatcaactgcagctgctgtttatcgcacagctcagataatcgcttctgtgccaaatttgcaatatcagaataaggtgtttcctgaagctctgtttcatcagttgctgttaacaatgatccaccccgaccatgaagctcgtgttgctgcacaccgcatatttgctattgtcttagtcccatcttctgtttcaccttcgattcaagccagtccctcaggccaggtaaagaaacatgacatgcagaggacactctctagggccgtctctgtgttttcttcttcggctgctatctttgacaagatgaaaaaggacaagcactcagaaaattcacaaggagaaagcaaggacaatagtttgcatagcgttggtgaagggaccggacaaccaaagaatcaaaaccttcatgtgtctcaaagccgacgtagtagcatgagaatttctaatttttccatgaaaagaggcccttcaatggccatgagagctccttcagtagctatcagagctccttcaatatctctgagaggtccttcaatgtcttcaagagcatcttctgtgtctgtaaaggaagaccaaatttccccaaagaaatccgacgaggaaacggaatcagtgttggtgaagctgagcgcccgtcagatcacacttttgctatcatccatttgggctcaagcaacatcccctgaaaatactcctgtgaactatgaagccattgctcatacttacagtttgcttctactgttctctggatccaaggcatcaacttttgaggctcttacccagagttttcaggttgcattttctttgaggagctatgcgctcactgaagcagattcattacaaccgtctcggcgtcggtcattgtttactctgtcgacagccatgattattttctcgtcaagagcttacaatgtgttgccactcattccaatctgtaaacaaatgatcaatgatcgcgcggccgatccattccttcgtttggtggatgagagcaaacttacagctgtcaaggattgttcaaatgatccttcaaaaatatatggatcaccagaggacaacgctaatgcactgaagtccctctcagaaatagaactgtcagaaagtcaatctcgagaatgcatagtctccacaatcatgaacaacattgcaaatatgatggatgcggagttgcataatgtgagaagccaactgctaagtgatttcactcccgatgacatgtgtcctacaagcactcagttctttgaaatgcatgttgataatccttcagggtttcatgagactggtcaccatgaagagggtttgctgattgacctggggaatgaccatgatgcttttggggaagcttcggaaggcgcagaagctcgcacatcttctgtacctgcatcagatcttctgagtatcgatcagctccttgaaacggttggtgcagaaccagcacctcaggctggagtagtgtcggcagacattggattcaaggatatgactagccactgcgaagccctgacgatcgggaaacagcagaaaatgtctgccttcatgagcttccagcaaagcgtgcaagctgcaggggtgccaggcagccagcccaaccagacgacggagctggaccttttccaagacctgcagttgcctcaggccggggcgcagagcacaaacccattctctgatgagagcgttcagggatacccacagtacatgaacgggcccaacggcgacaacgcacagccaggccaggacttccaacagcagtctctgaagctaccggcggcgagcccgtacgacaatttcctaagggctgctggctgttaggagtccagttacatggacgacaaccacctcacctcaagatagtcccaacggaagatcctgcaatttttccacattttgcagggaaagaagaggggtatgtccgcgtgtgaggtcttagctagagactcaaaccgggttcgacacccattctttatgtatagctgtacgtggttgggctttgagccctttgctgctgctgctgttgttttcaccaatgcaacgtgtagagagggactgtgggggagcagtgccttctaccagactgtacatgtaacatgttgcagaaatatatgaagaaaaaatgacgtttgaaggatagatctggtgtagctcgtcgagttaccagatgatgggatcaaagaagcctttcatatttgcggtggaagttcgtt

SEQ ID NO: 134488 - DNA, 229 bp, Zea Mays
atgtctaaaacctgtgagattcgaaccaaatctccacgttccaaacaggacgtacgagatttgcgttttgtctgcttttagagcgatcgaggaaaagagaaatatgcagtaagatgatagacctttatttcttcagttcatgttgtgctttcctgattagaggagcagtcctcttcagaggatgaatccttgtcttgtcatgctgttcttattgtttgttacagaaacc

SEQ ID NO: 134489 - DNA, 734 bp, Zea Mays
ataaaaccggcccacccatcgctagggttcgccccaccaaagcctccgcccccttcttccctgacaccctcgccgccgcgcacgcacgcacgcagggaaccagcgaagagagatgggcgtctacaccttcgtgtgccgcagcgccggcggcggcgagtggaccgccaagcagcactccggcgagatcgaggcgtccgccgccaccccctacgagctgcagcgccgcctcgtcgcctccgcctccgcggccgactccgcgtccggcgtccagtcgtccttctccatggtcacccccagctccgccgtcttccaggtgatcgtcggtggtggcgcgatgatggttagtggcggcggcggcggcggcgcgtccgccgccgcgtcgggtggtgctgcggccgaagctcccaaggaggagaagaaggaagaggagaaggaagagagcgacgacgacatgggattctccctgttcgactagagacagagttaagctgcgtgtgcatggttgctgttcggtcgtgtcgcgaaacgtgaagagctcaagcggcctttttgttccagtcccacatgtgagagcttgatacgttgtctggaatgaaaaattttctccaaaattcacgaatatatattgcgtacgcacaatactgtagattaaacaatgacttgtgtagagctgtaaaatcgacgcaattatatgaaagcagcactggagtttcaaactgacaagcatttacatc

SEQ ID NO: 134490 - DNA, 3453 bp, Zea Mays
gcacaggaaggtgagtgaggaggaagaaaccgcatgcaaggggacgggagtacgggaccggcgggcggaagacgaacgggattccaaaaaaacgacttgtcgtggcggagcggaatccacaatagcgacgagccgtcggggtctgccggcctggatgcaaaccagtctcgtcgtcacggactcccggaataaatactccctcctgcggcgcccggcggaaaccgccgaattcccctcttcctcgcgcgtgctcagcgattcgagaaaaaaatactaactgtcttactaggagcctagagtgtccgaatttttgccattgcttgtcctgacttgccaacctacaatgggatggggaaacactattaccagacgcctcaaggttttctctatggccctgtttatctacttcgactataaggctgttcagaagagagttcaatgggttagcactggtaaaaagagtgctatatggaagaaaacacatgagcgaaatgctcgccgtgtcctcaacctgatgatagagttagaaggtttatgggtgaaactgggccaatatttatccacaagagcagatgtacttcctgaaccctacataaatgtcctcaagcagttgcaggattcgcttcctccacgaccttttgaagaggttcgtgaaacgatagagaaagaacttggagaacctatgagtgatctatttgctgattttgtcctagaccctctcgcaaccgcatcaatagcacaagttcatcgtgcaactctggcagatggcagagaagtagttgtcaaaattcagcatgatggtgtgaaggagatcatattagaggatctgaagaatgcaaaatcattgattgaatggatagcgtgggcagagcctcagtatgattttaatccgatgattgatgaatggtgcaaggaggctccaaaggaacttgatttcaaccatgaagcagagaatactagggctgtctccaggaatcttagtcgcaaaagtgactgtgggagtggcagtgtttccagtactgttgatgtactcattccagaagttattcagtcaactggcaaggttctaattttggaatatatggatgggattcgtttaaatgataatgattcattggaagcatatggtgttgacaagcaaaaactggtcgaagagataacccgtgcatacgctcatcaaatatacattgatggcttctttaacggcgaccctcatcctggcaattttcttgtgagcaaggaacctccacataaaccgattctccttgattttgggctcactaagcgcatatctgaatctatgaggcaggcactagcaaaaatgtttttgtcatgtgcagagggagatcacgtggcactgctgtcagcattttcagagatggggcttaaactgcgggttgacatgcctcagcaggctatggatattgccacagtattctttcgtcagtcaaccacagcaagtgaagcaaaggagaacataaaaacacttaatgaccaaagagagagaaatgtcaaagctcttcaagaaaagatgaaattgaacaagaaggaggttcaacgctttaatcctgttgatgctttccccggggatgccataatatttatgagggtcttgaatctcctcagaggtctttcagcttcactaaatgttaggatagtttatctggacatcatgaggccatttgctgaatcaactttgttagggagtttgacacacggacaaatacctaacagtcagtggatttttgactcacctgctaactctgatgtggagtctaaactgagaaattatctgcttgagttgggaagcgacaaaattttaggaatacaagtctgcgcatataaagatggaaaggtcataatagatactgctgctggtatgctggggaagtatgatccccgacctgttcaacctgattctctttttcctgttttctcagtgactaagggtatcactgctgggatggtacattggcttgtggacaaagggaagctgaagtacgaggaaacagttgccaacatatggccgaattttggaactaacggaaaggagttaataaaggtccatcatcttctaaatcacacatccggtttgcacaatgcactgggtgatgtggtaaagaatgatcctttgttggtatgtgactgggaggagacactaaaccagattacgaagagtacacctgagaccgaacctggttcagcacaaatttaccattacctctccttcggttggctgtgtgggggagtcatagagcatgcatctgggaagaagtttcaagagattctagaagaggctattgttcgtcctcttcacattgagggggagttgtatgttggcattccaccaggtgtcgagtctcggctggcagcgctgacagttgacaccgaggagctccagaagctatcaggaatcagggcaggtgcagatgtgccagcagctctgctgaacaacatcgcgcagatggcgtccggtgtgcccgctattttcaacacgctaaacgtccgtcgggccatcatccctgccgccaacggccactgctctgcccgcgcgctcgctcgatactacgcggcgctagcggccggcggttctgttcccccgccgcactcttcgggcgccatgccgcccctcggcagccacgtgcacacccccaagttcccgaccgcgccgctcaagaagaagaagaagggcgccggaaagaagaagggcgccggcggcggctccatgggagacctcaaggtccaggatataagcggcggcagcagcgacaggaacgggtactgccagctgcgcaccagcgacgccgacagcgaggcggggagcggcagcggcggaggcggcaggatgttcggcagcgacaggatcctcgacgcgttcatgggcgtcggcgagtacgagggcatggcgcaccgggacggcaagttcgggctcgggttcaggaggtacgacgacgccagcagcggcagcggcaggctgaggtgctttgggcactccgggatgggcggctcgaccgggttctgcgacgtggagaacggcttcgccatcgcggtgacggtgaacaagctgtctctgggcagcgtcacgcgcggcgtcgtccggctcgtcctcgaggagctgggcctgcccgtgccggacgagtactcggccaccggggagaaggggcctgacatgatgctcaacctgacgacaacgacgacgactacgccgccgcaactgagatgacgacggcgaaactgagattatcaggttgggttcgtaataatctgtggaacaagatatatagcgagcagaaggaaggttggggtacagggatttggtggacagtatatatacgcgtgccattttgattttgacgtggcatgtaaaactcggcaaattctggtatattacgaagctgggtgctgggaattgtggccagcagtacaagaaatggacatgctagtttgttgacc

SEQ ID NO: 134491 - DNA, 2371 bp, Zea Mays
atttaaagaaaggaaaccgttttcgatttccttcctacgcgtctcgcgttggcagcgcgatccttcggagccgacgaatcccaccactgcccgcgccgcctccgcagacgacgcaactgacagtcaccgacgcgacgcggctcgcctcctccgcccttctgttcagcctcctcgcccgcgatggctccgggcaccgacgccggctacggccagtgggcggcggcgtgccccccgctgcggcggaacctgcagctgctttcgcccgacgaggttgagctagcaaaaatgctgttgaatgaaggccagattcacctgttcgaacactggcctgaaccaggtgtcgatgatgacaataaaagaggcttctttgatcaggttcgccgacttaattcaagctatcctggaggtctggtatcttacatccagaatgccaaaaaacttcttgcggattcaaaggaaggcaaaaacccatatgatggtttcaccccttctgtgccttcaggggaggttttgacttttggcaatgacaattttgtttcactggaaacagctgggataaaagaagcctgcaatgctgcatttgttcttgtagccggagggcttggcgaaaggcttggctacaaaggaattaaggtagcacttccccgggaaacaactactggaaaatgtttccttcaacactatatagagtctatcctggcttttcaagaggccagctgcaaaatggttgatgaggggtgccaaacaaagattccatttgttattatgacttctgatgatacaaatgcgctaactatcaagcttttagagtcaaactcctacttcggaatggaaccatctcaagtgaaaatactaaagcaggaaaaagtagcgtgtctagctgacaatgatgcaaggcttgcattagacccaagtgacaagtacaaaattcagacaaagccacatgggcatggagatgttcattctcttctttattcaagtggcttgcttgaacaatggaagactgaaggacggaagtgggttctctttttccaggatacaaatggattgcttttcaatgcaataccatcagcattaggtgtcagtgccaccaagggttacaatgtaaattctctcgctgttcctaggaaagccaaggaagcaattggaggaattaccaaacttactcatgtcgatggtagaacaatggtcatcaacgtagagtacaatcagcttgatccactccttcgtgcaactggacatcctgatggagattcaaattgcgagacaggctattctccatatcctggaaatataaaccagttgatactggagcttggaccatatattgaggagctcaagaaaacacatggcgccatttctgaatttgtaaatcccaagtatactgattcgaccaagacagcatttaaatcatccactcgtctagaatgcatgatgcaagactatccaaagacgttgcctccctcagcaaaagttggattcacagtgatggatacatggcttgcttacgctcctgtgaagaataatcccgaagacgcagctaaagttccaaagggcaacccttatcatagtgcaacatccggagagatggcaatttacagggcgaacagccttattctgagaaaggctggtgctcagatagctgatcctgttgttcacaccttcaacggacaagaggtagaggtttggccacgcgtaacctggagcccacggtggggtctcaccttcaagagtgtcaaggagaaagtgcacgggaactcttcagtttctcagaggtcagctttggtcatcaatggtcagaacgtcttccttgaaggcctctcgttggacggcactcttgttgtcaacgccgcggatgaagcagaggttaaacttaccggtcatatacagaataaaggctggactatccagcatgtcgactacaaggacgcctcggagaaggaagagatcaggatccgcggatttaagttggagaagattgagcagctagaggtgaactacacggagccaggaaaccatagcttgagtgcatgaaacaaaacattcttggttgacccgactagcttcctaccgattgggaatagttcgcattgcctcccagattctgggaggccattgccagcataagttgaagctgttgtattttagttcaaaattaaactagtggatgacaaatatttaagaatggaggtagtaataaggagccaagtgcttcaccaatcattccaaattcaatattctttatgtatatacgtactatttcatagccaaacgttttctcctcacctgtgtaatcggagttgattatttatctgggatctgatgttcatgttacaattttgaattttagaattgtgtgtgtattagttat

SEQ ID NO: 134492 - DNA, 2353 bp, Zea Mays
atttaaagaaaggaaaccgttttcgatttccttcctacgcgtctcgcgttggcagcgcgatccttcggagccgacgaatcccaccactgcccgcgccgcctccgcagacgacgcaactgacagtcaccgacgcgacgcggctcgcctcctccgcccttctgttcagcctcctcgcccgcgatggctccgggcaccgacgccggctacggccagtgggcggcggcgtgccccccgctgcggcggaacctgcagctgctttcgcccgacgaggttgagctagcaaaaatgctgttgaatgaaggccagattcacctgttcgaacactggcctgaaccaggtgtcgatgatgacaataaaagaggcttctttgatcaggttcgccgacttaattcaagctatcctggaggtctggtatcttacatccagaatgccaaaaaacttcttgcggattcaaaggaaggcaaaaacccatatgatggtttcaccccttctgtgccttcaggggaggttttgacttttggcaatgacaattttgtttcactggaaacagctgggataaaagaagcctgcaatgctgcatttgttcttgtagccggagggcttggcgaaaggcttggctacaaaggaattaaggtagcacttccccgggaaacaactactggaaaatgtttccttcaacactatatagagtctatcctggcttttcaagaggccagctgcaaaatggttgatgaggggtgccaaacaaagattccatttgttattatgacttctgatgatacaaatgcgctaactatcaagcttttagagtcaaactcctacttcggaatggaaccatctcaagtgaaaatactaaagcaggaaaaagtagcgtgtctagctgacaatgatgcaaggcttgcattagacccaagtgacaagtacaaaattcagacaaagccacatgggcatggagatgttcattctcttctttattcaagtggcttgcttgaacaatggaagactgaaggacggaagtgggttctctttttccaggatacaaatggattgcttttcaatgcaataccatcagcattaggtgtcagtgccaccaagggttacaatgtaaattctctcgctgttcctaggaaagccaaggaagcaattggaggaattaccaaacttactcatgtcgatggtagaacaatggtcatcaacgtagagtacaatcagcttgatccactccttcgtgcaactggacatcctgatggagattcaaattgcgagacaggctattctccatatcctggaaatataaaccagttgatactggagcttggaccatatattgaggagctcaagaaaacacatggcgccatttctgaatttgtaaatcccaagtatactgattcgaccaagacagcatttaaatcatccactcgtctagaatgcatgatgcaagactatccaaagacgttgcctccctcagtgatggatacatggcttgcttacgctcctgtgaagaataatcccgaagacgcagctaaagttccaaagggcaacccttatcatagtgcaacatccggagagatggcaatttacagggcgaacagccttattctgagaaaggctggtgctcagatagctgatcctgttgttcacaccttcaacggacaagaggtagaggtttggccacgcgtaacctggagcccacggtggggtctcaccttcaagagtgtcaaggagaaagtgcacgggaactcttcagtttctcagaggtcagctttggtcatcaatggtcagaacgtcttccttgaaggcctctcgttggacggcactcttgttgtcaacgccgcggatgaagcagaggttaaacttaccggtcatatacagaataaaggctggactatccagcatgtcgactacaaggacgcctcggagaaggaagagatcaggatccgcggatttaagttggagaagattgagcagctagaggtgaactacacggagccaggaaaccatagcttgagtgcatgaaacaaaacattcttggttgacccgactagcttcctaccgattgggaatagttcgcattgcctcccagattctgggaggccattgccagcataagttgaagctgttgtattttagttcaaaattaaactagtggatgacaaatatttaagaatggaggtagtaataaggagccaagtgcttcaccaatcattccaaattcaatattctttatgtatatacgtactatttcatagccaaacgttttctcctcacctgtgtaatcggagttgattatttatctgggatctgatgttcatgttacaattttgaattttagaattgtgtgtgtattagttat

SEQ ID NO: 134493 - DNA, 806 bp, Zea Mays
attgaatgagacaggtgggagttctttgtgctgctgctcatgttgccgttcgtgacactgtgggaaagcttgcggatgaccacaggaaggctaaagttttggtaggtttcgtacttccgtttccgaaccaaaatttactttcatttagataaccacaactgacgatgtttgcaaattggcttgcttgtcaacttaacgttagttctgtttgtggagtttgggtattgaagcttgtatgtcttgttgggttcattttcttagagggactgaagaatgactcagcttcggtcgagaccaatatgttcaagctctgcaaggtgaggtccgttcagtttggctagaaaggcatcccctacctgaacacctacgatggcctcaccatccgctaccccgacccgctcatcaaggctaacgacaccatcaagatcgatctggacaccaacaagatcatggacttcatcaagtttgatgtgggcaacgtggtcatggtgaccggcgggaggaacaccgggcgtgtaggagtgatcaagaacagggagaagcacaagggcagcttcgagaccatccacgtgctgcttggagctttttgctatgtctagttttctcctatttgttgtacaggaaaacatagaatggaattcaaatttggtggccgcaaaagtgtggagacttgaattcatataaagttaggcttaacataagtgcaaacagttgtattttagtttagatttagagtacacttatgtatgtgttgtttgataatgcttatttatgatatattgaatagtacttatttatattatatt

SEQ ID NO: 134494 - DNA, 1891 bp, Zea Mays
ggattcgtccacacccaggcacataaaagccgcctctcgccgccgactgcaaaccctcgtttttctctctcctgcgctgcgccgtccttcacctccgccgccgaatccgagactctgatctcgggttcaccgcagcgcacagagcacccctgactcccggcccgatccgcgctctcctctccgacgcttcagtcatggcaggaatggcacccgagggttctcagtttgatgctaagcactatgattctaaaatgcaggagctgctgagcactggtgagactgaggagttcttcacttcatatgatgaagtttttgaaagttttgatgacatgggccttcaagagaatcttctgagaggcatttatgcatatggttttgagaaaccatctgcaattcagcagagaggaattgttcccttctgcaaggggcttgatgtcattcagcaagcacaatctggtacaggaaagacagcaaccttctgttctgggatcttgcagcagcttgactatggtctggttgaatgccaggccctggttcttgctcccacccgtgagcttgcacagcaaattgagaaagttatgcgcgcacttggtgactaccttggtgttaaagtccatgcatgcgttggaggaacatctgttcgtgaggaccaaaggattctcgccagtggtgtgcatgttgttgttggtacacctggtcgtgtgtttgacatgctgcgtagacagtccctccgccctgataacatcaagatgtttgttcttgacgaagctgatgaaatgctttctcgtggtttcaaggatcagatttatgacatcttccagcttctgccatccaagattcaggttggagtcttctctgctaccatgccacctgaggcccttgagattacccgcaagttcatgaacaaaccagtgagaattcttgtgaagagagatgagctgacccttgagggtatcaagcagttctatgtgaatgtggacaaggaagactggaagctggacacactgtgtgacctgtatgagaccctggccattacccagagtgtcatctttgtcaacacccgccgcaaggtggactggctcactgacaagatgaggagcagggaccacaccgtttctgccactcatggtgacatggaccagaacactagagacatcatcatgagggagttccggtctggctcctcccgtgtgctcatcaccactgacctgcttgctcgtggtattgatgttcagcaggtgtccctggtcatcaactatgatcttcccacccagccagagaactacctgcatcgtattggtcgtagtggtcgttttggtaggaagggtgttgccatcaactttgtgacccgcgacgacgaacgtatgctgtttgacattcagaagttctacaacgtgttgattgaggagctgcctgccaatgttgctgaccttctgtgatcaatttcaagaaaaaacaaaacaaaaaagggtggtgaggaacctggtaaggcttggttttgtcgaaataccgtgggagagggggtgataaggacggtggggtttctatgttgaagtcgtggtcatggacaatttgtgattttttctcctttatgccatgttttggaatttttgtagctgcctaggccttgtggtaatgtgctgctgtgggggttcattagtatgaagaggaagacgctgctggcgctgagtctttctctttattagtattttgtttaaaactatgtatgaccgaatggtggtatttatttgtgtcatccttgactcttattctgctgcaaccagatgtatcgtgccatgtctgcaccactggtctttgctatcctgagtaaaacctgtttactctgtcgagcttgtcgctgatacaccgatcctagctgttttgagtaaaa

SEQ ID NO: 134495 - DNA, 1916 bp, Zea Mays
taaaagccgcctctcgccgccgactgcaaaccctcgtttttctctctcctgcgctgcgccgtccttcacctccgccgccgaatccgagactctgatctcgggttcaccgcagcgcacagagcacccctgactcccggcccgatccgcgctctcctctccgacgcttcagtcatggcaggaatggcacccgagggttctcagtttgatgctaagcactatgattctaaaatgcaggagctgctgagcactggtgagactgaggagttcttcacttcatatgatgaagtttttgaaagttttgatgacatgggccttcaagagaatcttctgagaggcatttatgcatatggttttgagaaaccatctgcaattcagcagagaggaattgttcccttctgcaaggggcttgatgtcattcagcaagcacaatctggtacaggaaagacagcaaccttctgttctgggatcttgcagcagcttgactatggtctggttgaatgccaggccctggttcttgctcccacccgtgagcttgcacagcaaattgagaaagttatgcgcgcacttggtgactaccttggtgttaaagtccatgcatgcgttggaggaacatctgttcgtgaggaccaaaggattctcgccagtggtgtgcatgttgttgttggtacacctggtcgtgtgtttgacatgctgcgtagacagtccctccgccctgataacatcaagatgtttgttcttgacgaagctgatgaaatgctttctcgtggtttcaaggatcagatttatgacatcttccagcttctgccatccaagattcaggttggagtcttctctgctaccatgccacctgaggcccttgagattacccgcaagttcatgaacaaaccagtgagaattcttgtgaagagagatgagctgacccttgagggtatcaagcagttctatgtgaatgtggacaaggaagactggaagctggacacactgtgtgacctgtatgagaccctggccattacccagagtgtcatctttgtcaacacccgccgcaaggtggactggctcactgacaagatgaggagcagggaccacaccgtttctgccactcatggtgacatggaccagaacactagagacatcatcatgagggagttccggtctggctcctcccgtgtgctcatcaccactgacctgcttgctcgtggtattgatgttcagcaggtgtccctggtcatcaactatgatcttcccacccagccagagaactacctgcatcgtattggtcgtagtggtcgttttggtaggaagggtgttgccatcaactttgtgacccgcgacgacgaacgtatgctgtttgacattcagaagttctacaacgtgttgattgaggagctgcctgccaatgttgctgaccttctgtgatcaatttcaagaaaaaacaaaacaaaaaagggtggtgaggaacctggtaaggcttggttttgtcgaaataccgtgggagagggggtgataaggacggtggggtttctatgttgaagtcgtggtcatggacaatttgtgattttttctcctttatgccatgttttggaatttttgtagctgcctaggccttgtggtaatgtgctgctgtgggggttcattatctttctctttattagtattttgtttaaaactatgtatgaccgaatggtggtatttatttgtgtcatccttgactcttattctgctgcaaccagatgtatcgtgccatgtctgcaccactggtctttgctatcctgagtaaaacctgtttactctgtcgagcttgtcgctgatacaccgatcctagctgttttgagtaaaacctgtttactctgttgagcttgtcacctggtgatgcaaggtgcttattgactggtaatgtattttgaagtcgttatact

SEQ ID NO: 134496 - DNA, 1863 bp, Zea Mays
cctggagtgagtcgagcagaagcagagtttgcagtctgagaagacccctgtgctgtccagccaacttttccacctcagtcttggatgccccccctccgccgtctagatctccccaactcctccgtcctcttgcttcctgtcgtcgacctcggtggccgccgcgagctgcgggtggttcatcgccgtcgacctcgcctctccgctccttctgcactgcctgttaccggcttcctggtggtcgaccggtgcggcgcgggtcgtcagtgaagctccgactatccggattgactcggatcgacctctcctctcgtgggtttttggattttgatcagttatatcagaggagtgcttatggatgatttcatggctgtagcttgctaggccctgctttcctgtttgtacagatacatcatggcaccacgcagtaggccttcgtctaaaaggcctctctggttcatcgtgttggttgcatttgtctgtgcagtagccattggagcctacctttatactccacggcattacacagcatgttatctggtaccatcagaagcctgcaattctcggcctcctccagaacctgctagggtatacactgatgatgagatcgctgctcgtgctatcatgagagacatcatccgggcacggccagtgcagtcaaagaatccaaaaattgctttcatgttcttgacgcccagttcattgccatttgagaaactgtgggaaaaattcttcatgggacatgaagaccgatacaccatatatgtgcatgcatcaagagatagaccaattcatgcaagtccagtattctctggcagggatattcgaagtgaaaaggtgatctggggcacaatttctatggttgatgctgaaaagcggctcttggcccatgccctacaagaccctgaaaaccagcattttgtcttgctttctgagagctgtgtctgtgtgccacttcataactttgattatatatatagttatctcatggagacaaacgtcagttttgttgactgttttgatgatcctggtccacatggagcaggtagatattctgaccatatgttacctgaaattgtgaagaaagattggagaaagggtgcacagtggtttacagtgaaacggcagcatgcagttcttattcttgctgacaccctttactatgggaagttcaagcgttactgtaagccaggaaatgagtggcataactgctattcagatgagcactacttgccaactctcttcaatatggctgacccgactggaattgcaaactggtcagtgacgcacgtagattggtccgaagggaaatggcatcccaaagtctacagggctgtggatacgagcttcgagctgctcaagaacatctcgtccattgatgagagcgtccatgtcagcagcaacgcgaagcatgtagcgcagaggaggccgtgcgtgtggaacggcatgaagcggccctgctacctgttcgcgcgcaagttctaccccgaggcgcttggcaacctgatgaacatattctcgaacttcaccgtcatctgagcagctgaatggaggcaggaacacagctaagcaactctgtcggatcagagtccagacgtcgccaactacctgctgccgcaactctagtagatagattgctggtgatggctgctgagctaaggttatttgccagctcttgagacggcaagttttgctggtgtggaacgatggctaggttggtgcgatttgcgaatgtgacgtgtggacttctgttgttgatactgctgcagatgaattgtgattaaattttatgatctttcatctaaaatccaatgtctcacgcacatattaaatcatgctctttcatctaagatccaatgtctcacg

SEQ ID NO: 134497 - DNA, 96 bp, Zea Mays
ataacgtcaaagaataatatcacttcaggaacattgaactggtacgacagtgcaacacaaccgtatcagtttgtttcacttctgccacacacacac

SEQ ID NO: 134498 - DNA, 543 bp, Zea Mays
aagcaagatcattatcaaaccaatctctctctcttgcaatgaccctctcaagcgcctagggatgctaccctagaaccaagcctacggcagaggggtataatctcgccggagtagacagctatctctatggaccgaaggtccatgaaacctggtatcagaggtaggttatcctcaccaccaccagccgcccatccctcaccaccaccagcagccacccatccctcaccaccaccagccgccgcaacgccctcccacccgccctctccagctccagatgcattcactcggctcgaagagagttttggccgtttcgcagagcagtgggatcagttcgttgtgatgttccaccgctacaaggagaagacagagaaggaactccaagcagcggtgcggcttcaggcggcagcgcgagggttcctggcacgccgccaggtatagtctcttcgtggggagaagcatcttgatgtggcctccagggccaccctatggtcgtcatcacacgagcaggccatggtgcgcctgcaagccgcagtgcgcggcttc

SEQ ID NO: 134499 - DNA, 220 bp, Zea Mays
gattgaatgtggaaatctttatgcaggcttaaacagtgttcaaagtactatctagtacattgtttaggcgatgaaaatttacacaagctgatgaacaaaaaaagtgaagatattctcatctctttctaccagcaaggttcaagaaagcactaagcgctgagcgagcggtatggtggtgaaaaagcttaagcgtgattaatcgtgcttaatcatttttgtt

SEQ ID NO: 134500 - DNA, 2147 bp, Zea Mays
caccagcgcctggacgctcgcgccccggcctcgccgccatggcttcctccctggccgccctccactcagccgccgccagccacctcccacaccctcgacgtcagaggaccgccgccctcgcgcgcgcctctcctctcctccgcctgccgcttcgcctccgctcccgccgggtccccgggtcgccgccaaggtacgcacgtttgcattctgtacgcgcgtgcgccgctaaaaaaaaaagcaaccttgaatttacttctacttcggagactcggagtgttgtgagtgacacgtcccgttctagaacctcgcagttggcgaccggcgccgctggcggcacggcaaccggcagggcgaggcggagcgtaggcgtcgacgtcgccgccctcgccgcggcgctgcgcgacgccagaacggccgacgacgtggagtcctcggtgaacgccttcttgagcgacgacgaggcccggctcctgccgctccaggtgtacacgtgcgtgatccgggggctcggcaagggcaacagcccggacgccgcgttcgccgtcgtcgagcacctcaagcggagaggggtggtgccgaaccagttcgtgtacaactgcctcctcggcgccgtcaagagctgcggcgagctcggccgggtccaggccgtcctcgacgacatggaggcgcagggggtgcccccgaacatcgtcaccttcaacacgctgatgtcgatccacgtccagcagggcagggtggaggacgccctcagggtgtacgccgacgtccaggggcgcgggctcgtgccgaccgccgcgacctactccacggtgatgtccgcctacaagaaggcgggggacgcgtccgcggctatccagctcttcgccctgctcagggagaggtacaggaacggggagctggtggggagccgtggtgacccggagcaggagctcgtcaagctcgagaagctgaccgtccgggcgtgctacctgtcgatgcggcggtcgctcgtcggggggaagaatccggtcggcgaggcgctgaaggtcctcctggacatggacgaagcaggtgtccggccggagcggagcgactacgagcggctcgtctgggcgtgcacccgggacgagcactacgccatcggcaaggagctgtaccagaggattcgcgacggtggcgacgagatcagcctgtccgtctgtaaccacctgatctggctaatgggcaaggcgaagaaatggtgggcggctctcgagatctacgaggacctgctggacaaagggccgaagccgaacaacctgtcccacgagctgatcatgtcgcacttcaacgtcctcctggacgccgccaagcgaaggggcatctggaggtggggcgtcaggctgctggacaagatgcaggagaagggcctgaagcccggaggcaaggagtggaacgcggtcctcctcgcgtgctcaagggcctccgagacgtctgcggctgtggacgtcttcaagaagatggtggagcgagggctgaagccggacgtggtctcctacggagcgttgctgagcgcgctcgagaaaggcaggctctacgacgaggcactgagggtctgggaacacatgcgcaggctcggcatcgaacccaacctctacgcgtacacgatcctggcgtcgatctacatcggcaagggcgaccacgccatggcggacgctgttcttcacgacatgctgtcgaagcggatcgcgccgaccgtcgtcaccttcaacgcgataatcagcgcgtgcgcgaggagcggttcgggtgggaacgccttcgagtggttccacaggatgaagatgaagggcattgagccgaatgagatcacgtaccaggtgttgattgaggctcttgtgcaggatgggaagccaagacttgcctatgagatgtacatgaaggcttgcggccagggtcttcagcttcctgcaaagtcgtatgacaccgtgctggaggcgtgtagggcttatggttccgtagtagatgtagctactctgggtcctcgaccttcgaaaggggtggaagtggaacccatcaggatagagaatagcttctcccgtttctctcagttcaaggatgtgcatggcagctctcatcgttttgcaggcgttggaatgtatgggttttacggatacagaatggcaaggtaa

SEQ ID NO: 134501 - DNA, 2204 bp, Zea Mays
caccagcgcctggacgctcgcgccccggcctcgccgccatggcttcctccctggccgccctccactcagccgccgccagccacctcccacaccctcgacgtcagaggaccgccgccctcgcgcgcgcctctcctctcctccgcctgccgcttcgcctccgctcccgccgggtccccgggtcgccgccaagaacctcgcagttggcgaccggcgccgctggcggcacggcaaccggcagggcgaggcggagcgtaggcgtcgacgtcgccgccctcgccgcggcgctgcgcgacgccagaacggccgacgacgtggagtcctcggtgaacgccttcttgagcgacgacgaggcccggctcctgccgctccaggtgtacacgtgcgtgatccgggggctcggcaagggcaacagcccggacgccgcgttcgccgtcgtcgagcacctcaagcggagaggggtggtgccgaaccagttcgtgtacaactgcctcctcggcgccgtcaagagctgcggcgagctcggccgggtccaggccgtcctcgacgacatggaggcgcagggggtgcccccgaacatcgtcaccttcaacacgctgatgtcgatccacgtccagcagggcagggtggaggacgccctcagggtgtacgccgacgtccaggggcgcgggctcgtgccgaccgccgcgacctactccacggtgatgtccgcctacaagaaggcgggggacgcgtccgcggctatccagctcttcgccctgctcagggagaggtacaggaacggggagctggtggggagccgtggtgacccggagcaggagctcgtcaagctcgagaagctgaccgtccgggcgtgctacctgtcgatgcggcggtcgctcgtcggggggaagaatccggtcggcgaggcgctgaaggtcctcctggacatggacgaagcaggtgtccggccggagcggagcgactacgagcggctcgtctgggcgtgcacccgggacgagcactacgccatcggcaaggagctgtaccagaggattcgcgacggtggcgacgagatcagcctgtccgtctgtaaccacctgatctggctaatgggcaaggcgaagaaatggtgggcggctctcgagatctacgaggacctgctggacaaagggccgaagccgaacaacctgtcccacgagctgatcatgtcgcacttcaacgtcctcctggacgccgccaagcgaaggggcatctggaggtggggcgtcaggctgctggacaagatgcaggagaagggcctgaagcccggaggcaaggagtggaacgcggtcctcctcgcgtgctcaagggcctccgagacgtctgcggctgtggacgtcttcaagaagatggtggagcgagggctgaagccggacgtggtctcctacggagcgttgctgagcgcgctcgagaaaggcaggctctacgacgaggcactgagggtctgggaacacatgcgcaggctcggcatcgaacccaacctctacgcgtacacgatcctggcgtcgatctacatcggcaagggcgaccacgccatggcggacgctgttcttcacgacatgctgtcgaagcggatcgcgccgaccgtcgtcaccttcaacgcgataatcagcgcgtgcgcgaggagcggttcgggtgggaacgccttcgagtggttccacaggatgaagatgaagggcattgagccgaatgagatcacgtaccaggtgttgattgaggctcttgtgcaggatgggaagccaagacttgcctatgagatgtacatgaaggcttgcggccagggtcttcagcttcctgcaaagtcgtatgacaccgtgctggaggcgtgtagggcttatggttccgtagtagatgtagctactctgggtcctcgaccttcgaaaggggtggaagtggaacccatcaggatagagaatagcttctcccgtttctctcagttcaaggatgtgcatggcagctctcatcgttttgcaggcgttggaatgtatgggttttacggatacagaatggcaaggtaaacaaaccaagcatgtaacctactatcaatccccctctccctcttgtaatcaccctcccaaacccaatgccacatttttaaaacatttgactcgtgtatttgtaagctcactaagttgcgaaaaaaaaatactagtgcactgccctttatgttagtgtggaccaaaaaa

SEQ ID NO: 134502 - DNA, 1678 bp, Zea Mays
aagcgacatgttcacgcctgttggttcggttcggtttcggcatggaggtagctgagagaccgatggcctcgtcccacctggcagctctcgtctccctgctgatcccctgcctccttgcgcttctgctgctccgcctcgccgccgtgctggacccggaccccgacgccgccgtgccccgcatcaaggcggccgcgcccctccctctccggttccgccacgatggcgccttcaagatcctccaggtggcggacatgcacttcggcaacggcgccaccacgcgctgccgggacgtgggccccgaaggcggcggcgcgcgctgctccgacctcaacaccacgcggttcctgcgccgtgtcatcgaggccgagaagcccgacctcatcgccttcaccggggacaacatatttgggggcagtgcaactgacgcagcagaatcactactcagagcaatcagccctgctatcgaatacagggtgccatgggctgccatcttaggtaatcatgaccaagagtcgacaatgacccgggaggagctgatgaccttcatgtctctaatggactactcggtatctcaagtaaacccacctggttttttggtacatgggtttgggaattatcatgttggcatccatgggccattcggatccgagctggtcaatactagcctgcttaacctttacttcctggatagcggtgatcgtgaaatggtgaatggagttaaaacatatggatggatcagagagtctcaactcgcctggcttcgttctacttccctggagcttcagaaaaaaatacatgccccagcattagcgttcttccacataccaatcccagaggtccgagggctctggtactcaggcttcaagggtcagtaccaggaaggggtggcttgctcatctgtacattctggtgtccttgggacccttgtctccatgggagatgtaaaatctgtctttttgggtcacgaccatcttaatgatttttgtggcaatctcaatgggatctggttctgttatggtggtggctttggttatcatgcctatggaagaccccattggccaaggagagctcggataatttacagtgaactcaaaaaggggcagaggtcgtggttggaagttgactcgatctcgacttggaagctgctagatgatgaaaagctctcaaaaattgatgaacaggttatctggagacatagcacagatgattctgaccacagagtctacttgtgaagaccatgaacctaaaactacttcctgtatgtgtcatgtgtataatgtttgtcgcaaagattcctccaattttataggtcgattgattattggtagtatgatgtggcacggacctattttaggtttcacatctggttcaatgttgatatgctaaccctggtttgggtcgctgacctgttttcgaccttcttgagaagctgccaattggtccccttgttttgggacttgggagcatcaccacatcataatctgtttcacaacagatgattcttaatttttttttttgtaattcacggcagatgatcctgaccacaatgtttacttgtcaaggccagagccataagacaacttccagcttgtgtcatctgttccatgtataatatctgtaaacaagtatggtccagttttgtttgtgggctcgttgaattattcttggcaatatgtgt

SEQ ID NO: 134503 - DNA, 1530 bp, Zea Mays
ggacccacacggccgcctcctgcatgtccaccctccaaatcgaaaacagatcgaaatcctagggtagggttaccctccaccccaatccccatcgtccgttccgatccgatccctcaccgtccatcaatgtcccactcccaccatgacggaagcaagccctaccagccgcgccgggggcccgagcgccccccgcagccggcggacgggatagccgtcccgcctcctgccgccgttgccccgtcggtggagcacctcgtggcggccgccgccgaggcggaggcgttgagtcgcttgggcgcggaacaacagcagctgctgcaggggcacgagcaggaggttggggaggaagaaggggaggacgaggaggaagacgagatggaggacgacgacgacgacgacgatgagcaggaagggcagcacggcggcatcggtgtggagcacgttcccatggacgcagatgctgctgctgccgccgccgtggcggccgctggcgcgcagatggacccgcactcggtgttggtgcctgggaccgtgccacccatggcgaccaaccagctcaccctctcgttccagggcgaggtctatgtattcgactctgtctcccctgataaggtccaagccgtgcttctgctgcttggaggcagggagctgagtagcctgagcggagcgtcgtcctctgcaccttatagtaagaggttgaactttccacatcgggtggcatcactgatgagatttagggaaaagcggaaggagcggaactttgataagaagatccggtacaatgtccggaaggaagttgcacttaggatgcagcgtaatagaggtcagtttacatcttcaaaaccaaagcctgatgaaatagcagcatcagaaatggcagctgcagatggctctctgaattgggcactagttgaaggccgacctccatctgctgctgaatgtcatcactgtggtattaatgcaacagctacaccaatgatgcgtcggggacctgatggaccaagaacactatgcaacgcttgtggcctcatgtgggcaaataagggtctcctgagggacctatccaaatctcctgtacctcttcactctatacaacaatcagctccaattctaaatggtggtcagaacggaagtgccatgtctgcgcttggctctgagctagagaatgctgcagcagccatgggcaatggccacgagccataaggtagtggtgtttagccatgtgctaaagccacgagcatcatcgcgcaatgatctctgcagtaggcggtcagttggagcctgcttagatatatggaatcctgcgcctgtaggttttaagagctgcgacagtgttttgtcccgtgtagtcatgtttgcagccgtcgcagctatagcaagtttgtttcttgtcttgagtcgtgactgttaagaactgatgaagttcattacttacgtgcgtgtagttatacttagatatgagatgttctagccatgcagcaacgttttctatcaatgtcagtaattagggagcgagcgtttgtctcatgg

SEQ ID NO: 134504 - DNA, 790 bp, Zea Mays
gttgtcaagtacagtaggtgcttgccatttacatctatcattttctctcttaagacttgaaactgaaaaagatatttattgctccactaaacaatagttattgctaatcttctctttccattactactggtgaattgttatctctttgcttggacttgagactagctcaaagtgatagggttcttcatagttcatagcattttagggaatagggaatgtataaaatggattatcttatcaccctcttacaatgcctcttacacacctcttccattgcctcttacacagcttccattactttctcctgccttgtttactttgataaacttgtatgccttcagtttctgaaataatcaactggttgacacttaagttgctgtctttttttttcttccagcagaacggaagtgccatgtctgcgcttggctctgagctagagaatgctgcagcagccatgggcaatggccacgagccataaggtagtggtgtttagccatgtgctaaagccacgagcatcatcgcgcaatgatctctgcagtaggcggtcagttggagcctgcttagatatatggaatcctgcgcctgtaggttttaagagctgcgacagtgttttgtcccgtgtagtcatgtttgcagccgtcgcagctatagcaagtttgtttcttgtcttgagtcgtgactgttaagaactgatgaagttcattacttacgtgcgtgtagttatacttagatatgagatgttctagccatgcagcaacgttttctatcaatgtcagtaattagggagcga

SEQ ID NO: 134505 - DNA, 2474 bp, Zea Mays
cacccgccggcttccgttcccaactgctcgagtggactcggctccaaaccctacccccaccgcgcgaatggccgacgtgcttgagcccgcctccgacgcgccgcgcgtgcgccgcccgccgccgccacccccggacagtccggaggaccgctcgccgcggcttcccccgcctccgcccggcgggcctccggcgccgagccggaagcggagccgctccccgccgccaccgcctccgctcggctcgtcgcggcctcagaggtaccgggaccaccgtggcggcggcgggcgaggcgggagcagccccagcccgccgccgtaccggggcagccgccgtcactcgccgcccaggaggtccccgtcgccgccgttcaagcggtcgcggagggacgacgggtacgaccgccgcgggggccgagggagcccgccccgttacgggtacgatgataggaggcgaggttatgaccatgatcgaggtggcggcagaggtgggtacgatgatgacagaaaccatggtagatatctgaaccgtggtccagattggcctgattcggggtatggggcggccaatgatggtccaggggtcacccaaagggaaggtttgatgacatacaaacagttcatgctagttcttgaggatgatatttcaccaagtgaagctgaacgcaggtaccaagaatatagaactgagtatatcacaactcagaaacgtgcttattttgatctccacaaaaacgaagattggctgaaagacaagtaccacccaactaacctattatctgttatcgaaaggaggaatgaacgttgcaaggttatagcaaaggatttctttcttgatttgcagaatggaactctggacctaggccctggaataactgggggtgcagcaagtaaaccaggtggtagtgatggaaattctgatgatgatacggacaatgacaagagaagaaagcatggcaaagattcctcaaagggaactgattctatttctggtgccctcaaggctcatccagttagttctgaatcacgccgagtccaagctgacatagagcaaactctagctcttgtgcgtaagcttgattctgagaagggcattgaggaaaatgtactgtcaagtggtgatcatgacaagtcagatgtagacaaatcacacataggatctatggggcctataattataatcagaggtttaacgactgtcaaaggcctagagggtgttgagctcctagacactattcttacctatttatggcgtattcatggtgttgattactatggcacgtcagagtcgcatgaggccaagggccttcgtcacgtgagagtagacagtaagacttctagcacatctgatgtcagtgctgctgattgggagaagaagctggatactttctggcaggaaagactgaatggtcaagacccactggtcatacttactgctaaggacaaaattgatgcagcagctgctgaagttttagaacctctcgtcaggaaaatcagggatgaaaaatatggatggaaatatggctgtggagccaagggctgtacaaaactttttcatgctcctgagtttgtccacaagcatttgaggctcaaacatccagaccttgtattggagtctacgtcaaaagttcgagaggatctttatttccaaaactacatgaaggaccctaatgcaccaggtggaaccccagtgatgcaactgtctgcaccagacagaggaagacggagacctagcatggacagtcgtctgaaatttgaccgtggcagtaacaaagaacatgataaagctgagagagatggaggcagatatggtagagacgatcactctccaagccgtgatgggcctgatgatcagatgtttgatggtttccgtggacggccctctaatgctccttttgttgctgaattcccccctccaccgatattgatgccagtacctggtgctggtcccctaggaccatttgttcctgcacctccagagatagcgatgcatatgctgagagagcaagggccacctcctccgtttgaaccaaatggcgcaccacatggcagcacaggaatgctcgggccaatgctgggtggttcagcaccgattatagctatgcctccgaatttccgccatgaccctcgccgtctgagaagttataacgacctcgatgcccctgatgaggaagttactgtccttgactacagaagcttgtagggtccagcatccattggagatttgggctgtttcctctttatatgaaggggaaaaaaggaaggttatggacaagtaaatgaatttttttggtcgcctgtgtatcctgttagattctgttgtaacttgaatagccggaatttctatttgctctcgcgttcgtcgaaccatactccctgaatgcgctgccgttgctacagttgttggccaactttctttgacacaacgctgtagtactccctgtcccaaaaaaataggacagatattttttttgaga

SEQ ID NO: 134506 - DNA, 357 bp, Zea Mays
atgtggctgaattcacaagattgcaatagagaacagtgttcatgcagtgtcctgccaaaaaaaaagcgtttggttctgtacaactttgcaagatgcgtccatgagaataattactcagtactcactaaggttagcatgcatgaggcggtggaagtggtgcatggccatctccacagacggagcgtatcttccaacactgtaggccggcgattccaggccacgctgaaccccctcacacagtgcaatgtcttctatctgtacttgctcactgtcttcgaggcttttcttgataaagcactggtcatcctgcaaagacttgtcaagaaaataatcaaataccaccttgcatctggttga

SEQ ID NO: 134507 - DNA, 152 bp, Zea Mays
gtgtatagtaaataatactctctatgtatcaaaatagaattcattttgcttctttagtggattcatataatacttggtgtatatgttacatatatgtgtctacattaatcatcatctagttgaatatagacataaaaattaagagctaaaac

SEQ ID NO: 134508 - DNA, 104 bp, Zea Mays
gaaattctttgtaactacagacttagaatgaacctctcgaattctttttacgataatacagttgaatccattttgatcacgcacttcgtagtcgatggctctcc

SEQ ID NO: 134509 - DNA, 1183 bp, Zea Mays
ttccccactgttttataggcagctggtgctcctccgaaagcgaagtccagcgccccccgctcccccgttcgcgcaaagacgccaaacccacccaccgaaatctctccccgaacttacccctcgccggcgccggcgatgtgcccgacgaagcccggtcgccctgcccaggcggccgccggctccggcgagaagagctggcgggagcaggccgtggccgccagctcgctgcggccggtcgacctggaccggggcaccaacggctgggcctcgccgccgggggacctcttccacctgcgcgcgcgcggctacttctcctgcggcggcgggaagcgcggcaaggcgccgtccgccgcggagtggctgctccgccccgccggcgtcgactggctccgctctcacgcgcgcctcgaccacgtgctcgcccgccatgacaaccgcgtcgccgccgcattccgccgcgcgcgcctcaggaacgaccccaccgcgcacttcctcctcgccgtcaatctccaggtgccgggccggccggacgcgtacagcgcggtgttctacttcgcggcggaggcacccatcgcgccggactcgctgctcgggcgcttcgtccagggcgacgacgcgtaccgcaacgcgcgcttcaagatcgccaaccgcatcgtcaacggcccctggctcttgcgcgccaccgtcggcaactacgcggcctgcctgctcgggcgcgcgctcacgtgccgctaccacaggggcgtcgactacctggagatcgacgtggacatcggcagctcggcgatcgccagcgccatcctgcacctcgcgctcggcgccgtcacgtcggtcaccatcgacatggggttcctcgtcgagtcccagtccgaggaggagctgcccgagaggctgttcggcgccgtgcgcatcgcgcggatggagatgggcgcggccaggtacgtggagctgcctcctaatgaggccatgcctgagacggtctgcagcggcagggccggggccggtttcagggtaagctccgggaaggtggtcaaccatagccgccaacaagaccgtgccggcggtaaggtgggcaggtcgatgagttgcccggagcgagagcgcggagagaaataggtgcaaagtacgcgggtgcagtgcagaaagaaaccatccaccggtgggagcgagagcggtggcgaga

SEQ ID NO: 134510 - DNA, 726 bp, Zea Mays
atgtataccactactcgtgccatggagaaagaagaggggttcgggaagtcatggcttggcctggggatcggcggcggtggccgcgatctgaatctgatgaagcggagccgaccactacgaccggtgcggctggacctgctgttcccgccgagtgtggagggaggagaagctgccgcgaggagcaggaaggctggtgcaggtgcactgcggaatatgtcgttgaagcaggtcgcaggcgacgacgatggtgggcagtcgtcgcacggtggtccgagccccagcgacgacgacgacggcgcaggcgcgcggaagaagctccggctcaccacggagcagtccaagctgctcgaggacaccttccgcgcccacaacatactctcccacgctcagaagcatgaggtggcgcggcaggtggatctaagcgccaggcaggtggaagtgtggttccagaacaggagggcaagaacaaagctgaagcaaacggaggtggactgcgagaccctgaggcgctggcgcgagagcctggcagacgagaacctgcggctgaggctggagctggagcagctgcagcggtgggcgaccgccgccgctggtcagtcctccgcgtccccgtcgccggccacggccacggcgagcgtctgtccgtcgtgcgacaaggtcgtcgtcgtcaccgtgacgagctgtggggagacaagcggcaagagctccaccagcagctactcctcc

SEQ ID NO: 134511 - DNA, 102 bp, Zea Mays
gccattccaactttaggaacaactgatgtacgactgatattattattcacctgttgtatatgggttcagaaaacataatctaacaatctcatacatgaccga

SEQ ID NO: 134512 - DNA, 101 bp, Zea Mays
gacgaaaaggggtttcccccctatttcattaagaaacaggaaacacatacagacacacaccagaaatgtcttagccaaaacaagcaattggcaacaaaagc

SEQ ID NO: 134513 - DNA, 780 bp, Zea Mays
atggctcatggtggacgtgggcgacgcattgctcttgttcctcgcacaccattactgtcgtgctctgctaggcccgacctccctctctctgtccctgtaggagaaagacgactgttcacggcaacgtttgatgctcgatcgaacggccatgatttttttggaacgacgtggatagaccgatcggtgttgtttccatccgactttaatagtaaggaaatctccagttcttgcacccactcgtccaccgttcgcatacgtcacgctgcgcttgctcacatacgccgaccctacccatccgctggcccccgcctgtaccatagccgacgagcagagcgggcttcccctgcggaggtggaggccattcttccgcgctttcgaggcgatcgatggcttatcgaggcatgcggctacccgcgcgccgagttccgtgatgtgcatggcgagatcgtcatgctgctccgcggcgccacggatgacggcgtggccgccgagcagctctgcgccgtgctcgacgatgtcatggtcgaatccctcaagacgctgctggtcgtgttcgttccgcatgacctattagcgtccaccgacctggtgaggaccgtcggcgccctcgggagccacgggtcatcccggatccgaagcctcacgtgcgacgtcgtgcgcgggtggagggtggccgttgaagcctcctttgccactgctgtagcggtgaagaagaagctcgataatctctctgatgatcagatcccgctcccacacgttgccgtcgacaaggtgcactag

SEQ ID NO: 134514 - DNA, 612 bp, Zea Mays
atgttcagattggcttatgttgcaccagagtcacgagtggtgggagctggagacttggttgatgagccaaaaaaagttgctatccattatcttcgtggttactttttacttgatttctttgttgtgcttccactccctcaggtgatgatactgctagtagttcctaaagttgggttatctgctgcaaactatgctaagaatttattgcgtgtcactgttcttcttcaatatgtcccccgtatcatcagattcgtaccacttcttgatgactgtggacgtggcattgggagtggactgtacagacagcagtggttcaatgactcgggtgcagaagcttgttttaacactggaaatgatgctactttccaatatggaatttatgagcaggctgttttgctcactacagaagacagtgctgtaaaacgatatatatattcattattttgggggtttcagcaaataagtaccttagcaggaaaccttgtcccgagttactttatatgggaagttctgttcacgatggctattattggtctgggactgttgctttttgcattgcttattggaaacatgcaaaattttctgcaagctcttggaagaagatgttggtag

SEQ ID NO: 134515 - DNA, 468 bp, Zea Mays
atggtcctcgcctcagttgccaccaactcgttcaccattctacttcttttctctctcccctcatgcatccacttccgcgccatcctattctcggcagagggcgtaggagcatgcgcctcctccccgtattcgtccgacaccagcctcggcaccgactcgcgcaatggctattgcacgtccatgaggacgtttcacatcatgcgcacaccctcgttttcgccgtcgtcggacgtcacgttcgtcttcccggccttcgcccttttcttcctccccaacctgctgcccccgcccacggtcgcagctgtgagccgaccgacgctcgtcgacgcgggtacggcgcgagtcggtcatgctcctggcctttctccatgcgtgccgtcgaggaggacatggtggcgcctgccacgcttaggttatcttggcgatgatgagtccaggtctgagatattggacaaccaaggcccatag

SEQ ID NO: 134516 - DNA, 107 bp, Zea Mays
cgagtgtcttatacactcggcaaagaacgtgattccggtagtgatggctggcaacaccaagccggatagacaggagtctggccaaccgcgtacgcacggttcggtcg

SEQ ID NO: 134517 - DNA, 885 bp, Zea Mays
ctttccctccgcctggtactcggcgcaagtgcctttctcctcctcgactccgtcgccgtgatctgctacgtagcagaagggcaggcacgcgcagatcctctggctgtcctgtcggcctcttctgcagctgttccagacagtggaagcaactattagacaagccaagtttaacagtacagtacacgtgaatacttcgccctcaagtcctgaacccacacagccaacaaatacgtgtagtactcatcagatatatggcacaggagatgacgatgttgctggttccgcagacgttgatgctgagtaacgttgcagtgcttttggacacgagcaccaccagctatggaggcccgcttttggaaactgaggatcgcttttgggaactatcccagttcatctaggttgctgttagaacttcccccctactgtgtagggcgtatggttttatgcttgtaagatatggacagcgctatgctgtgtgcttgactgcaagatatgccttttgttgcttggtcatagctatgctatgcatgcaatcctgcgaggaccatactcgcgatgtgtaaagcatgcctatatagtctaggcctgaccaaataagaaacgttgcttcctttggtgcttctactatttctctttgtcgttctgtgctactaccagccatgtatttgtcgttaatatgtaaagcatgcctatatagtctatgtgttgttctgtgctactgccatccatctattatgtgctactaccagccatctctttatcttatagtacaggaaataaacgtcggagcagctcctatgtcccgttgaagaacgaagacaatccaattctggatgatgagtgagaaagatactaaggtatatcatgtaacccatccttgaattc

SEQ ID NO: 134518 - DNA, 663 bp, Zea Mays
gggcgttatgcatccgtcattccctaatttacataacaatgtgcgtcatcttccaacttggcgaattgtccgttcagctaacatctgtagcatgcttttggattgggtttctgctggttgtctgtagcatatggtccgtggagacttatcttttggtacatttaaaagggacattatcattcaaaaacacaacaaagaccttaaacgtatttgttccatatgtccagtttatatgccactgcaatatccattgctatttacttttggtgagcgtggatttcaatttggtgttccatatgttgaaatggaggttctgggagtgagaagatgaggatcaactgctgcagcatctggcgcaacaaggcactgaggaggatgtgtttcagtgaaaggggtgctgtgagcagcacccagtgtgtgctcacatcagatgctggcccagacactcttgtcgtccgaacatcctttcggaggaattatgctgatcctaacgaagtcactgctgtcattttgggtggtgctggggaagacgaccggggaaggaaaagccagcaagagggacacaaagagcaccaccagcacaagttgaccctcccaactatttcgaattataccattcacgatgccactgacggcaccgacaatggcaaacaggaaggatag

SEQ ID NO: 134519 - DNA, 786 bp, Zea Mays
ggacggacctttcaattttgttttgcttgatggcacctggagcaattctgctgcactgtacagaaggttgaaggagagatggactgcagtatggggagatgaagctctaccttgtattgcactatctacacttagtgcctcagtgatgcataaactacggtgagcggaaaaaagatttgtttattcttaccgactcctgcatttatcgtaacctcctctccccttcttttaaaatgcttattttttgggcattatgttccttggtaaaactgaacagaccgcagcctgcctgggatcgtacctgcactgcagcagctgcagctggcctcctctgggagttgagctcgcggcctgagctcatctcatttgggttggaaaagcaagccgaggcggtggagtgctcgttagacaacttgctggatgctctcactgccaggcggcttcgtctgggccgatcgataactcggaaacagagacatagtaggaactgcatatagggaaagaagaaactcacagtaacagaggagcatggtgtgccatcaagtggaaggctgatttcattcttttttgtagaactcaggagctgatcattgtcaacaagttttctcccctttctatataggttactagatcttcagttcagtgctgtagattacttttaatggtcattgacatgagctgttaccgctgctactgtcgaagaggagggttaccaaatattagggtgctaaaacttgggttgtattctgacagattttgccataccatgaaatcaagttgttttct

SEQ ID NO: 134520 - DNA, 669 bp, Zea Mays
ggacggacctttcaattttgttttgcttgatggcacctggagcaattctgctgcactgtacagaaggttgaaggagagatggactgcagtatggggagatgaagctctaccttgtattgcactatctacacttagtgcctcagtgatgcataaactacgaccgcagcctgcctgggatcgtacctgcactgcagcagctgcagctggcctcctctgggagttgagctcgcggcctgagctcatctcatttgggttggaaaagcaagccgaggcggtggagtgctcgttagacaacttgctggatgctctcactgccaggcggcttcgtctgggccgatcgataactcggaaacagagacatagtaggaactgcatatagggaaagaagaaactcacagtaacagaggagcatggtgtgccatcaagtggaaggctgatttcattcttttttgtagaactcaggagctgatcattgtcaacaagttttctcccctttctatataggttactagatcttcagttcagtgctgtagattacttttaatggtcattgacatgagctgttaccgctgctactgtcgaagaggagggttaccaaatattagggtgctaaaacttgggttgtattctgacagattttgccataccatgaaatcaagttgttttctc

SEQ ID NO: 134521 - DNA, 379 bp, Zea Mays
tgtcgtaaaatttagtttgaaaatgtataaatcacgatggtctcagaggacacttgttttgttcacagtatatcaaaatatgaagtacaacgatattttgccaatattgttgcaatcatacacgatttttttgacatgacaaaaaacgaggaactagccctgtttcggtacttcagacacttggaaccattagcctttagctaggtcgtggtccgaaatggaagcatcgttgtccggctcttgttaaaacaggtccgtgtaagcagaaacctaaatgattcaccagttaaaagacatggattgagagaaatgatataatataatagtagagttatgcattcacttagctcattctgctctcctacaacctatcacatca

SEQ ID NO: 134522 - DNA, 3450 bp, Zea Mays
gagagcatgcagcagagcaacatgtccaagtgccccccaggctaaacacgcacacaaagtaagcgatctgcaacgcacatggaagcctaaacggcaacttacttttctgatgctgatcccacagttggggactgtagtagtgaggatggagtgatggacagagcctaggattgatagataactcgtggctgtggggccccctggtatcttcagatctctactgcaaactacaagcatgtactggcctggcctagctcatctatctatcagatgtctaccaagtacaaaaaccccccctgatatctttaatcccggcaaaacctgcgtggcatatctgcttcacatgttctttaggccggcttcttgtttcattaacccaaccagatttggctctccgattggcccgctggctgcactttccctgatctttcctcgagctcgataaacaaatatcgacgcgcagcgtgcctcccgctaactaaacgatctccacagctcctcatccttctgcgttgccgccctcgctgtaccctgctgcttacccttcaagcctgccgaccatcgcatcatcactagctttttttcttcacttctgctcggcgtctcttgtttgctgttggctgttggcttcataagcgcaaggaaggacgagagatagagcgacgaagtatcttgctcggaactctcccacagctgggctctgagatgagtaatgggttctgaggatagagccgcgcgagcttcctcccgttctgcgtccctgcgacgtatgggcactgcccgggggctatgacctgtaaccaaagaagagggaaaatgcgagataagcagcggctggaccatgataaccagggatgcaggtatggctgttgatttgcttcgtgttcacagaatcctctccaccctgttggagacaaaggggataaccgtcacgagatatatagaaggtagaggtaatacccagaaaacaaccgaattgttgctggaagctggtgagcaagagcttttacgcacctgggaagacccaatggacgagcagtgcaaacaggacagcaaggactcgattcggagaacaatcgtggagcatgataaggtcttcaggcagcaggtgcatgagctgcatcgtttgtaccatgtacaaaaaacattgatggctgaatgcgatagccataggtatcaaccgagagcagaaggaactcatgaagtggtgcagggatcaaggtcgaacctcaagtgcagtccttctacctcagggacaaaccaatctgctctccttggtaatgcacaatacccagctccgcagcaagtacaagaagatttgagtctccatgaatgcaagccggtgaactgcctcagcctcttcggtgaagaaaactcagcagccaaagaaaggtttcacggggagaaccataaatcagttgaagatgaaagctggagcgccgctgtagagagtgatcttgacctcaaactgagcatcggccccagctcacattcaccagaaacaccgcgctggctattctcaggaagcagggaaagaaacccttctggccagcatcgatgagagcaagctagtaaatatctgatcattcagtttgggggcaggagaagcaaaacacagcacactagagtttcatatgctgagaaagctgaagcctccattaaaaatggcatgtggatttgtggaaatacaggtctcaagaaaaatacacttctagctcctatggcgggcgccttggccaaaaacagaaacaaagcccagaaaggcttccaccagatttcaatcagaattctttagtatgccaaaaatgtagaacctcaaaggtcccaatgcttgctatgggtaggataggactgcactaatgttatggcaagtaaaggattggtaacaattcaggtcttgcttgccttgtgcataattttgagtttcagagcaaaagtgataagaaaaaacattaggtaagtattgaatttgaaagaaccaaacaatccctttcagttctcatacaccaataattatatagtcacattcagcagtatacttagtgtttttcaattacccatcatgattgatgttttgcaatttgcatttgtactgtgggcactccatggtccatgcttttaagtatatatatattttttcaaatcagtgtgtccacttttgcaatcaaacactgacttcctcattacccatgcattaccgaatagatctgtcaccagatgtttagctcttcattgcaaacaaagattgccatcactcaattgctttgaattcataagcagtgttctaagctttgctctgctgttcagagttgaccttcctatattggaaaccaagtcagataaataagccggacaaggaactgttgtcggtgaaggtttaggccttgttcggttagctcggattgtggctaggaactattccaactaatcaatactagtacaaataaacttatcattccaaccggaatggttgtcgtggaacggttctggagtaaacgaacgggcccttaatggtttattcacccatgtttatttttttaacaaaatccatatcatgcattcaccagaatccactgcatgagcattctccatcttcgaaatgatgggatctcaagttgtccctgtctataatctcgatgggcccaacttttgacaccaatcttataaacaaatggcagtcctcacatatccttagattctttactatcctaattgaggatctagactcgagtttgagcaaatccaaatgacagagcaagcttctcactatgacccattgacaacctttctttctcttcctcacttacgttataaacaactgaactaaggactggcacataacttgcaagattcaattttgcccgtagctccaataatcttattctatatttcatgcatccatgggtgtgtattatcaccagcaaagaacccgacccgacaactgcattcctcccaagaccattccattctacaattccctgaacccaggcgtctcgcctcaccgcaccgagctgagcagattgcaccggtgagtgaagcttcatcaatgggcatgccggccacctccatctgctcaaatggctccagtgccttcactggcatggcattctgtgcatacgccgtcaccattgccgtccacgccaccatatccttcaccagagcgcacacacctcctcagctgaacccatatcacggctcctagaatacgctgccacaatgcttgtacacgaaatgacatccttcaccgtcatttcgtgaaacaccttacccgcggcaccaacatcgccgcacgcgacgtacgcaccgatcaacgagttctcaacaaaccgatgcttatcggaggagcgacaccggccgtggcggacgcaggtgaagaggcggacggtctccaggcgcggctgagtgaggtgcgcgaagcggagcagcgcggcggcgaggagagaagaatac

SEQ ID NO: 134523 - DNA, 1629 bp, Zea Mays
tgatctttcctcgagctcgataaacaaatatcgacgcgcagcgtgcctcccgctaactaaacgatctccacagctcctcatccttctgcgttgccgccctcgctgtaccctgctgcttacccttcaagcctgccgaccatcgcatcatcactagctttttttcttcacttctgctcggcgtctcttgtttgctgttggctgttggcttcataagcgcaaggaaggacgagagatagagcgacgaagtatcttgctcggaactctcccacagctgggctctgagatgagtaatgggttctgaggatagagccgcgcgagcttcctcccgttctgcgtccctgcgacgtatgggcactgcccgggggctatgacctgtaaccaaagaagagggaaaatgcgagataagcagcggctggaccatgataaccagggatgcaggtatggctgttgatttgcttcgtgttcacagaatcctctccaccctgttggagacaaaggggataaccgtcacgagatatatagaaggtagaggtaatacccagaaaacaaccgaattgttgctggaagctggtgagcaagagcttttacgcacctgggaagacccaatggacgagcagtgcaaacaggacagcaaggactcgattcggagaacaatcgtggagcatgataaggtcttcaggcagcaggtgcatgagctgcatcgtttgtaccatgtacaaaaaacattgatggctgaatgcgatagccataggtatcaaccgagagcagaaggaactcatgaagtggtgcagggatcaaggtcgaacctcaagtgcagtccttctacctcagggacaaaccaatctgctctccttggtaatgcacaatacccagctccgcagcaagtacaagaagatttgagtctccatgaatgcaagccggtgaactgcctcagcctcttcggtgaagaaaactcagcagccaaagaaaggtttcacggggagaaccataaatcagttgaagatgaaagctggagcgccgctgtagagagtgatcttgacctcaaactgagcatcggccccagctcacattcaccagaaacaccgcgctggctattctcaggaagcagggaaagaaacccttctggccagcatcgatgagagcaagctagtaaatatctgatcattcagtttgggggcaggagaagcaaaacacagcacactagagtttcatatgctgagaaagctgaagcctccattaaaaatggcatgtggatttgtggaaatacaggtctcaagaaaaatacacttctagctcctatggcgggcgccttggccaaaaacagaaacaaagcccagaaaggcttccaccagatttcaatcagaattctttagtatgccaaaaatgtagaacctcaaaggtcccaatgcttgctatgggtaggataggactgcactaatgttatggcaagtaaaggattggtaacaattcaggtcttgcttgccttgtgcataattttgagtttcagagcaaaagtgataagaaaaaacattaggtaagtattgaatttgaaagaaccaaacaatccctttcagttctcatacaccaataattatatagtcacattcagcagtatacttagtgtttttc

SEQ ID NO: 134524 - DNA, 2711 bp, Zea Mays
cgacctccgcccattccgctcgcggttgcctccgcctccgcctccgcctccgcgcctaacccaatccagagccagggcagggcaaccaaaccctaggccctcgcgctcgtggtatccatgggctgaccgcgtcccggtggggagcccggatccagagctagggttccgtcctcggcggcaacgccatggagtgggacagcgagtccgacggcgccggcagcgtcggcgtcgacgagcaggaagaggagcaggagcaggaggaggaggaggaggagcggggaggcgagggaggaggtggcgacgccggtgggatgttcacgctcgcgattgaaggcatgctgcgcgcgtcaggtccgtgcgggctcgtcgtcaccgacgcgctcgagcccgactgtcccatcatctacgccaaccgcggcttcgaggaggctacgggctaccgcgccgaggagtttcttggcaggaactgtcgattcctgcagtgtagagggccatttgctcgaaggagacatcccctagttaatgctgcagtggtttcagagattcaaagatgcataaacaacagcattgagttccgtggcgatttattaaatttcagaaaagatggatcgccactgatgaacaggttgcatctgacccctatatatggagatgatgaaactataacccattatatgggcatccagttcttcactgatgctaatgttgatttgggaccattgccctgtccaatgacaaaggaaccagtgaggtcaacacggtttgctccagataactcatttcgacccatttctgcggggccagagcacagcaatttctgccgggaatattctagcctcttccagttaacggatgaagtgctttgccaaagtatactgtcaaggttgacaccaagagatatagcatctgtgagctccgtgtgcaggtgcttgtatcatttgacaagaaatgaagatctctggagaatggtttgccagaatgcttggggtagtgaaactactcgagctcttgagacggtgcccgctgcaagaaggttgggctggggacgtctggcaagagaactgaccaccctggaagctgttgcctggaggaaattgacagttgggggtgcagtggagccatctcgatgcaatttcagtgcctgtgccgtagggaaccgtgttgttctatttggtggggaaggtgttaacatgcagccgatgaatgacacgtttgtattggatttaaacgctagcaatccagagtggaggcatataaatgtgagtgcagctcctccaggtcgctggggccatactctgtcatgcttaaatggctcttggttggttgtttttggtggatgtggaaggcagggtctgcttaatgatgtattcatgttggatttggatgcaaaacaaccaacctggcgtgagatacctggagttgcacccccagttccacgttcatggcacagctcctgcactttggatgggacgaagttagtagtttctggtggctgtgccgattcaggtgtacttctcagtgacacatatcttcttgatgtaaccatggataggccagtttggagagaggttcctgcatcctggaaaccgccttctaggctggggcactcaatgtctgtctatgatggtaggaagatcctgatgtttggtggtcttgctaagagcggccctctgcggctcaggtctagtgatgtgtacacaatggacttaagtgaagaagaaccttgctggcgatgcctcactggtagtggaatgcctggggctggaaatccagctggcgcaggtccacctcctcgcctcgatcatgttggtgtgagcctgccaggtggaagaattttgatatttggtggctcagtggcaggtcttcactcagcatcacagctttatctgttggatccaactgaagaaaagccgacctggagaattttgagtgttcctgggcaccctccccgattcgcctggggccacagcacctgtgttgttggaggaacaaaagcgatagtgcttggtggacaaactggggaagagtggatgcttacagaaatacatgagctctctttggcaaacaactcagtctgagttcatggtggacaaaccggggaagagtggatgcttacagaaatacatgagctctctttggcaagcaactcagtctgagttcagggtggccaaaccggggaagagtggatgcttacagaaatacatgagctctctttggcaagcaactcagtctgagttcaggaatggttcttagtcatgctccttgcaaactaattgcggcttcttatgcgacctgaagcttgattgccttcaccttcagagtatcatctggcagctacatggctttacttgggagatgaaatggttttcactggtttgctcgctttatgtaggcagagggtagcgatatgttcatttttattgccgtttgcttggccttctttttaccagataattacagttcataagctactattgtggaatgagtaccagattttatatgtattctcagatgtttccgacttgcaatatgttaggaaaacaaaggactaccttgtacatagtttaagcttttgttgtacggtacatggagaccttgatgctgctgtcttgcggcacaggcgcacaactgctgagatggcgtgatgtaaggtgatcaccgatcgaccatgtttttgtgcagaacttgtattatgcagaaatttcatcccg

SEQ ID NO: 134525 - DNA, 191 bp, Zea Mays
cccaagatggtatcttatccagagcaaaaacacataccgcatgcatctgtgaatgtgatgcacggctcagaagcccttatatctgaagcactgcccagagacacaggtcgtctccaaacaaatcctttagagctgagctgagcgggaagaagtttgtttccaggtttttatgtaaagctgcgtgcgctaca

SEQ ID NO: 134526 - DNA, 95 bp, Zea Mays
actgcagattctatgcatcaacgtccgtatcttgtgtccctacatccacagaagcatatgagggattggattttgtcagagttccgttaaaagat

SEQ ID NO: 134527 - DNA, 2244 bp, Zea Mays
atgccttcagctgtgctgaagttgtttcacgtaggagccccacaggatggtacaggcaggaggatcaggccaccgtcgaggaacgcgctcttcgctgtgttccagcgagaagatgagggatcgagggcggcgcaggtggcgagctcgtgggcggaacagactggtgagagcaagaggatggatcaggagcttgagccccagagacatgccagtgaggagcagtttagtcggttcttgctttatgaagtggatgcaattagaaagacgtacgagcgggccaacatctcgcggtggctcgccttgggcaaccggacctgcccgaccacgatgcaggagctctaggacgacgccctcacccccaacgccactctccgacaactcatcgccgcctggttctcccgcctggtttctgcattttgttttcttatctgtcaatcatgtttttccatattactgcaggtgggtctgattaattatttaaatgtagtttatcttagatattgtttgaacgtatgggatgttggaggacagaagacaatcatgtcttactggagaaattactttgagcagactaatgggttagtttggtttgctgatagttcagacataaggaggcttgatgattgccgtgctgaactccacaatctcttgaaagaagaggataaaggtttacctatctaggcagtgttctattgttgatttttgcaaataagcaagacatgcaaggagctctaaaaccaactggaatcgcgaaggtaagcgaacttcagtcatttattatatgcattagagacatgttttcctgtctatgacatcatttttaacttgtactgtgtttttccggtcctcatggttgccaagattttacttagttcgatgtgggagcaaaaggatatgccaaattgaatgtagtttcatcagttatgctctattatggatgttcagaggcatccaatttcagtgtgtactgcaatacttgggtccacctgtacgtggtagatgttctgcattttgttttcttataaattagatttggcttccattatgttgttctcttttggaacagagtcactctccgacagctcatcgccgcttggttctcctgtcggtacacaaggtttaagaagcgctacgcggacttccacggccgcgctgccgatctcgtccacggcctccggggcacggcgatgcccaggagacaggccctcgaggaagagcaatgtacagaagagaaaggtatctcgactattccaaagcacaagtatgcatccaaagcctgttccccaaaaggaacctttatctgcagctctctctgcgcttactcttgttgtgcaatttaatgggtggctatcatttttcctcttgctttattataaacttcctctgcggccagaaactcacaagacatactatgaatacactggcttgtggcacatctatgggctccttgccatgaattcatggttctggagtgccatatatcacagttgtgacacaatttggacagaaaaagctatatttttcatcagatgctgcctttctagggtattccctcattttgacgatagttggtgagcatgtagtagcaagtttcatgggctctggtagattaactgacctttgtgtgttccattagcctgtgaagttcgaaactggtcatattgctaagaattctaggaggttactattagggcctagagtaaatgactacgtgctgatgaaaatctgttcagattaatcattctggaacttgtactaacaattgaagcaagtggaggcatagcaccaattgtgtctgtgctgcagctctggatgtcagtagacaagaggtgtatcagagagaagcacttcaaggttaatttgttgagcaaattggagatgctggattttgtattttggttgctcatgggtggtgaatgatctgacgacttcagaagaggatagatctgagattacctttcatgcatgtcaaggaagttaagtagctgatgccatcaaagcaatggagaaacgtcaggtgaaccgcgagcagaattctgtggcgcatttgttagcgcagttagttaggactctgttcatacaactgttcgattaagccaaatacctaatttagttttatattggttgttgtcaaagaatttgtgaaatattgaggttgataatatatgtggcgttcgtttttatgtaatcattgttcactaatattttgtcgaatattttatattatatagacattactaagaa

SEQ ID NO: 134528 - DNA, 2624 bp, Zea Mays
gcctattgccttgcctgccccttccatcctccttccccacccctccttccatcctcgcccgcgcgctccacacgtccccgccgtcgcgctcgccttccatcctcctccccaccccctccttccatcctcgctcgcgcgctccgcatgtccccgccgtcgcgctcgcctccctcctctttgttgcctccgcgtcggcctccaccccgctctccgacacgcttgccgtcgtcttggatttctggtgcactctcttctctacgacgcgagcaagggcggcgcttgccatggcatcgacgggaaccaggcatcactctccctatctcttgggtacgcgtttatttcatctctagggtctagagtttagtagcaccgccgccaacatccccgccgttgcgacaagcaccgaccgctcgcttccccctccctcctctcgtcggcgccaacgagccgcatgccgtgtgtcgtgtgggtcggctacccgggtatcggcgccagcgagccctcgccccccatccccctgccaatctcggcgtcggcgcgccgctcgccatccccgcaggccacgcccatgcccccgcctccatagtccctgtcatcggcgacctcagatccaacaggatggtacaggcaggaggatcaggccaccgtcgaggaacgcgctcttcgctgtgttccagcgagaagatgagggatcgagggcggcgcaggtggcgagctcgtgggcggaacagactggtgagagcaagaggatggatcaggagcttgagccccagagacatgccagtgaggagcagtttagtcggttcttgctttatgaagtggatgcaattagaaagacgtacgagcgggccaacatctcgcggtggctcgccttgggcaaccggacctgcccgaccacgatgcaggagctctaggacgacgccctcacccccaacgccactctccgacaactcatcgccgcctggttctcccgcctgtttatcttagatattgtttgaacgtatgggatgttggaggacagaagacaatcatgtcttactggagaaattactttgagcagactaatgggttagtttggtttgctgatagttcagacataaggaggcttgatgattgccgtgctgaactccacaatctcttgaaagaagaggataaaggtttacctatctaggcagtgttctattgttgatttttgcaaataagcaagacatgcaaggagctctaaaaccaactggaatcgcgaagattttacttagttcgatgtgggagcaaaaggatatgccaaattgaatgtagtttcatcagttatgctctattatggatgttcagaggcatccaatttcagtgtgtactgcaatacttgggtccacctagtcactctccgacagctcatcgccgcttggttctcctgtcggtacacaaggtttaagaagcgctacgcggacttccacggccgcgctgccgatctcgtccacggcctccggggcacggcgatgcccaggagacaggccctcgaggaagagcaatgtacagaagagaaaggtatctcgactattccaaagcacaagtatgcatccaaagcctgttccccaaaaggaacctttatctgcagctctctctgcgcttactcttgttgtgcaatttaatgggtggctatcatttttcctcttgctttattataaacttcctctgcggccagaaactcacaagacatactatgaatacactggcttgtggcacatctatgggctccttgccatgaattcatggttctggagtgccatatatcacagttgtgacacaatttggacagaaaaagctatatttttcatcagatgctgcctttctagggtattccctcattttgacgatagttggtgagcatgtagtagcaagtttcatgggctctggtagattaactgacctttgtgtgttccattagcctgtgaagttcgaaactggtcatattgctaagaattctaggaggttactattagggcctagagtaaatgactacgtgctgatgaaaatctgttcagattaatcattctggaacttgtactaacaattgaagcaagtggaggcatagcaccaattgtgtctgtgctgcagctctggatgtcagtagacaagaggtgtatcagagagaagcacttcaaggttaatttgttgagcaaattggagatgctggattttgtattttggtaggtgatgtatgcttttcagcatggcgtattttattgaactggtcaagtcctgcagaagctgaaactgatcatggataagactttgccttgtgtcacaatgggtgcatttgctggtggtccttggatcaggttgctcatgggtggtgaatgatctgacgacttcagaagaggatagatctgagattacctttcatgcatgtcaaggaagttaagtagctgatgccatcaaagcaatggagaaacgtcaggtgaaccgcgagcagaattctgtggcgcatttgttagcgcagttagttaggactctgttcatacaactgttcgattaagccaaatacctaatttagttttatattggttgttgtcaaagaatttgtgaaatattgaggttgataatatatgtggcgttcgtttttatgt

SEQ ID NO: 134529 - DNA, 2557 bp, Zea Mays
gcctattgccttgcctgccccttccatcctccttccccacccctccttccatcctcgcccgcgcgctccacacgtccccgccgtcgcgctcgccttccatcctcctccccaccccctccttccatcctcgctcgcgcgctccgcatgtccccgccgtcgcgctcgcctccctcctctttgttgcctccgcgtcggcctccaccccgctctccgacacgcttgccgtcgtcttggatttctggtgcactctcttctctacgacgcgagcaagggcggcgcttgccatggcatcgacgggaaccaggcatcactctccctatctcttgggtacgcgtttatttcatctctagggtctagagtttagtagcaccgccgccaacatccccgccgttgcgacaagcaccgaccgctcgcttccccctccctcctctcgtcggcgccaacgagccgcatgccgtgtgtcgtgtgggtcggctacccgggtatcggcgccagcgagccctcgccccccatccccctgccaatctcggcgtcggcgcgccgctcgccatccccgcaggccacgcccatgcccccgcctccatagtccctgtcatcggcgacctcagatccaacaggatggtacaggcaggaggatcaggccaccgtcgaggaacgcgctcttcgctgtgttccagcgagaagatgagggatcgagggcggcgcaggtggcgagctcgtgggcggaacagactggtgagagcaagaggatggatcaggagcttgagccccaggaggggagctgtttgagcggatgcccaccaggaacaatgtttcctagatcacgatgtttgggccacttttggaagaggtcagggatgacatgttttcaagcttggaggacatcaccaacgcaccatatgcagatctgctctctattaattcaatgaggaaaggaaaggggtcatagaaattagtcttggcagatggaggggaacgtctcaatgactgaggcacatttttactaaattatccctaaattatttgtatttttaaaataacatgtaatcttgttgatctggtttactcaagatgcatcaagtttgtacttggagaagaatcctggagttattttacttgtttccttgatttgtagagacatgccagtgaggagcagtttagtcggttcttgctttatgaagtggatgcaattagaaagacgtacgagcgggccaacatctcgcggtggctcgccttgggcaaccggacctgcccgaccacgatgcaggagctctaggacgacgccctcacccccaacgccactctccgacaactcatcgccgcctggttctcccgcctggtttctgcattttgttttcttatctgtcaatcatgtttttccatattactgcaggtgggtctgattaattatttaaatgtagtttatcttagatattgtttgaacgtatgggatgttggaggacagaagacaatcatgtcttactggagaaattactttgagcagactaatgggttagtttggtttgctgatagttcagacataaggaggcttgatgattgccgtgctgaactccacaatctcttgaaagaagaggataaaggtttacctatctaggcagtgttctattgttgatttttgcaaataagcaagacatgcaaggagctctaaaaccaactggaatcgcgaagagtcactctccgacagctcatcgccgcttggttctcctgtcggtacacaaggtttaagaagcgctacgcggacttccacggccgcgctgccgatctcgtccacggcctccggggcacggcgatgcccaggagacaggccctcgaggaagagcaatgtacagaagagaaaggtatctcgactattccaaagcacaagtatgcatccaaagcctgttccccaaaaggaacctttatctgcagctctctctgcgcttactcttgttgtgcaatttaatgggtggctatcatttttcctcttgctttattataaacttcctctgcggccagaaactcacaagacatactatgaatacactggcttgtggcacatctatgggctccttgccatgaattcatggttctggagtgccatatatcacagttgtgacacaatttggacagaaaaagctatatttttcatcagatgctgcctttctagggtattccctcattttgacgatagttggtgtatcagagagaagcacttcaaggttaatttgttgagcaaattggagatgctggattttgtattttggttgctcatgggtggtgaatgatctgacgacttcagaagaggatagatctgagattacctttcatgcatgtcaaggaagttaagtagctgatgccatcaaagcaatggagaaacgtcaggtgaaccgcgagcagaattctgtggcgcatttgttagcgcagttagttaggactctgttcatacaactgttcgattaagccaaatacctaatttagttttatattggttgttgtcaaagaatttgtgaaatattgaggttgataatatatgtggcgttcgtttttatgtaatcat

SEQ ID NO: 134530 - DNA, 2244 bp, Zea Mays
gcctattgccttgcctgccccttccatcctccttccccacccctccttccatcctcgcccgcgcgctccacacgtccccgccgtcgcgctcgccttccatcctcctccccaccccctccttccatcctcgctcgcgcgctccgcatgtccccgccgtcgcgctcgcctccctcctctttgttgcctccgcgtcggcctccaccccgctctccgacacgcttgccgtcgtcttggatttctggtgcactctcttctctacgacgcgagcaagggcggcgcttgccatggcatcgacgggaaccaggatggtacaggcaggaggatcaggccaccgtcgaggaacgcgctcttcgctgtgttccagcgagaagatgagggatcgagggcggcgcaggtggcgagctcgtgggcggaacagactggtgagagcaagaggatggatcaggagcttgagccccaggaggggagctgtttgagcggatgcccaccaggaacaatgtttcctagatcacgatgtttgggccacttttggaagaggtcagggatgacatgttttcaagcttggaggacatcaccaacgcaccatatgcagatctgctctctattaattcaatgaggaaaggaaaggggtcatagaaattagtcttggcagatggaggggaacgtctcaatgactgaggcacatttttactaaattatccctaaattatttgtatttttaaaataacatgtaatcttgttgatctggtttactcaagatgcatcaagtttgtacttggagaagaatcctggagttattttacttgtttccttgatttgtagagacatgccagtgaggagcagtttagtcggttcttgctttatgaagtggatgcaattagaaagacgtacgagcgggccaacatctcgcggtggctcgccttgggcaaccggacctgcccgaccacgatgcaggagctctaggacgacgccctcacccccaacgccactctccgacaactcatcgccgcctggttctcccgcctggtttctgcattttgttttcttatctgtcaatcatgtttttccatattactgcaggtgggtctgattaattatttaaatgtagtttatcttagatattgtttgaacgtatgggatgttggaggacagaagacaatcatgtcttactggagaaattactttgagcagactaatgggttagtttggtttgctgatagttcagacataaggaggcttgatgattgccgtgctgaactccacaatctcttgaaagaagaggataaaggtttacctatctaggcagtgttctattgttgatttttgcaaataagcaagacatgcaaggagctctaaaaccaactggaatcgcgaagagtcactctccgacagctcatcgccgcttggttctcctgtcggtacacaaggtttaagaagcgctacgcggacttccacggccgcgctgccgatctcgtccacggcctccggggcacggcgatgcccaggagacaggccctcgaggaagagcaatgtacagaagagaaaggtatctcgactattccaaagcacaagtatgcatccaaagcctgttccccaaaaggaacctttatctgcagctctctctgcgcttactcttgttgtgcaatttaatgggtggctatcatttttcctcttgctttattataaacttcctctgcggccagaaactcacaagacatactatgaatacactggcttgtggcacatctatgggctccttgccatgaattcatggttctggagtgccatatatcacagttgtgacacaatttggacagaaaaagctatatttttcatcagatgctgcctttctagggtattccctcattttgacgatagttggtgtatcagagagaagcacttcaaggttaatttgttgagcaaattggagatgctggattttgtattttggttgctcatgggtggtgaatgatctgacgacttcagaagaggatagatctgagattacctttcatgcatgtcaaggaagttaagtagctgatgccatcaaagcaatggagaaacgtcaggtgaaccgcgagcagaattctgtggcgcatttgttagcgcagttagttaggactctgttcatacaactgttcgattaagccaaatacctaatttagttttatattggttgttgtcaaagaatttgtgaaatattgaggttgataatatatgtggcgttcgtttttatgtaatcat

SEQ ID NO: 134531 - DNA, 2551 bp, Zea Mays
ctcgcccgcgcgctccacacgtccccgccgtcgcgctcgccttccatcctcctccccaccccctccttccatcctcgctcgcgcgctccgcatgtccccgccgtcgcgctcgcctccctcctctttgttgcctccgcgtcggcctccaccccgctctccgacacgcttgccgtcgtcttggatttctggtgcactctcttctctacgacgcgagcaagggcggcgcttgccatggcatcgacgggaaccaggcatcactctccctatctcttgggatggtacaggcaggaggatcaggccaccgtcgaggaacgcgctcttcgctgtgttccagcgagaagatgagggatcgagggcggcgcaggtggcgagctcgtgggcggaacagactggtgagagcaagaggatggatcaggagcttgagccccagagacatgccagtgaggagcagtttagtcggttcttgctttatgaagtggatgcaattagaaagacgtacgagcgggccaacatctcgcggtggctcgccttgggcaaccggacctgcccgaccacgatgcaggagctctaggacgacgccctcacccccaacgccactctccgacaactcatcgccgcctggttctcccgcctggtttctgcattttgttttcttatctgtcaatcatgtttttccatattactgcaggtgggtctgattaattatttaaatgtagtttatcttagatattgtttgaacgtatgggatgttggaggacagaagacaatcatgtcttactggagaaattactttgagcagactaatgggttagtttggtttgctgatagttcagacataaggaggcttgatgattgccgtgctgaactccacaatctcttgaaagaagaggataaaggtttacctatctaggcagtgttctattgttgatttttgcaaataagcaagacatgcaaggagctctaaaaccaactggaatcgcgaagattttacttagttcgatgtgggagcaaaaggatatgccaaattgaatgtagtttcatcagttatgctctattatggatgttcagaggcatccaatttcagtgtgtactgcaatacttgggtccacctagtcactctccgacagctcatcgccgcttggttctcctgtcggtacacaaggtttaagaagcgctacgcggacttccacggccgcgctgccgatctcgtccacggcctccggggcacggcgatgcccaggagacaggccctcgaggaagagcaatgtacagaagagaaaggtatctcgactattccaaagcacaagtatgcatccaaagcctgttccccaaaaggtgcgtgaactttgttcttgattttgtcagactaaatgtgggtgaactttgtactgcagtttttgtttaaataaactttggactgtttaaattactgatgcatccaaccactgtttttctttattgtttgttgatacacgaccagatgcccagttgagttcacccaaaaggtttattacaacacgaaaaaatctgagataaaatgttttttatttaaatgaactttgtattgcagtatttatagacatattttggcacccggtcgtttactatttttgttttattaatacctcttgtgtttccctttcacttcctttgtataaactgtatgcctctgttttcattctcaggaacctttatctgcagctctctctgcgcttactcttgttgtgcaatttaatgggtggctatcatttttcctcttgctttattataaacttcctctgcggccagaaactcacaagacatactatgaatacactggcttgtggcacatctatgggctccttgccatgaattcatggttctggagtgccatatatcacagttgtgacacaatttggacagaaaaagctatatttttcatcagatgctgcctttctagggtattccctcattttgacgatagttgattaatcattctggaacttgtactaacaattgaagcaagtggaggcatagcaccaattgtgtctgtgctgcagctctggatgtcagtagacaagaggtgtatcagagagaagcacttcaaggttaatttgttgagcaaattggagatgctggattttgtattttggtaggtgatgtatgcttttcagcatggcgtattttattgaactggtcaagtcctgcagaagctgaaactgatcatggataagactttgccttgtgtcacaatgggtgcatttgctggtggtccttggatcaggttgctcatgggtggtgaatgatctgacgacttcagaagaggatagatctgagattacctttcatgcatgtcaaggaagttaagtagctgatgccatcaaagcaatggagaaacgtcaggtgaaccgcgagcagaattctgtggcgcatttgttagcgcagttagttaggactctgttcatacaactgttcgattaagccaaatacctaatttagttttatattggttgttgtcaaagaatttgtgaaatattgaggttgataatatatgtggcgttcgtttttatgt

SEQ ID NO: 134532 - DNA, 2525 bp, Zea Mays
ctcgcccgcgcgctccacacgtccccgccgtcgcgctcgccttccatcctcctccccaccccctccttccatcctcgctcgcgcgctccgcatgtccccgccgtcgcgctcgcctccctcctctttgttgcctccgcgtcggcctccaccccgctctccgacacgcttgccgtcgtcttggatttctggtgcactctcttctctacgacgcgagcaagggcggcgcttgccatggcatcgacgggaaccaggcatcactctccctatctcttgggatggtacaggcaggaggatcaggccaccgtcgaggaacgcgctcttcgctgtgttccagcgagaagatgagggatcgagggcggcgcaggtggcgagctcgtgggcggaacagactggtgagagcaagaggatggatcaggagcttgagccccagagacatgccagtgaggagcagtttagtcggttcttgctttatgaagtggatgcaattagaaagacgtacgagcgggccaacatctcgcggtggctcgccttgggcaaccggacctgcccgaccacgatgcaggagctctaggacgacgccctcacccccaacgccactctccgacaactcatcgccgcctggttctcccgcctggtttctgcattttgttttcttatctgtcaatcatgtttttccatattactgcaggtgggtctgattaattatttaaatgtagtttatcttagatattgtttgaacgtatgggatgttggaggacagaagacaatcatgtcttactggagaaattactttgagcagactaatgggttagtttggtttgctgatagttcagacataaggaggcttgatgattgccgtgctgaactccacaatctcttgaaagaagaggataaaggtttacctatctaggcagtgttctattgttgatttttgcaaataagcaagacatgcaaggagctctaaaaccaactggaatcgcgaagattttacttagttcgatgtgggagcaaaaggatatgccaaattgaatgtagtttcatcagttatgctctattatggatgttcagaggcatccaatttcagtgtgtactgcaatacttgggtccacctagtcactctccgacagctcatcgccgcttggttctcctgtcggtacacaaggtttaagaagcgctacgcggacttccacggccgcgctgccgatctcgtccacggcctccggggcacggcgatgcccaggagacaggccctcgaggaagagcaatgtacagaagagaaaggtatctcgactattccaaagcacaagtatgcatccaaagcctgttccccaaaaggtgcgtgaactttgttcttgattttgtcagactaaatgtgggtgaactttgtactgcagtttttgtttaaataaactttggactgtttaaattactgatgcatccaaccactgtttttctttattgtttgttgatacacgaccagatgcccagttgagttcacccaaaaggtttattacaacacgaaaaaatctgagataaaatgttttttatttaaatgaactttgtattgcagtatttatagacatattttggcacccggtcgtttactatttttgttttattaatacctcttgtgtttccctttcacttcctttgtataaactgtatgcctctgttttcattctcaggaacctttatctgcagctctctctgcgcttactcttgttgtgcaatttaatgggtggctatcatttttcctcttgctttattataaacttcctctgcggccagaaactcacaagacatactatgaatacactggcttgtggcacatctatgggctccttgccatgaattcatggttctggagtgccatatatcacagttgtgacacaatttggacagaaaaagctatatttttcatcagatgctgcctttctaggattaatcattctggaacttgtactaacaattgaagcaagtggaggcatagcaccaattgtgtctgtgctgcagctctggatgtcagtagacaagaggtgtatcagagagaagcacttcaaggttaatttgttgagcaaattggagatgctggattttgtattttggtaggtgatgtatgcttttcagcatggcgtattttattgaactggtcaagtcctgcagaagctgaaactgatcatggataagactttgccttgtgtcacaatgggtgcatttgctggtggtccttggatcaggttgctcatgggtggtgaatgatctgacgacttcagaagaggatagatctgagattacctttcatgcatgtcaaggaagttaagtagctgatgccatcaaagcaatggagaaacgtcaggtgaaccgcgagcagaattctgtggcgcatttgttagcgcagttagttaggactctgttcatacaactgttcgattaagccaaatacctaatttagttttatattggttgttgtcaaagaatttgtgaaatattgaggttgataatatatgtggcgttcgtttttatgt

SEQ ID NO: 134533 - DNA, 2433 bp, Zea Mays
ctcgcccgcgcgctccacacgtccccgccgtcgcgctcgccttccatcctcctccccaccccctccttccatcctcgctcgcgcgctccgcatgtccccgccgtcgcgctcgcctccctcctctttgttgcctccgcgtcggcctccaccccgctctccgacacgcttgccgtcgtcttggatttctggtgcactctcttctctacgacgcgagcaagggcggcgcttgccatggcatcgacgggaaccaggcatcactctccctatctcttgggatggtacaggcaggaggatcaggccaccgtcgaggaacgcgctcttcgctgtgttccagcgagaagatgagggatcgagggcggcgcaggtggcgagctcgtgggcggaacagactggtgagagcaagaggatggatcaggagcttgagccccagagacatgccagtgaggagcagtttagtcggttcttgctttatgaagtggatgcaattagaaagacgtacgagcgggccaacatctcgcggtggctcgccttgggcaaccggacctgcccgaccacgatgcaggagctctaggacgacgccctcacccccaacgccactctccgacaactcatcgccgcctggttctcccgcctggtttctgcattttgttttcttatctgtcaatcatgtttttccatattactgcaggtgggtctgattaattatttaaatgtagtttatcttagatattgtttgaacgtatgggatgttggaggacagaagacaatcatgtcttactggagaaattactttgagcagactaatgggttagtttggtttgctgatagttcagacataaggaggcttgatgattgccgtgctgaactccacaatctcttgaaagaagaggataaaggtttacctatctaggcagtgttctattgttgatttttgcaaataagcaagacatgcaaggagctctaaaaccaactggaatcgcgaagattttacttagttcgatgtgggagcaaaaggatatgccaaattgaatgtagtttcatcagttatgctctattatggatgttcagaggcatccaatttcagtgtgtactgcaatacttgggtccacctagtcactctccgacagctcatcgccgcttggttctcctgtcggtacacaaggtttaagaagcgctacgcggacttccacggccgcgctgccgatctcgtccacggcctccggggcacggcgatgcccaggagacaggccctcgaggaagagcaatgtacagaagagaaaggtatctcgactattccaaagcacaagtatgcatccaaagcctgttccccaaaaggtgcgtgaactttgttcttgattttgtcagactaaatgtgggtgaactttgtactgcagtttttgtttaaataaactttggactgtttaaattactgatgcatccaaccactgtttttctttattgtttgttgatacacgaccagatgcccagttgagttcacccaaaaggtttattacaacacgaaaaaatctgagataaaatgttttttatttaaatgaactttgtattgcagtatttatagacatattttggcacccggtcgtttactatttttgttttattaatacctcttgtgtttccctttcacttcctttgtataaactgtatgcctctgttttcattctcaggaacctttatctgcagctctctctgcgcttactcttgttgtgcaatttaatgggtggctatcatttttcctcttgctttattataaacttcctctgcggccagaaactcacaagacatactatgaatacactggcttgtggcacatctatgggctccttgccatgaattcatggttctggagtgccatatatcacagttgtgacacaatttggacagaaaaagctatatttttcatcagatgctgcctttctagggtattccctcattttgacgatagttgattaatcattctggaacttgtactaacaattgaagcaagtggaggcatagcaccaattgtgtctgtgctgcagctctggatgtcagtagacaagaggtgtatcagagagaagcacttcaaggttaatttgttgagcaaattggagatgctggattttgtattttggttgctcatgggtggtgaatgatctgacgacttcagaagaggatagatctgagattacctttcatgcatgtcaaggaagttaagtagctgatgccatcaaagcaatggagaaacgtcaggtgaaccgcgagcagaattctgtggcgcatttgttagcgcagttagttaggactctgttcatacaactgttcgattaagccaaatacctaatttagttttatattggttgttgtcaaagaatttgtgaaatattgaggttgataatatatgtggcgttcgtttttatgtaatcattgttcact

SEQ ID NO: 134534 - DNA, 1870 bp, Zea Mays
cagatttgttagaatacacacagaaatttggatctgtctcctgtaatgttgttagcattggtcttaattttatttgctgttgttaggaggggagctgtttgagcggatgcccaccaggaacaatgtttcctagatcacgatgtttgggccacttttggaagaggtcagggatgacatgttttcaagcttggaggacatcaccaacgcaccatatgcagatctgctctctattaattcaatgaggaaaggaaaggggtcatagaaattagtcttggcagatggaggggaacgtctcaatgactgaggcacatttttactaaattatccctaaattatttgtatttttaaaataacatgtaatcttgttgatctggtttactcaagatgcatcaagtttgtacttggagaagaatcctggagttattttacttgtttccttgatttgtagagacatgccagtgaggagcagtttagtcggttcttgctttatgaagtggatgcaattagaaagacgtacgagcgggccaacatctcgcggtggctcgccttgggcaaccggacctgcccgaccacgatgcaggagctctaggacgacgccctcacccccaacgccactctccgacaactcatcgccgcctggttctcccgcctggtttctgcattttgttttcttatctgtcaatcatgtttttccatattactgcaggtgggtctgattaattatttaaatgtagtttatcttagatattgtttgaacgtatgggatgttggaggacagaagacaatcatgtcttactggagaaattactttgagcagactaatgggttagtttggtttgctgatagttcagacataaggaggcttgatgattgccgtgctgaactccacaatctcttgaaagaagaggataaaggtttacctatctaggcagtgttctattgttgatttttgcaaataagcaagacatgcaaggagctctaaaaccaactggaatcgcgaagagtcactctccgacagctcatcgccgcttggttctcctgtcggtacacaaggtttaagaagcgctacgcggacttccacggccgcgctgccgatctcgtccacggcctccggggcacggcgatgcccaggagacaggccctcgaggaagagcaatgtacagaagagaaaggtatctcgactattccaaagcacaagtatgcatccaaagcctgttccccaaaaggaacctttatctgcagctctctctgcgcttactcttgttgtgcaatttaatgggtggctatcatttttcctcttgctttattataaacttcctctgcggccagaaactcacaagacatactatgaatacactggcttgtggcacatctatgggctccttgccatgaattcatggttctggagtgccatatatcacagttgtgacacaatttggacagaaaaagctatatttttcatcagatgctgcctttctagggtattccctcattttgacgatagttggtgtatcagagagaagcacttcaaggttaatttgttgagcaaattggagatgctggattttgtattttggttgctcatgggtggtgaatgatctgacgacttcagaagaggatagatctgagattacctttcatgcatgtcaaggaagttaagtagctgatgccatcaaagcaatggagaaacgtcaggtgaaccgcgagcagaattctgtggcgcatttgttagcgcagttagttaggactctgttcatacaactgttcgattaagccaaatacctaatttagttttatattggttgttgtcaaagaatttgtgaaatattgaggttgataatatatgtggcgttcgtttttatgtaatcat

SEQ ID NO: 134535 - DNA, 1546 bp, Zea Mays
cgaaacaaatcccctcgtcatcgtccccaccgaaaccgcagtaccaccgtacccgcgccgacgtgagtacgatggcctcctacttcgccggtccggccatcgtgccgtcgcagcacgccaccgcggcgcccgacaattccgcggtcgccaccccttctccggctaagtcgcgtgacccccgcttctccggatccgcctccaccaccgttcgtcacatcgcccgctccttcgccgccgccgacgccaccggtgatggcgaccttgtcatccctatcgacggcgtcgacgccaccaacgtttggattctggggagggtggtgagcgtggtgaacatggaggccagcgtgtcgttcacgctcgacgacggcaccgggaagatcgcgctcacgcggtggatcgctgaagatattgatgctaaggaagtggctttcgttcagaatggtatatacctcaaggttcaagttactctcgtagggtttcaaactaagcagtatggttttgctcgcgctattcggcctgttaccaatttcaatgaagtggcgctgcacttcattgagtgtatttatttgcatttggaaaatgtacggcaaaaggtgattagagcaaatggctcatttttgtgacagttctttttgatgctgtatgaaagcacaaactgttatttcatttccgttttgaagatgcaaggtcaattccctcgctccattcaagcaaatgtgtctacttatgagatgcaagctcaagttgctcacagtattcaaacaaaatcacctgcttatatgcccttttctggtggagctagagagcatcaagttgattttgctcctgaagtaaaccatgggcgattcctttcatcagttcaaacaaacacacctactcatgtacccttttctggtggagctagagaacagcaagttcactttactcctcaaccaaatcaattttcagcttacccaggtacaggtggtcatcagcacgatctgcagagtatggttttggaggttatgcaacgaccagatatacttgcacttgaaaatggagtacatgttgatgaagtggcaaggagacttggaatgccaagcgcacaaattctgtatataaaactccactcatatatttgatcacatgcatatgcattatgctaagtcttatatacctttaaacatgcagggccaccgcccagcgtcttgtcaatttggcatgcctctgttccactattgatgattatcatttcaagtctattaaatgattgatcaatgttaccatcttcaagacttggcattttagattattggcagtttttaggtactgaatagcattcgtgtatatgctttaagtatgcacatctagtacatgcatttttctttgtacagagcactgaacacctgtttttagttgccaagctagttactcagattgtcagacatgcagatcggttagaaacttagaatgtcaaaccattggcatgctgcagttgctggatggatctgcttagtactgtttacttgtttactagaatgtcaaaccattgccaggcaagttactc

SEQ ID NO: 134536 - DNA, 1459 bp, Zea Mays
cgaaacaaatcccctcgtcatcgtccccaccgaaaccgcagtaccaccgtacccgcgccgacgtgagtacgatggcctcctacttcgccggtccggccatcgtgccgtcgcagcacgccaccgcggcgcccgacaattccgcggtcgccaccccttctccggctaagtcgcgtgacccccgcttctccggatccgcctccaccaccgttcgtcacatcgcccgctccttcgccgccgccgacgccaccggtgatggcgaccttgtcatccctatcgacggcgtcgacgccaccaacgtttggattctggggagggtggtgagcgtggtgaacatggaggccagcgtgtcgttcacgctcgacgacggcaccgggaagatcgcgctcacgcggtggatcgctgaagatattgatgctaaggaagtggctttcgttcagaatggtatatacctcaaggttcaagttactctcgtagggtttcaaactaagcagtatggttttgctcgcgctattcggcctgttaccaatttcaatgaagtggcgctgcacttcattgagtgtatttatttgcatttggaaaatgtacggcaaaagatgcaaggtcaattccctcgctccattcaagcaaatgtgtctacttatgagatgcaagctcaagttgctcacagtattcaaacaaaatcacctgcttatatgcccttttctggtggagctagagagcatcaagttgattttgctcctgaagtaaaccatgggcgattcctttcatcagttcaaacaaacacacctactcatgtacccttttctggtggagctagagaacagcaagttcactttactcctcaaccaaatcaattttcagcttacccaggtacaggtggtcatcagcacgatctgcagagtatggttttggaggttatgcaacgaccagatatacttgcacttgaaaatggagtacatgttgatgaagtggcaaggagacttggaatgccaagcgcacaaattctgtatataaaactccactcatatatttgatcacatgcatatgcattatgctaagtcttatatacctttaaacatgcagggccaccgcccagcgtcttgtcaatttggcatgcctctgttccactattgatgattatcatttcaagtctattaaatgattgatcaatgttaccatcttcaagacttggcattttagattattggcagtttttaggtactgaatagcattcgtgtatatgctttaagtatgcacatctagtacatgcatttttctttgtacagagcactgaacacctgtttttagttgccaagctagttactcagattgtcagacatgcagatcggttagaaacttagaatgtcaaaccattggcatgctgcagttgctggatggatctgcttagtactgtttacttgtttactagaatgtcaaaccattgccaggcaagttactc

SEQ ID NO: 134537 - DNA, 1483 bp, Zea Mays
cgaaacaaatcccctcgtcatcgtccccaccgaaaccgcagtaccaccgtacccgcgccgacgtgagtacgatggcctcctacttcgccggtccggccatcgtgccgtcgcagcacgccaccgcggcgcccgacaattccgcggtcgccaccccttctccggctaagtcgcgtgacccccgcttctccggatccgcctccaccaccgttcgtcacatcgcccgctccttcgccgccgccgacgccaccggtgatggcgaccttgtcatccctatcgacggcgtcgacgccaccaacgtttggattctggggagggtggtgagcgtggtgaacatggaggccagcgtgtcgttcacgctcgacgacggcaccgggaagatcgcgctcacgcggtggatcgctgaagatattgatgctaaggaagtggctttcgttcagaatggtatatacctcaaggttcaagttactctcgtagggtttcaaactaagcagtatggttttgctcgcgctattcggcctgttaccaatttcaatgaagtggcgctgcacttcattgagtgtatttatttgcatttggaaaatgtacggcaaaaggtgattagagcaaatggctcatttttgtgacagttctttttgatgctgtatgaaagcacaaactgttatttcatttccgttttgaagatgcaaggtcaattccctcgctccattcaagcaaatgtgtctacttatgagatgcaagctcaagttgctcacagtattcaaacaaaatcacctgcttatatgcccttttctggtggagctagagagcatcaagttgattttgctcctgaagtaaaccatgggcgattcctttcatcagttcaaacaaacacacctactcatgtacccttttctggtggagctagagaacagcaagttcactttactcctcaaccaaatcaattttcagcttacccaggtacaggtggtcatcagcacgatctgcagagtatggttttggaggttatgcaacgaccagatatacttgcacttgaaaatggagtacatgttgatgaagtggcaaggagacttggaatgccaagcgcacaaattctggccaccgcccagcgtcttgtcaatttggcatgcctctgttccactattgatgattatcatttcaagtctattaaatgattgatcaatgttaccatcttcaagacttggcattttagattattggcagtttttaggtactgaatagcattcgtgtatatgctttaagtatgcacatctagtacatgcatttttctttgtacagagcactgaacacctgtttttagttgccaagctagttactcagattgtcagacatgcagatcggttagaaacttagaatgtcaaaccattggcatgctgcagttgctggatggatctgcttagtactgtttacttgtttactagaatgtcaaaccattgccaggcaagttactcatccatttcttttc

SEQ ID NO: 134538 - DNA, 1396 bp, Zea Mays
cgaaacaaatcccctcgtcatcgtccccaccgaaaccgcagtaccaccgtacccgcgccgacgtgagtacgatggcctcctacttcgccggtccggccatcgtgccgtcgcagcacgccaccgcggcgcccgacaattccgcggtcgccaccccttctccggctaagtcgcgtgacccccgcttctccggatccgcctccaccaccgttcgtcacatcgcccgctccttcgccgccgccgacgccaccggtgatggcgaccttgtcatccctatcgacggcgtcgacgccaccaacgtttggattctggggagggtggtgagcgtggtgaacatggaggccagcgtgtcgttcacgctcgacgacggcaccgggaagatcgcgctcacgcggtggatcgctgaagatattgatgctaaggaagtggctttcgttcagaatggtatatacctcaaggttcaagttactctcgtagggtttcaaactaagcagtatggttttgctcgcgctattcggcctgttaccaatttcaatgaagtggcgctgcacttcattgagtgtatttatttgcatttggaaaatgtacggcaaaagatgcaaggtcaattccctcgctccattcaagcaaatgtgtctacttatgagatgcaagctcaagttgctcacagtattcaaacaaaatcacctgcttatatgcccttttctggtggagctagagagcatcaagttgattttgctcctgaagtaaaccatgggcgattcctttcatcagttcaaacaaacacacctactcatgtacccttttctggtggagctagagaacagcaagttcactttactcctcaaccaaatcaattttcagcttacccaggtacaggtggtcatcagcacgatctgcagagtatggttttggaggttatgcaacgaccagatatacttgcacttgaaaatggagtacatgttgatgaagtggcaaggagacttggaatgccaagcgcacaaattctggccaccgcccagcgtcttgtcaatttggcatgcctctgttccactattgatgattatcatttcaagtctattaaatgattgatcaatgttaccatcttcaagacttggcattttagattattggcagtttttaggtactgaatagcattcgtgtatatgctttaagtatgcacatctagtacatgcatttttctttgtacagagcactgaacacctgtttttagttgccaagctagttactcagattgtcagacatgcagatcggttagaaacttagaatgtcaaaccattggcatgctgcagttgctggatggatctgcttagtactgtttacttgtttactagaatgtcaaaccattgccaggcaagttactcatccatttcttttc

SEQ ID NO: 134539 - DNA, 969 bp, Zea Mays
cagccaaaaaaaagaactgtaagaatgatgtaatatatcacacacagtgtgctcctaacacttgacatttctgcatgaaccagcccaaggcccatcacattttgggctagtttggatccatgagtttttatggagaatggagggaattgagagagaaatggactaattttccccttggccctcagatagccccaatcaccatagagaataattagtgtatccaaactagctctaaaagttgtccatgttcttttacatattaatatcggtttatgtctacattttaggtctctgggtccacaatgatgcggaccctagttctagttgacacaggagccgaacttgtgattgtgatgtctatggtcctgctcgactggctaccacatgtcggcaacctgtcaccagaagtaccaccacctcccttacaaagctcagacggctgcttaggatctggcagcagacctatgctttcaaagttcaggagcgacacgacgtcggacatggtgggacgatctgctggctcctcctgcgcgcagagcagtgccacttgagcgtactgcaccacctcagcaagttcgaatccgtcacccagcactggatctacaagctcatgcagccttccatcgttccatagctgccaggcctgcaaacattttgttttccacagtttgttcagcgccatccatttcgcagtgtaagcacaagagacccataaacagtggataaagctttgatacaaatatagagaggacaaaacaactgcagataaatattcaacattttgaatggcccattttgaatggcccctttaggctttgttttgttcggttgcacagggatcagagggattcgagggagattaaatccactttctattcaattttgaataggaagaggtttagggtccgtttgagtttgagaggacctgacttgcgcaaaaacaactctacctctgatttttttcccctg

SEQ ID NO: 134540 - DNA, 201 bp, Zea Mays
atgcttgcgctgatggttgcgatgagatcacgcaacaagtcgctggcttgcttgatctggtcaaaattgccttccagctcgatgttctttaggttggggttagactcgtggtcgcggatggatagcttgacgcctgtaactctgcttagtgttgaccccacccttgtcgattatgcaaccggccagagaggcgtccacact

SEQ ID NO: 134541 - DNA, 2270 bp, Zea Mays
ggccgcagcgtccgacaagatgcgctccgtgaccctgtcagtccctctttgtttctctctccgccgctagcatgggccactgcaagctcgcaacttgcaagtgtgcttcatcccacccgtcggttcttggagtccgcccaaagttggctcctttcatcttgtgccgtgtgcaggggcgggacgatccagagggcggtgcggaggatggctggcggcgccggccggaggagaccccacgccttggcggactcggggaccgccgactcgtcggcgtcagcatcggccagctgctccggggatgatatcagcagcactggtagtgccaagagggaagcggtacaaaggtgcaccatgcatcggtacagatcgcagctagagcaggaagttaacaaattgcaaaggcaactccaagaagagattgatttgcacatggcgttgacagatgccattacatataatgcggcgctgatacttaaggcatctatgaagcttcctgacaaggcacacgagctattgattagcatatcctctctggaaaccgctatcacaaagcttgaagaggatctacatcacctgcactaccagttatgtgatgcgaggaatgaaaggctacttgcagaaaataagccagaatgcttgctacctacagcgtcagattgccaaccttctacagcttgcgattgtacaagggaagagcctgaacaaacattaagatattcgagattcaaagattatcaccaagtggaggacggtttgtcaactgaacctgaagatcaacaagatgacgaaaaagacgccgaagatggagaacatgtatctctaaatatgctggtagaaaagcaccaagacgtttctttaactggactgttggaacacattttacacacaatgcaagaggcatgctctatggaaaatgaaggcaaagaagatcagaagatagatgcattaacatttagtcagcccaatttcaagaaaagcgacatgagtggaaatttgtggaataatccaaaccagctctctgaagagatggtgcgctcgatgaaagatatcttccttcatttatctgcatctcccaagatatcacgagaggagccttttgctaattcatcttcatcagcagaacgtctatctggttcaacattgactactttgtcagattcatctataatcgcctcagtgctgcggagtccttcgattgactggaacaacggcgatggtattattgatgatgttagaaactttgacccgtacaacgttaaaggcaaggaagcacggagagacgttgggagctattgttcagtagctgaagtgtcttggatgtatattggcaatgaacaacttgaatatgcatccggagctcttaaaaagttcaggtttcttgtggagcaactatcaaaggttgacccttcttgtatgaactgtgatgaacagatagcattttgggttaacttgtacaatgcattaataatgcatgcttatttggcatacggtgtccctgaaaatgacattaagctgttcgcgctaatgcaaaaggcctgttacacgatcggcgggcagcctgtcagtgcagccgaaatagagtttgtgattctgaagatgaagacaccggtgcaccggccacagctctccttgatgctggcccttcacaagtttaaaacgtcagagaacctcaggagatattcaatcgatggcactgagcctcgcgtcctcttcgcgctctgctgtgggatgttctcttctcctgcggtaaggatcttctctgctgaaaacgttcgagctgagcttcaggagtccatgagagactacatccgagcgtcagttggcataaacgacaagggagagctcgtagtccccaagctactgcagagctacgccaagggcatcgtggaggactccctgctcgccgactggatctgccgccatctgacactagaccaagtcgccgcgatccaggacacgtcgtcgtcgtcgtcgcataagcagcggcttcttggagtgcgcagcttcagcgtcatcccgttcgactcgaggttccggtacctgttcttgtccaacaacaccaggtgccagaattgaaacaagagtacaagactgcattgctatgcgcagacagccacaggagtgggtgcttgacaagttgacacttttttcgagagctgaaaatattagcttttgctgtacattctgtaaatttttccgttgactaggattcttctttgtacgtaacattcagctaactttttgtacatcaagcgaacccagaatacaag

SEQ ID NO: 134542 - DNA, 2245 bp, Zea Mays
ggccgcagcgtccgacaagatgcgctccgtgaccctgggcgggacgatccagagggcggtgcggaggatggctggcggcgccggccggaggagaccccacgccttggcggactcggggaccgccgactcgtcggcgtcagcatcggccagctgctccggggatgatatcagcagcactggtagtgccaagagggaagcggtacaaaggtgcaccatgcatcggtacagatcgcagctagagcaggaagttaacaaattgcaaaggcaactccaagaagagattgatttgcacatggcgttgacagatgccattacatataatgcggcgctgatacttaaggcatctatgaagcttcctgacaaggcacacgagctattgattagcatatcctctctggaaaccgctatcacaaagcttgaagaggatctacatcacctgcactaccagttatgtgatgcgaggaatgaaaggctacttgcagaaaataagccagaatgcttgctacctacagcgtcagattgccaaccttctacagcttgcgattgtacaagggaagagcctgaacaaacattaagatattcgagattcaaagattatcaccaagtggaggacggtttgtcaactgaacctgaagatcaacaagatgacgaaaaagacgccgaagatggagaacatgtatctctaaatatgctgatgcaagaggcatgctctatggaaaatgaaggcaaagaagatcagaagatagatgcattaacatttagtcagcccaatttcaagaaaagcgacatgagtggaaatttgtggaataatccaaaccagctctctgaagagatggtgcgctcgatgaaagatatcttccttcatttatctgcatctcccaagatatcacgagaggagccttttgctaattcatcttcatcagcagaacgtctatctggttcaacattgactactttgtcagattcatctataatcgcctcagtgctgcggagtccttcgattgactggaacaacggcgatggtattattgatgatgttagaaactttgacccgtacaacgttaaaggcaaggaagcacggagagacgttgggagctattgttcagtagctgaagtgtcttggatgtatattggcaatgaacaacttgaatatgcatccggagctcttaaaaagttcaggtttcttgtggagcaactatcaaaggttgacccttcttgtatgaactgtgatgaacagatagcattttgggttaacttgtacaatgcattaataatgcatgcttatttggcatacggtgtccctgaaaatgacattaagctgttcgcgctaatgcaaaaggtttgactaaatcctttttgattcacaactttcgctgaactctcgatatactgtaatttgacgagctagagacaatgtggcaggcctgttacacgatcggcgggcagcctgtcagtgcagccgaaatagagtttgtgattctgaagatgaagacaccggtgcaccggccacagctctccttgatgctggcccttcacaagtttaaaacgtcagagaacctcaggagatattcaatcgatggcactgagcctcgcgtcctcttcgcgctctgctgtgggatgttctcttctcctgcggtaaggatcttctctgctgaaaacgttcgagctgagcttcaggagtccatgagagactacatccgagcgtcagttggcataaacgacaagggagagctcgtagtccccaagctactgcagagctacgccaagggcatcgtggaggactccctgctcgccgactggatctgccgccatctgacactagaccaagtcgccgcgatccaggacacgtcgtcgtcgtcgtcgcataagcagcggcttcttggagtgcgcagcttcagcgtcatcccgttcgactcgaggttccggtacctgttcttgtccaacaacaccaggtgccagaattgaaacaagagtacaagactgcattgctatgcgcagacagccacaggagtgggtgcttgacaagttgacacttttttcgagagctgaaaatattagcttttgctgtacattctgtaaatttttccgttgactaggattcttctttgtacgtaacattcagctaactttttgtacatcaagcgaacccagaatacaagtgtagattcggtgatggttcagtctcaggttagtggcttgattaccgccaaggaacccaaaattacactgcaaattcacagccagt

SEQ ID NO: 134543 - DNA, 2196 bp, Zea Mays
cgctttgtttcgagctgtgatgggctctgttcctcttaaatggaagctggctgatgttggccgtggtgggcatgtggttatacgaaagttgaaaattgaagtcctctgatgaaatccattctctaaaatttgttccctgattatacgaaagttcgtcaaaatcatgttcatttttaactcatgccttcccatgtgcctttagtttcatcattaacagcaccattgtagttcaagcagttttccttgggcgccttttctatgacaggagaatatttttttgcaagttcaaaagaacaaaaaagaagatatttcttgatgtggttgtgtactgactgtgtaatgctctactcttgacatacctgtacaggttaacaaattgcaaaggcaactccaagaagagattgatttgcacatggcgttgacagatgccattacatataatgcggcgctgatacttaaggcatctatgaagcttcctgacaaggcacacgagctattgattagcatatcctctctggaaaccgctatcacaaagcttgaagaggatctacatcacctgcactaccagttatgtgatgcgaggaatgaaaggctacttgcagaaaataagccagaatgcttgctacctacagcgtcagattgccaaccttctacagcttgcgattgtacaagggaagagcctgaacaaacattaagatattcgagattcaaagattatcaccaagtggaggacggtttgtcaactgaacctgaagatcaacaagatgacgaaaaagacgccgaagatggagaacatgtatctctaaatatgctgatgcaagaggcatgctctatggaaaatgaaggcaaagaagatcagaagatagatgcattaacatttagtcagcccaatttcaagaaaagcgacatgagtggaaatttgtggaataatccaaaccagctctctgaagagatggtgcgctcgatgaaagatatcttccttcatttatctgcatctcccaagatatcacgagaggagccttttgctaattcatcttcatcagcagaacgtctatctggttcaacattgactactttgtcagattcatctataatcgcctcagtgctgcggagtccttcgattgactggaacaacggcgatggtattattgatgatgttagaaactttgacccgtacaacgttaaaggcaaggaagcacggagagacgttgggagctattgttcagtagctgaagtgtcttggatgtatattggcaatgaacaacttgaatatgcatccggagctcttaaaaagttcaggtttcttgtggagcaactatcaaaggttgacccttcttgtatgaactgtgatgaacagatagcattttgggttaacttgtacaatgcattaataatgcatgcttatttggcatacggtgtccctgaaaatgacattaagctgttcgcgctaatgcaaaaggcctgttacacgatcggcgggcagcctgtcagtgcagccgaaatagagtttgtgattctgaagatgaagacaccggtgcaccggccacagctctccttgatgctggcccttcacaagtttaaaacgtcagagaacctcaggagatattcaatcgatggcactgagcctcgcgtcctcttcgcgctctgctgtgggatgttctcttctcctgcggtaaggatcttctctgctgaaaacgttcgagctgagcttcaggagtccatgagagactacatccgagcgtcagttggcataaacgacaagggagagctcgtagtccccaagctactgcagagctacgccaagggcatcgtggaggactccctgctcgccgactggatctgccgccatctgacactagaccaagtcgccgcgatccaggacacgtcgtcgtcgtcgtcgcataagcagcggcttcttggagtgcgcagcttcagcgtcatcccgttcgactcgaggttccggtacctgttcttgtccaacaacaccaggtgccagaattgaaacaagagtacaagactgcattgctatgcgcagacagccacaggagtgggtgcttgacaagttgacacttttttcgagagctgaaaatattagcttttgctgtacattctgtaaatttttccgttgactaggattcttctttgtacgtaacattcagctaactttttgtacatcaagcgaacccagaatacaag

SEQ ID NO: 134544 - DNA, 130 bp, Zea Mays
tccctgtgtgatggtcctcctgctgtctcgactacgcggggtcgtaggcatgggtgccgctgctggctcaactgcacggacgttgctcggagacgaggacacccatgcgcgccgatggatagcgggtgaa

SEQ ID NO: 134545 - DNA, 88 bp, Zea Mays
ctgcactgtactacgctgggagcgtagaggagacgagaatgatgctctgtttgcttgggaggaggaggaggaggaggcgacaggagga

SEQ ID NO: 134546 - DNA, 1568 bp, Zea Mays
ggatcacaagctagatttcattaaatgcttggtactagtagtattattgacaacacaagagtacataccgctgatttaaataaactttagttgctccactaaaaactgtataccatggcccatggggattaggccgaggagaggagatccttctccggtggtccctacaaaccaggaccagcccgcacgaccacaagtgccagcgaggagtggcacctgggcatgccacgtgtgcagtgggcatcaccatagccccgattcaccaatgggaagagaccccttatccgctgctcttatcctccgcctgtggcctgtgctcagctgcgcgtagataacgaactctcccgccctcacaaaaccgcccttcacgatacgcacccaccagaggaaaagggcaaaagccaaaaggcatcaccgccgcgacgacgatggcagcctcgctccaagccgcggccaccctgatgcagccggccaagatcggcggccgggcgccctttgcctcgctgccgtcccgcccgtcgtcgcaactcgcctgcagggcgttcggcgtcgacgccggcgccgccaggatcacgtgctccctgcaggacgtcgccagcaggtgcgtcgacgccgcgaagctcgccggcttcgcgctcgccacctcggcgctcctcgtctcgggcgcgagcgcggagggcacgcccaagaggctgacctacgacgagatccagagcaaaacgtacatggaggtgaagggcacgggcacggcgaaccagtgcccgaccatcgacggcggcgtggagtcgttcccgttcaaggccggcaagtaccagatgaagaagctgtgcctggagccgacgtccttcaccgtcaaggcggagggcatcgccaagaacgccccgcccgagttccagaagaccaagctcatgacccgcctcacgtacacgctggacgagatcgagggcccgctcgaggtcggctccgacggcacgctcaagttcgaggagaaggacggcatcgactacgccgccgtcaccgtgcagctcccggggggcgagcgcgtgccgttcctcttcaccgtcaagcagctcgtcgccaccggcaagcccgagagcttcggcgggcccttcctcgtgcccagctaccgtggctcctccttcctcgaccccaagggccgcggcggctccaccggctacgacaacgccgtcgcgctccccgccgggggcagaggtgacgaggaggagctccagaaggagaacatcaagaacgccgcctcctccaccggcaacatcacgttgagcgtcaccaagagcaacccggagaccggcgaggtcatcggcgtcttcgagagcgtgcagccgtccgacaccgacctcggggccaaggcgcccaaggatgtcaagatccagggggtctggtacgctcagctcgagtgattcgagtgtctaactgctaggtgtccgaccgccgtcatggatcttgggaaggtgtatgtataccatggaaaactttggagagcagaggaggaatcgtgtatgtaatgtacttgttaatgcaaattcgggctgtcgcttttttactccgct

SEQ ID NO: 134547 - DNA, 1343 bp, Zea Mays
cgcccttcacgatacgcacccaccagaggaaaagggcaaaagccaaaaggcatcaccgccgcgacgacgatggcagcctcgctccaagccgcggccaccctgatgcagccggccaagatcggcggccgggcgccctttgcctcgctgccgtcccgcccgtcgtcgcaactcgcctgcagggcgttcggcgtcgacgccggcgccgccaggatcacgtgctccctgcaggacgtcgccagcaggtgcgtcgacgccgcgaagctcgccggcttcgcgctcgccacctcggcgctcctcgtctcggtaagcacgcatgcattgttagcgagctcgcttgcctgctcctcaaggtcggccgaagttggttggtggtgacatgtgtgtgtgtgtgtgtgtgtgtgtgtgtgtgtgtgtgtgtgtgtctgcgtgcagggcgcgagcgcggagggcacgcccaagaggctgacctacgacgagatccagagcaaaacgtacatggaggtgaagggcacgggcacggcgaaccagtgcccgaccatcgacggcggcgtggagtcgttcccgttcaaggccggcaagtaccagatgaagaagctgtgcctggagccgacgtccttcaccgtcaaggcggagggcatcgccaagaacgccccgcccgagttccagaagaccaagctcatgacccgcctcacgtacacgctggacgagatcgagggcccgctcgaggtcggctccgacggcacgctcaagttcgaggagaaggacggcatcgactacgccgccgtcaccgtgcagctcccggggggcgagcgcgtgccgttcctcttcaccgtcaagcagctcgtcgccaccggcaagcccgagagcttcggcgggcccttcctcgtgcccagctaccgtggctcctccttcctcgaccccaagggccgcggcggctccaccggctacgacaacgccgtcgcgctccccgccgggggcagaggtgacgaggaggagctccagaaggagaacatcaagaacgccgcctcctccaccggcaacatcacgttgagcgtcaccaagagcaacccggagaccggcgaggtcatcggcgtcttcgagagcgtgcagccgtccgacaccgacctcggggccaaggcgcccaaggatgtcaagatccagggggtctggtacgctcagctcgagtgattcgagtgtctaactgctaggtgtccgaccgccgtcatggatcttgggaaggtgtatgtataccatggaaaactttggagagcagaggaggaatcgtgtatgtaatgtacttgttaatgcaaattcgggctgtcgcttttttactccgctaaatt

SEQ ID NO: 134548 - DNA, 471 bp, Zea Mays
atggacgcaagccaggtggcctccagaaccaaagaagacactgatctacatggaagggtgcttaggtttggcgccgaagatggaaggggatctccgagggggcgccgcgtgcaatggagcggagccggggaaggagagtgcgggcgtcgtggcgccgtgctgtttggggaaggggccgcggcgacagggggctgcaccggcgcggggaaaggaggcgggcaacacggtgacataccagagtgcagggtgagggaggtcgctgtccacgccatgggcgacgtcggggagaatcggtgcgtcgctgatgagggagcggatgcgcggacgggactggggtctggagggcagccatggggaggaggtgttggctcgccgctaagggctagagaagggaggtcgccggtggccaggaacgtggacggctgtggctcgccagggaagggggcgccgatggtggatctcgccgtgtaa

SEQ ID NO: 134549 - DNA, 1842 bp, Zea Mays
gttccgtatacataatttggttccaaatggaataacccaatgcagcagtagccgtctgcctcctcgctttccctttcgtccgtacgccgccgcctcgcaccgccgacagtcctcagtccagaactccagatcgagcctccctctccccagatcgggtcctaggctacagcagccgccgcatccgtcaccttcacaccgcgtgcgtgctctctctccccctccccctctccgtgcgacgactgggtgggctaccgccgccctacgcaaggtgccgagaacttcgccgatatctgcgccggagaagagcgcccaccagatcaggcgcttagaaggcgcgctggccggtggatgacgatggcgggtggcgggggactgaaccggtcttcatcgagggggcagctgccgccgcaagagctgcttgacgatctctgcagccggttccttctgaatgtgcccaaggaggagctggagtcgttcgagcggatcctgttcctgctggagcaggcgcactggttctatgaggacaactccgttgagcacaaccccaacctcaagtccctctccttcaaggacttcacttccctcatgttcaagagctgcactgctctccggccctacatcgcgcacctggatgatatctacaaggacttcaacaactacaagtttcgtgtgcctgtgtccggcgccatcatcctagacgacacttatgagaggtgcttgcttgttaaaggatggaaggctggggccagctggagctttcctcgtggaaagaggaataaagatgaggaagaccacacatgtgctgttagagaagttctagaggaaactgggtgtgatgtttctagactattaaatctggatgattacattgaagtttcaattggacaacaaagggttcggctctacatcataacaggggttaaaagagacactgtgtttgcacctcaaaccaagaaggaaattagtgaaatttcatggcacagaattgatgacctcttaccagctagtgatgatgcagtatctcgtgcagtgaatggaatgaagctgtacatggttgcgccatttttgacgggtcttaaggcttggattgccacacatcctccaccactgcatcagaaaccagagacatctgctagaggtactgtgtggagggcgaagggttcgtcgagcggcacaaccccagtggagaatcctgttgctaaagcaggatctgacgtgcagcacgctgccgaccgccctggttgcagcttcagaaacttcaggtttgacaccgcaagcatcctgcaggccatggaggcttccttcctacgcacctagaatcctgacgaagcatcaacacctgcacccttgatgtgtatagaccgcggaccagcgctatctgtgttgtcaatctgtctttgtttcgtctttctcgccttgtatctgtactcttcacagcaatcctgtcagacgcttgaacctgattttgctgctgccccgtttggtggtggttgtccataaagttctaacgatggtgctgcaaagtctggaaagggccgacttgcgatcttcgtgctgatggctcggatggggccaatccattgggccgctggagccactgcccgcgttgttctacaagagttagttatcctcgcggttgacacagaaaggataaaattgcaagttgtgtctcagtttggcactcgaagggagcttgtgtgggtgttgttgttttttttttgtcatggcagcgtcgtctctaactctaaaggataccgcagtttctccaggtattttgtttaatagcgttatgtacctactcagttgctgtgccatgatagtgtagcctctcaaaaaaaaaga

SEQ ID NO: 134550 - DNA, 2105 bp, Zea Mays
tgccccgcgagaccgcccgaccaccgctagccagtgaagtaaaaacgccaggcgccacgccgcgcggcgcgagtgggaacgataatgaagccgccgccgccgaagggacggggagcaggagggagttgcgtgttcggccgccgcgcgttcgcgttcctcctcgcggcggccgtcgtcgcgctcgcgctcctctgcctcttctacggcgccgccttcgcaccctccatccgccgcgcgcaccctcgccttcccctccggctgcggttcggggacctagggacgcaatctatcccagcgggcctcgtcgtctcctccatcccggtgtgcgacgcgaggcactcggagctgatcccgtgcttggaccggggcctccactaccagctccggctccggctcaatctctccctcatggagcactacgagcgccattgcccaccggcgccgcgccgcctcaactgcctcatcccaccgcccgacggctaccaggtgcccatcaggtggccgaggagcagggacgaggtctggaaggccaacataccccacccataccttgctgctgagaagtcagaccagcggtggatggtcgtcaatggcgataagatcaacttccctggcggtggcacccacttccccactggcgctggcaagtatattgtgcaccttgcgcagatgctgaattttccaaatggtacgctcaacaatggagggaacatcaggaatgtgcttgatgttggctgtggggttgccagcttctgcgcttaccttctttcacatgatgtacttgcgatgtctcttgctcccaacgacgtgcatgaaaatcaaatccagcttgcccttgagagagggatcccggcaacccttggtgtgctgggcacaaggaggctgccatacccattacccaagccgctcgtttgaaatggcacattgctctcgttgtcggattgactggctacagagggatggggtcttgttgctggaagtcgatagggtattaaggcctggaggatattttgtgtattcatcaccggaggcctatgctttggaccccttcaacaggaagatatggagacagatgagtgaccttgctcgaaggatgtgttggcgggttgcatctaagaagaaccagacagtgatatgggctaaaccattgactaatggatgctatatgaggagagagcctggaacacttccccccatgtgtgaacgtgatggtgactcagatgctgattggggtgtccccatgaaagtatgcctaaccccatactctaagagagttagtaaggctaaaggcagcgaattacttccctggccacaaaggctcacaacaccaccaccgtgcctggaagagcttggaatcagttggaacaatttttcagaggacaatgagatttggcattctagagtaattcagtactggaagcacatgaagttcgagatacaaaaggattcctttcgaaacgttatggatatgagtgctaaccttggtggatttgcagcatctctgaagaaaaagaatgtctgggttatgaatgtagttcctttcacggaatctggaaagctgaaaattatatatgatcgtggtttaatggggactacccatgactggtgtgaatcattctcgacatacccgcgcacctacgacctccttcacgcctggctcctgttttctgagatagagaagcggggatgtagcctggaggatcttctgatcgagatggaccgcatcctaaggccttatggttacgccatcatcagagacaaagttgatgtcgttacctacatcaagaaacttttaccagcgctaaggtgggacgactggacgtttgagatgaggcctaagaaagatgcgctcacaataggtgacgaaagagtcttgatcgtgaggaaaaagctctggaatcactcggtgcaagatttgtcgtagcagccgtttctcttgttttgatcctaactgtagctaactctgcaccggcgttgtcctaatcctcaaatgtaatgtagtattcgacgccttcttttttctcgtgtggtgaaatgtcaacagtagatttagcatcagcatcagacgcaggcttcagtccttttgatatacatattacatagtc

SEQ ID NO: 134551 - DNA, 2093 bp, Zea Mays
gaacccgacccgacctcgcctcacttcactcgggatatcccaacagttcgctgccgtcgcctccgccagaccgccgccgcgacactagacaccagcgccgcggcagaaggagcaagggagaagaaggaaagcggcacccgccgcacatacgccgcgcggcggagccatggccgagctgcggcacgccacggcggcggcggcggcgacgcgcgccactggctccccttccaagcgcgacgccgaggccgcgtcctcgcccttggtcgcgtccccccgcgtcggcggcggcagggacgggctccgccctcaccagaggtggccgctcccgccccccgtccgcgccctcctcgcgtgcgaggaccccaggtcccccaccgcctccgcctcctaccggatcctggtcgcggccatcgcctgcttcgccctcgctgcgctcttctccgcgccttccctctgggcacgcctcaacgctccgtacctgtgccgcaaggaggggattcggctccactgccccagggtcagccagccagactctctgtgggagaatcctcatgcagcagcaacttcgtggaagccgtgtgctgagcgtcagagacatgaggtctcagacctcgtgtcagagaatgaaacttctgggtttatatttattcacgctgagggtggattaaaccagcaacgtatagctatatgtaatgctgttgcaattgctaagataatgaatgctacacttattctgccagtgctaaaacaggaccaaatatggaaagatcaaacgaaattcgaggacatctttgatgtagaccattttataaattatttgaaggaggatgtgcacattgttcgagatattcctgactggtttacagaaaaggatgaccttttcactagtataaagcgcactgtgaaaaatgtcccaaagtatgcatcagcacaattttatattgataatgtgcttccaaggatcaaggagaaaaagataatgtctatcaagccatttgttgataggttaggatatgataatgttccaatggagattaaccgactgaggtgccgagttaattatcatgctttgaagtttctacctgacattgaagaaatggctgacaagctagcaacaaggatgaggaatcgaacaggaagtttaaatccatacatggctcttcacttgcgatttgagaaaggaatggtgggcctttcattttgtgattttgctggaacccgggaggagaaagctatgatggctacttacagacaacaacaatggccaaggcggtacaagaatggatcacacttatggccactagcgctacaaaagagaaaaagaaggccgatgcccccttgagcctgggggaaataggaatcattttgcgcgcgatggggtatacgaaggaaactcagatatatgttgcatcagggcaggtgtatggtgggaacaacagaatggcacccttgaggaatatgttccccaatatggttagcaaagaagatctcgcaagcaaggaagagatggagcctttcaagaagcatgtaaccagccttgctgcgctggacttcctggtatgcctgaagtcggacgtgttcgtcatgacccacggcggcaatttcgccaagctgatcattggctaccgtcgctacatgggccgccacaggctcaagtcaatcaagccggacaagggtctcatgtccaagttcttcggtgacccttacatgccgtgggcgacgttcgtggaggacgtggtgataacccatcagacacggaccggcctccctgaacccaccttcccgcactatgacctatgggagaaccctctcaccccttgcatgtgtagagcttaaattacagtcagcgagtgatggtgcatagttattctttgtatcatatgctgatatgcaagctgcaaattttgtccaccttgtttatttttttttaccacttctgctgtacaagtttaacaaagcaaagctcagttcatcacgatcctctgcaatctttccctcctgaaaaatcttggtgatgtctaaatatgtaatctgatgtagctcttcatcagatgaatcacaaagttttatgtactccatcagatccaaacagt

SEQ ID NO: 134552 - DNA, 1885 bp, Zea Mays
cgcctccgccagaccgccgccgcgacactagacaccagcgccgcggcagaaggagcaagggagaagaaggaaagcggcacccgccgcacatacgccgcgcggcggagccatggccgagctgcggcacgccacggcggcggcggcggcgacgcgcgccactggctccccttccaagcgcgacgccgaggccgcgtcctcgcccttggtcgcgtccccccgcgtcggcggcggcagggacgggctccgccctcaccagagaacgctccgtacctgtgccgcaaggaggggattcggctccactgccccagggtcagccagccagactctctgtgggagaatcctcatgcagcagcaacttcgtggaagccgtgtgctgagcgtcagagacatgaggtctcagacctcgtgtcagagaatgaaacttctgggtttatatttattcacgctgagggtggattaaaccagcaacgtatagctatatgtaatgctgttgcaattgctaagataatgaatgctacacttattctgccagtgctaaaacaggaccaaatatggaaagatcaaacgaaattcgaggacatctttgatgtagaccattttataaattatttgaaggaggatgtgcacattgttcgagatattcctgactggtttacagaaaaggatgaccttttcactagtataaagcgcactgtgaaaaatgtcccaaagtatgcatcagcacaattttatattgataatgtgcttccaaggatcaaggagaaaaagataatgtctatcaagccatttgttgataggttaggatatgataatgttccaatggagattaaccgactgaggtgccgagttaattatcatgctttgaagtttctacctgacattgaagaaatggctgacaagctagcaacaaggatgaggaatcgaacaggaagtttaaatccatacatggctcttcacttgcgatttgagaaaggaatggtgggcctttcattttgtgattttgctggaacccgggaggagaaagctatgatggctacttacagacaacaacaatggccaaggcggtacaagaatggatcacacttatggccactagcgctacaaaagagaaaaagaaggccgatgcccccttgagcctgggggaaataggaatcattttgcgcgcgatggggtatacgaaggaaactcagatatatgttgcatcagggcaggtgtatggtgggaacaacagaatggcacccttgaggaatatgttccccaatatggttagcaaagaagatctcgcaagcaaggaagagatggagcctttcaagaagcatgtaaccagccttgctgcgctggacttcctggtatgcctgaagtcggacgtgttcgtcatgacccacggcggcaatttcgccaagctgatcattggctaccgtcgctacatgggccgccacaggctcaagtcaatcaagccggacaagggtctcatgtccaagttcttcggtgacccttacatgccgtgggcgacgttcgtggaggacgtggtgataacccatcagacacggaccggcctccctgaacccaccttcccgcactatgacctatgggagaaccctctcaccccttgcatgtgtagagcttaaattacagtcagcgagtgatggtgcatagttattctttgtatcatatgctgatatgcaagctgcaaattttgtccaccttgtttatttttttttaccacttctgctgtacaagtttaacaaagcaaagctcagttcatcacgatcctctgcaatctttccctcctgaaaaatcttggtgatgtctaaatatgtaatctgatgtagctcttcatcagatgaatcacaaagttttatgtactccatcagatccaaacagt

SEQ ID NO: 134553 - DNA, 627 bp, Zea Mays
tcccccgaccaaaagattcccacgggctcgccgctcgcatctcgccagcgcgaacgcagcctccgtgcatatcaccagcctcctcgcgcacccggtcccgcttgcctttccccacctactcgccgtcgcggtgccgtgcgccggtgctgttcagtctagggtttcggccctcgcccgccgatccgtccccccgccggccatgtcgaagcaaggagggaaggccaagccgctgaaggcgcccaaggtcgacaagaaggagtacgacgagagtgatcttgcttatttgcagaagaaaaaagatgaggaaaaggcgctgaaggagctgaaggccaaggcacagaagggcgcaattggaggctcgggtctcaagaaaagtggaaagaaatgagcattgcccacccacccatctccaaaacacctaagagaacgataagacagctgcttatctgtgttgcgcttcactatatgatatatgtggctgtgagacaatgttgcctcttgtattccgtgtttcgcggtgttccagttggtttgcttgatccgaagatgtttcagcctctcatctgctagctttgatacacgagttatttgctattatgatattcatttgaagtggattcttcggca

SEQ ID NO: 134554 - DNA, 677 bp, Zea Mays
tcccccgaccaaaagattcccacgggctcgccgctcgcatctcgccagcgcgaacgcagcctccgtgcatatcaccagcctcctcgcgcacccggtcccgcttgcctttccccacctactcgccgtcgcggtgccgtgcgccggtgctgttcagtctagggtttcggccctcgcccgccgatccgtccccccgccggccatgtcgaagcaaggtgcgagggaaggccaagccgctgaaggcgcccaaggtcgacaagaaggagtacgacgagagtgatcttgcttatttgcagaagaaaaaagatgaggaaaaggcgctgaaggagctgaaggccaaggcacagaagggcgcaattggaggctcgggtctcaagaaaagtggaaagaaatgagcattgcccacccacccatctccaaaacacctaagagaacgataagacagctgcttatctgtgttgcgcttcactatatgatatatgtggctgtgagacaatgttgcctcttgtattccgtgtttcgcggtgttccagttggtttgcttgatccgaagatgtttcagcctctcatctgctagctttgatacacgagttatttgctattatgatattcatttgaagtggattcttcggcattgtttgaatgcactagcatatagttagtagctaaaattagttgag

SEQ ID NO: 134555 - DNA, 257 bp, Zea Mays
atggagaagtgcaggtcggtgccgcacgagcactcgtcgccgtactacggcggcggcggcggcggcgggcccgggcaggccggcaagtcgtacagcttcaacgggccgagcggccgcgacgacccggagccgaagcggcggcgccgggtggcggcgtacaacgtgcttgccgcgcagggccggatcaagacaaccgtccgcggcagcgtcaagtgtctcaagtccaagatctctccgatgtccagtacggcggcctc

SEQ ID NO: 134556 - DNA, 306 bp, Zea Mays
atggtctcggcgcagtaccgcggcacggagaagcccccgccgttgttggcgtcggactgcgtgagcgtcttggcgaaggacgcgggcttgtcctcccgcgcgcccggcgccgcggcgtcggcgtggtccggctcgttgggccggacgggggcgaggcggaccctggcgagcacctcgtcggtgtccggatcggccaggaaccggacggcgtcgacgcggcagaggacgagggccgggacccggccggcggggaggtcggcgtgggcgtggccctgcgcgtgctcggcgtggccctgcgggaagtag

SEQ ID NO: 134557 - DNA, 1792 bp, Zea Mays
cgcaatgcgcatgctggctgatcgcttcacggacgctgtcaggcttcggcccctagaggaagcagaacggatcaaaatcatcgcagtggcctctattcgcgcccagggttttcctcaaattggaattggggaacgagcgggaaatggtgatcggccccggcggcggcagcggcagcggagcgaagaagcagagggcggatgagcaaggggacggatgcgaggcggtgggtgcggatgcggatccgatccctttggaccactcctcggtgctgcccaacgacctgcggtatctcatcctgacgcacctccccctcaagtacgccatccgcacgggggcgctctcgcgcgagtggcacggcctgtggaagcgccggtggtcgcaccgcgaccccgccgagggcgaggtgcacctccgccgaggtgccggctcgaggagagagctgcacaagtttgagcagcagcggcgaccgctccccccgatggaccgtttctccctcgtcgtcgagactgggctcaggtcctcggagctccggcgcttcatgaggtacgccgccgaccgccgcgtccaggacctccacgtcgagacacggaagagcatcaagaagaacgagaacctcaacttccacctgccgctgtcgagcccggccctcgtgcgcctctcgctccgccgcatcaacatctccaacatgtactacaggggcgcccagccgttccgcgctctcgaggtcatccagctctacctagtctgcattaatgtgtgcttcgcaaagatgatggggctgtgccccagcctgctcactctcgacctgcgaggctgcgtcatcagctgcggcgctcaaagattgtttgtgccgccgaccgtcaggaatgtcaccgtcgcggagtgcggcgggtattccaaactgtggttgaggctcgcgcctaaccttcgctccttccgttacagcggcgacgtccgcagcaggcccttctaccttccattgcaagccaccgcgcttgctgatctttatattcggtctgccaaccggctagaaggaacaagccagcacaatgccgataatctgagatttgctatccccaagaatttaccaggcctcaacgttctcaccatctgttccaatgccctccaggttgcatcatattccttgccaatgccaaatgacggtgccccgttccctactcgcaacttacgcagtttgagagaacttcaactgctcatgttagacatggaagctgtcaacctagctgacctcttcgtgttcctcaagacctgccgatgtcctaatctggagaggatctttgtgcagctcccggccttcagtcatgtgcccgtgaaaggtcccattgatgaggtgatggaagagccatctcaggatggctatggttttgacaaccttgtgatggtgaaggtcatgaacttcaattggcgccctaccgaggtgcagctattgggttttttgttgaggagagctagccccctatgtgaactattgatagtttctaataatgccatgcctctgaatttgtctggtgtaccagacgaagatcttacgcttctactagatggtatcgacaatggcaagataacggtgaggaagtctgacgatgctgaaattcagccatgtcattcagaggactttatcaagttctagttgtcagtgacaaggagggttcagaaccatatggatatagcaataccaaactgttagggaattatcccttttttaattggttgtagctcttatagctcttctgtccaccgttcttatgattgtagcagtatcaatacatg

SEQ ID NO: 134558 - DNA, 1797 bp, Zea Mays
cgcaatgcgcatgctggctgatcgcttcacggacgctgtcaggcttcggcccctagaggaagcagaacggatcaaaatcatcgcagtggcctctattcgcgcccagggttttcctcaaattggaattggggaacgagcgggaaatggtgatcggccccggcggcggcagcggcagcggagcgaagaagcagagggcggatgagcaaggggacggatgcgaggcggtgggtgcggatgcggatccgatccctttggaccactcctcggtgctgcccaacgacctgcggtatctcatcctgacgcacctccccctcaagtacgccatccgcacgggggcgctctcgcgcgagtggcacggcctgtggaagcgccggtggtcgcaccgcgaccccgccgagggcgaggtgcacctccgccgaggtgccggctcgaggagagagctgcacaagtttgagcagcagcggcgaccgctccccccgatggaccgtttctccctcgtcgtcgagactgggctcaggtcctcggagctccggcgcttcatgaggtacgccgccgaccgccgcgtccaggacctccacgtcgagacacggaagagcatcaagaagaacgagaacctcaacttccacctgccgctgtcgagcccggccctcgtgcgcctctcgctccgccgcatcaacatctccaacatgtactacaggggcgcccagccgttccgcgctctcgaggtcatccagctctacctagtctgcattaatgtgtgcttcgcaaagatgatggggctgtgccccagcctgctcactctcgacctgcgaggctgcgtcatcagctgcggcgctcaaagattgtttgtgccgccgaccgtcaggaatgtcaccgtcgcggagtgcggcgggtattccaaactgtggttgaggctcgcgcctaaccttcgctccttccgttacagcggcgacgtccgcagcaggcccttctaccttccattgcaagccaccgcgcttgctgatctttatattcggtctgccaaccggctagaaggaacaagccagcacaatgccgataatctgagatttgctatccccaagaatttaccaggcctcaacgttctcaccatctgttccaatgccctccaggttgcatcatattccttgccaatgccaaatgacggtgccccgttccctactcgcaacttacgcagtttgagagaacttcaactgctcatgttagacatggaagctgtcaacctagctgacctcttcgtgttcctcaagacctgccgatgtcctaatctggagaggatctttgtgcagctcccggccttcagtcatgtgcccgtgaaaggtcccattgatgaggtgatggaagagccatctcaggatggctatggttttgacaaccttgtgatggtgaaggtcatgaacttcaattggcgccctaccgagacgaagatcttacgcttctactagatggtatcgacaatggcaagataacggtgaggaagtctgacgatgctgaaattcagccatgtcattcagaggactttatcaagttctagttgtcagtgacaaggagggttcagaaccatatggatatagcaataccaaactgttagggaattatcccttttttaattggttgtagctcttatagctcttctgtccaccgttcttatgattgtagcagtatcaatacatgaatttttggctgttccgagtgctaaaaaaaagaaccattaagcaagatttggacaaggattcttggctaatagatcttctgtccaccgtgtcgacacactttatg

SEQ ID NO: 134559 - DNA, 756 bp, Zea Mays
ggcccaagctatatgactcggcacgagatacaattattttgcagtgcacaactcgataataaccgagtctaggcaaaacatggcagacgccagacagcaggtaacaagacaaaacttaatacattgttaaaactatttaagtgattttggtctggctgactgttgttgtctcggggcagcagctcatcatcccagcaaagtcgaagacaatacttcagagagcttaagacagcgaaggcagagaactaaaatgtaatttccatcacgctcacaagaatatcttggttgttgctcactctggccctggttgtgcagtagaggaaactgctgctcaggaacatgggaagtcaggcttgtaacaaggatcaaactattggtcaaaacatttgtctctcaatccatggctcacattcctgcaagggccagttgagatgtgactgctcctccaaattagcattcaagaaacctgcttctggtgatgactcattcttaggttcctgccagttgagatgtgactgctcctccaaattagcattcaataaacctgctactggtgatgtctcattcatatgttcctgccagttgagatgtgactggtccttcaaattagcattcaagaaacttgctcctcctagtgatgtatcattggtaggttcctgcctgttgatatgtgactggtccttcaaattaacattcaacaaacttgctagtgctatatcattcaagagaccttttgttagtagtgtatccgagatc

SEQ ID NO: 134560 - DNA, 477 bp, Zea Mays
atgagtaccgaagcactgaataggaacgacccattaaaagctaaatccaatgatttcaggttgaaggaacccttcgtatatgggcctcaccctcccccagggaagaccggtgcaaaatatatcatcatggacgatggtcagaggcttgatcttcaatatgtgaagaaaagaaatgatcaacatctagagcttggttacaagttagtagtttctggattgacactgtatagtggatgcagaactaagaaaggatggttccctactggttctgcgtataggaagttggaacacaagtatgagagtctgctaggagcaataagtcattcacccccaactgataccacctggtgttcaagctttcaacaaggcaaacagccattcgtgatacgcccatgggcatgggcagcaacaggccaacagccatactacagcatgaagcaaataatcactggaaggattcaggctttcaacatctaa

SEQ ID NO: 134561 - DNA, 321 bp, Zea Mays
gttctgtattttgaagattttgtaccttgtcagatatcacagtcctcttttgatgtgttgatgagcacaggctggcaaagctatggtttcaagttaaaaggaagtttgctgggtgatgaaggaaatgcttttcttgagtgggataacatgacatttgctcgtattgatattgctattcacacttaccatgaatgtgctatgcaagaacagcagggatctcaacaagaaagataccttgtgaggaaggcactcaagtctgctctatctcacttgaaagcagaccatgcaggagattttcttagttgccatggccagagagta

SEQ ID NO: 134562 - DNA, 165 bp, Zea Mays
cgtagtttcccgtttggactcttttggtctgctgggcacaaaaatatgcccccgtatattaaggtgcgatggacatctgcaaccatactgcaaaccattcacaaggaccacaacaacatagattcaagcgttttagttaaacaaaatagaagaaaaaacgagtag

SEQ ID NO: 134563 - DNA, 2402 bp, Zea Mays
gtcgcatcgcatggtatatctaaacaagaaaaagggggaaagaagcgatagcgataggccatgtggacgtgtcacatgctggtcaggtggaagtcaattaggtcatgtaaagaaatgcagaatggccatgactcatcagagggagatgggaaattgccgaccggtgtataatacgaagtcttggacgtggatgagatctggaacttttttattcctgcattgcctcaaatctggggtaattttccttttatttttatttttttctggtaggagtacctgggagtctgggacaggtcagaggcagctgctgctgcggatggacacgcgacacatccgcagcggctagccaatgagcggcgaccaagggagcaggtagtaggccgtgttctaggctggccttttccatcgcttttctcgccggtattattagcgcggatcgttcatcgttcgggattggggttctgactcggaacctgatcagtgagtgtggtcttctgaaagcgagcaaaggaggatggggttctccttcttcacctcccgagccggtgctcgactgctggacgggatcgcgcgccccggcttctccaccgccgcgcttctgctcacagcggccagtggcggaggccttgtggcgtacgcggattccgctgcagagagcgcgccggacccatctcaggatgctcccaggaagaaggtggtggttcttgggactggctgggctgggacgtcgttcctcaagaacctcgactgctccaggtatgaagtgaaggtcatatcgccccggaactacttcgcgttcactcctctgcttccgagtgtcacgtgtgggactgtcgagccgcgcagcattattgaaccgaaaaacaaggatgtcacattttgtgaagccgagtgtttcaagattgatgcaaatagaaaaactgtacattgccgttctgctgttggaactaatcttgatgggaatggtgattttatgttggattatgactacttagttgttgctcttggggctactgtaagtacatttaacactcctggagtgctggagcactgctgctttttgaaggaagtagaggatgctcagaagatacggaagggtgtgatagattgttttgaaaaagcatcacttccaaatattagtgaagaagagaaaaggaaaatcctacattttgtagttattggtggtggacctactggagttgaatttgcagcagagatgcatgattttcttgtcgaagatttagtgaaactatatcctgccattcaagacctcgtgaagataacaattattcaatcggcagagcatatattgactatgtttgatgaaagaatagcttcatttgctgaacaaaagttcaagagggatggcatcgaagtgtgcacgggcttcagagtgataaaggtgtctgatgatttgattacaatgaagagaaaatctgatggtgaggagttatcagttccttacggaatggctgtttggtctgctggcattggtactcgtcctgtcgtcatggacttcatgcaacaaattgggcagaccaatcgtcgtgccttggcaactaacgagtggttaagggttcgcgagtgtgaaggcgtctatgcaattggcgactgtgctacagtgagtcaaagaaaaataatggacgatatttcaacagtattcaagatggcagacaaggacaattccggcaccttaacactaaaagagatcaatggtgttttagatgatatatgtataagatacccgcaagtagagctgtatatgaaaagcatgcacatgcttgacattgcggatttaataaaaggcgcagttggcgattctcacaaggagtccatggtggttgacatagaggagttcaagaaggctctgcgccacgttgactcccaggtgaaaaacgctccagcgacggcccaggtcgccgcacagcaagggcagtacctcgcccagtgtttcaacaagatggagaaatgcagagaggagcccgaaggccctctgcgcatggcaggggggtccggccgccacttcttccgcccgtttcgctacaagcacttcgggcagttcgcgcctctgggtggagaacaagccgctgcagagctcccgggcgactgggtctccatgggccacagcacgcagtggctctggtactccgtgtatgccagcaagcaagtgagctggcgcacgcgggtgctggtggtttccgactggactcgccgcttcatattcgggagggactcaagccggatctagctgccaaggattctcttctgcacaggggggggggggggggggttcgttccgtccgaagaataatcggtttcgctgctgctggagcttgagcaagcaaagctgtttccccgcgcctggccctgccggcgaaactgctgttctttcttctgctaca

SEQ ID NO: 134564 - DNA, 2636 bp, Zea Mays
gtcgcatcgcatggtatatctaaacaagaaaaagggggaaagaagcgatagcgataggccatgtggacgtgtcacatgctggtcaggtggaagtcaattaggtcatgtaaagaaatgcagaatggccatgactcatcagagggagatgggaaattgccgaccggtgtataatacgaagtcttggacgtggatgagatctggaacttttttattcctgcattgcctcaaatctggggtaattttccttttatttttatttttttctggtaggagtacctgggagtctgggacaggtcagaggcagctgctgctgcggatggacacgcgacacatccgcagcggctagccaatgagcggcgaccaagggagcaggtagtaggccgtgttctaggctggccttttccatcgcttttctcgccggtattattagcgcggatcgttcatcgttcgggattggggttctgactcggaacctgatcagtgagtgtggtcttctgaaagcgagcaaaggaggatggggttctccttcttcacctcccgagccggtgctcgactgctggacgggatcgcgcgccccggcttctccaccgccgcgcttctgctcacagcggccagtggcggaggccttgtggcgtacgcggattccgctgcagagagcgcgccggacccatctcaggatgctcccaggaagaaggtggtggttcttgggactggctgggctgggacgtcgttcctcaagaacctcgactgctccaggtatgaagtgaaggtcatatcgccccggaactacttcgcgttcactcctctgcttccgagtgtcacgtgtgggactgtcgagccgcgcagcattattgaaccggtacggaggatgtttgagaagaaaaacaaggatgtcacattttgtgaagccgagtgtttcaagattgatgcaaatagaaaaactgtacattgccgttctgctgttggaactaatcttgatgggaatggtgattttatgttggattatgactacttagttgttgctcttggggctactgtaagtacatttaacactcctggagtgctggagcactgctgctttttgaaggaagtagaggatgctcagaagatacggaagggtgtgatagattgttttgaaaaagcatcacttccaaatattagtgaagaagagaaaaggaaaatcctacattttgtagttattggtggtggacctactggagttgaatttgcagcagagatgcatgattttcttgtcgaagatttagtgaaactatatcctgccattcaagacctcgtgaagataacaattattcaatcggcagagcatatattgactatgtttgatgaaagaatagcttcatttgctgaacaaaagttcaagagggatggcatcgaagtgtgcacgggcttcagagtgataaaggtgtctgatgatttgattacaatgaagagaaaatctgatggtgaggagttatcagttccttacggaatggctgtttggtctgctggcattggtactcgtcctgtcgtcatggacttcatgcaacaaattgggcagaccaatcgtcgtgccttggcaactaacgagtggttaagggttcgcgagtgtgaaggcgtctatgcaattggcgactgtgctacagtgagtcaaagaaaaataatggacgatatttcaacagtattcaagatggcagacaaggacaattccggcaccttaacactaaaagagatcaatggtgttttagatgatatatgtataagatacccgcaagtagagctgtatatgaaaagcatgcacatgcttgacattgcggatttaataaaaggcgcagttggcgattctcacaaggagtccatggtggttgacatagaggagttcaagaaggctctgcgccacgttgactcccaggtgaaaaacgctccagcgacggcccaggtcgccgcacagcaagggcagtacctcgcccagtgtttcaacaagatggagaaatgcagagaggagcccgaaggccctctgcgcatggcaggggggtccggccgccacttcttccgcccgtttcgctacaagcacttcgggcagttcgcgcctctgggtggagaacaagccgctgcagagctcccgggcgactgggtctccatgggccacagcacgcagtggctctggtactccgtgtatgccagcaagcaagtgagctggcgcacgcgggtgctggtggtttccgactggactcgccgcttcatattcgggagggactcaagccggatctagctgccaaggattctcttctgcacaggggggggggggggggggttcgttccgtccgaagaataatcggtttcgctgctgctggagcttgagcaagcaaagctgtttccccgcgcctggccctgccggcgaaactgctgttctttcttctgctacatggtagatggctctcaaagcctcacgccggttactttcactgaggttttagctctggtttatttgatgtccataggttttcttcctttgcttgtgatctcaacacatccatcactatgattcatttgtgtgtgatacatattgcaacttcagttaaaatccaaccttttcttaggaacagggctctaaaatccagcgtcctcgtcagccttct

SEQ ID NO: 134565 - DNA, 881 bp, Zea Mays
ctagcccatttagtcttcaggcagcatgcaaacaatgcaacccatagccataagtttcagattctcttccaaggagttcgacgagagataattggatttttgccactgttgtcttcttgttataattaccactttgtctatgaattgtgggtccagctgggtctatgaaatgtaggtctgatgataattttacaaacttgtttcttgctggtggcaaatatcagaatctctcgttcgacgatggtgtacccggggttttttcaaaaaaaaatatgttcttttatggatcctcttatgcattttgctcgatatcaaggaaatgcaattcttgcatcaaaagggactcttctttttgaagaagaaatgaaaatcttacttgtcatttctctcgtaatatttttttctctttttggactcaaccacaaaggattcgtctaaaccaattaacaaactcttgcttcgattttctaggatacctttcaagtgtaccaataaatactttgttagtaaggaatcaaatgctggagaattcttttctaatagatactcgaatgaaaaaattcgataccatagtccttgcaactctccttatcggatccttatcaaaagctcaattttatactagatcgggccatcctattagtaaacccgtttggactgatttaggccttgttcgtttacgttggattgtacccggaatcgttacggctaatcaaagtttatataaattagaaaagcaatccggttaagaatcgaacaagtcattatcagattgggatattcttgatcgttttggtcggattcgacgaagtaggggtggatatcgagccggctcggctcggctcgaccgagctcgagctggctcgttaaggaaacgagct

SEQ ID NO: 134566 - DNA, 385 bp, Zea Mays
ttttcttacaaatctcgaggacgagattatttttaagggggtaggatttgtaatacctaaaattctattttggaaaatgtcttctaaaatgggttccccactttattctttttgttttctcctaatgggtgatggggatactaaatggttgtcacaaatatagatcctaaacttgtaaaactagaatttaaactgaaactcagaaaaataaataatagggggtttgcatatttatttgagtaaatactcatttcatcaaatactatacttagatgcatgtattacaataagtaataaaagaaactttgcattcattatggactttgggtaatttgagaaagtttattatgtgacttgaataaatatgttttcaaataggagaata

SEQ ID NO: 134567 - DNA, 291 bp, Zea Mays
atggcgatggctggcgagctgagaggaggtcggattgagcgctgccggtcgtgggcgacgctggaagatggagcagaggtggctggcccaagacagagaaaagaaggagcagcgctggtgtcggtacttggcaggagcagaagaccgaagtgcagcttggagtggaggatgacgaccggccttgggaagatgagtgagcatgcagcgttgcaggtggaagatgaagtgagtataaatacacggccgatgatcagcgcaagaaaagataagacaggaatgcttgggagataa

SEQ ID NO: 134568 - DNA, 1196 bp, Zea Mays
cggatgggccgcctataggcccttccggccttccctgttgccctcccattttccctgtgtcattcgttgtcttcggttcatcctctcggccgccgtctggactgtagcaagcggtgctgctgtccgccgcgctccggagccatgcgggaggggatgaaggagagggacagaggtgggagcccagatgcctcgggccctcctcccttccgcggcccggcgtacaagacgaagctgtgcgctttatggagaggcaggggcggctgcccccgccccaactgcgggttcgcccacggcgaggctgagctccggaggccgccccctcgcgcctccttccagcctcgccctcggcctggtatgcaccacgcgcacctccatccgtctctccctctcgctcccattctcgatctgcgcgtagtttgtcgttttaggttttgcatcgccttaccgtatgcttctgggttttgccgtacccaaattgttgtcgattccatgccaatctgtcggattaagttatttggacgtttcatccgagcaagagaaaccagcgcgctcttcttcaaagagatgcatcttctgcctgcttgtccatcttgttattgggatgattggttgatgagtagaggctccaaagtggtgcagcaaaccggcaatgtgatccgaatcatatgttctcaggagaagagctagcagacagggaagatagttgcaactgcaagaattatataatgataacaacttgcaagtgcatccttggaggatgtacaaatgggggatgcagatgttaatagctgacagttctgggaggctttatagtttgtactcgtggttgagaagaatctacacttcaattgcatagcaatatgatggtttgacacctgaatcttttctcagttcgtgttatctcatttttttgtcttctggtgcatatacaccacgattcctgtgtggtggtacttaaactgagtgcttgctgttgcagaacacaaaaaaaaacatcaacaagcctgatttcattgcagataatcttggcattgctgcttattattttgattttacaattgtgtctcatgggcagatttattgagactgagaatttgagattgactgcttccagaggatgacacatcctatttctatcctggccttcttttcagttgacaattggtcatttatgttcaattgaatgcttaacccgc

SEQ ID NO: 134569 - DNA, 1788 bp, Zea Mays
cggatgggccgcctataggcccttccggccttccctgttgccctcccattttccctgtgtcattcgttgtcttcggttcatcctctcggccgccgtctggactgtagcaagcggtgctgctgtccgccgcgctccggagccatgcgggaggggatgaaggagagggacagaggtgggagcccagatgcctcgggccctcctcccttccgcggcccggcgtacaagacgaagctgtgcgctttatggagaggcaggggcggctgcccccgccccaactgcgggttcgcccacggcgaggctgagctccggaggccgccccctcgcgcctccttccagcctcgccctcggcctgggagaagggattacagagataatgactttagagttaggcctgagagaagacactcaccctatgggaggttttcccctgaaagagatatcaggcgtcgttcatttcgtgataagagacagagagcaagttctgaagataggggatctagtcattcaagatcacctattaggaagagtgagagaaaacatagcaaaagtcctgatggtggaaaaaccgattcatccgtaagttttagaagttcagataacgaagacaaaggaaaagatgaaaggtacttaagcagtgatgagaaaaatggccgtgaagaacaattgaaacaaatgcatctggacatggaagcattgcgtgaagataaatcaaagctggaggcgatattggagaagaagactgatgaagagcgcaaactttgtagcagagtagaagatcttgaattgcaattgaacaaagagaaagatgatttccaaaggatgacctccaaaaccaaaaagctaatcaaagcacatgggcgttatataaaagcacaggaggatttaaagaggtctcaggctcgctttgagaggctagcagatttgcttgcttcagatattttgaagccttataccaaggagcagggttccatcggtattactgccaatgacgatccatataatggtaatgaaatgagcccaagcgaccaaagacaaaaccatgtttcagcatcgagaaagagacctatttccctcccaagaagtgaagaagcaaaaactgggaagagacagagagagaatggtgatgatatgattccaacaccagagaactatagacctgaagatgctctagaacatgtccaagatagcaagggaactgatcgactagaatcatttacagtgaagaagttaagagtgggtgactacgatgatgaaggaaacattgtttcttcaagcaatatttttgcggataggcttttgtatgcagttctagaaacgaagtcctgacactacgccttctgtttttccttcagtacaagggcgatgatgaggaagttgatgttgattagtgacccgatgccgtcggtcgctgataacgatttgagctgtacgaagcaatttcagcagacgacatcgatgtcagcttctaaaactacttgtatgccttttgcatcgggtaatagggcctggtatatttggtagctatttatgtgcttagactgagttgtgatgctgtcaaacatgattacatgcgatgctagaattttcttcttttctgtgtttcctgagactcgaagaggatattaatctgtattcgcctcatgtattattcttagccagtttgagtatgagatttttggactggtgttattctcagcctcaggttagaaacaccatgcatccatgattcatttacctatcatgaaatgcatgtgtgatcattaagcttactaagggtgtgtttggttg

SEQ ID NO: 134570 - DNA, 1775 bp, Zea Mays
cggatgggccgcctataggcccttccggccttccctgttgccctcccattttccctgtgtcattcgttgtcttcggttcatcctctcggccgccgtctggactgtagcaagcggtgctgctgtccgccgcgctccggagccatgcgggaggggatgaaggagagggacagaggtgggagcccagatgcctcgggccctcctcccttccgcggcccggcgtacaagacgaagctgtgcgctttatggagaggcaggggcggctgcccccgccccaactgcgggttcgcccacggcgaggctgagctccggaggccgccccctcgcgcctccttccagcctcgccctcggcctgggagaagggattacagagataatgactttagagttaggcctgagagaagacactcaccctatgggaggttttcccctgaaagagatatcaggcgtcgttcatttcgtgataagagacagagagcaagttctgaagataggggatctagtcattcaagatcacctattaggaagagtgagagaaaacatagcaaaagtcctgatggtggaaaaaccgattcatccgtaagttttagaagttcagataacgaagacaaaggaaaagatgaaaggtacttaagcagtgatgagaaaaatggccgtgaagaacaattgaaacaaatgcatctggacatggaagcattgcgtgaagataaatcaaagctggaggcgatattggagaagaagactgatgaagagcgcaaactttgtagcagagtagaagatcttgaattgcaattgaacaaagagaaagatgatttccaaaggatgacctccaaaaccaaaaagctaatcaaagcacatgggcgttatataaaagcacaggaggatttaaagaggtctcaggctcgctttgagaggctagcagatttgcttgcttcagatattttgaagccttataccaaggagcagggttccatcggtattactgccaatgacgatccatataatggtaatgaaatgagcccaagcgaccaaagacaaaaccatgtttcagcatcgagaaagagacctatttccctcccaagaagtgaagaagcaaaaactgggaagagacagagagagaatggtgatgatatgattccaacaccagagaactatagacctgaagatgctctagaacatgtccaagatagcaagggaactgatcgactagaatcatttacagtgaagaagttaagagtgggtgactacgatgatgaaggaaacattgtttcttcaagcaatatttttgcggataggttctagaaacgaagtcctgacactacgccttctgtttttccttcagtacaagggcgatgatgaggaagttgatgttgattagtgacccgatgccgtcggtcgctgataacgatttgagctgtacgaagcaatttcagcagacgacatcgatgtcagcttctaaaactacttgtatgccttttgcatcgggtaatagggcctggtatatttggtagctatttatgtgcttagactgagttgtgatgctgtcaaacatgattacatgcgatgctagaattttcttcttttctgtgtttcctgagactcgaagaggatattaatctgtattcgcctcatgtattattcttagccagtttgagtatgagatttttggactggtgttattctcagcctcaggttagaaacaccatgcatccatgattcatttacctatcatgaaatgcatgtgtgatcattaagcttactaagggtgtgtttggttg

SEQ ID NO: 134571 - DNA, 1915 bp, Zea Mays
cggatgggccgcctataggcccttccggccttccctgttgccctcccattttccctgtgtcattcgttgtcttcggttcatcctctcggccgccgtctggactgtagcaagcggtgctgctgtccgccgcgctccggagccatgcgggaggggatgaaggagagggacagaggtgggagcccagatgcctcgggccctcctcccttccgcggcccggcgtacaagacgaagctgtgcgctttatggagaggcaggggcggctgcccccgccccaactgcgggttcgcccacggcgaggctgagctccggaggccgccccctcgcgcctccttccagcctcgccctcggcctgatgattggtattacaagtactggatctattctaagtggtgaatcatgacgtgtaatcatgtattggcatatactctttcattagttgtattggctcgtctgtgtttatggtctatggtgtattggtgttattgtggaccctctaattcttgtagctaattgaataaccatttggctcaaggttatgggagaagggattacagagataatgactttagagttaggcctgagagaagacactcaccctatgggaggttttcccctgaaagagatatcaggcgtcgttcatttcgtgataagagacagagagcaagttctgaagataggggatctagtcattcaagatcacctattaggaagagtgagagaaaacatagcaaaagtcctgatggtggaaaaaccgattcatccgtaagttttagaagttcagataacgaagacaaaggaaaagatgaaaggtacttaagcagtgatgagaaaaatggccgtgaagaacaattgaaacaaatgcatctggacatggaagcattgcgtgaagataaatcaaagctggaggcgatattggagaagaagactgatgaagagcgcaaactttgtagcagagtagaagatcttgaattgcaattgaacaaagagaaagatgatttccaaaggatgacctccaaaaccaaaaagctaatcaaagcacatgggcgttatataaaagcacaggaggatttaaagaggtctcaggctcgctttgagaggctagcagatttgcttgcttcagatattttgaagccttataccaaggagcagggttccatcggtattactgccaatgacgatccatataatggtaatgaaatgagcccaagcgaccaaagacaaaaccatgtttcagcatcgagaaagagacctatttccctcccaagaagtgaagaagcaaaaactgggaagagacagagagagaatggtgatgatatgattccaacaccagagaactatagacctgaagatgctctagaacatgtccaagatagcaagggaactgatcgactagaatcatttacagtgaagaagttaagagtgggtgactacgatgatgaaggaaacattgtttcttcaagcaatatttttgcggataggtacaagggcgatgatgaggaagttgatgttgattagtgacccgatgccgtcggtcgctgataacgatttgagctgtacgaagcaatttcagcagacgacatcgatgtcagcttctaaaactacttgtatgccttttgcatcgggtaatagggcctggtatatttggtagctatttatgtgcttagactgagttgtgatgctgtcaaacatgattacatgcgatgctagaattttcttcttttctgtgtttcctgagactcgaagaggatattaatctgtattcgcctcatgtattattcttagccagtttgagtatgagatttttggactggtgttattctcagcctcaggttagaaacaccatgcatccatgattcatttacctatcatgaaatgcatgtgtgatcattaagcttactaagggtgtgtttggttg

SEQ ID NO: 134572 - DNA, 1711 bp, Zea Mays
gcccttccggccttccctgttgccctcccattttccctgtgtcattcgttgtcttcggttcatcctctcggccgccgtctggactgtagcaagcggtgctgctgtccgccgcgctccggagccatgcgggaggggatgaaggagagggacagaggtgggagcccagatgcctcgggccctcctcccttccgcggcccggcgtacaagacgaagctgtgcgctttatggagaggcaggggcggctgcccccgccccaactgcgggttcgcccacggcgaggctgagctccggaggccgccccctcgcgcctccttccagcctcgccctcggcctgggagaagggattacagagataatgactttagagttaggcctgagagaagacactcaccctatgggaggttttcccctgaaagagatatcaggcgtcgttcatttcgtgataagagacagagagcaagttctgaagataggggatctagtcattcaagatcacctattaggaagagtgagagaaaacatagcaaaagtcctgatggtggaaaaaccgattcatccgtaagttttagaagttcagataacgaagacaaaggaaaagatgaaaggtacttaagcagtgatgagaaaaatggccgtgaagaacaattgaaacaaatgcatctggacatggaagcattgcgtgaagataaatcaaagctggaggcgatattggagaagaagactgatgaagagcgcaaactttgtagcagagtagaagatcttgaattgcaattgaacaaagagaaagatgatttccaaaggatgacctccaaaaccaaaaagctaatcaaagcacatgggcgttatataaaagcacaggaggatttaaagaggtctcaggctcgctttgagaggctagcagatttgcttgcttcagatattttgaagccttataccaaggagcagggttccatcggtattactgccaatgacgatccatataatggtaatgaaatgagcccaagcgaccaaagacaaaaccatgtttcagcatcgagaaagagacctatttccctcccaagaagtgaagaagcaaaaactgggaagagacagagagagaatggtgatgatatgattccaacaccagagaactatagacctgaagatgctctagaacatgtccaagatagcaagggaactgatcgactagaatcatttacagtgaagaagttaagagtgggtgactacgatgatgaaggaaacattgtttcttcaagcaatatttttgcggataggtacaagggcgatgatgaggaagttgatgttgattagtgacccgatgccgtcggtcgctgataacgatttgagctgtacgaagcaatttcagcagacgacatcgatgtcagcttctaaaactacttgtatgccttttgcatcgggtaatagggcctggtatatttggtagctatttatgtgcttagactgagttgtgatgctgtcaaacatgattacatgcgatgctagaattttcttcttttctgtgtttcctgagactcgaagaggatattaatctgtattcgcctcatgtattattcttagccagtttgagtatgagatttttggactggtgttattctcagcctcaggttagaaacaccatgcatccatgattcatttacctatcatgaaatgcatgtgtgatcattaagcttactaagggtgtgtttggttg

SEQ ID NO: 134573 - DNA, 685 bp, Zea Mays
tcccattttccctgtgtcattcgttgtcttcggttcatcctctcggccgccgtctggactgtagcaagcggtgctgctgtccgccgcgctccggagccatgcgggaggggatgaaggagagggacagaggtgggagcccagatgcctcgggccctcctcccttccgcggcccggcgtacaagacgaagctgtgcgctttatggagaggcaggggcggctgcccccgccccaactgcgggttcgcccacggcgaggctgagctccggaggccgccccctcgcgcctccttccagcctcgccctcggcctgggagaagggattacagagataatgactttagagttaggcctgagagaagacactcaccctatgggaggttttcccctgaaagagatatcaggcgtcgttcatttcgtgataagagacagagagcaagttctgaagataggggatctagtcattcaagatcacctattaggaagaggtatgtaggaacaattataagggattcatttcagaagatgctgctgtttagtttgttgtgcactcagttaactctgtatatagtttaaatatgtttattccatcaggctatgtggctaatttatcttcgtttgacattatgacctagtccctgctaatttgttccctttcatttttatctgtgacttcgtttgacattatg

SEQ ID NO: 134574 - DNA, 1727 bp, Zea Mays
tcccattttccctgtgtcattcgttgtcttcggttcatcctctcggccgccgtctggactgtagcaagcggtgctgctgtccgccgcgctccggagccatgcgggaggggatgaaggagagggacagaggtgggagcccagatgcctcgggccctcctcccttccgcggcccggcgtacaagacgaagctgtgcgctttatggagaggcaggggcggctgcccccgccccaactgcgggttcgcccacggcgaggctgagctccggaggccgccccctcgcgcctccttccagcctcgccctcggcctgggagaagggattacagagataatgactttagagttaggcctgagagaagacactcaccctatgggaggttttcccctgaaagagatatcaggcgtcgttcatttcgtgataagagacagagagcaagttctgaagataggggatctagtcattcaagatcacctattaggaagagtgagagaaaacatagcaaaagtcctgatggtggaaaaaccgattcatccgtaagttttagaagttcagataacgaagacaaaggaaaagatgaaaggtacttaagcagtgatgagaaaaatggccgtgaagaacaattgaaacaaatgcatctggacatggaagcattgcgtgaagataaatcaaagctggaggcgatattggagaagaagactgatgaagagcgcaaactttgtagcagagtagaagatcttgaattgcaattgaacaaagagaaagatgatttccaaaggatgacctccaaaaccaaaaagctaatcaaagcacatgggcgttatataaaagcacaggaggatttaaagaggtctcaggctcgctttgagaggctagcagatttgcttgcttcagatattttgaagccttataccaaggagcagggttccatcggtattactgccaatgacgatccatataatggtaatgaaatgagcccaagcgaccaaagacaaaaccatgtttcagcatcgagaaagagacctatttccctcccaagaagtgaagaagcaaaaactgagacagagagagaatggtgatgatatgattccaacaccagagaactatagacctgaagatgctctagaacatgtccaagatagcaagggaactgatcgactagaatcatttacagtgaagaagttaagagtgggtgactacgatgatgaaggaaacattgtttcttcaagcaatatttttgcggataggttctagaaacgaagtcctgacactacgccttctgtttttccttcagtacaagggcgatgatgaggaagttgatgttgattagtgacccgatgccgtcggtcgctgataacgatttgagctgtacgaagcaatttcagcagacgacatcgatgtcagcttctaaaactacttgtatgccttttgcatcgggtaatagggcctggtatatttggtagctatttatgtgcttagactgagttgtgatgctgtcaaacatgattacatgcgatgctagaattttcttcttttctgtgtttcctgagactcgaagaggatattaatctgtattcgcctcatgtattattcttagccagtttgagtatgagatttttggactggtgttattctcagcctcaggttagaaacaccatgcatccatgattcatttacctatcatgaaatgcatgtgtgatcattaagcttactaagggtgtgtttggttg

SEQ ID NO: 134575 - DNA, 1673 bp, Zea Mays
attttccctgtgtcattcgttgtcttcggttcatcctctcggccgccgtctggactgtagcaagcggtgctgctgtccgccgcgctccggagccatgcgggaggggatgaaggagagggacagaggtgggagcccagatgcctcgggccctcctcccttccgcggcccggcgtacaagacgaagctgtgcgctttatggagaggcaggggcggctgcccccgccccaactgcgggttcgcccacggcgagggagaagggattacagagataatgactttagagttaggcctgagagaagacactcaccctatgggaggttttcccctgaaagagatatcaggcgtcgttcatttcgtgataagagacagagagcaagttctgaagataggggatctagtcattcaagatcacctattaggaagagtgagagaaaacatagcaaaagtcctgatggtggaaaaaccgattcatccgtaagttttagaagttcagataacgaagacaaaggaaaagatgaaaggtacttaagcagtgatgagaaaaatggccgtgaagaacaattgaaacaaatgcatctggacatggaagcattgcgtgaagataaatcaaagctggaggcgatattggagaagaagactgatgaagagcgcaaactttgtagcagagtagaagatcttgaattgcaattgaacaaagagaaagatgatttccaaaggatgacctccaaaaccaaaaagctaatcaaagcacatgggcgttatataaaagcacaggaggatttaaagaggtctcaggctcgctttgagaggctagcagatttgcttgcttcagatattttgaagccttataccaaggagcagggttccatcggtattactgccaatgacgatccatataatggtaatgaaatgagcccaagcgaccaaagacaaaaccatgtttcagcatcgagaaagagacctatttccctcccaagaagtgaagaagcaaaaactgggaagagacagagagagaatggtgatgatatgattccaacaccagagaactatagacctgaagatgctctagaacatgtccaagatagcaagggaactgatcgactagaatcatttacagtgaagaagttaagagtgggtgactacgatgatgaaggaaacattgtttcttcaagcaatatttttgcggataggttctagaaacgaagtcctgacactacgccttctgtttttccttcagtacaagggcgatgatgaggaagttgatgttgattagtgacccgatgccgtcggtcgctgataacgatttgagctgtacgaagcaatttcagcagacgacatcgatgtcagcttctaaaactacttgtatgccttttgcatcgggtaatagggcctggtatatttggtagctatttatgtgcttagactgagttgtgatgctgtcaaacatgattacatgcgatgctagaattttcttcttttctgtgtttcctgagactcgaagaggatattaatctgtattcgcctcatgtattattcttagccagtttgagtatgagatttttggactggtgttattctcagcctcaggttagaaacaccatgcatccatgattcatttacctatcatgaaatgcatgtgtgatcattaagcttactaagggtgtgtttggttg

SEQ ID NO: 134576 - DNA, 1627 bp, Zea Mays
attttccctgtgtcattcgttgtcttcggttcatcctctcggccgccgtctggactgtagcaagcggtgctgctgtccgccgcgctccggagccatgcgggaggggatgaaggagagggacagaggtgggagcccagatgcctcgggccctcctcccttccgcggcccggcgtacaagacgaagctgtgcgctttatggagaggcaggggcggctgcccccgccccaactgcgggttcgcccacggcgagggagaagggattacagagataatgactttagagttaggcctgagagaagacactcaccctatgggaggttttcccctgaaagagatatcaggcgtcgttcatttcgtgataagagacagagagcaagttctgaagataggggatctagtcattcaagatcacctattaggaagagtgagagaaaacatagcaaaagtcctgatggtggaaaaaccgattcatccgtaagttttagaagttcagataacgaagacaaaggaaaagatgaaaggtacttaagcagtgatgagaaaaatggccgtgaagaacaattgaaacaaatgcatctggacatggaagcattgcgtgaagataaatcaaagctggaggcgatattggagaagaagactgatgaagagcgcaaactttgtagcagagtagaagatcttgaattgcaattgaacaaagagaaagatgatttccaaaggatgacctccaaaaccaaaaagctaatcaaagcacatgggcgttatataaaagcacaggaggatttaaagaggtctcaggctcgctttgagaggctagcagatttgcttgcttcagatattttgaagccttataccaaggagcagggttccatcggtattactgccaatgacgatccatataatggtaatgaaatgagcccaagcgaccaaagacaaaaccatgtttcagcatcgagaaagagacctatttccctcccaagaagtgaagaagcaaaaactgggaagagacagagagagaatggtgatgatatgattccaacaccagagaactatagacctgaagatgctctagaacatgtccaagatagcaagggaactgatcgactagaatcatttacagtgaagaagttaagagtgggtgactacgatgatgaaggaaacattgtttcttcaagcaatatttttgcggataggtacaagggcgatgatgaggaagttgatgttgattagtgacccgatgccgtcggtcgctgataacgatttgagctgtacgaagcaatttcagcagacgacatcgatgtcagcttctaaaactacttgtatgccttttgcatcgggtaatagggcctggtatatttggtagctatttatgtgcttagactgagttgtgatgctgtcaaacatgattacatgcgatgctagaattttcttcttttctgtgtttcctgagactcgaagaggatattaatctgtattcgcctcatgtattattcttagccagtttgagtatgagatttttggactggtgttattctcagcctcaggttagaaacaccatgcatccatgattcatttacctatcatgaaatgcatgtgtgatcattaagcttactaagggtgtgtttggttg

SEQ ID NO: 134577 - DNA, 1356 bp, Zea Mays
atgtcctcctcgacggcacgcacggagaaagggcaggagcatgatcgactcgccccgtacccgcgtcgacgagcgtcggttggctcgcggctgcgactatggacgggggcagcaggttgggtggaagaacagggcgaaggcagggaagacgaacggaacgtccgacgagggcgaaaacgatggtgcgcgcatgatgtgaaacgtcatcgtggacgtgcaatagccactgcacgagtcagtgtcggggctggtgtcagacgaatacggggaggaagctctactcctacgccctctgccgagaatggggtggcgcggaggtggagacataaggggagagagaaaagaaatagaatggcgaacaaggtggtggtaactgaggcgagaaccatcattatcgtgaggagggtcctccacctctgcccccggatccgcgtcccagccatcctccgcctcggatccgcgtccacgctccccgctcggtctccatggaaaggtcctccacccgcggacctcgcccccaccgcacctgtccactatacgggggagaagtttccatccaaatatctggggcagacctcctcaccccgcatctcccttgccatccacggatctggccccaccccggattctgctcgcgttaagggccagtactcggcgcgggcggcccagagcgcggcgctggtcgcgtaccgatacctcagcggcagccccaagaatcggctggacatgtccgccgtcgtccaggcactggagcccctgatcgacctcgacgacgacgtgcctgtggcacccctaggccacgccggccccgtcgtgctattcgtagcggccgccgcgaaggagaagaatgagcgggccccaaggaaggacgtcctcggccaccgacgcaggcccatgtcgcccaaggcgagccccaggaagcaccccagcgtcggcaccaaggaggagttctgggtgaggcatctgccggccgaccagaagacacgtccgagcttgggcggtgttgtgcaagcgttctgctattacagtgagattagatgcagagtgtcgccgccgtcggtctccggctcctgcggaagcagctcagcagacccctacggtgtcccagaattcgggtggcgggacattcgccggtacaaacagttccggtcagtcgacacgaacatttctgccagcaatgactccgctcttggccagagactgaactggcatgggcttggaagcatgccttcagcggaggcgatgcgtctttttgtcaaaatcttagaggaagaagatcctggatggtactctagggcccctgagttcaaccctgagtctgttgtagatattcagatgcattgcagtttccattga

SEQ ID NO: 134578 - DNA, 2439 bp, Zea Mays
cgttgctaggcctgcgcagcgtgcggaggaggtgcagctgcgcctgggcccgtctgctcccttggattgcagggaacgccagagatacgcatcgacggccgggagctgtcacggaccctctcctcctcctcccctgtcccgtgagtcgtctcagccgccgccggctctcggagccctacccttctttcgtcggagccctacccttcttctcgtcggagcccatggaccggcaaccccaggactacgcggctgcggccatggcgtacgcacaggggcagcagccaccgccgccgcagtacggcgggtaccacccacaggcgccgccgcctcagtacccgccccacccttacggcgcgccgctcccgcagtaccggcccgcgccctatgcgcgccccatgccgcctgcctactcgcacctgctgccgcaccagcagccgcctcccccgtacgcagcgcacccgccgccgccgcacgccttgtccacgccctccccgccgccgccgcaccacccttacatgcacccgccaccgttcgagtccgccccgcctcctccggccgctccacccgccgatccggagctccagaagcgcatcgacaagctcgtcgagtacatcgcgaagaacgggccggatttcgaggccatgatccgcgacaagcagcacgacaacccggactacgccttcgtcttcggcggggaaggtcacgcctactacaggtacatgctctggctcttgccgcgcccgccggtgcccgcgccctacccgccggcctcgatgcatatgatgccgcctatgggccctatgatgaggggaccgccgattcaccagccggggtacccgccattctatgaccagcaccagcagtttgctgctgctcacggccatggggactatgaagctgcggcgcaaccattcaagggactgtccggaccgctccctgcagatgttgctgctgagctccaagatgtgcttatcaatcttaatggcactaaggaatcaataaagggagcgaagtcatggtttatgcaaagattgccgttcgcgccggctctggctgaagctcttaaggagagagtatttgtgttggaggattcggagcggcagctgcacataattttcctggtgaacgatattctttttgaaagcttacagagacgaactagtattcgggaccttgacaatgaggctattgctttcaaatccgtactgggtcccatgcttgcaagggtttacaataattcacagagtaaagatgacaaccagacccgtgttgagaagatcctgcagttttggggttcaaaggaagtttacgaccaggaaacaattgctaattttgaaagagagatgaaaggtggcttgccttattcgctggtgccacgacatgtttcaccagaccctacgaccttttcaggatcagcgccagtgccctcaaaatggtcctcggaacctccagagaaggataagccgatccatcctgtcgctggtgcaagccaatctgtccccaccgcacagtttccatcaaaccaacttacagccggtgtctatcctcctgtaggccaaaatgcatttgcaggatctttgccagtgcaaccgtcgtcaacagttcccgctgtggctcctcaaagcactgccgccgcaaacgattcaactccacctccttatccgctcttcccgcctggcctcatccctggaatggttcggaagatgcaaataggcagcggggtaccgtactcttccctgagcccgctcgacatccccacgaccatcccgccatcgtcagtcccggagtccgagatcctcgagcgcgtgtccaagttcttcagcgacattggggaggtgaacccgtcagaaggtccgatgaggcaaggcgagcccgatgactacgacgactacgagagggagcttcctgcgcggaagggaggcgcctgcatccctcccccgccgaatctgcttctgaaccctgagacagggatgcacgccgatggcagcgtcgacagtaagccagggtccagcggccggttgggtctcggagcatccgccgatccgaacgaggtgagccagtatgacgatgtgtattcttcttatcgtaagcaaaggagctcaacgtatcacatttccatcaccgctcgctcatcgacgtcaaggtgatggtagcagagatgcatgtctcgagcacccccttctgacatttgtgggtgattctgtacggttaatacatgagatgagaaaactgtaagaacattgtagtgcctgagaacttttttatggcaaaatgtggtctacaggttcttaaatcgaaatgtagttgccccatctgcaaattatgcttgtcctgacctgctacgttgtgtgatagcttctccttctggtcagtcccggcagtgatcactgtgtatttgaacatgacattgatcaacggaaaaaagacacttgaaacatt

SEQ ID NO: 134579 - DNA, 1982 bp, Zea Mays
cggagccctacccttcttctcgtcggagcccatggaccggcaaccccaggactacgcggctgcggccatggcgtacgcacaggggcagcagccaccgccgccgcagtacggcgggtaccacccacaggcgccgccgcctcagtacccgccccacccttacggcgcgccgctcccgcagtaccggcccgcgccctatgcgcgccccatgccgcctgcctactcgctccacccgccgatccggagctccagaagcgcatcgacaagctcgtcgagtacatcgcgaagaacgggccggatttcgaggccatgatccgcgacaagcagcacgacaacccggactacgccttcgtcttcggcggggaaggtcacgcctactacaggtacatgctctggctcttgccgcgcccgccggtgcccgcgccctacccgccggcctcgatgcatatgatgccgcctatgggccctatgatgaggggaccgccgattcaccagccggggtacccgccattctatgaccagcaccagcagtttgctgctgctcacggccatggggactatgaagctgcggcgcaaccattcaagggactgtccggaccgctccctgcagatgttgctgctgagctccaagatgtgcttatcaatcttaatggcactaaggaatcaataaagggagcgaagtcatggtttatgcaaagattgccgttcgcgccggctctggctgaagctcttaaggagagagtatttgtgttggaggattcggagcggcagctgcacataattttcctggtgaacgatattctttttgaaagcttacagagacgaactagtattcgggaccttgacaatgaggctattgctttcaaatccgtactgggtcccatgcttgcaagggtttacaataattcacagagtaaagatgacaaccagacccgtgttgagaagatcctgcagttttggggttcaaaggaagtttacgaccaggaaacaattgctaattttgaaagagagatgaaaggtggcttgccttattcgctggtgccacgacatgtttcaccagaccctacgaccttttcaggatcagcgccagtgccctcaaaatggtcctcggaacctccagagaaggataagccgatccatcctgtcgctggtgcaagccaatctgtccccaccgcacagtttccatcaaaccaacttacagccggtgtctatcctcctgtaggccaaaatgcatttgcaggatctttgccagtgcaaccgtcgtcaacagttcccgctgtggctcctcaaagcactgccgccgcaaacgattcaactccacctccttatccgctcttcccgcctggcctcatccctggaatggttcggaagatgcaaataggcagcggggtaccgtactcttccctgagcccgctcgacatccccacgaccatcccgccatcgtcagtcccggagtccgagatcctcgagcgcgtgtccaagttcttcagcgacattggggaggtgaacccgtcagaaggtccgatgaggcaaggcgagcccgatgactacgacgactacgagagggagcttcctgcgcggaagggaggcgcctgcatccctcccccgccgaatctgcttctgaaccctgagacagggatgcacgccgatggcagcgtcgacagtaagccagggtccagcggccggttgggtctcggagcatccgccgatccgaacgaggtgagccagtatgacgatgtgtattcttcttatcgtaagcaaaggagctcaacgtatcacatttccatcaccgctcgctcatcgacgtcaaggtgatggtagcagagatgcatgtctcgagcacccccttctgacatttgtgggtgattctgtacggttaatacatgagatgagaaaactgtaagaacattgtagtgcctgagaacttttttatggcaaaatgtggtctacaggttcttaaatcgaaatgtagttgccccatctgc

SEQ ID NO: 134580 - DNA, 354 bp, Zea Mays
atgaacaagagaaaaggaaccaaaaggagtggtacaacgaacgcctgcaaatgcaacggagagccatttcccgcgtcgattcgatgcaacgacgagggtgcagtcctcatcatgcatggagcgcgcgaaggcctgatagaacgcctacggcggcgcgttgaccacgctgaggacgtcggccctggacgcggcgtcggactggaacaggctccgccacttgagcacgtcgcggtagcccaggtccgcgaccgtcgtgttgtccgccggcgccttgcccttgtccgccgcgtccagcgacgggtccgcgtcctcgtgccgccgcgccccgtcaagtttgtagaggcgctcgtgtga

SEQ ID NO: 134581 - DNA, 297 bp, Zea Mays
atgatggccacccgacaagagccagcaaatggcacgcagaagagacgcctacagcctccttcccctcctaccgccctttctgcgagtgctgtccgtggggaccggggtaacgtcctcaatgcgtccgattttcatcccggaacgagcaagcgccctgagggcagactgggcaccaggtccaggggtcttggtcttgttgcctccggtggcacgaagcttaatgtgcagtgcagtaatgccaagctccttgcagcgctgtgcgacatcttgagcagcaagcatagcagcgtaaggtga

SEQ ID NO: 134582 - DNA, 576 bp, Zea Mays
atggagaaggttatggtgctggtggctggtgtctccaagatgactgatctggggagcgggtcggctgcgaagcccgagaggaagagctgggacgatccaactcacactacggctacaccgtccatgacaaagtctaaggccaaggtggacaaggttaccatcctcaggactcaggaagcaatgtcgaggcggctaagcgatgccatgacgaaacaattcggcaatgatgattcatttgttgaagagaggtcgaagcctcgtaagaaaatagacacccctacctcagtgaaggcaaataccacagctccgaaaattacacttcacaaccctaaatggactgacggtagcattcctttggacgcacttcttcataaactctcaaaaataggcaaggaaactgactacaacaagttctctgaaatttgcgcttcagcaagggtctccaatccattcccaaatgtagatctcttccttgtcgtctgtgaggatgctctcaagtggaagaccatcgctgccaagtctgtggcgaccaacggggctgaagaggaggaattgttggagaagaaatcaacttag

SEQ ID NO: 134583 - DNA, 261 bp, Zea Mays
atgctgcatctgaacggaagcccactgcccatgctgctcccacaccgaggccctccgaccgtgggcgctgccgatggctaccagtccttcttgcttgctttcacattagttatgggagctctaatgttcatgttgatatcactgagaaaagttttacttctatttgacctgccagtgaaagcatttggagattttcttttaatccaccgtggagcagattcatggttgaatgctgataattttgaccttcagagcttataa

SEQ ID NO: 134584 - DNA, 420 bp, Zea Mays
gaggtcaacgacgatcctacggacgaggtctcggatttgaagggcgatgcggcaaaattattggaacggcgggagtcgtggatatggttgttgtcgaggcgattgacgactggttcgagctttctgtcgtgcactcggtgaatattactcggctagcttcgtcttcacccgacgcacagaacggcgacgggattatgtctggagcgaactgacgaagtggggttgagcagaggatgacgggtttgacgagtcgacgcaaaacacgaacccgccagaacccgatggatgaggagtgagcgcatgcggggcgagcagcacggatttgaagcgtagagaaatcaccaacagcgagacgaacagaacaagttgtggtcgcgaacttaatggcagaatcggcggtagccgatgccagagcccacg

SEQ ID NO: 134585 - DNA, 420 bp, Zea Mays
gaggtcaacgacgatcctacggacgaggtctcggatttgaagggcgatgcggcaaaattattggaacggcgggagtcgtggatatggttgttgtcgaggcgattgacgactggttcgagctttctgtcgtgcactcggtgaatattactcggctagcttcgtcttcacccgacgcacagaacggcgacgggattatgtctggagcgaactgacgaagtggggttgagcagaggatgacgggtttgacgagtcgacgtaaaacacgaactcgccagaacccgatggatgaggagtgagcgcatgcggggcgagcagcacggatttgaagcgtagagaaatcaccaacagcgagacgaacagaacaaggtgtggtcgcgaacttaatggcagaatcggcggtagccgatgccagagcccacg

SEQ ID NO: 134586 - DNA, 240 bp, Zea Mays
accgatgctcctgttagcatgcaaactctccaacggaatgggtggtggccatggaattttccatcacagagagagtgtgatgaggacatcacttctatacatacaatgaatggaccgataagacgatcgcgtgcacgacagctaaatctccaggtacattctaccctagtcaattgtgtttcagagcttacgcttggggccatggatgttttgaggattaggaaccttggagaggaccag

SEQ ID NO: 134587 - DNA, 2399 bp, Zea Mays
ctgacagcctggctagtggcgaccgtctgcctgccctgcacgcccacttgccgccgccccggcttcgttcctgctaccactaccgccatcccgaccggctcgcgcgccaccgccatctcctcctgcgctcgccttgctgccgcggccgcccccacctcaaggacccagaggggctgccctcgatctgactgaccccacgggacaggatggacaaggggaaatcggtggtagccgagctgtcggcatcgtccagctcgctcccgtcgccctcctcctatcctttctcaaagaaggctaaacctcggaaattggtcagcttgtgcctgggcacccttggtcagcatcttgaagatatcatcactgatatttcagaatttgctgccttatttccaccccacataacgttggcaattatgtctattgcaaggagaaaaagcctcctgaatgataaagttttgacttctcttgctgaaagctcctggcaaatcctagatatatctggatctgatgttactgatgctggtttggctactgtagcaaatgtttgtagtaatttacgggcagttgatattagtcgctgtgaaaaaattactactgctggtgtgtctgagattgtatgccactgcccatccttggagatattgagatgtggaggctgtccaagaagtgaagtaacggcacggaggtgcttgaatctcttgaaacccaaattgaatgctcttgaagaggactcatgggaggaacttgatacactagatataggaggcggtgcagagtccttaagatggcttgtttggccaatgatagatgataagtcaaaggtgactctagctgtcgaatgccctcgtgttactgtcaacccacagccatcgctgttcgacctctccggatattccaaagtcccaatagaagcattgtcaagcgtaccactggaccattctgtggttgaggacattgatcccaaaacatgggctgtttctgctgctcctccaagagctgttgctccagcgaatccaaatgttccaagtgctccgcctgaaataccgatggcagaaaggttcaggctggcctatgtggagagggaagcgaggctggcacccaagagggccaagcgggaaaggcagcggcgtcggcgcgctgagagggactacatgatggttgacatcgacgcaaggtcggtcgcacttgctgctcaagcaagcaggaacctgcggaagagctgattgtttcttgtctacgctatctgtggagacttgagagtagagaatcatgaggcaagaaatgctgttcaatccttctactttcaaggcaaagatagcatacatatatggacacagtattgtatagttgtattggcagtagcggtagcgtttacactgccatgtactagtaatagaaaaaaatctgagtgggaataacagggaaggcgtgccttatcaaatcacaaatgggttgccacgaggatttgtgaacatgctcgtccagatttctttgaatctggatgatgcggttatgtgaggttcctcacgcaatttgtttaatccgaacaagattcgtgtgaactgttgtatacgtaatttttttcttggaatttgagaatgtgtttggatgcactcgtattcaaactaattcactgaatatgaatgtgtccaactctccaaacaagacctaaattatctaaattatgaattgaggttgatacaagtgcatcaaaacaaggtccaaattagaataaaaatcggagcacaaacgaaatctgtacgcactgggaacaacagttcttagatagttagatttatacgaattctagatccatacaagaagctagcagaaacataaccggatccgtctgcacactatatataatataccatatatgtatctaataacttggcaataatgccaagaatgtcgacgagcaccgagcgcaaaagctaccgctcactcgctcagtgcgcagcgaccacgtccggcgacgccgctggcgcgaacgcgtccatgaacgcctccacgacatccagcggtggggacaggagcaccacggctcgggcggcggccagcttcttccgcaacgggtaccgcatccccctcgtggcggaggcgggcccgaggaagcatggcacgccgtcccaggcggcgggcggcgcgggcgagcgaggaggcgaggagggcggcgcccacgcccgcgcggcacagcggagggagcgggccaggaccctggagtcgcggagccgcgcgagcgcgcccgggcggaggaagcggtgcgggctgccgctgcccgcgagctgctggcgctcgggacggcgcgccggggagcggaggcgtcggtccatggatggctggcgtcggcggatgggcggatcgggagggagattggaattgcgcgcgggtttggggaa

SEQ ID NO: 134588 - DNA, 504 bp, Zea Mays
ggccctccccgccatggacgccgctcttccttcctacagtacgtcagcgacctcgtctccctctcttcccgtggacgcctgctgcaggagctgttcctcccctgcgctcgcctaagatggccggactcgcccatgatggctttcccctgtcgatgctgttctctagccgccatggcagtgcctccctgcagtgcagcagtccggtgactgggccctccccttcccacgtcatgctggtgccatgtcttctccctcaccggccaacctcgccagccaccaggaaggtgtctccctctcggtagctcccatggccaccatcatgtcatgtctgagcagtaagtactctctagggttgggccgtgggccgggtttagtgtcctaatctggtgttatgggtttatttggagtctgtaatggcctgttaagagaccggatatatactctgtacttggccagttggcaaacgacgatcagaataatccagagaatcatatccgtaacaaa

SEQ ID NO: 134589 - DNA, 1011 bp, Zea Mays
atggaggtcgcggagcagaagagcgaggagcgctgggatcggatgatgaagatcctggagcgtttgggcgacaaggtggaggcgatggagattgggcagcaacgtcttcaacgtcaagcagaggtgatggaggcgggacagcaacgtcttcatcaccaagttgaggctgctgcaacatctgcgaggaaggcggaagaggaacgaaccatcctggcgcgccaagtggatgaaaccgggaaggcagtgtcgcgccttcgattggagtggatggcgaaggagatggaaggtatggaaactgagtctgagaaggaagggcgtaaccaaaggcggtttgagggtgatgatcgggagtatggtgagcaggagtttcgtgtggatgatcagccggaaggaagtagagagcgtcatcatttagctcaagtaattggtagttcaactgtgtttggtttgggatttctatctgtggatgctgggaacatgctccatcttatcgaagcatgtatcttgagaaagttgatcgatacatctgcttatttatggcctggttatgttgtaccatctgggactttaaaagatacagctttgccccaagaatccccttggttaaactttatgaaagtgtctcgactttcaggaccccttattgatgctctggtcgcatctcctgcttcaaggtgtttcaagctctgcaaggtgaggtctgttcagtttggccagaaaggcatctcctacctgaacacctacgacggccgcacaatccgctaccccgacctgctcatcaaggccaacgacaccatcaagatcgatctagagaccaacaagatcatggacttcttcaagtttgacgtcagcaacgtgttcatggtaaccggcgggaggaacaccaggcgtgtaggagtgatcaagaactgggagaagcacaaggccagcttcgaggtcatcgacgtgctgcttggagctttttgcatgctatgtctagttttctcctatttgttgtacaagaaaacataa

SEQ ID NO: 134590 - DNA, 1470 bp, Zea Mays
ctgccccctcttcacagagactgaaaagggtggagttgtggagagaaggactaaggtgcggtcgcaacgacgatggcgaggagcagcggcggcgggctgaagaaggggccgtggacgaaggcggaggacaagctgctgagggaccacgtggagcggaacggcgagggcaactggaacgccgtgcgccgggagacggagctgcagcgctgcggcaagagctgccgcctccggtggaccaaccacctccgccccagcctccgcaagggccccttctccaccgaggaggagcgcacgatcctcgtcctccacggcctcatcggcaagaagtgggcgaccatcgcctcgcatctccctgggaggacggacaacgagatcaagaactactggaacacgcgcgtgaagcgccggcagcgcgcgcgcttgccgctctaccagccggacgtcgagcaggagatcgcgcggctacgcgaggagaacgtcaacccgctcgccgacgatgatggccgcgccaacaccaatgccggcctcccgccgccgccggacctcccgcgcctctacgactccggctaccagttagtgctgccgcccacgacgtcgcactcgtcgctgatcaaccaggactgcccgctccaggaccagatgcaggtgttccacgtccaccacatcggcagccagcagccggcgttccaccaggacgtcagtgcggcggcgttcagcaacaccgtctcctccggcctgccgccgctgccgaccgtcagaacgcaggcggatctccctccgacgaaccaattcaagacctgcagcggcggcactagtgggctgctggagccgatgctgatgatcggcgacgaacaactgctgatgcggcccgacccgagcatggtcaaggtcccttccatgcccgcgctctcctatcgccagctggccgtgtccggtctgctgcccgcttacggcgccgggagcgacggcgacttcaccccgcactgccctctgggagaggacatccaccatggcgcgacatgggacttcaccttcggaaaccaaaccgatgcgtttacagaagagttcgtgaagccggcgaagaggaggaggacgagcgaggtggggatcgtcaacatgttccctgttgccccaccggaggataggctcggcacctactacggtgtgtcggcggcaccatcgtcgtcgcccgtcaccgacgacaggttcaccgtcgcctcgccgtggagttggttcggcacctgtggtgggtcgacgacaccgtcgacggggccgtcgtcggtcgtcgccgacgacgagttcaccgtcgccccgccaggggattgcttcggcacatgcggtgggtcaacggtaccgttgacggggccatcgtcggccgtcgtcgacgacgagttcgactacctggatatcgagcagttcatgtgggctgtaccaccgtccattgatgacgagcacgactcggatgcataa

SEQ ID NO: 134591 - DNA, 122 bp, Zea Mays
gcacttcgacaactgtgctacctcctcccaatacgactgtatgccccaaggcaggttcgaccaaggcctcggaagtaacctctgtctcgcccgagcctggcctcggcctatataacattgac

SEQ ID NO: 134592 - DNA, 134 bp, Zea Mays
ctttctcattccccctccccgcaaatctcattctcattcccacgtgcatcccacgcctagctccccgcaaatcccattctcattcccacgtgtatcccacgcctagctaaaactaaattaaaaaaaaacacaaa

SEQ ID NO: 134593 - DNA, 211 bp, Zea Mays
ttggaaaatgttcctatcaaaacaaagggagaatttgttttaatatacctttaatccaactacacactcaaaataataatgtggtgtgtgtactttcatgttgaaaacctagcctaaataaaataaataaataaataaagtaactgaataataaatattatgtagaaattgtgcatcatgtggagtttttcttatgcataaatttgaaatt

SEQ ID NO: 134594 - DNA, 3202 bp, Zea Mays
tctttttttttttttttgcaaagcacctctcttgttccttcgtcctcgtgtctcgctcctcgcccattccgcgctctaaacaataggcctgccatcgctcgcggaagtctccattcctgcgcgcgaatctccctcccctcccaagcgatccccattgtcgaggcccgattcggatcacctaggttttctcttcgcgaccgggcaggcggtggcgaggatgcggcgctaggctcggctctgtggtgatgaacatcgtgcggggagtcgccgaccttctccgcaaggcgccgccacctccccccgcaccggacgctggtgcggcgcctaccgcctccttctccgccggtgacttcgacgacgcgcccaccccgcgcgtcgtcttcagtggtagtctggaggagggagctctgaatgcactctggaagaattacgagaatgcgcttgataaggtcgagaaggaaaaatctcttcaaatttttgtcttgcaatttgtagagacattcagagattgggatccaaacccaattgagcaattggttgatcaagaattgggaaacaatgaaacagttgtaggatgctcttgcgggcatccttctgaggtcattcttattttgattcaggagatttctctaattacatcaacttttactgaaagtggcaacagtcctgtatctcctacaaatcattattcagggcaacaaaataacctgggtttaagctcacaaatattgcaagttctggagtgtttggaaattctgactcgctccttgcataactgtagagtattcagctactatggtggtgtacagaagattacttctctactaaaagctgctgttgctcagctcaaaaacttgaactgtttgctggctgcagaagaccaatctgcagatgaagcagtgaaaaattctagggtgatgctaaatatacttgtatgcataatcaccataatttcaaacttcatgaagttggacataactgttggaaggattccccatattaccgataccacaaagcataccccatcatgcaaccatttggctgcagtcacgtctagctctcctgatagaaccatttctgatacacttcgacattggcagcagaaagcaactgttcttgtgatggaagccagatgtgtcaactggttaatgttccattggcaaaatgacagtaccaaagcttcacttacactagattctgtctctggtccaacttattctcttgatagaactgaatggattgactactctataaaattgagcaatgccttttgttcttttgttcttccttcggaggatatcggatactgttccgatgaaatagctgtcagccaaattgtattatccatcccactggcatacctggagcaatctgtgagatggatcataaggattcttatgactgtctttctatgtatcagagcgtgtaccaaggaaactgagctgccacaccacatcaagatttttgcaaagaccctacaatattatgtgattcgtatgttcaaaagagttcttatttcaacaccagctctactcccagcttttcgagaggaaggtgtatgggacctgttattctcagggaattttttctactttggttcatctatagaagacacttgttttcatactgttacggatattcaaaatggtaatgttagcagtaaccgaatatctattcattctgaaagcttgtatcgtaccgatgttaaaattcttcaagtggaagctatttccttcttggagtttgctgcaacactccatgaaaacacatataacatgccagaatgctcagcactgctagatgcacttgagcattgcatttctgatcctttgctagtcagcactcttctcaaaagcttccgtgttattctacaactcgcgacagaacatactctagcttcatttgaatcattggatgtaattacaagagtccttaaggctgcttgccgtcaggcacaagagctacggaacttcagcaattttctttgttctaatgtcagcatcagtcaagatagttctcaatttaaaaatattgaaggcagaactgaggacactcttatatgtacagagttagctttgagcctctttatggaatatgtcactatatcgatagatggaaggattctcgttttacacaatgctgattgtattgattgtttatttgacttgttccatgaacagaacattcgagaacatgtgctggagcaagttcttgccttatttaggttgccttcatcgtcagcagaagatcatacagcaaagttgcagttatgttcaaagtatttagagaacttagcacgggcaaatgaaaaagaaaaggtcaacacagagttattaattgatcttctggtcaacatgagagagatcataatgatggatcacatgtactatcaaaatctattccgcgacgaagggtgctttctgcatattatttcattattgaatggaaatttcaataaggtgactgatgagcggcttgtccttaacgtccttcagaccttaactttattacttgaagggaatgatgcatctaagaatgaagatgctgttgtattacttctaaatattttgcagaaggaaagggatgatacagttattgcaatcacagagttaatacaaatacttggtgcacacagtatatgtggcaaggacatcaggaaaatctttgcccttttgcgctgtgagaagattggtgccaaacacaagcacacatctttgcttctgacaagtctcagtcacatgctgaaggaaaaggggccagaagctttctttgagttcagtggccatgattctggtatagatataaaatcaccctttctatggccttacaatagagggatatctttttcttgctggttaagggttgaaaacttcccagacagtggtatgatgggccttttctccttttttaaagaagacgggaaggggtgctcagctgttcttaacagaagtgctttagtatatgaggtaactcagcttcttgtgtaatatattttgggtgtagatgctgatacttttttgtctatctatcaaaaacatcagtgtgttctgttaccactcaagctcccaccaaagcaatggagattcctttctattactcatacaattgggagggctttctccggaggaagccagttgaggtgttatgtagatggggagctagtatcatccgagaagtgtgggtgagcaaattcatctatatt

SEQ ID NO: 134595 - DNA, 530 bp, Zea Mays
tcctactccaccaaatcggcttacgacgctttctttgtaggaacaatccattttgctccttataagagggtatggagatcttgggctcctcccaaatgcaaacttattatttggttggcgttgaaaaataaggtgtggactgcagaacggcttgcaaagcgaggcctcccacaccctgcatcttgcccgctctgcgaccaagaggcggagaatatacaacacctattgttctcctgcgtgtttaccaaacaagtgtggtttctaatcctgcagggccttggactttcctctctacctcaacctgaggaaagaagctttatgggttggtggagtagcgttgtttgtttggcacctaagaatataaaggactcaacagtctctttatcctagtggcttgggaggtttggaagcaccagaatgcctgtgtgtttgatagagctattctagaggtcttaatggttcttcaaaatattgccaacgaagactctttgtggtgtgcagcgggagcaatggaccttcggttcctgcta

SEQ ID NO: 134596 - DNA, 381 bp, Zea Mays
atggagaagggtggcggcgctagagaagggctcacgcgcgagcgcgactgtgcactgcgtaatgcgtgtaccgtattggtacaagtagggcaaaacaatgtttgtgttgtaccggtggtggtggcacaacaatcaagtgaagcacaactcaagaggaggccaaggcatgcacaatactgctcaaggagtggtcgcctactcgcctgttcagccgctgaacagacaacagaggacagaagcatgttgaaaggggccctctgcaaactacaaccgccgcgcgatggagggggtgcagctgctgctcgagcagagggtcgccagagcacaacagggtggcaggagaggagggcgacaacgatggagaaggggcgacgacactag

SEQ ID NO: 134597 - DNA, 866 bp, Zea Mays
atgggggggacaaagttatgctcacgacacttgcctcaggatattatttactgtgttggtggtgtctccgtatttttcccactcttcactcaattttttgatgctgcaagtgatattgagaaatgttgccatacatctgttgtcaatgataaattggtggctgaggtcattgagctagttgctactgttctggatggaaatgtgtcaaatcagcaacagatgtatcttctttctgggttatctattctaggcttcttgcttcaatcagctaccccacagctcttaaccaccaaaactctttctgcactgaagtatatgtttgacattctgaggaactgcagcatgtcaaaagtcctcctcaaagatgctatctcacaaatttatttgaatccacaaatatgggtatatgcaagctatgaagtacaaagagatctctatatgtttgtgataaactattttgaaacagatggaaggcttttaccacttctatgtggacttccttgggttattgatattgtgtgccgatattactgggaaaaggcagattctaggcatgttgttgcttccaagcctttgtttcattcagttaccaaacaagttattggagagagacctgaggtagttgaaattcgcaagcttcgtcttctcctcctgagtttagcagaaatgagcttaaagataaaagtttctcctgatgacataagagcgcttgtagcttttattgagaggagtcaagacatagcatgtatcagcgatgtactggacatgatcatccgtgctctttcacagggagaagttttttcatcatttgttgggaacgtaaattaccttggtggttgttgcattttcattaatcttctcaagag

SEQ ID NO: 134598 - DNA, 608 bp, Zea Mays
ctttcttatggcagtttttatgtttctttgttttcgtcccccgtaaggaggcttgtattgtgttgatgactgttggtctatttcggaccgctcttcttcttaatataatggtgtgcagctctcttgcatgttcgagaaaaaaaacaagacaatttccaccattaacatcctccctttccaaagaaacacccatcgaattttgttaatcgatttaactacctacagtcgggccgccacccccttggtggcgctctgcgtcgtgatctggatgcagtgtcaagtgagcaaggatcgggtcgttgcttccttagtgacgcgctacatcggtgcccgggtgtagtgacaatgtgcaagggtcttcgcatctgtctcaacgggtgcgaggggtaaggaagctagttgagccgactacgatccatgtaggtagttggaacatagggtccctttcaggtaagctaagagagttagtcaatgcagtgagtaggaggcgtgttaatatcctatgtgtacagaagacaaaatggaaggggcaaaaagcgaaggaggtggagaacactggttccaactttggtactcaggaacagtggcaaacaaaaatggagtaggta

SEQ ID NO: 134599 - DNA, 1722 bp, Zea Mays
ggaatttgagccagtccgtttgttggggcttcagctccttggaaaacttttgactgggattccatctgagaagaaagaaacgaaactatttgccctacccttagggcagtctagacccatctctgaaaacttaacaaaagaaataacagcggcacctcagtttttcttgaatacaatgtctgaaaggctattcaaatttccactatcagataacttatgtgcagcacttttcagtgttcttagtggaaccagtgcacaacaggttccccaggaaaattctgagcctgatccatcaagggatagaaattgcaatattttaagcttgccacccttttcccttcctcagattttgatatgcatctttagatttatgcattcttgtaaagattcctcagcacgcacaagaatcttaaatcttcttcttggtttgctggattcaaactcttcaaacatcgaggcattaatggagcacagttggaactcttggcttgaaacatccacaaaacttgaggtattcaaggactacaaatcagtttctaaaggcgaccctgacgatgtgaaggcagatgaaataagtcttgttaggaacttgtattctttggtcctttcatactacctgcgctttgttagaggtggctggcatcaacttgatgatactgctaattattttctcttaaaaactgaccagggacaactatcatgttctgatttgcttagggacatacttgatgatattgctgggagcctgcttcacaaatctgtggaagataatattttccttttacagccttgctgtgataatgttttacattttttgaaccttatacaggagctgcttatcagtcaaatgggaattaggctattgtttctctctcccagtatttcggaggaatcttcacatgataacatatggaaagaagatattaagtcaacagtaaatgatattttaaataccgagagccatggtcaatttacaagattttctgatgtaaatgaagtcagtgatgattggtggagtttctttgacaaggtgtggagtattatacgtaatttgaacggaaaaggaccaagcaaatttataccaaaggatccaaatgttgaggttgcatctttggggcaaagggcgcgtggactggtggagtctatgaatgtccctgctgccgaaaaggtagctgttgtatctggaggcggaggtattggtactgcattaggtataaaagtgaacagatttgctgagaaagcgacaacgtcgagggaagagataatcccaagaattttcttccaccttgtgattctgtacctctgcaaagctggattggagaatgcatccaagtgtgttatacagttcatgtcgttgcttccgattcttcttatttcagaagatgaccaaagcaaaaataagttgcactttttgatatggtctctactaattgtaagatctcagtatgggcaacttgacgatagcgctcgtttccatgttttctcgcacttgattcttgaaactattatatatgggaagtccatgttggtcactaatatcttagagagagatgattcggtggacgtcaacaacaaggagactggattcatccttagctttatacagaagaatcgtgttcttgctgcggtttgtatctttgccccctccccctatctttgtctggaattattttgttgacgcgtacaaaatgagaagggtgtgtttgaagttttgtgcattta

SEQ ID NO: 134600 - DNA, 5294 bp, Zea Mays
ggaatttgagccagtccgtttgttggggcttcagctccttggaaaacttttgactgggattccatctgagaagaaagaaacgaaactatttgccctacccttagggcagtctagacccatctctgaaaacttaacaaaagaaataacagcggcacctcagtttttcttgaatacaatgtctgaaaggctattcaaatttccactatcagataacttatgtgcagcacttttcagtgttcttagtggaaccagtgcacaacaggttccccaggaaaattctgagcctgatccatcaagggatagaaattgcaatattttaagcttgccacccttttcccttcctcagattttgatatgcatctttagatttatgcattcttgtaaagattcctcagcacgcacaagaatcttaaatcttcttcttggtttgctggattcaaactcttcaaacatcgaggcattaatggagcacagttggaactcttggcttgaaacatccacaaaacttgaggtattcaaggactacaaatcagtttctaaaggcgaccctgacgatgtgaaggcagatgaaataagtcttgttaggaacttgtattctttggtcctttcatactacctgcgctttgttagaggtggctggcatcaacttgatgatactgctaattattttctcttaaaaactgaccagggacaactatcatgttctgatttgcttagggacatacttgatgatattgctgggagcctgcttcacaaatctgtggaagataatattttccttttacagccttgctgtgataatgttttacattttttgaaccttatacaggagctgcttatcagtcaaatgggaattaggctattgtttctctctcccagtatttcggaggaatcttcacatgataacatatggaaagaagatattaagtcaacagtaaatgatattttaaataccgagagccatggtcaatttacaagattttctgatgtaaatgaagtcagtgatgattggtggagtttctttgacaaggtgtggagtattatacgtaatttgaacggaaaaggaccaagcaaatttataccaaaggatccaaatgttgaggttgcatctttggggcaaagggcgcgtggactggtggagtctatgaatgtccctgctgccgaaaaggtagctgttgtatctggaggcggaggtattggtactgcattaggtataaaagtgaacagatttgctgagaaagcgacaacgtcgagggaagagataatcccaagaattttcttccaccttgtgattctgtacctctgcaaagctggattggagaatgcatccaagtgtgttatacagttcatgtcgttgcttccgattcttcttatttcagaagatgaccaaagcaaaaataagttgcactttttgatatggtctctactaattgtaagatctcagtatgggcaacttgacgatagcgctcgtttccatgttttctcgcacttgattcttgaaactattatatatgggaagtccatgttggtcactaatatcttagagagagatgattcggtggacgtcaacaacaaggagactggattcatccttagctttatacagaagaatcgtgttcttgctgcggctgctaatgaggttaagcacatgaaggctgttcaggctgatcgtttaaagaagctgcaggatcttcgcatgaagcttaacgagtgttctgctacggagataaagctagcgcaggccattgaagatgagatacatttaactattactgctgtgctttcagcggatgacaatagaaagacagcttgtcaacttgctttccgcgaggatcagcaaattatcagggataagtggatacatatttcccgtgctctgatggatgagagaggaccatggtctgctaacccttttccaaatgatgttgtgactcactggaaacttgacaagacagaggatagatggaggcggcggttcaagttcaaacgtaattacaaatttgatgaacgattatgtcagccttcacagtcaaggaatgaaagtacagcaactttagctgaccagctgtacattagtgccaaaattactcagaaaatgaagcaattccttgttaaaggagtgcggggaatcacagaggatagtagttacgaacaatttgaagacactaatgacgcgagtgaatcttcccagagtaatccttcagagagccaaaaccttaataatgctgcagatacctctgatcatcatgcttctgcacattataagaaagagccatcatctactaatggagataatgattatacaaaggtgctatgttcagttcgttgtgtttttgttaccccaaagcgaaaattagcaggacaactggatatcacacgaactgtcatgcatttttcttttgaatttttggttgaaggaactggaggatcatctgtttttagcaagtttaaagacaaaaaagattcagactgcaagaacgagctgggaggtgtggacagacttgacggatgccgagacagtatgattgaaaccaatggtgttttgatgcaaaaccagtctaacaagatcaaacgtcacaaaaggtggaacataactaagataaaaggagttcattggacacgctacctactgcaatatactgcaatggagatcttctttgatgattcaactgcacctatatttttaaacttttcttcccaaaaggatactaaaaatgctgggactttgttagtttctcttaggaatgaagctttgttccctaaaggaagtaccaaagacaaaaataatatcatttcattcgtggacaggcgagttggacttgaaatggctgagaatgccagggaaagatggaaaaggagggaaatcagtaactttgagtatcttgtgattttaaatacccttgctggaagatcttacaatgacttaactcagtatcctatatttccatgggtattggctgattacacctctgaaaagcttgatttcaacaagtcatcgactttcagggatctttcaaaaccagttggtgcgttggatgaaaaccgcttcaaggtttttgaagatagatatcttagtttctgtgaccctgatataccaagtttttattacggatctcactactctagcatgggaatcgttcttcattacatgcttaggcttgagccatttacaactctgcatctaaattttcagggtggcaagtttgaccatgcagatcgtttgttccaaagcattgagagcgcttacataaatagcttatcaaatacaagtgacgtcaaagagcttattccagaattcttttacatgcctgagtttcttgaaaattcaaattcatatcatcttggtgtcaagcaggatggggaacctataggcgatgttgctctccctccatgggcaaagggatcgcctgaagaattcatccacatcaacagagaagcccttgaaagtgaatatgtgagctctaatctgcataactggattgacctcatatttggttacaagcagcgtggacaaccagctgttgaggcagcaaacatattttactacgtgacatatgaaggtgcagttgatctggaaaatatggatgacatgttacataaatctgctattgaggatcagatagcaaattttggacagacaccaatccagattttccggacgaagcatccaagaagagggcctcccatcccaattgctcatccactgtattttgcaccacagtcgctaacattaacatcaagtgtttgtagtacggccagccacatgtgtgctatactatttataagtttgttggagaacactgttgtattgatgaatgagggactcatattgtcagtaaagctgtggttgacaacacacctgcagtcaggtggaaatttcacatattccggaccacaggaacattcctttggaattggttcagatgttatctctcctcgtaaaattggcactttccttgctgaaaacgttaagtttggaagacaattcttagcaacgatgcaaaatagtcgtgataattatttgattttatgtggaaactgggagaacagttttcaaataatttctcttagtgatggaagaattatgcagagcatcaggcaacacaaggatgttgttagctgtgttgcagtttcgtctgacgggaacgtggttgcaactggtagttatgacacaactgttatgatctggcatgcatttcgtggaagaccaattgataagaaaatcaggggtgccaattttgaactttcagaaaaggaacaagttatagtggaaaggcctgttcatatcttatgtgggcatgatgacatcataacatgcttatttgttagcacggaacttgacattgtaatcagtggttcaaaagatgggacttgtatttttcatacactgcgtgaagggagatatgttcggtccatccagcatccttctggtgttggtttatcaaaattggtagcatcgcagcatgggagggtggtattgtattctgagaatgacctctctttgcacatgtactccatcaatggacggcatattgcttcttcagctacccttggacgtctcaattgcatagaacttagttgttctggcgatttcattgtttgcgctggtgagcttggacagatagtcttacgctcaatgcattctcttggtattgtttggaggtacgatggaaatggcaagacaattacttccctagctgtgacccctgaggagtgcatcctagcaggaaccaagaatggcagcctcttggtgttttcaacagaaacttctcttcttcgaagggggagcatgcaacgaaataaaataaaaccctccacatctggttaagtcattggctgcaagatatccaacgaatgtaaaacaaatgactgcttcatgctgaggtcattaccagcttatagaactgttctcacgaccatgtagtctgtacataatgaaacacacttttgtcatttgttttcactaccaaaagtgaagctggcattcaggaatgagggttgtcaagatattcagctggtgataatccttgagcacccaatctgacgaaggaacactggttagccctagatccaagcatcttcacttagccttcacttggtaggcattgacatctatcacaatgttattgtagcatttgacttcgttggtgttctgtgcgacagtttgtgtttgtgtagtatttatattagattccagtgcttttgtaaatgtgccatttttgtgatctaaagtgttagaaagcatcttcatatatcatatgccctcatctatctattgataatggcgttctgta

SEQ ID NO: 134601 - DNA, 429 bp, Zea Mays
ctcccatcccccaccagcgccgagctccaccaattgcacctccttcccatggcgtgagccctgtgttggcgcgcacctctgctcggtctccatctccccagtcgtcggaccggcctcctcccagccatggcgcagggccctgctcctcttcggcttccccttcgcgtaggctcgccttcggccgtcgtgaagacaccagcaggctccagatccgaacgatcgtgcttcgactctggctggccaccatctctaggcgccgctgccccaagcccgacctcgcgcgctgccaacgttgtcttctccgaccacctctccattccgccaaccatattgcgccatctcacctacaagccatggaatgttgggtattcaatatatattacgttgcaaatccatttttatgtcgcaaaggttgtgttatccccgtaa

SEQ ID NO: 134602 - DNA, 1997 bp, Zea Mays
cacttatcttctccttttgtttcctacccattagataatttctttttggttgattttatgtctcattgccttgtcaggaatgacaataaccagcttctgcttggaattcgtcgggcaaatcggccacaaacagtcatgccatcttcagtcttatcaagtgatagcatgcatattggtcttcttgctgcagctgctcatgctgcttcgacaaatagccggtttacaattttctacaacccaagggcaagcccttcagagtttgtcataccgcttgcaaagtatgttaaggctgtgtatcatacccgtatatctgtggggatgcgcttcaggatgctttttgagacagaagagtctagtgttaggagatacatggggactattaccggaatcagtgatcttgattctgttcggtggccaaattcacactggcgttctgttaaggttggctgggatgaatcaactgctggcgatagacagccaagggtgtcactatgggagattgagcccctgacaactttcccaacgtatacatctccttttccgctcaggctcaagcgtccatggccaacaggcttgccttctctgcatggtgggaaggatgatgacctggctaactctctcatgtggcttcgagataccacaaatcctggtttccagtcgttaaattttggtggacttggtatgaactcttggatgcagccaaggctggatacttccttacttggtctgcagcctgacatgtatcaggcgatggccacaggtgctttccaggatccaacaaagcaggcatcacccacaatgctgcagttccagcagccacagaacatagctggccgggctgcgccactttcaagtcagattttgcagcaagcacatcctcaatttcagcagcagccgtacatccaaaacatctctgagagcacaatccaagcgcagggtcagtctgagttcctcaaacagcagatccaacgcagccagtcattcaatgagcagaagccccagctgcaaccccagcaagaatcacagcagcagcagcaatcacagtgtctgcaagcccctcagcatcaacaaatacaacagaacatagccaactaccagtctgtatccaatgcattatcggcgttttctcagctgtcgtcagcctctcagtctacacctatggcactgcaaactatattaccgttctcacaggcacagagctttacagacacgagtgcaagctcattgtctccatccaacaccaacacaatgcaaaatacgcttcggccattctcatcagaagcagtttctcacctcagtatgccgaggcccactgcgatacctgttcccgacgcatggtcatcgaagcgagctgcggtggagtctttgcttccttctcggccccaagattcgtctcaaatgcaacagttggactctacaccagctagtatacctcatagctctgcgttggcaccacttcctgggagaggatgcttggtggatcaagacgcgaaccctgatcctcaaaaccatctcttgtttggtgtcagtatagattcgcagtcactgctaatggagggaggcatccatggtctccaaaatggcaatgattcgaccgctataccttattccacctccaatttcctgagcccttcccagaacgattttcctttggatcatactctgaattcttcaggctgcttagatgattcagggtacgtcccgccatgttcggataattctgaccaagtgaaccgaccaccagcaacctttgtgaaggtttacaaatctggaacctacggaaggtcgcttgatatcaccaggtttagtagctatcacgagctccgtagggaactagggcgcctatttggccttgagggccagttggaagaccctctgagatcaggctggcagcttgtattcgtcgaccgcgaggaggacgtccttctcgtgggcgacgacccttggcagtaagttaccatgaccgtccatcagtcttggtgatacatcctcaacaa

SEQ ID NO: 134603 - DNA, 1044 bp, Zea Mays
ctgtaaatgtccaaattgggccttgaatttggcccaactaactatccactcaagtctggatcgcaggtccattaggtctagttagatagagtccaaggaattctaaagagactttagataatcaagtccaatccaggctatagtgggcctttctatcgcgcgcattttctttccgaccagccgagcgccgccgccctccggcaggtcttcttcccggccacgaccacccacgccaggtcttcccggccccgaacgcgagcacccagccctcctccaggtcttccccggcgacgagcgcgtagaagaggggatccttagcacaatggaagaaggagcaccagggccgtcgcaagccatcccggattctggagacacgtaccgcaacagctccaccgcgcccgtgggcagcagctcaccgtctgtcgcgaagctccggaagctgctgttccggcggatgctcatcggcgtcaacgacggccgctacttccacggcctgttccactgcatcgacaagcagggcaacatcatcctccaggacgccgtagagtaccgcagcgcccgccactgctcgcctccgacggagcagcggtgcctggggctcatcctgatcccggccgcctgccggtcgtcgtgccaggtcgattgctccgttgaagagaagatgtcgctcctgtgttttgagtgaatcgtgcttcaaagggaatacactacgcatgtactaagttactggggctcatctctgctatctgaaactgagaggcatgattggtgtttcctatttttgaaggattgtttattagaaaacttcagagttcatacataagcttttctattttctactatgatgcagagtttattttacatagtctttagttagctccagagctacagctatcaacaaaaacagaagtttagaagaatgcatctaaatagaaactacagattgttggactagttaagtctgggactgcgacactagaatcaagagcctctgacaagggattttagcttcaggccttgtgaaaagagaacgggagaaaatct

SEQ ID NO: 134604 - DNA, 1872 bp, Zea Mays
aaaccggagcattccattgtaccccgcggtgacgcgtcccggccccggcggccggcgggtctgcctaccggtaccggccccgctcgctcgccgagtcaacggcttgactgcgcccgcccgccacgttcgtagtactatacaagtacatgcctttgccttccctttcctctcctctcctcctctcccacagtcccacccgtttcgcagtgcagaagccggcgaaacttccaagcccaaggaaggaaaaaaaaactgtcacctttaactcgatcccctcttccccgcccgagtcagagcggcggcgccggagccggagccgacagcttccggcaagcgggggctacttggtgcggcgggctatttccgcggttttgtgccacagcgggactgaactgcccgcccaggctgccctatcagggtcaccaagattgaacaagactgaactgccgcgcttcaggatactgaactgccatctcagttaaatgatatactgcacaacagtgggcagcgatagtttgagacacattagcaatgagttgtttttctcaccttttcaagagaaaaagggggccacaacaacaagacgatccatctgacaattatttcactggttctgagaatataacaagattcagctacagggaactggttagagccacatcaaattttgaccaaggcaataagattggtgagggcggctatggacctgtctacaagggaacactcaaggatgggacacttattgccgtgaaggttctgtctttacattctagacaaggggcaaaggagtttcttaatgagcttcttgcaatctctgatgtaacacatgagaatcttgtcaaactctatggctgctgtgtagaaggaaaccacaggatccttgtctacaattatcttgaaaataatagtcttgcacatacccttctagattcgcgacacagcaacatccagttcaactggagaactcgggtaaatatctgcatcggtgttgcccaaggattagctttcctccatggcagtgtcagccctcacattgttcaccgtgacatcaaggcgagcaatatacttcttgataaggatatgacgccaaaaatatctgattttggtctggcaaagcttctacctccggatgtatcacatgttagcacaagagtcgcagggaccctaggttacttggctcctgaatatgcaattcgaggacatgttacacggaaggcagatgtctacagctatggcgttctgcttatcgaaattgtgagcggaagatgcaacactgatacgaaattgccctatgatgaccagattctccttgagaagacatggagatactatggtcgcgggaatctggagaagatcatagacagctcccttggcgacgacctggacgttgacgaagcctgcaggtttctgaagatcgggctcctctgcacccaagacggcacgaaacgccggccgggcatgtctgcggtggtggccatgctgagaggcgaggcggacgtggacacggagacgatcagcaagcccgacgtgatcagggatttcggagacctgaagctgcggagcagggccacgtcgtccacgctgctgacctcgatcatggcgcggtcgtccccgctgtcgtctgaggagacgacgcgcacctccatcaccttcaccgagatatcggagcgcgactgactgacgatcgccgttaattcgccgacaagaagtgggctgtgagcctgtgaccgtgtagctggaggagcggaaagtgtacgtagcataggccggggagaattctttttgctggttttatgtgatctgtgtgcgtatttctatattacaatcgcggtaggaaacggcgcttcaaagactatccacgtcagcttctaa

SEQ ID NO: 134605 - DNA, 270 bp, Zea Mays
atggagtcgacgacggcccgggcgctgctctacttctgctgcctcgcgctgtacctctgccgccgcgctccgccctgcctgtgggcggaggccgccgccggcgggtacgctgcccgcgcggcggcggtggacgaaggaggcgcgcggctccgcgcccagctcgcggccatcgccgccgccggcgacgacgacgtccggaacctcgacgtgtatgctaggtgcgatatattacaacgaaggaacatcgatagatgtgtatatggttgttag

SEQ ID NO: 134606 - DNA, 3022 bp, Zea Mays
ccatttcatttccgatttctgtttaaaagagcccccgcagtgtcctgcactgtcttgttctaggcctagctagctagccctccagctcgcacacatgccatggcgctgtcgtggtcgcccgccgtcgtcgtcttcctcctcctcctgttgctcctccctgccccatggccccgcgcggccgcccaggccggccggtaccacgccgtgtcggtgtccagggcaggaggccagctgtccgcgcggctggagctcgccggcgccggcgccggcggccaaaagccggagctcgggcccgatgtccagaggctcagcctgaccgcgagccttgagacggacagccggttgcacgttcgcatcaccgacgcggatcaccggagatgggaggtccctcagagcgtcatcccccgcgaggcgccgcgggacgacgtgcccctggaagcgagcacgggagcctcgccgccgcacagccgcgtcctctccgcggcgacctccgacctggccttcaccctccacgcctccccgttccgcttcaccgtgtcccgccgctccagcggcgacgccctcttcgacacctccgcggcgctggtcttcaaggacaggtacctggagctgaccacggcgctgccgccggagggcggggcgtcgctgtacgggctaggcgagcacaccaagcgcacgttccggctgcagcgcaacgacacgttcacgatgtggaacgccgacatcccggccgccaacgcggacgtcaacctgtacggctcccacccgttctacctcgacgtgcgccacgccggcgccgcgcacggcgtgctcctgctcaacagcaacggcatggacgtcgagtacggcggctcctacctcacctacaaggtcatcggcggcgtgctcgacctgtacttcttcgccggcccctccccgctcgacgtcgtcgaccagtacacccagctcatcggccgtccggcccccatgccgtactggtctttcgggttccaccagtgcaggtacgggtacaagaacctggctgacctggagggcgtggtggccgggtacgccaaggccaggatcccgctagaggtgatgtggacggacatcgactacatggacgcgttcaaggacttcacgctggatccggtgaacttcccggccggcccgatgcggcagttcgtcgaccgcctccaccggaacggccagaaatacgtcgtcattatagacccagggatcagcgtgaacgagacatacgggacgtacgtgcgagggatgcagcaggacgtgttcctgaagcggaacggcaccaactacctcggcaaggtgtggcccgggtacgtctacttcccggacttcctcaacccgcgcgccgccgagttctgggcgcgcgagatcgccctgttccggcggacgctccccgtcgacggcctctggatcgacatgaacgaggtctccaacttcgtcgacccggcgcccctcaacgcgctggacgacccgccgtaccgcatcaacaactccggcgtgcaccgccccatcaacaacaagaccacgccggcgtccgcggtgcactacggcggcgtgcgcgactacgacgcacacaacctctacggcttcctggaggcgcgagccacgcacggcgcgctgctcgccgacaccggccgccggcccttcgtgctcagccggtccacgttcgtggggtccggccggtacaccgcgcactggaccggagacaacgccgccacgtgggacgacctccgctactccatcaacaccatgctcagcttcggcctcttcggcatccccatggtcggcgctgacatctgcggcttcggcggcaacacaaccgaggagctctgcagccgctggatccagcttggcgcgttctacccgttcgcaagggaccattcggcgatcggcacggtccggcgcgagctgtacctgtgggagctggtggcgcggtcggcgaggaaggcgctcgggctgcgctaccggctgcttccgtacatgtacacgctgatgtacgaggcgcacaccacgggagcgcccatcgcgcggccgctcttcttctcctaccccaaggacgaggccacgtatggcgtggaccggcagttcctgctggggcgcggcgtgctcgtgtcgccggtgctcgagcccggtgccaccaccgtcgaagcctacttcccggccgggcggtggttcagcctctttgaccacgaggtcgtcgtcgcctcggcgacgggcaagcacgtcaccctcccggggcccgcggacacggtcaacgtacacgtggccggcggcaacatcctgccgctacagctgccggagctgacgacgtcgcgcgcgcgccagaccgcgttccacctcctggtcgcgctcgccgaggacggatccgcatccggggagctgttcctcgacggcggcgacttgccggagatggccgggccgcggggcgagtggagtctggtgcggttcagctgcacgcaggggcgcgacggggttaagctcatgtcgcacgtggtgcacgacgcgtacgggccgagccggaagctggtcatcggcaaggtgatgttcctgggactgccctcgctggcgccaccgggagagttcgccgtgtatgtcaacggcgttaagatggccaactcgactggcgcgacgctagggtatcaaaggcgcggagcactcggcgccgctcaagtggaggggttgtcgctggtcgtcgtcgaggagttcgagctcaaggtggtcacgtcgtcataacgtgacactcaagctcgttctgaataaaatctgatcaaaagtctaaatttaaattggaaataaaggaattgtgagtgcaatatagcaaaaaatgtgcaatgagattcgtgtcctctacccggattgagccctaacgcgcataatgaacatccggcccaaatatggaggcctaaatcaatgattgcaaattgggcttgcaaaaggctttatggcttggcacgtcatcggaaggaaacagtttagtccacgatggagactttttaatgtgttaacccttctt

SEQ ID NO: 134607 - DNA, 2167 bp, Zea Mays
gtcaacctgtacggctcccacccgttctacctcgacgtgtacttcttcgccggcccctccccgctcgacgtcgtcgaccagtacacccagctcatcggccgtccggcccccatgccgtactggtctttcgggttccaccagtgcaggtacgggtacaagaacctggctgacctggagggcgtggtggccgggtacgccaaggccaggatcccgctagaggtgatgtggacggacatcgactacatggacgcgttcaaggacttcacgctggatccggtgaacttcccggccggcccgatgcggcagttcgtcgaccgcctccaccggaacggccagaaatacgtcgtcattatagacccagggatcagcgtgaacgagacatacgggacgtacgtgcgagggatgcagcaggacgtgttcctgaagcggaacggcaccaactacctcggcaaggtgtggcccgggtacgtctacttcccggacttcctcaacccgcgcgccgccgagttctgggcgcgcgagatcgccctgttccggcggacgctccccgtcgacggcctctggatcgacatgaacgaggtctccaacttcgtcgacccggcgcccctcaacgcgctggacgacccgccgtaccgcatcaacaactccggcgtgcaccgccccatcaacaacaagaccacgccggcgtccgcggtgcactacggcggcgtgcgcgactacgacgcacacaacctctacggcttcctggaggcgcgagccacgcacggcgcgctgctcgccgacaccggccgccggcccttcgtgctcagccggtccacgttcgtggggtccggccggtacaccgcgcactggaccggagacaacgccgccacgtgggacgacctccgctactccatcaacaccatgctcagcttcggcctcttcggcatccccatggtcggcgctgacatctgcggcttcggcggcaacacaaccgaggagctctgcagccgctggatccagcttggcgcgttctacccgttcgcaagggaccattcggcgatcggcacggtccggcgcgagctgtacctgtgggagctggtggcgcggtcggcgaggaaggcgctcgggctgcgctaccggctgcttccgtacatgtacacgctgatgtacgaggcgcacaccacgggagcgcccatcgcgcggccgctcttcttctcctaccccaaggacgaggccacgtatggcgtggaccggcagttcctgctggggcgcggcgtgctcgtgtcgccggtgctcgagcccggtgccaccaccgtcgaagcctacttcccggccgggcggtggttcagcctctttgaccacgaggtcgtcgtcgcctcggcgacgggcaagcacgtcaccctcccggggcccgcggacacggtcaacgtacacgtggccggcggcaacatcctgccgctacagctgccggagctgacgacgtcgcgcgcgcgccagaccgcgttccacctcctggtcgcgctcgccgaggacggatccgcatccggggagctgttcctcgacggcggcgacttgccggagatggccgggccgcggggcgagtggagtctggtgcggttcagctgcacgcaggggcgcgacggggttaagctcatgtcgcacgtggtgcacgacgcgtacgggccgagccggaagctggtcatcggcaaggtgatgttcctgggactgccctcgctggcgccaccgggagagttcgccgtgtatgtcaacggcgttaagatggccaactcgactggcgcgacgctagggtatcaaaggcgcggagcactcggcgccgctcaagtggaggggttgtcgctggtcgtcgtcgaggagttcgagctcaaggtggtcacgtcgtcataacgtgacactcaagctcgttctgaataaaatctgatcaaaagtctaaatttaaattggaaataaaggaattgtgagtgcaatatagcaaaaaatgtgcaatgagattcgtgtcctctacccggattgagccctaacgcgcataatgaacatccggcccaaatatggaggcctaaatcaatgattgcaaattgggcttgcaaaaggctttatggcttggcacgtcatcggaaggaaacagtttagtccacgatggagactttttaatgtgttaacccttctt

SEQ ID NO: 134608 - DNA, 1425 bp, Zea Mays
agttccgcgagctcgggatctctgctccccatcccgcgcgtccatcttggtcaagaaaccctaaccagcacatccatcccacaggcctgccgacggcgcgtcgcccctaaaccctagaccccctgcggaaatctctagagcctgggccagctctgtgcgccagctcttgctccatctctccgcggcggcagcgcaacaaccgcacccatgaaagtcgccatcctcaccccccgcgagcctgccccatcctgcttagtgtcgtcccccgccaccgcgcagccgcaacccatctggataaggatgcatccgcttctcccatagccgccactacccctgcctgccctcggctacgaacacgaagatcccctggatggaggtggagctctcagaggcttatgatctagaactctatctcatactacggattccacagggtgaggagagatacgagcagggtcccaccggcgatgcgggtcccatcttcggcattgggagcaatccgcctactcggacacgaaggttctctgaggcggtgtagctatagatcatgcgggcaacggggaaggacgatagctacgcagcccacatcacgaaggcatataagtgggagttcgccgaaagggaaggtttgcagctggttgtgctgaatccagggactactctgggtccatttttcatgtcatcagtcaataccagcctgaataatctgttgcaacacctaagaggttggttatccattatcattcactgcatcacaactgaatcgcaaatgggttttcatgcaataaacaaacttatagcgcaagtcgttcttgaaggttgaaaattaaccaggccaacggcttgagtcggaccctgtcaacacagggtggtcgatgttagagacatggcacaatctcgatcgtgacgtatgagaacccatctacacagggttgtgcttggcgtccatggaatgtttgtttgacttcaccgatagaattgctgatatgtaccatgatttcccagttcataggtcatacattttctaagaacatgcatcaggtttgtgtaagcagggctagctgttcattttggtaatgacatttttacttttttcacatcagaatcaactatcaaagaggacaaacaggttggttgatgagagcaaaggagccctccaagaagttgatcgatctgggcgtttgtttccttccgtttgatgtgaccatcagggagaccgtcgattgcttcagaagcaaagggctcatctagccatgtgaacatttccagatgtacgttttattctatagaactgctacagtaatacttggctcatattaaaccgcctaaacgcactggaaaaaactaaactatatgataatgatataggtaccagggttactattgcttactagaatgaggcgagagctgcttagctcctttgac

SEQ ID NO: 134609 - DNA, 2092 bp, Zea Mays
agttccgcgagctcgggatctctgctccccatcccgcgcgtccatcttggtcaagaaaccctaaccagcacatccatcccacaggcctgccgacggcgcgtcgcccctaaaccctagaccccctgcggaaatctctagagcctgggccagctctgtgcgccagctcttgctccatctctccgcggcggcagcgcaacaaccgcacccatgaaagtcgccatcctcaccccccgcgagcctgccccatcctgcttagtgtcgtcccccgccaccgcgcagccgcaacccatctggataaggatgcatccgcttctcccatagccgccactacccctgcctgccctcggctacgaacacgaagatcccctggatggaggtggagctctcagaggcttatgatctagaactctatctcatactacggattccacagggtgaggagagatacgagcagggtcccaccggcgatgcgggtcccatcttcggcattgggagcaatccgcctactcggacacgaaggttctctgaggcggtgtagctatagatcatgcgggcaacggggaaggacgatagctacgcagcccacatcacgaaggcatataagtgggagttcgccgaaagggaaggtttgcagctggttgtgctgaatccagggactactctgggtccatttttcatgtcatcagtcaataccagcctgaataatctgttgcaacacctaagagaatcaactatcaaagaggacaaacaggttggttgatgagagcaaaggagccctccaagaagttgatcgatctgggcgtttgtttccttccgtttgatgtgaccatcagggagaccgtcgattgcttcagaagcaaagggctcatctagccatgtgaacatttccagatgtaccagggttactattgcttactagaatgaggcgagagctgcttagctcctttgacattccttctacttagtggcaattggtttggttacttaaacctatgctccatatgatccacgctgattgaattttggtttgttaatatgttttgggcaagcagtgctatgagatggagatgatggttaggcatgatctttctataggttaaaagaacagattatccaacagctgatggaacctgcattagagatattatgttgatgtcacagatttagttgatgctcatgtgaaagcgctcaacaaggcagacactagaaaagtcagtatttacaacgttggaacaggaagagatagagaggcccgcaaatagttaatctgggacaacatatctctgtactggccatagaggacaacaaaaaaaatcaaaagttgaagaatcaccaacggtgcctcctttgcaccctccagctcaagaacctgggcccgagccagttcaacaagtcatgcccacagctgaagtgctgaaccaacagatttactgtagggaatcaatgaatcagcccgaggcacatctgaaatagatcaaaacaaggtagtcgccttggtcgtggttccacatgataatccgccaaaagcacttgcttctaccagtcctggaagcgtggcgactagctggagcaaatcagattctgtgcgatgaaaagcaagtgaaagaggctattgttcaggtactaatttgccatagtgttggtctatgactgaatggtacaaaatacatgcaatgaatggatgatactttccagttaaatcatgtaattggaatacagtggtgccgtcagcggtgcggattgggggcttctagagaaagggtctagcgtcgtgccctgcttgacgaacagtgtgttgatatgtgccatcatcgcactgggaacgaacgtgatggctagcacggggagcatcttgagcatctgctttgtctccaccactcaccatgctctgagcctgtgttggtatgcagacttttccctttgtttcagaagaagatgcagttgcattgcacattgttggaacccacgatcaccacaaaattgagggaatatgtcattactcatttgcataactcattagtcattaccttgtcaaggtttatgctttccatcacgaacggttggagttgcaacataacgatactttggtata

SEQ ID NO: 134610 - DNA, 2363 bp, Zea Mays
agttccgcgagctcgggatctctgctccccatcccgcgcgtccatcttggtcaagaaaccctaaccagcacatccatcccacaggcctgccgacggcgcgtcgcccctaaaccctagaccccctgcggaaatctctagagcctgggccagctctgtgcgccagctcttgctccatctctccgcggcggcagcgcaacaaccgcacccatgaaagtcgccatcctcaccccccgcgagcctgccccatcctgcttagtgtcgtcccccgccaccgcgcagccgcaacccatctggataaggatgcatccgcttctcccatagccgccactacccctgcctgccctcggctacgaacacgaagatcccctggatggaggtggagctctcagaggcttatgatctagaactctatctcatactacggattccacagggtgaggagagatacgagcagggtcccaccggcgatgcgggtcccatcttcggcattgggagcaatccgcctactcggacacgaaggttctctgaggcggtgtagctatagatcatgcgggcaacggggaaggacgatagctacgcagcccacatcacgaaggcatataagtgggagttcgccgaaagggaaggtttgcagctggttgtgctgaatccagggactactctgggtccatttttcatgtcatcagtcaataccagcctgaataatctgttgcaacacctaagagaatcaactatcaaagaggacaaacaggttggttgatgagagcaaaggagccctccaagaagttgatcgatctgggcgtttgtttccttccgtttgatgtgaccatcagggagaccgtcgattgcttcagaagcaaagggctcatctagccatgtgaacatttccagatgtaccagggttactattgcttactagaatgaggcgagagctgcttagctcctttgacattccttctacttagtggcaattggtttggttacttaaacctatgctccatatgatccacgctgattgaattttggtttgttaatatgttttgggcaagcagtgctatgagatggagatgatggttaggcatgatctttctataggttaaaagaacagattatccaacagctgatggaacctgcattagagatattatgttgatgtcacagatttagttgatgctcatgtgaaagcgctcaacaaggcagacactagaaaagtcagtatttacaacgttggaacaggaagagatagagaggcccgcaaatagttaatctgggacaacatatctctgtactggccatagaggacaacaaaaaaaatcaaaagttgaagaatcaccaacggtgcctcctttgcaccctccagctcaagaacctgggcccgagccagttcaacaagtcatgcccacagctgaagtgctgaaccaacagatttactgggaatcaatgaatcagcccgaggcacatctgaaatagatcaaaacaaggtagtcgccttggtcgtggttccacatgataatccgccaaaagcacttgcttctaccagtcctggaagcgtggcgactagctggagcaaatcagattctgtgcgatgaaaagcaagtgaaagaggtatatcttttttacattaaaatatcaaagtactttgcagattttatttcagctctgttgcatgatgcactcgcgctactgtctactgcaagtaccatcaccataaactctgaacgctctatgttcggtttcatctttttctttaactagattcgctttcatgtttcttataggctattgttcaggtactaatttgccatagtgttggtctatgactgaatggtacaaaatacatgcaatgaatggatgatactttccagttaaatcatgtaattggaatacagtggtgccgtcagcggtgcggattgggggcttctagagaaagggtctagcgtcgtgccctgcttgacgaacagtgtgttgatatgtgccatcatcgcactgggaacgaacgtgatggctagcacggggagcatcttgagcatctgctttgtctccaccactcaccatgctctgagcctgtgttggtatgcagacttttccctttgtttcagaagaagatgcagttgcattgcacattgttggaacccacgatcaccacaaaattgagggaatatgtcattactcatttgcataactcattagtcattaccttgtcaaggtttatgctttccatcacgaacggttggagttgcaacataacgatactttggtataccaaataaagttactctgttcaccaaatgtagggttagtttttttgttgtgctaaagactgaacataatttgggtgtgttaatattttatttattgtctgc

SEQ ID NO: 134611 - DNA, 2532 bp, Zea Mays
agttccgcgagctcgggatctctgctccccatcccgcgcgtccatcttggtcaagaaaccctaaccagcacatccatcccacaggcctgccgacggcgcgtcgcccctaaaccctagaccccctgcggaaatctctagagcctgggccagctctgtgcgccagctcttgctccatctctccgcggcggcagcgcaacaaccgcacccatgaaagtcgccatcctcaccccccgcgagcctgccccatcctgcttagtgtcgtcccccgccaccgcgcagccgcaacccatctggataaggatgcatccgcttctcccatagccgccactacccctgcctgccctcggctacgaacacgaagatcccctggatggaggtggagctctcagaggcttatgatctagaactctatctcatactacggattccacagggtgaggagagatacgagcagggtcccaccggcgatgcgggtcccatcttcggcattgggagcaatccgcctactcggacacgaaggttctctgaggcggtgtagctatagatcatgcgggcaacggggaaggacgatagctacgcagcccacatcacgaaggcatataagtgggagttcgccgaaagggaaggtttgcagctggttgtgctgaatccagggactactctgggtccatttttcatgtcatcagtcaataccagcctgaataatctgttgcaacacctaagaggttgaaaattaaccaggccaacggcttgagtcggaccctgtcaacacagggtggtcgatgttagagacatggcacaatctcgatcgtgacgtatgagaacccatctacacagggttgtgcttggcgtccatggaatgtttgtttgacttcaccgatagaattgctgatatgtaccatgatttcccagttcatagaatcaactatcaaagaggacaaacaggttggttgatgagagcaaaggagccctccaagaagttgatcgatctgggcgtttgtttccttccgtttgatgtgaccatcagggagaccgtcgattgcttcagaagcaaagggctcatctagccatgtgaacatttccagatggttactattgcttactagaatgaggcgagagctgcttagctcctttgacattccttctacttagtggcaattggtttggttacttaaacctatgctccatatgatccacgctgattgaattttggtttgttaatatgttttgggcaagcagtgctatgagatggagatgatggttaggcatgatctttctataggttaaaagaacagattatccaacagctgatggaacctgcattagagatattatgttgatgtcacagatttagttgatgctcatgtgaaagcgctcaacaaggcagacactagaaaagtcagtatttacaacgttggaacaggaagaggtttggtaacacgagaattgtttatttatttgtataactattatttattcatgtggatagttgtaccctgcacaggttttaatcaatactttacttaatttacatggtaacaagatagagaggcccgcaaatagttaatctgggacaacatatctctgtactggccatagaggacaacaaaaaaaatcaaaagttgaagaatcaccaacggtgcctcctttgcaccctccagctcaagaacctgggcccgagccagttcaacaagtcatgcccacagctgaagtgctgaaccaacagatttactgggaatcaatgaatcagcccgaggcacatctgaaatagatcaaaacaaggtagtcgccttggtcgtggttccacatgataatccgccaaaagcacttgcttctaccagtcctggaagcgtggcgactagctggagcaaatcagattctgtgcgatgaaaagcaagtgaaagaggctattgttcaggtactaatttgccatagtgttggtctatgactgaatggtacaaaatacatgcaatgaatggatgatactttccagttaaatcatgtaattggaatacagtggtgccgtcagcggtgcggattgggggcttctagagaaagggtctagcgtcgtgccctgcttgacgaacagtgtgttgatatgtgccatcatcgcactgggaacgaacgtgatggctagcacggggagcatcttgagcatctgctttgtctccaccactcaccatgctctgagcctgtgttggtatgcagacttttccctttgtttcagaagaagatgcagttgcattgcacattgttggaacccacgatcaccacaaaattgagggaatatgtcattactcatttgcataactcattagtcattaccttgtcaaggtttatgctttccatcacgaacggttggagttgcaacataacgatactttggtataccaaataaagttactctgttcaccaaatgtagggttagtttttttgttgtgctaaagactgaacataatttgggtgtgttaatattttatttattgtctgcacatggtttgcgttcttatgatgatggctcatggatcctgt

SEQ ID NO: 134612 - DNA, 2739 bp, Zea Mays
agttccgcgagctcgggatctctgctccccatcccgcgcgtccatcttggtcaagaaaccctaaccagcacatccatcccacaggcctgccgacggcgcgtcgcccctaaaccctagaccccctgcggaaatctctagagcctgggccagctctgtgcgccagctcttgctccatctctccgcggcggcagcgcaacaaccgcacccatgaaagtcgccatcctcaccccccgcgagcctgccccatcctgcttagtgtcgtcccccgccaccgcgcagccgcaacccatctggataaggatgcatccgcttctcccatagccgccactacccctgcctgccctcggctacgaacacgaagatcccctggatggaggtggagctctcagaggcttatgatctagaactctatctcatactacggattccacagggtgaggagagatacgagcagggtcccaccggcgatgcgggtcccatcttcggcattgggagcaatccgcctactcggacacgaaggttctctgaggcggtgtagctatagatcatgcgggcaacggggaaggacgatagctacgcagcccacatcacgaaggcatataagtgggagttcgccgaaagggaaggtttgcagctggttgtgctgaatccagggactactctgggtccatttttcatgtcatcagtcaataccagcctgaataatctgttgcaacacctaagaggttgaaaattaaccaggccaacggcttgagtcggaccctgtcaacacagggtggtcgatgttagagacatggcacaatctcgatcgtgacgtatgagaacccatctacacagggttgtgcttggcgtccatggaatgtttgtttgacttcaccgatagaattgctgatatgtaccatgatttcccagttcatagaatcaactatcaaagaggacaaacaggttggttgatgagagcaaaggagccctccaagaagttgatcgatctgggcgtttgtttccttccgtttgatgtgaccatcagggagaccgtcgattgcttcagaagcaaagggctcatctagccatgtgaacatttccagatgtaccagggttactattgcttactagaatgaggcgagagctgcttagctcctttgacattccttctacttagtggcaattggtttggttacttaaacctatgctccatatgatccacgctgattgaattttggtttgttaatatgttttgggcaagcagtgctatgagatggagatgatggttaggcatgatctttctataggttaaaagaacagattatccaacagctgatggaacctgcattagagatattatgttgatgtcacagatttagttgatgctcatgtgaaagcgctcaacaaggcagacactagaaaagtcagtatttacaacgttggaacaggaagaggtttggtaacacgagaattgtttatttatttgtataactattatttattcatgtggatagttgtaccctgcacaggttttaatcaatactttacttaatttacatggtaacaagatagagaggcccgcaaatagttaatctgggacaacatatctctgtactggccatagaggacaacaaaaaaaatcaaaagttgaagaatcaccaacggtgcctcctttgcaccctccagctcaagaacctgggcccgagccagttcaacaagtcatgcccacagctgaagtgctgaaccaacagatttactgggaatcaatgaatcagcccgaggcacatctgaaatagatcaaaacaaggtagtcgccttggtcgtggttccacatgataatccgccaaaagcacttgcttctaccagtcctggaagcgtggcgactagctggagcaaatcagattctgtgcgatgaaaagcaagtgaaagaggtatatcttttttacattaaaatatcaaagtactttgcagattttatttcagctctgttgcatgatgcactcgcgctactgtctactgcaagtaccatcaccataaactctgaacgctctatgttcggtttcatctttttctttaactagattcgctttcatgtttcttataggctattgttcaggtactaatttgccatagtgttggtctatgactgaatggtacaaaatacatgcaatgaatggatgatactttccagttaaatcatgtaattggaatacagtggtgccgtcagcggtgcggattgggggcttctagagaaagggtctagcgtcgtgccctgcttgacgaacagtgtgttgatatgtgccatcatcgcactgggaacgaacgtgatggctagcacggggagcatcttgagcatctgctttgtctccaccactcaccatgctctgagcctgtgttggtatgcagacttttccctttgtttcagaagaagatgcagttgcattgcacattgttggaacccacgatcaccacaaaattgagggaatatgtcattactcatttgcataactcattagtcattaccttgtcaaggtttatgctttccatcacgaacggttggagttgcaacataacgatactttggtataccaaataaagttactctgttcaccaaatgtagggttagtttttttgttgtgctaaagactgaacataatttgggtgtgttaatattttatttattgtctgcacatggtttgcgttcttatgatgatggctcatggatcctgtaaaatacgtgttaggattgggagatcc

SEQ ID NO: 134613 - DNA, 1978 bp, Zea Mays
cactgcatcacaactgaatcgcaaatgggttttcatgcaataaacaaacttatagcgcaagtcgttcttgaaggttgaaaattaaccaggccaacggcttgagtcggaccctgtcaacacagggtggtcgatgttagagacatggcacaatctcgatcgtgacgtatgagaacccatctacacagggttgtgcttggcgtccatggaatgtttgtttgacttcaccgatagaattgctgatatgtaccatgatttcccagttcataggtcatacattttctaagaacatgcatcaggtttgtgtaagcagggctagctgttcattttggtaatgacatttttacttttttcacatcagaatcaactatcaaagaggacaaacaggttggttgatgagagcaaaggagccctccaagaagttgatcgatctgggcgtttgtttccttccgtttgatgtgaccatcagggagaccgtcgattgcttcagaagcaaagggctcatctagccatgtgaacatttccagatgtaccagggttactattgcttactagaatgaggcgagagctgcttagctcctttgacattccttctacttagtggcaattggtttggttacttaaacctatgctccatatgatccacgctgattgaattttggtttgttaatatgttttgggcaagcagtgctatgagatggagatgatggttaggcatgatctttctataggttaaaagaacagattatccaacagctgatggaacctgcattagagatattatgttgatgtcacagatttagttgatgctcatgtgaaagcgctcaacaaggcagacactagaaaagtcagtatttacaacgttggaacaggaagaggtttggtaacacgagaattgtttatttatttgtataactattatttattcatgtggatagttgtaccctgcacaggttttaatcaatactttacttaatttacatggtaacaagatagagaggcccgcaaatagttaatctgggacaacatatctctgtactggccatagaggacaacaaaaaaaatcaaaagttgaagaatcaccaacggtgcctcctttgcaccctccagctcaagaacctgggcccgagccagttcaacaagtcatgcccacagctgaagtgctgaaccaacagatttactgggaatcaatgaatcagcccgaggcacatctgaaatagatcaaaacaaggtagtcgccttggtcgtggttccacatgataatccgccaaaagcacttgcttctaccagtcctggaagcgtggcgactagctggagcaaatcagattctgtgcgatgaaaagcaagtgaaagaggctattgttcaggtactaatttgccatagtgttggtctatgactgaatggtacaaaatacatgcaatgaatggatgatactttccagttaaatcatgtaattggaatacagtggtgccgtcagcggtgcggattgggggcttctagagaaagggtctagcgtcgtgccctgcttgacgaacagtgtgttgatatgtgccatcatcgcactgggaacgaacgtgatggctagcacggggagcatcttgagcatctgctttgtctccaccactcaccatgctctgagcctgtgttggtatgcagacttttccctttgtttcagaagaagatgcagttgcattgcacattgttggaacccacgatcaccacaaaattgagggaatatgtcattactcatttgcataactcattagtcattaccttgtcaaggtttatgctttccatcacgaacggttggagttgcaacataacgatactttggtataccaaataaagttactctgttcaccaaatgtagggttagtttttttgttgtgctaaagactgaacataatttgggtgtgttaatattttatttattgtctgcacatggtttgcgttcttatgatgatggctcatggatcctgt

SEQ ID NO: 134614 - DNA, 1993 bp, Zea Mays
aaaccactggacctcatctgtttctcccctggacgtagctgtagccactagccagtggacggtgccgttacaaaaatataacccggaaaccgacgagctccccccgctgctgccggctgttcccggaggccggagcgccgtttcacgcgtcgcccagctcaaaggccgccacatctgcttccgcgaaccggcggccctccgttaccattcctattatatataggcggctttaccaccgttaccctctctctcatcgctcccctcgccgctgctccccgcccaccatccgccactggattttagccaccgcaagtaccggcagctccagcaagagtgccactcccacccacacccacactttgatgcgcgtagccgccgcggtccatggcctccgccgtcaccagtaacctccccgctgccgcgccggtgccgtacccgcacaggtggctcagcccgcgcgtgtccatcagccgcgacgtggccgcggatcccgtggccacgaccacgccagagcccgcgatctccaaggacttcatcgacttcgagttcagcctgggcggctccgccaccatgctccccgcggacgagctgttcgccgacggcaagctgctgcctctaaggaaggcagcgccttcgccggatccggcggaggccgccgcagccgccgccgcgcccccgccggtgcggccggaggagataatgccgccggcgcccagcagcgcggagccgatcaagcccctccgcgccgcggcggctgacggcgccgacccctacgtgttgtcgcccaaggcgccgagctgctccggccgctggcgcgagctgctcgggctcaagagagctgcggacgcgcggagcccgtgcgccgccaaggcctcggcggtggcgaagacccccgcgcccgcggccaggtccgcggcggcgaggtcgctcaagctcctgctccatcggaacaccgggcgcgcgccggacctcgcgtcggcgccgctgctccgcgacagctccgactcggaggcgtcgctgtcgctgtcgctggcgtcctcctcccgcttctcgcactcgtcgtcgtcgtcctcctccggccacgacgacgcgccccgcctctcgctcgactcggccgccgccgccgccgccgccgacccgccccgcttccgcctggcccgctcctcccactcccactccctccaccgccactccacctcctccgcccgcgcgcggcgccggccgtctccgccggcgctaccgcgctgcctgtccgtggactccccgcgcatgaactcgtcgggcaagattgtgttccaggggctagaactggaacgcagctccagctccccctgcagcttccacgcggcggcgcccaagccgcggttccgcgccgtggaccggtcctactcgtccgcctgcgtccgcgtggcgcccgtggtgctgaacgtctccgtgtgcccgcgccccgtgttcggcttcttcaaggacaggaaggactccagcgccaggtcgtcgtcgctggggcggagagcgccgccgccgcaagggtggagcggcgagctggtggcgagatcgtccggctgatttgacgcccccgtttgtttgacttgaccaggcagccgcgggacctcgtgcttgtctcgttcccgtgcacagggctgttcgttgccatcgaccgtcatgatgatgagaggatggatagcttggctgccggttggtcttaactgattttgtttgttctttggagaagacggccgcgggggaggctgtattttttttctttcttttgctcctttttcacaaccgcgatgcaaacaaaacaaaatgatggcagcatttctggggcagagcgacggcggaaatcccagacgccagtcgtcacgctcacgcagttgcaagccctcgttgtctggggttacctgcactgcatcggagtcagcacatatgccgggaagcgggtgccggttcattcatgggagaggggcagaggcgaagcgcaattgggggccag

SEQ ID NO: 134615 - DNA, 1659 bp, Zea Mays
ccggaggccggagcgccgtttcacgcgtcgcccagctcaaaggccgccacatctgcttccgcgaaccggcggccctccgttaccattcctattatatataggcggctttaccaccgttaccctctctctcatcgctcccctcgccgctgctccccgcccaccatccgccactggattttagccaccgcaagtaccggcagctccagcaagagtgccactcccacccacacccacactttgatgcgcgtagccgccgcggtccatggcctccgccgtcaccagtaacctccccgctgccgcgccggtgccgtacccgcacaggtggctcagcccgcgcgtgtccatcagccgcgacgtggccgcggatcccgtggccacgaccacgccagagcccgcgatctccaaggacttcatcgacttcgagttcagcctgggcggctccgccaccatgctccccgcggacgagctgttcgccgacggcaagctgctgcctctaaggaaggcagcgccttcgccggatccggcggaggccgccgcagccgccgccgcgcccccgccggtgcggccggaggagataatgccgccggcgcccagcagcgcggagccgatcaagcccctccgcgccgcggcggctgacggcgccgacccctacgtgttgtcgcccaaggcgccgagctgctccggccgctggcgcgagctgctcgggctcaagagagctgcggacgcgcggagcccgtgcgccgccaaggcctcggcggtggcgaagacccccgcgcccgcggccaggtccgcggcggcgaggtcgctcaagctcctgctccatcggaacaccgggcgcgcgccggacctcgcgtcggcgccgctgctccgcgacagctccgactcggaggcgtcgctgtcgctgtcgctggcgtcctcctcccgcttctcgcactcgtcgtcgtcgtcctcctccggccacgacgacgcgccccgcctctcgctcgactcggccgccgccgccgccgccgccgacccgccccgcttccgcctggcccgctcctcccactcccactccctccaccgccactccacctcctccgcccgcgcgcggcgccggccgtctccgccggcgctaccgcgctgcctgtccgtggactccccgcgcatgaactcgtcgggcaagattgtgttccaggggctagaactggaacgcagctccagctccccctgcagcttccacgcggcggcgcccaagccgcggttccgcgccgtggaccggtcctactcgtccgcctgcgtccgcgtggcgcccgtggtgctgaacgtctccgtgtgcccgcgccccgtgttcggcttcttcaaggacaggaaggactccagcgccaggtcgtcgtcgctggggcggagagcgccgccgccgcaagggtggagcggcgagctggtggcgagatcgtccggctgatttgacgcccccgtttgtttgacttgaccaggcagccgcgggacctcgtgcttgtctcgttcccgtgcacagggctgttcgttgccatcgaccgtcatgatgatgagaggatggatagcttggctgccggttggtcttaactgattttgtttgttctttggagaagacggccgcgggggaggctgtattttttttctttcttttgctcctttttc

SEQ ID NO: 134616 - DNA, 134 bp, Zea Mays
cgctgcagcgcatgcaggcgggccatccgcccatccctcccccaggcccagacgcctgcctcagtgcaggtgcagcgtgtagaccaccggccaccgcgcgggttcatgagagctgagagcgtgcgtggaccggg

SEQ ID NO: 134617 - DNA, 95 bp, Zea Mays
ggagtagtgcttggggaagcaaagcaactgatggatggccagccactggcagatctgtttggtccgttgggttagttcgacttggttttgtttaa

SEQ ID NO: 134618 - DNA, 843 bp, Zea Mays
gggaggagcccaaaccctagaccccgcagccaaagatcccaccgctccaccagaggcgatcgaggagaggactcgagacaacccaaccccgccgccgagctacatcgatccatcgatggccccggacacggagaccacgcttgcgatccgcgacgacgaacccgccgccgccgaggtagatcgatcgatggccacggacacggagtcgccgacgccgacgccggtgccgactcttgcgatccgcgacgaggaagaacccgccgccgccgccggagccggagccggagcccaggtcctagaggaaagaagcgtcgccgtcatcctgcaggagctgctccagcccagggaccggcgcgtccaggcttcggccttcttcttcgcctgcggaggctccgtggtgctccacgggaccgtggccaacctcgcggacaacccggagcatgtcctgctcggattcgggctgttcacggtcggcgcggcgctcgccttcctcacgctcagcggctccgaccgcctcgggcgcgctgcggctcgcgtggaggaaaagctcagaggattgttccgctcgcccgctggctagatcctgcagctagctagtagcgaagcgaaccctcgacggtccttctgtttgagtgtgctaatagttctactagtgtgccggcgtgggctgatgctgggctcaccatgtggtttaattttgagaatgtgtgctttgattctgtgtatattacgagataagtgtgatagatgtagtggtaactaaataattaaagttctccttagggtcgattgtaattccaatatcccctttgaatataatgtttcctttcatatgaccttcca

SEQ ID NO: 134619 - DNA, 376 bp, Zea Mays
tcacagcctgtacatatgatatcatgacacgtggacaagtttcatgattttctgactttgtttgtgttttatacaatttttaaacatgtggatgccaagttcacggccatgtttagtgagcatgttgctcgaagtttccggtacgcttctgcaatcggtcgtaacttatgctaagtaacatgaatatcattttttcatgcacggttttccaagtttcgagtgacctgcagttcaaatttgaattttccaaagaaattcaaataaacgaactaaatctactaactatggaaactatgttataattgtccacaaatgatacatgtaggtctacatagtgtaggaacataccacaaaaagtttgggagacaaaataaaa

SEQ ID NO: 134620 - DNA, 1505 bp, Zea Mays
gtcaccgcccggtcggccgcgtccgcctcccttccctccctagctctttctcccccacctctcgtgtcccggatcgacgctgcagctccgtcctcgcctccacagtttagcctccagctacaccctatctatcgccacccgcgtcccgtcctcctccatctgtaaccactccccgtcgtctctttcgcggtctcgcctcctgcagcctctcgcccagaaagggaaaccgcatctgctcccgtctcccgcctcggcgccgccgcctagtcgacctgagcccagagaggggggggcgtcgaggccgtcgggcgctcagatctggggcgggagtggcaagcgaaggacatgcagatgcacgtcggaggaggcgcggccgacagcccggaggcgacgcggccgagccgctacgagtcgcagaagcggcgggactggcacacgttcgggcagtacctgcgcaaccaccggccgccgctggagctggcgcggtgcagcggcgcgcacgtgctcgagttcctgcgctacctcgaccagttcggcaagaccaaggtccacgcggcggggtgccccttcttcggccacccgtcgccgcccgcgccgtgcccgtgcccgctgcgccaggcttggggcagcctcgacgcgctcgtcggccgcctgcgcgccgccttcgaggagcacgggggccggcccgaggccaaccccttcggcgcgcgcgccgtgcgcctctacctccgcgaggtccgcgacagccaggccaaggcgcgcggcattgcctacgagaagaagcgccggaagcggccgtcgtcgttcgcgtccgcctcgtcccagtcgtcgccgcaggccgcgaccagcccgccgcagcaggccgctcccgcttcctcgccgatcctgtcggacgcggcggctgagagggccgacgtgcgggcgttcgtgtctgacgccggggcacggggcacgggcacgggcaccagcaacagcaccacttcttcatgccgcacccgcagttcctgcacgggttcagcctgctgccgggaaaccaccgaagcggtggctggcaatggcaatggcagcagcagcagcgctagcgtcgccgccagcagcggggacgagatagcgctggcactggcggcggcggaggaggcgcacgcggcggggtgcatgctgccgttgtcggtgttcaactaggcaggcgtatagccaaaagcgaggtagggcgaatgaatagtccgggtgcttgcttatccggttccggtgttcatgcatgatcgttctcactgtcgcgatggagttgaggcgatcaacacacgtacgttctgcttgctgttcttaagtaattcctattcccatctcttttttgctcatgcatttcctgctgtgctgctgctgctgggaaatagtattagtagctgtgcttggtactgtagggtttgcagaatcctgcttggtttgtgtatgcaatgcaaatgatgacggaggtataatataatggaaggcttaatttccaggct

SEQ ID NO: 134621 - DNA, 1554 bp, Zea Mays
tcagaggcgccgtacttgccctggaccaggcctgattctgattctgattccatctcccctgttgcaaaccctagttctttactcctcttttctcgattaagtagcagcagaatccaggaccacgaaatcccgaactagttgtttacaatttcttctctgcttcccactttccgccctctcgaaagcttctctcccttctgcacaagctcaggattataggtactcctagtataccacaagctacaagcatataatccagctcgctcctggtcctgggtgatggcggcgaaaagctcagtcatttgattcggtgttttggttcccggcgtcgccgtcgcactaaccgagggggttcttgcatgcagatctggggcgggagtggcaagcgaaggacatgcagatgcacgtcggaggaggcgcggccgacagcccggaggcgacgcggccgagccgctacgagtcgcagaagcggcgggactggcacacgttcgggcagtacctgcgcaaccaccggccgccgctggagctggcgcggtgcagcggcgcgcacgtgctcgagttcctgcgctacctcgaccagttcggcaagaccaaggtccacgcggcggggtgccccttcttcggccacccgtcgccgcccgcgccgtgcccgtgcccgctgcgccaggcttggggcagcctcgacgcgctcgtcggccgcctgcgcgccgccttcgaggagcacgggggccggcccgaggccaaccccttcggcgcgcgcgccgtgcgcctctacctccgcgaggtccgcgacagccaggccaaggcgcgcggcattgcctacgagaagaagcgccggaagcggccgtcgtcgttcgcgtccgcctcgtcccagtcgtcgccgcaggccgcgaccagcccgccgcagcaggccgctcccgcttcctcgccgatcctgtcggacgcggcggctgagagggccgacgtgcgggcgttcgtgtctgacgccggggcacggggcacgggcacgggcaccagcaacagcaccacttcttcatgccgcacccgcagttcctgcacgggttcagcctgctgccgggaaaccaccgaagcggtggctggcaatggcaatggcagcagcagcagcgctagcgtcgccgccagcagcggggacgagatagcgctggcactggcggcggcggaggaggcgcacgcggcggggtgcatgctgccgttgtcggtgttcaactaggcaggcgtatagccaaaagcgaggtagggcgaatgaatagtccgggtgcttgcttatccggttccggtgttcatgcatgatcgttctcactgtcgcgatggagttgaggcgatcaacacacgtacgttctgcttgctgttcttaagtaattcctattcccatctcttttttgctcatgcatttcctgctgtgctgctgctgctgggaaatagtattagtagctgtgcttggtactgtagggtttgcagaatcctgcttggtttgtgtatgcaatgcaaatgatgacggaggtataatataatggaaggcttaatttccaggct

SEQ ID NO: 134622 - DNA, 1457 bp, Zea Mays
gttttcagccccagctagcgtgctcgtcctcaccggcgaggtgccactagacactagtcggactcagatcttgtacgtcatgcccacctcgatgagggaggtgttggggatgccgagctccacggcgggccgccgcgagttgcgccggaggaacccgtacaccacgttgatggcgaacttcttcacggcgggcgacgactcgtgggcctgcacgcacgtgtgcccgatcatgtacgacacgccggactccagctcctccagcagcgtcttcacctcctcctcgctgccggcggcggccccgctcggctcctcgaaccggaccctcctgccggcgtcgatctcgctgcacgacggcggcgccgagcccgcgtccacgtgcgccgggatcaccgacagctccccggacccggacacgcatcctcccgccttggcggcggcggcggcgtcctgcagctgcaggaactccaccaccttcatcagcagctggttctcgaagttgaagtggtcccgccgcccttccttgtacccgtagcgcacgacgcagcggaacatccggtgcgccggcgcgccgacccgccccaccaggaaccgctcgccggggggcacacggggcaccgccagcgtctgcagggacacgaagaccagcacccggtggaacgccgggaagttggtgacgaagtgcgcgaacacggggggcacgccgccagcggcggcgctggcggcgtagacgaagcccacccccgggacgcgcaccaggcccatgccggcgctcaggcccaggaaccggtccaggcgcaccttgctctgcgcctcgtgctcccgcttcctcttcgtgccgtagtgccacgtcgacatggccagcagcgtgcccagcgacagcagcagcggcagccacccgccgtgcggcaccttggcgaggcacgccgacaggtacgtcagctccacggacccgaaccccgccgtgaagagcgccgccagcgccacgctccggctccacacgaccgtgatgacgaggaacatcaggcatgtggtcgcgaacatcaccaggatcacggcgagccctggtgggacaagggatcagtagaaatgttgcagattttgcagcagttctgcgtcgcaggagaacctacgaatggaaattggtacgtaccgtaggcgtttccgatcatttcggtgtcgcggaagccgacggtgacggccaggcacaggaacatgagggcccagttcacctccggtatgtagatctggccgtggacgtggctggatgtgtgcacgatctttatccgcgggaagcaccccaaagccctggactggcttatgatcgagaacgtagctgagatgatggcctggctcccaacgactgtggctagtgttgcgatgatcaggacaggccagaacactctgtctgagaaaagaagagaagaacagaaagagattgaggaaaattacaagaataa

SEQ ID NO: 134623 - DNA, 2801 bp, Zea Mays
atcttcccccgccccgcctctccctttcttctttaccaagccccccacacccaaacccctcctcccctgctctgcctgccccatgtccccgcgcctctgaccaaccaggctgccggaaccctacccggtgccccgtgatgcccccgcggccgtcgctccactctctgctcctcatggccgcctccgccgccgcggccagcggggactcgggcccgctcctcgctgcgcgccgccgtctagctgcgacggccgccgcaggggggcaccgcatccggctgctccactccttctcgccgggacgcgtccccaggcggcctgaggtggtctgctgcgtgcgcagcgcccccgactcgcggcggtcggcccccgcccccccgtgctccaggaacgttctttcggcaaaaaactactcaactgcttctgaggagaggcttgggaagatcattcagaagttgaaaaacgaaggtattaatcccaagcagtggagacttggaaattttcagcgcatgttgtgtccacagtgcaatggtggatctagtgaggaattgagtctcagtgtctacatccgaaaggatggcataaatgcaacatggaactgttttaggtctaagtgtggctggagaggttttgtccaggctgatggagttaccaacatatcccaaggaaagagtggcatagaaagtgaaactgaccaagaggttgaagctaagaaggcagcaaataaggtttatagaaaaatcagtgacgaggacctcaatcttgagccactctgtgatgagcttgtagagtactttgctacgagaatgatttcggcggaaacacttcggaggaataaagtcatgcaacgtaactggaataataagatatccattgcttttacctatagacgtgatggagctcttgttggctgcaaatacagggcagtcgataagacattttcacaggaggcaaacacggagaaaattttttatggtctggacgatataaagcgtgcacatgatgttatcattgtggagggtgaaattgataagctgtccatggatgaagctggttatcgtaattgtgtcagtgtgccagatggtgcaccacccaaagtgtccagtaagattccagaccaagaacaggataagaagtatagctatctttggaactgcaaagactatcttgactcggcatctaggataatattagcaaccgataatgatcgtccaggtcaggctctggctgaggaacttgctcgtcggcttggtaaagaaagatgttggagagtcaattggccgaagaagaatgatacagatacttgcaaagatgcaaatgaggttctaatgtttttaggtccacaagcattgagaaaggttatagaagatgcagaactgtatcctataagaggccttttttcattcgaacagttcttcccagagattgacaattactttcttggaatacatggtgatgagcttggtattcatactggatggaaatctatggatgatctttacaaggttgttcctggtgaattgactgttgttactggagtaccaaattctggtaaaagcgagtggatagatgctttattgtgcaatataaacaaacaatctgggtggaaatttgttctgtgctcaatggaaaacaaggtaaaggagcatgctaggaaactcttagagaagcacattcagaagccattctttaatgctaggtatggtgggtctgcacagcggatgactcctgatgaatttgaagcaggaaaacaatggttaaataaaactttccatcttatccggtgtgaagatgatagccttccatctattaattgggttcttgaccttgcgaaagctgcagttctaagacatggagtgcgtggtctggtgatagatccttataatgaacttgaccatcagcgcccctcaaaccagacggaaacagaatatgtcagccagattctgaccaagattaagcgctttgctcagcaccattcatgtcatgtatggtttgttgcacatcctagacagcttcaaaactggaatggaggcccaccaaatatatacgacataagtggaagcgcacattttataaacaaatgtgataatggaattgtcatccacagaaacagggacccaaatgctggcccccttgataccgtgcaggtttgtgtgaggaaggtgcggaataaagtggttgggcaaataggagatgctttcctgacatatgaccgggttactggtgaattcaaggatgctggtaaggccactacagcacccagtgcaaaagcggcaaaacagtcacgcaaagaggcatataagatgccatttcaacatgctgctgaagacggtgagaatagtggtctgtgactgcataagaaagacatgttcctgctgatttgatgtatctgtatcattcaacgaaagtgagatttcacgattgtttctggggatggcctgctggagctcaggcagtacctcattgaactggatttgaaaccccaggatttcaccgattcctgctgcaaatgaagttgaaagctaaacttgctcagatgcgcacaagacattggcggggtggtgtatagtagtaagattaatgtaaatcaattgccacaccaggtgctaatctatgaacatttgggtgggttatatcagtagctaaactttagcagctaaggtagtacgattaatcatgcaggctttcccaaaaaattgtagcagttggaagggtttttatgttcacccttctcaacgcctgaccaggaaccaatgcctttaatgtggccgtattttttaaaaaagatgcctttaatgtgaccc

SEQ ID NO: 134624 - DNA, 456 bp, Zea Mays
atggagcaggccgacaggggaccgagtagaggaagctccggcgcgcgtagaggagcctggacgggcgcgacagcgggcgcggccatggaggaagagcgcgcgcagcagctagaggccgagctgggaaggtccaggttgcagggaaggaagagcgctgggagagcagctcggctggaggaacaagggagggacgcggccgagcagcagataagcccgggaccgagcagggcgcagcgaactgggacaggggcatcccggcgagctcgccatgggaggagcgaaggggccggggcgagctcggccggtggtggctgtgcgcagggagggagaccacgacgcggcacagggggcgagcagacacccggatgtgcggcgcggagggagatgggcgcgcgcagcggcgagccggaggcagtacgccggccagggaggaagacggacggtcggcaagcttga

SEQ ID NO: 134625 - DNA, 897 bp, Zea Mays
aattgcatgcccaacttcatggtaagcaacaagacttttgctcttcccgtctgtcatcacggtcccttccataccagctacaattctgtcaatagaatcatcaatctcttttgaagaaattgctgtccttccccgtcttccagccagaatggctgcttcattcagaaggtttgccaagtctgctccgctgaacccaggtgttctcattgctatgacatcaagagaaacatcagaatcaaatttcttgttgctaccatgcacttttagaatctctgtccttccacgtacatcaggaacgtcgacagacacctgtgtaatgaattacaaggcatactgtctatcaaaacgcccaggtctaagtaaagcggaatccaatatgtcagcccggttagtggcagcaataacaataattccagtgttgccctcgaaaccatccatctcagttagtagttgattgagagtctgctccctttcatcatttccaccaccaatacctgtacctctttgccttccaacagcatcaatttcatcaacaaacactatgcaaggagcattctccttggccttcttgaaaaggtcacgaactctggaagctccaacaccaacaaacatctccacaaattcagaacctgaaattgagaaaaatggcacgccagcctctcctgcaattgccttggcaagcaaagttttacccgtcccaggaggaccgacaagcagaacacccttaggaatgcgagcaccaacagcagtgaacctttcgggtttcttcaagaactcaaccacttccatgaagtcttgcttcgcttcatcgacaccagcaacatcatcaaatgtaacaccagtgttgggttccatctgaaacttggccctagattgaccaaaaccaaggggaaagcc

SEQ ID NO: 134626 - DNA, 2075 bp, Zea Mays
atttcaaacgcatctcccccctcacctcgctcgcctacgtacgtctctctctctccgccgcgaccccccacaggcggcgccggcgccggcgcccgcgctgcagctaaaccaaaccctaagccacggccaccgccctacgccgcgggctctccgcgatgcgccggtgcgcggaggcgatcgcgagggccgtggtcgagttcctcgacgccgtcatcctggccttcatccgctcgtgcttcggcgcgcgcccccgccgcggctccggcctccgagtaagaccaacccctgcccctcctcgctctccgtccctaagcgctcatctggcggctgtctcgtggtcatcatcgtttcaggatgcgctcgtgcgcggggatcgggccgcggaggtcatctgggatgaggaaggcttggtaagggacggacgatttcatgaggatttggctgacgggtgtggaattgatgaggagctcagacgcgaggcaagttacctgaagctatgcggcactatctctgaaaccccagctgaactacgcaatgagcaatcgtatgaaaacaatttggaaactactaatgagtgtgatagcaagctcacgtatggaccaccggcaaattgcaaattgctgtttgaagctaattcatcacaagggcaacgcaatcccagatgtgaggagcgtcactcgctcaggtctatactgaacagtgaagatgctgggcgtcatcatggagctgaatatgttcctcgttcagcttcctcggaaaagaggctgtttcaaaacatgcaacacaagccacttgattctggtggttcgccgtttccaactcctctagttctcagggatgacatgcagacccctgggacagcatacgcttcacacagagggacctctatatctggaaagcgtgtgcggactcggaaacaattcatataccctgtcctcagatccatcgagaacagacttcagcagattgaactgacagaagactcttcaccattggcatcgtccgatcctctaaaggagagagacttgggagcagattctaccaaggatccaacccaagcgtcttcaacttcagtggtcaaatcaggactgtctgaaactccatcatattctgcacctgatcctaatgcctcatatggagtagaagaatcactgtcaaaatccaactcggatgaaaagaacgctgcactgagcctgtcccgctggctgaaatcttcctccgcagatgctgagaatcaagatgatgaagactgcagctttctaactgagaagcctgtcttcatggttgcacctgatctcaacttggataccagtaaccctactcctaggttgcccaaggcatgggatggcaacggtatccccaacacaacgaccagatacagagaggatcagagggtcagttggcacaccacgccatttgaacaaagactgctgaaggtgttgtctgatgaggaccgttgccctccaaggaaagtcgtccgggggaagctgttccatctcgaggagacagctgagtagcgggcagggttatcatattagcccaactgtgatgaggctgccagcgacctgttatgaaactgagctcagaagctggtaccgtcatgcatgctgctgaaggtgccgtgtacaaatagcataatttctgttggggtgtgatgctgtgtataaatgacagtttgagctgggttgtgaatatgagttactgtaccgtcatgcatgcagcattgttggctcactgctcacaagcacaccggtctgtagctcactctatggtcgcaccagcactgacatgagtgaaacgtacatttgttttctatgtatttgtgtctgaatacaggcttcaaggccttatgtgtcacatacaggcatgaaaagaaaattgttacatacatatggcaccactttcttgttaataacatctgaaagtctatattttttcacgtattgtgacaactgttacccgtcagcctcttgtgcaggtgaaacttccgggtatgtatgtgcacaagtcatcattgaggtatgtatgtacctcttgccccactttgatccatctctctacaacggcatcatctt

SEQ ID NO: 134627 - DNA, 1994 bp, Zea Mays
atttcaaacgcatctcccccctcacctcgctcgcctacgtacgtctctctctctccgccgcgaccccccacaggcggcgccggcgccggcgcccgcgctgcagctaaaccaaaccctaagccacggccaccgccctacgccgcgggctctccgcgatgcgccggtgcgcggaggcgatcgcgagggccgtggtcgagttcctcgacgccgtcatcctggccttcatccgctcgtgcttcggcgcgcgcccccgccgcggctccggcctccgagatgcgctcgtgcgcggggatcgggccgcggaggtcatctgggatgaggaaggcttggtaagggacggacgatttcatgaggatttggctgacgggtgtggaattgatgaggagctcagacgcgaggcaagttacctgaagctatgcggcactatctctgaaaccccagctgaactacgcaatgagcaatcgtatgaaaacaatttggaaactactaatgagtgtgatagcaagctcacgtatggaccaccggcaaattgcaaattgctgtttgaagctaattcatcacaagggcaacgcaatcccagatgtgaggagcgtcactcgctcaggtctatactgaacagtgaagatgctgggcgtcatcatggagctgaatatgttcctcgttcagcttcctcggaaaagaggctgtttcaaaacatgcaacacaagccacttgattctggtggttcgccgtttccaactcctctagttctcagggatgacatgcagacccctgggacagcatacgcttcacacagagggacctctatatctggaaagcgtgtgcggactcggaaacaattcatataccctgtcctcagatccatcgagaacagacttcagcagattgaactgacagaagactcttcaccattggcatcgtccgatcctctaaaggagagagacttgggagcagattctaccaaggatccaacccaagcgtcttcaacttcagtggtcaaatcaggactgtctgaaactccatcatattctgcacctgatcctaatgcctcatatggagtagaagaatcactgtcaaaatccaactcggatgaaaagaacgctgcactgagcctgtcccgctggctgaaatcttcctccgcagatgctgagaatcaagatgatgaagactgcagctttctaactgagaagcctgtcttcatggttgcacctgatctcaacttggataccagtaaccctactcctaggttgcccaaggcatgggatggcaacggtatccccaacacaacgaccagatacagagaggatcagagggtcagttggcacaccacgccatttgaacaaagactgctgaaggtgttgtctgatgaggaccgttgccctccaaggaaagtcgtccgggggaagctgttccatctcgaggagacagctgagtagcgggcagggttatcatattagcccaactgtgatgaggctgccagcgacctgttatgaaactgagctcagaagctggtaccgtcatgcatgctgctgaaggtgccgtgtacaaatagcataatttctgttggggtgtgatgctgtgtataaatgacagtttgagctgggttgtgaatatgagttactgtaccgtcatgcatgcagcattgttggctcactgctcacaagcacaccggtctgtagctcactctatggtcgcaccagcactgacatgagtgaaacgtacatttgttttctatgtatttgtgtctgaatacaggcttcaaggccttatgtgtcacatacaggcatgaaaagaaaattgttacatacatatggcaccactttcttgttaataacatctgaaagtctatattttttcacgtattgtgacaactgttacccgtcagcctcttgtgcaggtgaaacttccgggtatgtatgtgcacaagtcatcattgaggtatgtatgtacctcttgccccactttgatccatctctctacaacggcatcatctt

SEQ ID NO: 134628 - DNA, 1979 bp, Zea Mays
atttcaaacgcatctcccccctcacctcgctcgcctacgtacgtctctctctctccgccgcgaccccccacaggcggcgccggcgccggcgcccgcgctgcagctaaaccaaaccctaagccacggccaccgccctacgccgcgggctctccgcgatgcgccggtgcgcggaggcgatcgcgagggccgtggtcgagttcctcgacgccgtcatcctggccttcatccgctcgtgcttcggcgcgcgcccccgccgcggctccggcctccgagatgcgctcgtgcgcggggatcgggccgcggaggtcatctgggatgaggaaggcttggtaagggacggacgatttcatgaggatttggctgacgggtgtggaattgatgaggagctcagacgcgaggcaagttacctgaagctatgcggcactatctctgaaaccccagctgaactacgcaatgagcaatcgtatgaaaacaatttggaaactactaatgagtgtgatagcaagctcacgtatggaccaccggcaaattgcaaattgctgtttgaagctaattcatcacaaggatgtgaggagcgtcactcgctcaggtctatactgaacagtgaagatgctgggcgtcatcatggagctgaatatgttcctcgttcagcttcctcggaaaagaggctgtttcaaaacatgcaacacaagccacttgattctggtggttcgccgtttccaactcctctagttctcagggatgacatgcagacccctgggacagcatacgcttcacacagagggacctctatatctggaaagcgtgtgcggactcggaaacaattcatataccctgtcctcagatccatcgagaacagacttcagcagattgaactgacagaagactcttcaccattggcatcgtccgatcctctaaaggagagagacttgggagcagattctaccaaggatccaacccaagcgtcttcaacttcagtggtcaaatcaggactgtctgaaactccatcatattctgcacctgatcctaatgcctcatatggagtagaagaatcactgtcaaaatccaactcggatgaaaagaacgctgcactgagcctgtcccgctggctgaaatcttcctccgcagatgctgagaatcaagatgatgaagactgcagctttctaactgagaagcctgtcttcatggttgcacctgatctcaacttggataccagtaaccctactcctaggttgcccaaggcatgggatggcaacggtatccccaacacaacgaccagatacagagaggatcagagggtcagttggcacaccacgccatttgaacaaagactgctgaaggtgttgtctgatgaggaccgttgccctccaaggaaagtcgtccgggggaagctgttccatctcgaggagacagctgagtagcgggcagggttatcatattagcccaactgtgatgaggctgccagcgacctgttatgaaactgagctcagaagctggtaccgtcatgcatgctgctgaaggtgccgtgtacaaatagcataatttctgttggggtgtgatgctgtgtataaatgacagtttgagctgggttgtgaatatgagttactgtaccgtcatgcatgcagcattgttggctcactgctcacaagcacaccggtctgtagctcactctatggtcgcaccagcactgacatgagtgaaacgtacatttgttttctatgtatttgtgtctgaatacaggcttcaaggccttatgtgtcacatacaggcatgaaaagaaaattgttacatacatatggcaccactttcttgttaataacatctgaaagtctatattttttcacgtattgtgacaactgttacccgtcagcctcttgtgcaggtgaaacttccgggtatgtatgtgcacaagtcatcattgaggtatgtatgtacctcttgccccactttgatccatctctctacaacggcatcatctt

SEQ ID NO: 134629 - DNA, 552 bp, Zea Mays
aacgtgtggttatatatgcgcttttgatctaaatgtaaccgttgttaggatcagagggtcagttggcacaccacgccatttgaacaaagactgctgaaggtgttgtctgatgaggaccgttgccctccaaggaaagtcgtccgggggaagctgttccatctcgaggagacagctgagtagcgggcagggttatcatattagcccaactgtgatgaggctgccagcgacctgttatgaaactgagctcagaagctggtaccgtcatgcatgctgctgaaggtgccgtgtacaaatagcataatttctgttggggtgtgatgctgtgtataaatgacagtttgagctgggttgtgaatatgagttactgtaccgtcatgcatgcagcattgttggctcactgctcacaagcacaccggtctgtagctcactctatggtcgcaccagcactgacatgagtgaaacgtacatttgttttctatgtatttgtgtctgaatacaggcttcaaggccttatgtgtcacatacaggcatgaaaagaaaattgttacatac

SEQ ID NO: 134630 - DNA, 1233 bp, Zea Mays
aaactctcaacacacacacacacacccctaaactctggtactacgcatatatatgaggatcgaagcaacctagttaagttggagcctgaaagagtcgagcagctagctaggggatagagaggagccaggtgaaggctgcaaattaaacctctgatcggaagggcatcagctagggagaatgagagggtttgagagaaaaggggtccggcagtacaaccggtcagaggtgccgcggatgcggtggacggaggagctgcaccggcagttcgtcttggccgtcgagtgcctcggtggccaggacgaagcaactccgaagcaaattcttcagttgatgggcgtgaagggagttagcatatgtcatatcaagagccatcttcagatgtacagaagctccagctccagtagcagcagtacccataatcagtcctccagcctccagaagctgacatcgaccacggcgagcaacagcaagcgcgtgttcttgagccgtgaagatcatgcgtcacaggcagatggcagcactccagcttcagacgagaacatctatactaccatgctctgtggttgcagccactcaacaccataccaaatacgaccgtcgctagagggagtcttcagaggcttggaacaaacaagaatgcttgcaacaacagagaagtcgattagcaggccaagtcacactgagaagcagcacaccggatgcgacctcacgctgtcgatcggcctgtgggcggaggatgcgagcagcaacgacgtcgacggctcgagctccatcagcgaggagctgatgcctgctgctccggcagcgggcgctcgccgtgccgccgccgtgaaggaggagagcgaggcggcggctctaaacctggacctgaccatctcgtcgtcttattggctggccctgacgagtgacgacggcgcacgccgacgcacggccggctggcggcgctagctagctgtgcatgacgggcgtaggtacgcgcgcatctcatgcacagccgcagcagactgtgatcaggccatcagtacccgactgtatatgtgtgtatatgctagtgttaaattaacaggatctctaggagtagattattctattgagtaatttcgggttcttaatttctagaacaaaactgtattagattgttaccgtcattaggaagcacaggcgtgttggaggatgtaaatccgtccgccatcaggttcgttgatgaaggtcgatgcagcgaggttgtcaat

SEQ ID NO: 134631 - DNA, 575 bp, Zea Mays
cccttgctgtgacgcacggctcctggaagcctctctccccaccgcatcttctatcttcggttccttgctctgcaccgcctcctgctcatccatatcccatggtgcccagccgagcagcccatggaggcttcctccccacgcccagccctctctactggtggccgccgctccaagtcctctcgtcgcctatggctgcctcctctgttcgatccgtggcgctatcgtgggttcgcgcccagctccttctcggcctccagctcgccaacagccctcttccatggatggcgattttctttcctgcagcaagaagccatgccgcagtcctctctctcagtttcctctcacggctatggacatcggttgttccttccctcccatggccgccccaactccttccatggacgccaatagtagcagcccctcgctgccggacatcctccggtagtcccgcaccatccgcacccgtatggtgtttgataaaatgtccaagtggagtgccgtgtcatggacaaccctattagcgtcatgggatgtttggtattttgcgcagcccatccacgacaccgtcgaccctc

SEQ ID NO: 134632 - DNA, 79 bp, Zea Mays
ttgaaagagacccggcctttgtggcctcctcaacggggagtaggtttgcgagaaccgaacctcggtaaaacaaatccgc

SEQ ID NO: 134633 - DNA, 1016 bp, Zea Mays
gatatattgtttgttacatgcggagtttgaaggagtttaaaacacaagcaaccacattggcatcgcttcagcatcccaatttatgtaaactgatcggctattatgcaaaagaagattctaatgaaaggatgttggtctatgaacggctttatcatggaagcttagataagctactctttggaagatcagatggtcatttcatggactggtctaaacgtttgaaggttgccctgggtgctgccagaggtctagctttcttgcatgatgaaggaccctttcaggccatgtacaacgagttctcaactttgaacatccaaatagataaaggtttcactgctaagctttcaggatatggttgtgttggcttcaataccgaggagatatctaatgcacctgtgcaaaccattcggtggagaccttggagaagggtttactcactcagtttgtctattgctgcaacaagtcggggctggaccgttccaaagtaaatgtaaatggaggcacgattgcccttggacaccctttgggtgcaacaggtgcccggtgcgtggctactcttctaaatgaaatgaagtgccggggcagagactgcagatttggtgttgtcaccatgtgtatcggatctggaatgggggcagcagctgtgttcgagctatgttcggcccggctggaggtatcgaccatcactcgtcactgtaacccgatggtgatcgacgaccgtgagcttccatgttattgcgttctgatacttgagacttttattataactatgtatgagatattgtctcttattagtactggatgatgagatgtgtcttattatgactatggatgagacttttgtgatgtaattgatgagactatggatgagacttttgtgatgtaattgatgagactatgaatttaaatattgttatgtgattgtgtgtgagatgtgttatgtgaaaatatgttgtgttatatagctgttgatatatttgttatgttgtggaatgtggtgtaaaataaaaataaaa

SEQ ID NO: 134634 - DNA, 1734 bp, Zea Mays
gagttctcgatcgcgccattcaatcggataaagctgtgttgagttgcagaaaatcagtctttgatcgtctgtgttttcctgattaaagcagcgctttgttgctttagatagaggtagagccatgtgcggcgcttttcaggctggttctttttcgaaaaccggtttcccccactccacaccaccaccaccaccattgacgacttgactacaaagcccagatccattcctcggggtcgggcggccgccaatcccgccgcataccgctggccgagtcctcgtcggcgccggacggggtgaagtgaaggccgactgggagaattttgtggatcttatctggtctccatcatggaacatgacggcacaacgaacctggctgtcactgaggctgtgcgctcggtgcagctgctcaagatcgacggctactgcgccaccgctaccatgggggcatcggagttcatcaaattccgatggcacatcgatggccacgagtgggaggtccgtttctatcctgattactggtacttcttcgaggacgaggactgcttcggcacttatggcgacgacgatcactccgagtgggtaggtctgaagctcatccttgtcagtgaaccccagagggacgacgacaaggtgagggtgaacctgagctgccggcttgtatgccccagccccaccagccagcggccgcatctcgatacctgctggtccgaagagaagagggtgtcccatgtgtttgccagcgactcgaaatgctcgcctgaacttctcctcatcctgaagcacgagctaccatcgtcaggttatctcgtggacgattcactgaccgtggaatgcacggtcaccgtgctacgcgacttggacgccgccacggataaggcgctgtcgtccctgccagtgccgccaccctcggacctacaccagcacctcggcgacctcctgcagagcgaggacggagcggacgtcacgttccgtgtctccggggagtccttcgccgcccacagggccatactcgccgcaaggtcccctgtttttaaggccgagttcttcggaggcatggaggaacgcagctccgcttctgtggaggtcaaaggcatggaggctgctgtgttcaggtccatgcttcgcttcatctataccgacacggctccagagctcgacggtgcccaggaccaggagcctgaggcggcggtggccatggctcagcacctactggtagctgctgacaggtatgggctgaacagactgaagctcatgtgcgaatgcaagctctctggcggcatcgacatcggcacagcggccgcgacgttggctctcgccgagcagcacaactgctcgctgctcaaagccaagtgccttgagttcgtcaccaggtcgcctgagactctcgatgctatcctggcgactgacggctacgagcatctggtggcaagctgcccctcggtgctggctgaactgctgagggctgcgcgtggaaggaagatctgagctggacgatgatttcatattatggtttgcctaagatgtgtgtgaactaaaaaccatgcatgatgaactagtagtgcttgcagttgatttcctgcccctcctttcagtttgacctgcgcttgtcatacatgtattgtatgcacatacacgagacgggcagctagcattttctgtggttagatctcgtctcggctttgtgcctgtcatttgggggcttaattgtaccggttgccgtttctcgttcttctc

SEQ ID NO: 134635 - DNA, 339 bp, Zea Mays
atgaagcgaagcatggacctgaacacagcagcctccatgtctctgatcacataagcggagcttctttcctgttcctgcacgcctccgaagaactcggccttgaaaaccgaggaccttgcggcgagtatgaccttgtgggcggcgaaggactctccggaggcggagacacgaaacgtgacgtccgctccatccttgctctccaggagctcgccgaagtgctggtgcaggtccgagggtggtggcactggcaggtgctgccccttagtcgtttctgcggcgcccaagttgcgtagcacggtgaccgtgcactccacggtcagtgaatcgttcacgagataa

SEQ ID NO: 134636 - DNA, 330 bp, Zea Mays
atgaagtgaagcatggaactgaacgcagcagagtccatgtctctgatctccacatgagcagagcttctttccttcatgcctccgaagaactgagccatgaaaaccggggaccttgcggcgagaatggccttgtgggcggcgaatgacttcccggagacacggaacgtgacgtccgctccattcttgctctgcaacagctcatcgaagtgctggtgtaggtcggagggtggtggcagtggcactggcagggacagcaccttagccgtggcgtccaagtcgcgtagcacggtgaccgtgcattccacggtcagtgaatcgttcacgaggtaa

SEQ ID NO: 134637 - DNA, 336 bp, Zea Mays
atgaagtgaagcatggacctgaacacagcagcgtccatgtctctgatctccacataagcagagcttctttccttcatgcctccgaagaactcggccttgaaaaccggggacctcgcggcgagaatgaccctgtgtgcggcgaaggactccccggagacacggaacgtgacgtccgctccgtccttgctctgcaggagctcgccgaggtgctggtgtaggtccgagcgcagtggctgtggctgtggcactggcaggggcggatccttcacagaggcgtcgaagccacgtagctcggtgagcgtgcattccacggtcagcgaatcctccacgaggtaa

SEQ ID NO: 134638 - DNA, 1628 bp, Zea Mays
atgatgcactcgcaccaccctcactaccatccgcgtttccacccgccgtcgtcctcctcgtctgaggcggtggacatggacccccgcgtgtggagccggctgccgcagccgctggtggaccgcgtgctggcgtgcctaccgacgccatccttcctccgtctccgggccgcctgccgccgcttcggcaacctcatctactcgtcgccgttcctccactcccacctcctcctctcgccgcacctccccttcttcgccttcgccgtcccttccgcggggtacccgtacctcctcctgctcgaccccaccacgcaggcgcccgcgccctcctggtcccgcctcccgctgccgctgccggccgcgcccggcgccgtgcaggcggcgttctccccggcggccgcgtcggcgggcctgctcgcgttcctgtcggacgcgtccggccacaagacgctgctcctcgccaaccccatcacgcgcctcctcgcgccgctgccgctctgccccaccgcgcgcctctcccccaccgtcggcctcgccgcgggacccacctccttcatcgccgtcgttgccggcgacgacctcgtgtcccccttcgcggtcaagaacatctccgcggacacgttcgtcgccgacgccgcctccgtcccgccctccggtttctgggcctcgagttccatcctgccccgcctctcctccctcgacccccgcgccggcatggctttcgcctctggaaggttctactgcatgagctcgtcgccgttcgcggtgcttgtgttcgacgtggcaaccaacgtgtggagcaaggtgcagccgccgatgaggaggttcctgcggtcgccggcgctcgtggagctcggcggcgggagggagcgcgaggcggtggtggcgctggtctccgccgtcgaaaagagccgcctcagcgtgccgcggagcgtgcgcgtgtggacgctgcgaggcgagcacggagctgctgccggcggaagcaacggcggcggagcgtggactgaggtggcgcggatgccacccgacgtgcacgcgcagttcgcggcggccgagggcgggcgcgggttcgagtgcgcggcgcacggcgacttcgtggtgctggcgccacgcgggcccgcgagccccgtgctcgtgttcgactcgcgccacgacgagtggcggtgggcgccgccgtgcccgtacccgtacccgtacgccgcgggaggcgcggggttcagggtgttcgcctacgagccccgccttgcgacgccggccatcggtctcctggacgccacggcgccggcggcctttttgcatgggatgcagggctagctaggtgctaggctcaggcgctcagctcattgacgtgtacgcatcatctacgtaacggaaatcgttccggtctctgcgttgtgaggtgcaccatgaaatctggtgtttttcttgagcgtctgttagcgaaggctgctggtaagaactctactactggtctgaggcgtgtctttaatatattagtactattaagtatctcatgataatttatgtgtacggggccggattattagttatatgaacatttaaacttgctttctgcataagtatttgcaatctaaaatggaccatgcatgcaagagtgaagtcttgtctgc

SEQ ID NO: 134639 - DNA, 352 bp, Zea Mays
ggagaatgagaaaggaaacagagaatggtgaccgaacatgagaatgcctaccccttaccgccttaataagtagtagagaaatcgtaccgaacatcggaaaggcagaacagagaatagactgtgtggggatggggaatcgaaaaggcagaacagagaatgagaatggcagtctaccccttaccgcattaataagtagtagagaaatcgtagtatacaaacaaacatcatacagtggtcaatttatacagaagtttgtaatattcccccattgcggacattacacaaaacactattagaggaaaccgtttgtggcatgttcgtttacgccggatttcactaaaaatcgttccaa

SEQ ID NO: 134640 - DNA, 1664 bp, Zea Mays
gacaaggttggtagaggacgcgcacccggggtggagctgagagcaacaggagctcctgcggcgaattcgggccccgagtacgccggttcaggcggccgccgccggtggaattgtgccagtcgaggtggcctgctggtgcggcgggagtttgcgagtagggcggttccggttttgagtgagcgaaggtgttgttgggggcgtggatctggccggcggcgggcgatgggaaggagggactagggctcgattggagggaaaggcgtgatccatgggcggatgcttctcgcaggaggagcaccggctccagagcaggccagctgaagctgctggaccagacggactgcagaagtcaaaatctgattctaaagctacagcaagtgttcttgctccaccaaaagctgtggtggatctgcaagtggaaggatatggaaatgtgaatattttcacatatgacgaattgagcgcagccacaaaaaacttccgaccagatcaaattcttggagagggtgggtttggagttgtttacaaaggtgtaattgatgaaaatgttagagcaggtttcccatccaggcaggttgctgtgaaagaactaaacccagagggttttcaaggggacaaggagtggctggcagaagtcaactatcttgggcaacttagtcatccaaatcttgttgaactgattggctattgctgtgagggttcacatagactgcttgtgtatgagtacatggcttgtggaagcctcgaaaagcacctttttcggggtttgccttaatatgccatggtcaacacgcatgaagattgcattgggtgctgcaagggggctcgagtaccttcacagagctgagagatccatcatttatcgagatttcaagacatcaaacatcttgctagatgcggattataatgctaagctttcagactttggtctcgcaagaacaggtcctagtggagaccaaacccacgtgtcaactcgtgttatgggaacttatggatacgcggctccagaatatgtcatgactggccatctgacagcacgaagtgatgtttatggctttggagtcgtgcttctagagatgattattggaagaagggctgtggacgatagccggccgagccgtgagcataacctagttgactgggcacggcccctcctcgtccataacaggaagctgttccggataatcgatccaagaatggaagggcagtactccaccaaggctgccaccgaggtggcaagccttgcataccgctgcctgagccagaaccccaaaggacgaccaaccatgagccaagttgttgagacctttgaggccgtgcagaacatgcctgaatgccaggacatactcctccagaacggcatcacaggtgccgtgacgctctacgaggtcccaaaggagcctgcagacagagttgagctggagaaggccaagcaggaaccggcagtaaagaccgccgcaatcccgcccgtgaacggaaagccggccccccagagcaggcgaacgcggcctgggaatggccggagcaagagcgagccatcgttggagtgtaagatgtacatcccatcaccagactctgacgaacagcagctcggcctggaggcactggcgtccccaaatggcagcatgaaggaccatcctgacgaggatttgtacaagatataa

SEQ ID NO: 134641 - DNA, 2220 bp, Zea Mays
agaggacgcgcacccggggtggagctgagagcaacaggagctcctgcggcgaattcgggccccgagtacgccggttcaggcggccgccgccggtggaattgtgccagtcgaggtggcctgctggtgcggcgggagtttgcgagtagggcggttccggttttgagtgagcgaaggtgttgttgggggcgtggatctggccggcggcgggcgatgggaaggagggactagggctcgattggagggaaaggcgtgatccatgggcggatgcttctcgcaggaggagcaccggctccagagcaggccagctgaagctgctggaccagacggactgcagaagtcaaaatctgattctaaagctacagcaagtgttcttgctccaccaaaagctgtggtggatctgcaagtggaaggatatggaaatgtgaatattttcacatatgacgaattgagcgcagccacaaaaaacttccgaccagatcaaattcttggagagggtgggtttggagttgtttacaaaggtgtaattgatgaaaatgttagagcaggtttcccatccaggcaggttgctgtgaaagaactaaacccagagggttttcaaggggacaaggagtggctggcagaagtcaactatcttgggcaacttagtcatccaaatcttgttgaactgattggctattgctgtgagggttcacatagactgcttgtgtatgagtacatggcttgtggaagcctcgaaaagcacctttttcggcgggtttgccttaatatgccatggtcaacacgcatgaagattgcattgggtgctgcaagggggctcgagtaccttcacagagctgagagatccatcatttatcgagatttcaagacatcaaacatcttgctagatgcggattataatgctaagctttcagactttggtctcgcaagaacaggtcctagtggagaccaaacccacgtgtcaactcgtgttatgggaacttatggatacgcggctccagaatatgtcatgactggccatctgacagcacgaagtgatgtttatggctttggagtcgtgcttctagagatgattattggaagaagggctgtggacgatagccggccgagccgtgagcataacctagttgactgggcacggcccctcctcgtccataacaggaagctgttccggataatcgatccaagaatggaagggcagtactccaccaaggctgccaccgaggtggcaagccttgcataccgctgcctgagccagaaccccaaaggacgaccaaccatgagccaagttgttgagacctttgaggccgtgcagaacatgcctgaatgccaggacatactcctccagaacggcatcacaggtgccgtgacgctctacgaggtcccaaaggagcctgcagacagagttgagctggagaaggccaagcaggaaccggcagtaaagaccgccgcaatcccgcccgtgaacggaaagccggccccccagagcaggcgaacgcggcctgggaatggccggagcaagagcgagccatcgttggagtgtaagatgtacatcccatcaccagactctgacgaacagcagctcggcctggaggcactggcgtccccaaatggcagcatgaaggaccatcctgacgaggatttgtacaagatataaaatcagatcagttttttttttttcaaacaacatgagccctcgttgctcgccttttgcgccgccaccccagctctcaaagatcggtcagttacaattttttctctgatagccaccggcctcgctagggttcttattcttccgattagcaattgtatgtagagggagagttgtgatggaaagcatgtgtgtgcttgccatgacgatgctgtagagatctgatacacttctttctggggaatttccactccaaaaatggaagttgagagatgtgtcctgacgattggtgcgttttacccgtgtgttgagtttacttgtaaagatgcttcttcgttgtaatcttcagttctgcgggaaatcaacaccagcatagaaattgatagattagtcactgtgttgtcaatttgttcaaatctccaagcggtgaagtttttatttatctatttatttttttcgcacaactagagtggtaagttcatgaatattagttcaaagcatctgtatcctactttataaatccgtacatatctgagaagttttaaaacttaatctcaaggttgatataaaat

SEQ ID NO: 134642 - DNA, 873 bp, Zea Mays
aagaacacatccgctcaaactttcagcacatgctcaccaagttccgtcccctcatggcgacggcggcgaaggcaagggctccgccggccgtgacggcttccaaagcggcggcggcagcggtggagctggaggagcacgtgcactacaagcacactgatgcgtgccaccaactccggtggacagccaaggaaagctatgagtacatgtacgcgcggccgtggagcagggtggtcgacttttatgccgagctcgtgcgcgccggcgccggcgcagcggggctcgccaaattatttgggaatgatgagaaagattacacactttatactgctggagaaaattatctaacaccatcagaaaaaccaacgacaactaccttctccaaaggtcgtggaggaagatgggaaagagtaacatttaaagttgttatttcataccatggggggtcgttcgatggctggcagaaacagcctggccttaatactgttcaagggtaattttgttcaatctactattcacttcaatcacatgtaatggaatacaatcactggtgctatttttctttgaactttttattggttgcaggttagtggagaaacatctcggacaatttgttgatgagcgaaaagctaaacagcttgaagcaagatctttgccgatagaaggctgtgcaattgttgctggacgcactgacaaaggggtgactgctcttcagcaagtttgctcattttacacctggagaaaggatgtgaaatctggagatataaaaggtgcaataaatgaggctgctccagataaactaaaacctctgcatgtgtcagaggtatattttcatttttggccgaatacaccaatgcatttaatatcgttgctgct

SEQ ID NO: 134643 - DNA, 1441 bp, Zea Mays
aagaacacatccgctcaaactttcagcacatgctcaccaagttccgtcccctcatggcgacggcggcgaaggcaagggctccgccggccgtgacggcttccaaagcggcggcggcagcggtggagctggaggagcacgtgcactacaagcacactgatgcgtgccaccaactccggtggacagccaaggaaagctatgagtacatgtacgcgcggccgtggagcagggtggtcgacttttatgccgagctcgtgcgcgccggcgccggcgcagcggggctcgccaaattatttgggaatgatgagaaagattacacactttatactgctggagaaaattatctaacaccatcagaaaaaccaacgacaactaccttctccaaaggtcgtggaggaagatgggaaagagtaacatttaaagttgttatttcataccatggggggtcgttcgatggctggcagaaacagcctggccttaatactgttcaagggtaattttgttcaatctactattcacttcaatcacatgtaatggaatacaatcactggtgctatttttctttgaactttttattggttgcaggttagtggagaaacatctcggacaatttgttgatgagcgaaaagctaaacagcttgaagcaagatctttgccgatagaaggctgtgcaattgttgctggacgcactgacaaaggggtgactgctcttcagcaagtttgctcattttacacctggagaaaggatgtgaaatctggagatataaaaggtgcaataaatgaggctgctccagataaactaaaacctctgcatgtgtcagaggtttcgcgtgagtttcatcctaattttgcagcgaaatggaggaggtacatgtatattttccctcttgatgaggatgctgacttgattttaggggaagcacagtcctcaaaaacactagagaattctgaacacaacataaagcctcaaagctttgatgtgtccaaggttgatgaaattctcaaaccacttgctggaaagacattatcctacaagatgtttgcacgtgatacacaggcttcacgaagtgttggcccacctacagaatgtttcatgttccattcccgagctgcagtggccaaactacattctgctaatgaggatcacaaaggaggcatggtggtcatgtgcgtcgagctagtcgcaaacaggttcctgcgcaagatggtcagggttcttgtggccactgccataagagaggctgctgccggtgctggcgccgatgctttgctgaacctaatggaagccacggacaggcgtgccacggcgcccccggcaccgccagaaggcctgtgcctcgtagacgttggttatgaagattttgataagcagaggtgcttcatagtcgattgaaagaagtattctttgtagggaaaaaaatacaagatgcatgattcagcaatt

SEQ ID NO: 134644 - DNA, 1590 bp, Zea Mays
aagaacacatccgctcaaactttcagcacatgctcaccaagttccgtcccctcatggcgacggcggcgaaggcaagggctccgccggccgtgacggcttccaaagcggcggcggcagcggtggagctggaggagcacgtgcactacaagcacactgatgcgtgccaccaactccggtggacagccaaggaaagctatgagtacatgtacgcgcggccgtggagcagggtggtcgacttttatgccgagctcgtgcgcgccggcgccggcgcagcggggctcgccaaattatttgggaatgatgagaaagattacacactttatactgctggagaaaattatctaacaccatcagaaaaaccaacgacaactaccttctccaaaggtcgtggaggaagatgggaaagagtaacatttaaagttgttatttcataccatggggggtcgttcgatggctggcagaaacagcctggccttaatactgttcaagggtaattttgttcaatctactattcacttcaatcacatgtaatggaatacaatcactggtgctatttttctttgaactttttattggttgcaggttagtggagaaacatctcggacaatttgttgatgagcgaaaagctaaacagcttgaagcaagatctttgccgatagaaggctgtgcaattgttgctggacgcactgacaaagggacacctggagaaaggatgtgaaatctggagatataaaaggtgcaataaatgaggctgctccagataaactaaaacctctgcatgtgtcagaggtttcgcgtgagtttcatcctaattttgcagcgaaatggaggaggtacatgtatattttccctcttgatgaggatgctgacttgattttaggggaagcacagtcctcaaaaacactagagaattctgaacacaacataaagcctcaaagctttgatgtgtccaaggttgatgaaattctcaaaccacttgctggaaagacattatcctacaagatgtttgcacgtgatacacaggcttcacgaagtgttggcccacctacagaatgtttcatgttccattcccgagctgcagtggccaaactacattctgctaatgaggatcacaaaggaggcatggtggtcatgtgcgtcgagctagtcgcaaacaggttcctgcgcaagatggtcagggttcttgtggccactgccataagagaggctgctgccggtgctggcgccgatgctttgctgaacctaatggaagccacggacaggcgtgccacggcgcccccggcaccgccagaaggcctgtgcctcgtagacgttggttatgaagattttgataagcagaggtgcttcatagtcgattgaaagaagtattctttgtaggggtgcgtgtttgggtccgtgccgtttctcagagaaggggggaaaagagagaaagttattccgtatctttttgttagaaaaaaatacaagatgcatgattcagcaattgaggggtctgtttagagaaacatacttcatgtcatgaagtgaccaagccatgcagctgctattagtcggctatttttggttgctatgagtcgcctatttataatc

SEQ ID NO: 134645 - DNA, 1578 bp, Zea Mays
aagaacacatccgctcaaactttcagcacatgctcaccaagttccgtcccctcatggcgacggcggcgaaggcaagggctccgccggccgtgacggcttccaaagcggcggcggcagcggtggagctggaggagcacgtgcactacaagcacactgatgcgtgccaccaactccggtggacagccaaggaaagctatgagtacatgtacgcgcggccgtggagcagggtggtcgacttttatgccgagctcgtgcgcgccggcgccggcgcagcggggctcgccaaattatttgggaatgatgagaaagattacacactttatactgctggagaaaattatctaacaccatcagaaaaaccaacgacaactaccttctccaaaggtcgtggaggaagatgggaaagagtaacatttaaagttgttatttcataccatggggggtcgttcgatggctggcagaaacagcctggccttaatactgttcaagggttagtggagaaacatctcggacaatttgttgatgagcgaaaagctaaacagcttgaagcaagatctttgccgatagaaggctgtgcaattgttgctggacgcactgacaaaggggtgactgctcttcagcaagtttgctcattttacacctggagaaaggatgtgaaatctggagatataaaaggtgcaataaatgaggctgctccagataaactaaaacctctgcatgtgtcagaggtttcgcgtgagtttcatcctaattttgcagcgaaatggaggaggtacatgtatattttccctcttgatgaggatgctgacttgattttaggggaagcacagtcctcaaaaacactagagaattctgaacacaacataaagcctcaaagctttgatgtgtccaaggttgatgaaattctcaaaccacttgctggaaagacattatcctacaagatgtttgcacgtgatacacaggcttcacgaagtgttggcccacctacagaatgtttcatgttccattcccgagctgcagtggccaaactacattctgctaatgaggatcacaaaggaggcatggtggtcatgtgcgtcgagctagtcgcaaacaggttcctgcgcaagatggtcagggttcttgtggccactgccataagagaggctgctgccggtgctggcgccgatgctttgctgaacctaatggaagccacggacaggcgtgccacggcgcccccggcaccgccagaaggcctgtgcctcgtagacgttggttatgaagattttgataagcagaggtgcttcatagtcgattgaaagaagtattctttgtaggggtgcgtgtttgggtccgtgccgtttctcagagaaggggggaaaagagagaaagttattccgtatctttttgttagaaaaaaatacaagatgcatgattcagcaattgaggggtctgtttagagaaacatacttcatgtcatgaagtgaccaagccatgcagctgctattagtcggctatttttggttgctatgagtcgcctatttataatctgtgggttttttttaaatgatttggtagttgtacttttgatgctctgtc

SEQ ID NO: 134646 - DNA, 817 bp, Zea Mays
atgcgaaggttatcataagggatggcacaggaaacagatgcatgcgaagttttttcgagatgagatggatgcggcagatgatgtggatagggaacagcggtggagcatccggtatggcgtgataccttgacccgcgtgtcttcttgttcgatgaagctcgtagccttgccgagtcacccacaagccgcactccttcagcccgcttgtccgccggccgccgccgttccaaatcctctatctagcttcgtaagcagctcgcttctctgctcgtgggtcgtccgctgcgagcgctctgcagtccgtcctcgccagtggcctcgggtcgcggccctccgcggcgtcctcgtgctcgcgtcggtgcggcagccctcctcgctaccccctctccaacagggaaaagtccagtccggcaacgtccagccgaccaggtccagccgaccagccctacctctccctccggccatacctcgtttcttggttgcgctcggccacagatagggaaggcatttatggagcaacagatctacgacaatacaattcctccgacgctagcacgggccgggagagggagggggagatacgaagagcgagaagtcagggcgcatgccaatcgtgagatctgagacgcaggcatggcacgccctgtatccaatccggaagagatgagaaactccgccgccgccgccgccgacgccgcctttgtcagtggcgacatggcagtggcacgccctggctctggtcaggggagaggaaccgccgccgccattttcgtctttgctcggtctgagggaaacgtgtggggaggtggtggccggcc

SEQ ID NO: 134647 - DNA, 279 bp, Zea Mays
gtactcgccgagtgttgtcggttgtacttgtacctcatcactcgtgcttgccgctggctcgcgttaacgctcatgcgcctgctcgttgtcaccgcggcacactcgctcttcgtccatcggacttcacgcgtgctcgcatttgttgtcgagctgttaaacccgtcctcccttgctcttgacttcgtcatcgcctgagatcgcgctaacctgctcgaccccacctcaccagctcactccaaacttgatctcgtcgtcgtgccgtgcgtcatcaagaaatcc

SEQ ID NO: 134648 - DNA, 956 bp, Zea Mays
ccgtggttctcagcctcgaccgtccactctcccatccgagcggctcccccgcggtccctggcttcccatggtcgccgcgacccagccatggagcttccccgccgctcagctcggagttcccacggctcggttccagttccatgcgcgcgcgctgagctcggcgttctctgtttccccatggccaagcgccctccgcccctcccgccctccagctcgacgggcttggcttcgagctcgcccagctcggccgtcctccaagtttctccctccttccagaagctttccccatggcgcccggctggatttcccctcggctcgccgcgcccctgtttccgtcggtgtttcttccacggccgcgcgcgaagcttttctgccggtgcgcgcgcccgtctcccatagccgcggcgtcctggctcctgctccctcgccatggccgcggtgctcctccctgttcgccacgtttctgttgcgagctcgtccctggcactgggtttcctacctgcatcgcgcgtcttcttcctcaggctcgcgcccttgctgttgtcgcgcctggctcgcccctgtgccgcgcaccgcttcaccagcttgccccttcccttgccaagcaggtcgccacgcccaaccgagtttacccctgcgcgcaaccgtgggtttcgctgcacagcgttcctgctccccagcctgcgttgtgctcgccagatcgagtcccgcgtcgtcgatctacgcagttcctgttcggctatcggttccgcctacgtcgatctcctaattgccatggatagtgtatcgacgtcccatcacaatagcccgtcgtaaaactctagtgcttgtcgttgatatccggtcgtctccagcctttgtcttaccgtcgtcgttcggtcacctcgtctcgatgtcggtccctacgtgatgtctccgagtttgaatcacgctgacaaaagaattcccaagaaaga

SEQ ID NO: 134649 - DNA, 252 bp, Zea Mays
ataagaagactaccgacatgggatacgtctcttcagtttgtttgtcaatattttgtaggaatcagaagaggtgttcaacatgtgggttaatttcgttttcaagtgtgctcctctaatgacacccttttcttttttggagtaccttttgataataacaaatttgggttctgtttttgtttctagactcaagtctagagttccatgaattaaaatattggtttatttgttgtggccacctatggtctcattatc

SEQ ID NO: 134650 - DNA, 103 bp, Zea Mays
cgtacgaggacctgtaattgagcctcgattcactggtaaatcatccatggccgtggaaccagatgttcagaccctcgaaatatctacatttcaatttcattaa

SEQ ID NO: 134651 - DNA, 555 bp, Zea Mays
cgacccatcgcgcactgacatgagaggggactaggacaagcaaagagcacgaacctggcctgctctggagccggtgctcctcctgcgagaagcatccgcccatggatcacgcatttccctccaatcgagccctagtccctccttcccatcgccgcctgaaccggcatactcggggcccgaattcgccgcaggagttcctgttgctctccactccaccccgggtgcgcgtcctctaccaaccttgtcgctctccccccgcgtgtttttactccactaccatcaccttcttggcctttattttccgtgagcgcgttggaacggcgaagcgaaagcgagcagaaaagggcgaagaggcgggctcgtagctttgccagaggccagagcccagcgaatgcgcgaaaggagcctgcttggattaaaataaatcaaacatctagtaataatttaaatcaaaccttcatttttttatctctactcgtgcgtatcttgagtttttggctcaattttttatgtgcaatagtccgcatgatatcgtatatgttacagaaataaatc

SEQ ID NO: 134652 - DNA, 583 bp, Zea Mays
cgcctcaactccacctccgcctccaaatccgatcgatctccgaggcctccagatccccggcggccggaagacggcgagctcaaggcggtggacacccctcgcagcgctcgtctcctctcgctctcccaatccccttaccagttctacaatgagtatctcattgcgggatcgtattagaaagaggagggaagaagaagaagaagatgacatgatgatatttattgggaagcaaagtattggaaaaaactgcatttagttgatgatccactagaagtttaagctatgtcccactcgagtctttatacagtggtgatgtctcttgttatgctatgttcactgcatgatttttgtttttggcatgtctacaactggttcagctgttcagctgctcattgtggttgcagtcaaccataagattgttgtcttagcacctttgatatgtcttagcaaaaactcccagttcactctttgatatgtctagattgaaccagttcactctttaatatgtcttagcattgaacttgttttagattcaacaaatattcttgtcacggtgccagcaatatattaaatctacattgtg

SEQ ID NO: 134653 - DNA, 572 bp, Zea Mays
gaaccaacccttctgtcgtaccctctggatcgaagcctggacgacgcgaccgtgcggcggcgactcgacgcaaccagcacggcggcggcgcacagccccgacgacgactctccccactgccttctctccgttctacaatgagtatctcattgcgggatcgtattagaaagaggagggaagaagaagaagaagatgacatgatgatatttattgggaagcaaagtattggaaaaaactgcatttagttgatgatccactagaagtttaagctatgtcccactcgagtctttatacagtggtgatgtctcttgttatgctatgttcactgcatgatttttgtttttggcatgtctacaactggttcagctgttcagctgctcattgtggttgcagtcaaccataagattgttgtcttagcacctttgatatgtcttagcaaaaactcccagttcactctttgatatgtctagattgaaccagttcactctttaatatgtcttagcattgaacttgttttagattcaacaaatattcttgtcacggtgccagcaatatattaaatctacattgtg

SEQ ID NO: 134654 - DNA, 922 bp, Zea Mays
gaaccaacccttctgtcgtaccctctggatcgaagcctggacgacgcgaccgtgcggcggcgactcgacgcaaccagcacggcggcggcgcacagccccgacgacgactctccccactgccttctctccgggacatgagggaagatactccatctatgtgcacgcatcacgtgaaaagcctgttcatactagttctttgtttgctggtcgggatattcacagtgatgcgatagtatggggattgatttcaatggttgatgctgagaagagactattagcaaatgcactggaagatgttgataatcaagtttttgtcttgctttctgacagctgtgttccgctgcattcatttgattatgtgtataactacctgatgggaacgaatgttagcttcattgattgtttcaaggatccaggtccacatggcagtggaaggtaccctattgagatgtatcctgaaatagacgagagtgattttagaaagggtgcccagtggtttgcagttacgaggagacatgctttaatgattctggctgacagcctgtactacaagaagttcaagctatactgcaagccagcagaagggcgcaactgtattgcagatgagcattatttgccaacgctgttcaatatggtagatcctggtggcatctccaattggtctgttacacatgtggattggtccgagggaaaatggcatccaaggtcatatagtgctgacgatgtcacttatgatctcttgaagaatattacaacaactgatgagaacttccatgtgacaagtgatgacaagaaacttgtgatgcagaagccgtgtttgtggaatggatcgaagagaccgtgctatcttttcgccaggaagtttaatcctgaagcactcgataacctactgaagctgtttacaagttatacatctgtttga

SEQ ID NO: 134655 - DNA, 1137 bp, Zea Mays
atgactgtcatgatgcctcagcgccaccgggctacggccaagaagcccatgtggataatcgtgctcttgtctatggtttgcatcatgttgattggggcttacgtcttcccaccacggcgcttctctaagtgctacctctctgcttcaagtgtatgtacgtctttcaaggattggctcccttccatgggccatcgggagcgtgctgacgaggagattatttcatctgtagttattagggatatcctttcaatgcccatgcctatgtcaaaaaatccaaagatcgcccttatgttcttgacaccaggttcattgccctttgagaaattgtgggagacgttcttacagggacatgagggaagatactccatctatgtgcacgcatcacgtgaaaagcctgttcatactagttctttgtttgctggtcgggatattcacagtgatgcgatagtatggggattgatttcaatggttgatgctgagaagagactattagcaaatgcactggaagatgttgataatcaagtttttgtcttgctttctgacagctgtgttccgctgcattcatttgattatgtgtataactacctgatgggaacgaatgttagcttcattgattgtttcaaggatccaggtccacatggcagtggaaggtaccctattgagatgtatcctgaaatagacgagagtgattttagaaagggtgcccagtggtttgcagttacgaggagacatgctttaatgattctggctgacagcctgtactacaagaagttcaagctatactgcaagccagcagaagggcgcaactgtattgcagatgagcattatttgccaacgctgttcaatatggtagatcctggtggcatctccaattggtctgttacacatgtggattggtccgagggaaaatggcatccaaggtcatatagtgctgacgatgtcacttatgatctcttgaagaatattacaacaactgatgagaacttccatgtgacaagtgatgacaagaaacttgtgatgcagaagccgtgtttgtggaatggatcgaagagaccgtgctatcttttcgccaggaagtttaatcctgaagcactcgataacctactgaagctgtttacaagttatacatctgtttga

SEQ ID NO: 134656 - DNA, 1086 bp, Zea Mays
aaatcccaacgatcccccaaccttcgcgacgcgcacaccagctcgccgtcggacgcaagcgctcacaggctgctgctgctccgtctcccgggcgccaactctgactccgtacgcgttacgtgaaggcatccatggcacgcgtgctctgctcccggtcagcggtcctggcgcgccgcctcggggcccagccccagccccagcccggcgtggttctgagccgccggcacaaccacactcgccggcgcgcggtgaaggttcttgaagaggacgccgcggggccttcttcacctgcgacggacgcctccgagcagtcccggcggttggaggaggcgatcgacagcgccatggcgcggatggccgagcccgactgggcgcccttccggcccgggacatcctacttcgctccgccccggcccgccggcgcggccctgggggttctcgcgcttatcggccacgctggcgggttcatgggctcctcggcagcgccgaggcggggactctctgccgacgaggcccgcgccgtcgccgcctcctcccgcggttacccgtgctcgacctatttcatcgaaggctgctttccagatgaagtggagatcccaaatatggatgccaatcaagttcaagaggaatgaatggatgagctatgttattgcactggatgaagggggtctggaaaaggtgtcactttcatgtcatttagtggtgtcatgaagtaatgaattcgtgagctacttgtgggcaaatccagtgccgaaggctccccacatgagtaccttctggagaaagggctccccagctgctgcgaacccacgacctcagacagctcccatcactgcatcaggcctgaccttctgaatttgtgagctactgtataaaataaatttgtcctgaattcatgtgatcttgtaataagactagtcttaaataaaaactacgatttcaccgtcttctctatgctatccggcatctggaatgtatgatggtaaacatgctctcatattagctgatatggtgtacaactcaaaactgtgtattatattaacatttcagatcataatagtttccaaatgtgagcactactgcagt

SEQ ID NO: 134657 - DNA, 1269 bp, Zea Mays
ggctcatcgctcgtctctctgcctgcttcccattgccaccatcatcatcacctccatctcctcgccatcacgcctgccggccggccgggtcttccttctccctcctttgcaccgccgctacaaattaaagagcacgcacactgcctgcgcgacctagctgctgttctgttctgttctgtcctgtccatcacaattcacgcgacgacgacccggcctgcgggcagatctttcttgacctagccagctcgttcttggcgcactagctagccagccagctagtagctatcctcgctcctccccaccgtcctcagtgctagactattcgtccgatgggcggcgtccaactcgacgacctctccgaattggccgtgctccggccgatccagacagcggcagcggctcggccgccgggcgacgacgccgaagacggcccggacgccgccgacacgggctgcgtcacgccaacggcctcgagctcccggctgatgccgatgccgcgcctggacggcggctgcggcgccctggacagtaccgacgccgccgccgccgcctgcgtcacgccggcggcgtcaccttgcctgctgcggccggccacggtgtgccctccggcgccgcggaagccggcgaggccggccgcgccgccgcccgacaacaagaggaagcgctgctgctgcgcccgcgccttcttccccgtgccgcacgacctctccgcggtgttcgtgccgcgcaggtcgccgcccagggccgccaccgccaagaaggtccgcctgcacctcgtgggctgacgaaagccaagccatgccaccggcggcacgacaggatgcatgccatgccaccacgcgccatgctttctttcttcgtcctccgattcatccgccagcgcatcacgcgcgcatcagttgcgccggcgcgccattggccatttgctgcgagtgcgatcgatggaggacaaattcttgggcttcctgacaagacagaggacacgacgaccaaaggcgggcgggcgggccggccggccagtacaatcgatcagatcagagtgtttctgcagtgattgcgctaccttctcaatctcagatcgatctcgagctgcctggatctgaataatcgaattgtaaataccacatcgtcgttggctgcgcatggttgtcgtcttcgcgtgtcgagggtgtataaaggccatagtcgttcctgtgaaattcgctgcctgcaaacgcatagttttctctgcaggagcgccaatgcaaacaacggccggcgcagattaaa

SEQ ID NO: 134658 - DNA, 523 bp, Zea Mays
ctctatggggcttctaggatacatcttctccagaagcaccataagtcttgtcttgggcattacaccagggctagccactctgctacttggcactctcagtctgaagttctggaggagcggcagatccagcttcctgcttatcttggctcaggcagggatttgtttggcttccaaatggtttgttggtcctaaaatagtcagaatcacatgacatctgtgctatagatatggaccttggtggttttctccacattaggaaagctggaagagccttttgtactcagttttttttgctaacagtggtgttatggtgaaacagagttttgtgtgtatataccaacagctaaaatgtaaacacgacattagcatagttgagtacaggaataattatctcttatatcttattgcaaaatctgaaacagttctcctgtagatggttagcttgcattttacgctacaattacctcagatcacttgttgtatcttacaccaatttacgaaatttcttgatgcgttttatgac

SEQ ID NO: 134659 - DNA, 105 bp, Zea Mays
gggggaatcaatcatttacaagacgaggtcagctgccatcaacaccccccattagtcccatacacagtgcaggtttctgaaccgtgcaagtggtaagtccaagaa

SEQ ID NO: 134660 - DNA, 2223 bp, Zea Mays
atgctccaccgcctcgcccacacccgcgtgtgccacttcttcatcatccccacaccccgcgcgttctccaacgctcccgctgccactccacccgctgcgccgccgctctcggccgcggacctcgagcaactcctccgccgctgtcactactctgcctccagccaccgcttccactctcttctccccctcctctcgcacccctccgtcctcctctcctgcgcgctccacctaagccaccgcgcgcacccatccctccccgtcccgccccagcccccaccaatcaccattgccgccgctgccgccgcgttctcatccccatcatcccacctccgcctcctcctcccgtcccgcatcaagggccagccgcttcccgtccccacgctaccgctccgcctcgctttgcgctgcgccgcctccgtcctcgacgccgtgttcgccccgcgcgcagccaccttcgcttaccgcggccgccacacagctgtccgatacctcaagtccattcccagcgcgtcctggttcttccgtgtcgccatcccgcggcagcccttcgcccctcgccacgtttgccgtctgctcggtgccatctccagtaaggtcgatgatcccgggttcctggagttcctgaacgaactgttcgtctctgatgcggtcgcatttgagcttggtggttgcgagctcggacgcgggctgccacaggaatcagagctcactagcacgctagtgaacatattcttcaatcgtgtggatggagagataatggccctccgtgaggaagtgcacaaaaaacatcctagaatgaaagatgacagcgttcggcatacacctgtgagagtatatgcgattcgatatctagatgatattctggttgtgacgtccgggtcgaagatgctcacaattgagatcaggaacaggataattgcagtcttggagagggatttagaggtgagggtggacagattggggagctcaatccacagcgctgtatcagagaagattgagttcctggggatagaattccaagctgtgccaccgtcagtgttgcacccacccatgtcagagaaagcaaagagagcaaggaagaagtatctgaagatgaaggcggaaaaggcgcaggagctgaaaaatgcacgggagacgaggcggaagaagcttggcttgaagatactgaaccacttgtccaagaggatgaggaggggcgaggagtttgaatttgatttccggatcgagaaagaggtgcagcaagtgttcagggactgggcagaggagacagtggccgaatacttcgaatcacgtgagcattgccgatattggcaccgactgctagcatcaggtgatttcttgtcattgaacagggtgagagatcaattgccacctgctttggtggactcatatgataaatttcaagagacaatcgacaagtttttgatgcccatgaaaggtcatgacctgacagaagaagaggagattctagctgaggaggaagaagaggaacaatatgagaaacggattgtcgaggacttgacagagcttaagatgagggccaatgtgccgatagatcttgtaaggaaggaggtaaagcttgctggattcacaaattccatgggccggccacggccaattaagctacttctctgtttggatgatgcagatatcatcaaatggtatgctggcgtagggaggaggtggctagatttcttctgctgttgccgtaacttcaagatggtcaagactgttgtcacttaccacttgaggttctcctgctttttgacattagcagagaagcacgagtgcactaagaagcaagcaattagccatttcacaaaggatttaaaggtagcaaatgataatggaatggcagaagtgcacttcccaatggaacgcgagatcaaaatgatgggtgataaaaacttgtctgacccaaagcctgtggatggtgccttgacgatgacattagtaagattagcagttgatgacgcctcctatccatgcctagcacatttttgtgctaaaacagaaactgtgctttacagaatacgtttgttgcaaaatcgcctaaatgttgatccattgaatgaaaagaaatgggtccatggattaggtgccattcatgagagcctgaacaagaaatgtctccccttgtgctatatgcacgcaagtgatctctttcttggcaagatcacacttcaagatattgactgcactcaatttgttgatgtggaatga

SEQ ID NO: 134661 - DNA, 1447 bp, Zea Mays
attcccattcctattccctgttatgcgattcccattctcgtttgtgcggcgtccgctgctccctcctcccttcaccacgcgacgcagcgacacgacgactgttctctcctccctcactcgccctctcctcccttccccatggcgtcttcgcgtctccgatcgatccaagccaccatggattttttcaaatccatcctcgccgagctcgatccgccacagatttctccgatcgatctgaaccgtagcctccccacaggtggagcaggagccagaacttgtcaaattcacctcctccagcggcgacgggtggggcttcgatgacctgctgaagacgctaacccgatcgatgtcctgtatagccgcttcgaggcgcagatgcgcacgctccaggcagatctggccacattcacatccgaccctgaggatgtcgactctgcatcgtcgctgaggacaggtcactactcgatcgtcgtaggtcggcggaggcaggggaggagacacaacgcacacacgccggtggcagggccgacccccacacgccgggtctaacccgatcctcgtcgtctgtggttacttcagtgtcatcacggccaccaccgtgcttctctgtgttgccgtcaacgtcgtctccgccacccagtccttccacgctggctatgacgtgcgtggaacgccccgcttgccctgttccattccagtgcaactttccctctcctggatccggctggttcgggtgtggctctgttgttaaatgcactcattcatttgctatgatgtgatcctaagcaactctatttgccatgctcaacactcaatagggaggtgcctcatagagcccccgcttgatctgtggtcgggatcggattagccgctatgcatctcatggtgtatgctgttgaagcctgtgaaattgttgtccacgtaatatgtcattcgatgtagttttcttttcagttcaagttgctcaggcacacgttcattttggagtcatatgggagcaaatagaacccacattcctaccattgactccagtacagtgtgctgtcgtggggtgaataaaagcagctaaacagacaatgttttgtaagatctaagttgtatcgtttgtattctgatgagaagaagaaaaaggcttgcacacctgacaacagatgaagttaggttacctcagaagtcatcaacctgtgcatcagggtttcttatatgtctgctgctgattacagtcaccttctcgtaggtttctactcagctaggcagatacgttatcactatgatgagcagtggtgttgtacttggggttggatttcatctgtcatgttagccatatacttatgcctctcgtttcatttcacttttggtataacctgaaattgcaatctaattaaataggctattgtttatccccatttaagtggagacagtcaaatgaacaaactaatttggtaca

SEQ ID NO: 134662 - DNA, 294 bp, Zea Mays
atggcctggtggcgcgcgagggtggtcgcgtccgtgcgccgcgcctggctcgccgtcgccgtcgccgccgcgcgcgcgcgcgtccgcaagggcgagtgtggtggcgtcctgagcctccaccgggacgtgcagacctgcgggtaccaggacgtgcaggtgatgtggaacatgctgagctcggagaaggaggccgcggccggcgcgctgccgaagccgccgcggcggaagcgaccgtcgtcggtctggaggctgccgctctggcccgtccggtcgccccgcgccgccccggggtga

SEQ ID NO: 134663 - DNA, 237 bp, Zea Mays
atggctttgtgctcatgccatctcagttcagttgcgggcatagggaatcgtcatcctctctgctttgtccagtgtaagcagttgaagcctgtaaaattgttatacaggcatacgtggagtaggaaatatgaagctcatttatgggacaattcttgcagagtagatggacgtagaaggaaagggaagcaaggtgaacatctttggttctattttcatcgtcgggtggcaagaaactaa

SEQ ID NO: 134664 - DNA, 116 bp, Zea Mays
tttttttaaccaaaagtgcagtgccccctatttcattaagaaatagaacgatagagtttttacaaccaacacaggtcacgaagcccgtcattcaacaaggatggcacatggctaca

SEQ ID NO: 134665 - DNA, 493 bp, Zea Mays
attcagggtggagacaaccaatagattttgttgtggacattcatgttatctatatagttgaaagtaattgttctttgttacgtcatcataagtccttccttttaggacatatacaagacactagttttagttgagttcagtttagttaaaacgagtttagttcacttgctatgctgatctatagttaacatttaacatcacaatgtatcatgcaggcaccctcgaatcctatgcatccagcacctcatcaaccatcccgctgtgaaggacggtgtctgaggtcatttcatgcaactaacaattctagtgaagactatccaatcttaggacacaacatgcagcaattagacgtatctataacgatccttctatagtttaacgagtattatgtttttctgtaaagcatagaaatacttattttgttaatgcatagaaaatcaatgacaagaatgtagagtttttatgaaagtcaaaatagagatcgatgatttac

SEQ ID NO: 134666 - DNA, 102 bp, Zea Mays
atggcggttgccccagagcgtgcgcggcggtggacccccagccggtggctgcagctccatgacctcgacgcgtggtggcggaggttactcgatccggagtag

SEQ ID NO: 134667 - DNA, 435 bp, Zea Mays
atgagccaagcatctcagacaagattggatctcataccaaagttgaagcgaatagagctcatgagagccttgttgcagatgacgatggagacagaggatatcaccgagaggatgagtgcacccaccgttctagctggaacttctcccctgccacccccatctccacctcgccgttgcaacaagacaggcagagctaaagaatgcaaaaactcgtcggcctcaaagcacgaaaccatgccaccgagcagcacctatgaagcacaaaaggctgggatcccaaaaggacaaatttcgatcgactgcagaaagaacaccatgaagagacaagagccgggatggtgggagggagggagaagaggggagctcaacgaagtggtgcacaactgcgtggtgggcgctaggcaagtagcatcgacgtcatggcggtggtgctaa

SEQ ID NO: 134668 - DNA, 1053 bp, Zea Mays
cagtgcttgcgcgtgtacgtacgtacgtgtatcggcgcacgcatgatggctcctaccacctccttgctcgcgctcgtgttcctcttcctcctgcccgccgccgccgtcgccgccccaccggctaccggcgacgccgccgccttcaacgtgacggagatcctcagccggtacccggagttcaagctcttcaacctcctcctcagcaagacccgcgtcgcgcgcgaggtgaaccgccggagcgccgtcaccgtgctggtcccggacaactcggcggtggactggctcctgcgccgcagcgccaggctgccgcgcgccgcgctcgtggagcttgtctccgtccacgttgcgctcgactacatcgacgcggccaagctggccgcgctgccccggagcggccagcccgccgtggtcaccacgctgttccagaccacgggggccgcgctgaaccgcacggggttcctgaacgtcaccgcagtagggcgcgccggcgctgtcttcgtatcggccgcgcccgggtcgctggtcagcgccacgttcaggagggcggtgaccgcccggccgtacaacatatcggtgctccagatcagcaacttcgtcgtgccgccgggcgtcatcaccaggccgcggccgccgctgccgtcgccgcccgcgccgaggatgaggcagatggccatcgcgcccagccctgcgccgacgttagcttcgttgaggccatctccgacgacgctaccgtcctcggagggcgatgccgcggaggctccggacactactgctgaagcgccgacgccgtcgcatggtcatgtggcggaagtgaccagttggtggattggtgcggccgtgggggtggcatccatgctcgggtacttgtagattgctccatctgcctgcaactgatcgatcgggagggaatcgtcacatgcatttttgtaatagctcatgttgcgcaccctagtaagtaattcttatatcgcctttttctttagtcgatatttgcacttttttgttttcttatattattaggcttcttggaattatagagagtagaaatacaaa

SEQ ID NO: 134669 - DNA, 122 bp, Zea Mays
ctcccaacatagagtgcaatcttacaccacaaacattaaaataaacatgacacccaacagacatactataacctcaatatgtaatcctgttcgtaaaactccaaccaaaataagaaaaaaaa

SEQ ID NO: 134670 - DNA, 3822 bp, Zea Mays
attctagtagtaggcttttccttgttttatatcgatgcgtaaaccgaggaacacaaacacgcctcgcttcccccgccgtttccgcgaccgcggcgttgactcgctccgccccatctccactgccagaccggcccctcccgccccgtcccgcgcgtcagtgacggtagcgcggcgagcccaataggagagaaaagcgcgccagcggcagtgtcccttccggctccggctgagactgcggcgcgggcggtgcggctggaccagttaggattcggactcggtccgcgctgcggcctgtgtcacctgtgtccgggcggctcgcagtctggttgggctcggatggtcggtgccggacgccgggcgcggaaccctaaccctaggggccggctacattagatgctggggggcggcgccggaggcggtggcgcgggcgcgggcttgggactggacctttcggcggtgatccaagcggcggtcgtcgggctcgtgctcttctccgcggccgtcgttgccgtgcgccgcgccgcctcgcgctacttcgtcgtcgacgccgcggggttcgccgcctcctacgacgatcaccaccacagctcgcccgcctccccgatgtcgtccaaggggaaccggccggagcaggggggcgccgcagcggacctcacggggccctgcgccgcgtgcggtgtcgtcacctccaagaagtgctccgggtgcaagcgcgtgcggtactgttcccaagaatgccagacaaagcattggcaaattgatcacaaattcaagtgcaaacaaatgaaatcattggatcttgccgacaagttatcctgtggaggtgaggccaacagtaagaaaacatcaggtttcggtcgcatctcattggtgcctgcctgtaaaaagataagcaagggtcaggtcctctttccttatgatgagttcttaaagttgtacaactggaaagaccttgatgttgtaccttgtgggcttatgaactgtggcaacagttgctttgctaatgtggttttacaatgtctctcatgcacgagaccacttgtggcctatctgttaggaaaggaccatagcagggaatgttctgtgaggcatgaagattggtgttttttgtgtgagctacaatgtcatattcagagagctagtggaagtttgcacccatttgctcctacaaacattctttctcatctgccaaatattggtggcaatcttggcgttggtaggcaagaggatgctcatgaattcatgaggtttgcaattgataagatgcaatctgcttgccttgatgaatatggaggtgagaaggctgtagatcttagcatccaagagacaaccattattcagcacatatttggtgggcggctgcaatcacaggttcaatgcaccacatgtggaatggtctcaaaccgctatgataatatgatggatttgactgttgaaattcaaggtgatgctgaatcattggaacggtgcttggatcagttcactgctgttgagtggcttgatggggataataagtacaaatgcgatggatgcaacgactatgtgaaagcacggaagcacctttcagttcagcaagctccaaatatacttactatcactctcaaaagattccagactggtagatttgggaaactaaataagagagttacattccctatggagttagatctgacaccatacatgagttgcactgatggaagtgacctgtatgatctctatgctgtagtcgttcatctggatatgctgaacgcatcattctttggacattatatatgctatatcaaaggttatcaaggaaggtggtataaaattgatgactgcaaggttatggttgttgatgaggaggaagtacatgctcaaggcgcttatatgcttttatatagcaggagaacagctcgtcctaggtcacttcttacagttgatgagtccgtgaaacagcaacaacagtgcaaatcgctcctttccaatgggcaaagccacatgatactagcagatacaacattgaactgtgaatcatctttgaagattccagaagatatgttacaacaggattgtgaatccaataatgaatccttgcatgaaatgggtattaaggaccaggagtcagacatggatctacgtacaagcattgaagatgacaaattcattagcaatggaaatctacgtttaccaggttcactagtatcacatgttcttgaagatactagagctccagattctgtattagaaggctctgtgcaacttggccctcctttagaaggtggtcctactacgatgagctctgtgcagtttggcaactgcacaagtgaagcatcttcggaacattcctttgcagagcaatgtgaggtgcctgcctcatgtattgattcagttgactatatggatgttgatactgaagctggtgcagaagttgagagatgcgacgaacaaagacctgtcttaaatgattcagttggaaggccgaataataacacagcaaccccaactgcgaatggggtgccaggagaacccaaaccatcattttcctctggtttttttgataagccctcaagaaaaagatcttcctttacagaagaggctagtgccggttctcctcgaaagttaaatggctattgcaatggacatatcagcagtctagagcaagaagttctttgcaactctggaagtgaaaagtgcaatggagatgcacccgttacatccagtaatggcaaattctgtgcagctaatgttgatatgcaatctatcgatgattcgttgcatgaagacaagcgagatgtgccttctgtttctcatggctttgagccaagaccttacaagctacaatcagacagcaacaacaattgcggtaggacatgcaatgggaaacctaaagcttgccaaggggacatgtcatttttacctcggggcttccttggaaggcctagttctagaggaatttcagtcaaagcagatgatagcttgccatttagcactgacgcatcatcatcctttgggaatggaaacagtaagtcaagtaacaactcatcttctatgggtggcttgtctcctggtttccttacaagacaccgcagggaatccacagtcataggcacaagctctgacattccaatggataaaaaatctaatggcgccacagtagtgccagatcatgcagaaaaaaaggtttcagattgtacgacgaatggctcttcattccaaataagagcagcctccgaccaccttgattgaaatggccttgcaattttgaccacaaaaaacaacagctgtggacaagaaaatgacagtaatggagccccaggcatgagttatgatgggtctgaacatgatggactgagccgacgaataacctcaatttttttagctggatggtattgatgcccaataaaagcatgactgcattgttatagaatagaggccatttcgagcacacaagtgagaactgagagcctgtgtgatcatgtcatggctggtatataaactgatgaagggctgtgagctacgaagtaaatgctatgcaattagggcaagcattgtttgcttgatagaaatttttcctctttcgccacgtggctccctcatatcagatgggtagaggggtatctgggtttccacacaatttgcagaaacccagatgctcccctaatgccacgctattttgttggcattagcgttaggtacatagctgagcgtaggcctactaccgtccccttaattcatagcttaaataaactggaactgctgactcctccggtgtcctgaaagctgaatcaattgcagagtgataagaggaaattctcatggctttcacctttatattttaca

SEQ ID NO: 134671 - DNA, 742 bp, Zea Mays
agacattcatgttattacacccggcaagacgaccaaacttcctacgaaggcagaaccgcattctcgcgtcggcttgcttttaactgaatccagcccaccgcttctcgcacgtcgccatggacgcggtcgattctgtggtggatcccctccgcgacttcgccaaggacagcgtccgcctcgtcaagcgctgccacaagcctgaccgcaaggatctgacggtttttctctgtgatctgcgcttgcagagttcaccaaggtggcagcgcggacggcgatagggttcgtcgtcatgggcttcgtcggcttcttcgtcaagctcatcttcattcccatcaacaacattatcgtcggttccggctaggctcagggcgcgactagcatgggagtagtgcgatacttttgagagcaagggatagcgaggatcttggtctttggaatagtattgttaatgacattttttttccggttgtgtttctggagtaaatcgttgaacgacaaggcttcaggatgtctggatgtggattctgagtagaccttgaatccttgatgaagcagccagtcttggaaagaaagttccattttgttgttccattaagctatttttgttgttgtctacagctctctcggcgatggtaagcgcgatttggtggtttaatgttttagtatatctgagccgaactgtagactgttgcttctgtgagaaacgaaaaaaaaatatagacgtttgggcggattgtcgctt

SEQ ID NO: 134672 - DNA, 708 bp, Zea Mays
agacattcatgttattacacccggcaagacgaccaaacttcctacgaaggcagaaccgcattctcgcgtcggcttgcttttaactgaatccagcccaccgcttctcgcacgtcgccatggacgcggtcgattctgtggtggatcccctccgcgacttcgccaaggacagcgtccgcctcgtcaagcgctgccacaagcctgaccgcaaggagttcaccaaggtggcagcgcggacggcgatagggttcgtcgtcatgggcttcgtcggcttcttcgtcaagctcatcttcattcccatcaacaacattatcgtcggttccggctaggctcagggcgcgactagcatgggagtagtgcgatacttttgagagcaagggatagcgaggatcttggtctttggaatagtattgttaatgacattttttttccggttgtgtttctggagtaaatcgttgaacgacaaggcttcaggatgtctggatgtggattctgagtagaccttgaatccttgatgaagcagccagtcttggaaagaaagttccattttgttgttccattaagctatttttgttgttgtctacagctctctcggcgatggtaagcgcgatttggtggtttaatgttttagtatatctgagccgaactgtagactgttgcttctgtgagaaacgaaaaaaaaatatagacgtttgggcggattgtcgctta

SEQ ID NO: 134673 - DNA, 1613 bp, Zea Mays
gtcaacccgaccccgttccccagctcaccgcgcgcgctctctcagtctctccttctcttgtggccacgacgagcgacattcgctactcgctaccgtcctacgccaggtgccccaggtcttcttcggttccttcgccggcgacgaacgctaccaggaacttgatcttatattgcaaacttcaagatgttctctgctccaggcaacaattatttggctcttgtagcctcacgaccagggatggagctggctaattttcaacaacaaccaaaccaggctcctggtcctggaggaaaacagcgcacatccagcctggaggcaccaataatgctacttactggtcaccagagtgctatatactgcatgaagttcaatcctgcaggaactgtgatagcatcaggttcccatgacaaggatatcttcttatggcttgcccatggtgaatgtaagaacttcatggtactgagagggcacaagaatgctattcttgatcttcagtggactactgatgggacccagatcatctctgcaagccctgacaagactctgagggtctgggacgttgagactggcaaacaagttaagaagatggctgagcactcatcattcgtcaactcatgctgcccagcgcggaagtggccacctcttgtggttagcggttcagacgatggtacagcaaagctgtgggacttgcgtcagagaggtgcaatacaaactctccccgacaaatatcagatcacagctgttagcttctcagaggcagcagataaggtattcactggtggcctggacaacgatgtcaagtggtgggatcttcgcaagaacgaagtgacagaacatctcaaagggcatcaggacatgatcactgggatgcagcttagccctgatggatcttacctcctgaccaatgcgatggataacgagctcaagatctgggatctgcgcccttacgcgccagagaaccggaacatcaaaactcttacaggtcaccagcataactttgagaagaacctgttgaagtgtagctggtcacccgataaccgcaaggtcactgccgggagcgcggaccgcatggtctacatctgggacacaacgtcaaggcgcatcctgtacaagcttcctgggcacaacggttctgtcaatgagactgcgttccatcccactgagccgatcattggatcctgcggcagcgacaaacagatcttccttggggaactttaagtgactatggcagtggctggcagacccaatgccagaggctcccacatcactgggatgttcttgtgacactttgatgaggagaaaaagaggcactgacatccccattccttcgcctgaaaatcggaatactcagtttggctgatcaggatttgtcatttgtagattgtcttagcctgtttagcccagttgttgacaaaccgctccatggctttgtactctctgactttccgaccttaaacttgatgcggtgcttgaagatcaccgattgaatgtactgtgtctagaacctcactctctggagcttgcctgctgtagttatgtacggctctgccatattgttaatctttcctagtcacctgaaactagctggagaagtgatcttttctagttgcctg

SEQ ID NO: 134674 - DNA, 2502 bp, Zea Mays
gctaaccgcggaccgaactttgaccttccgcgcaatccgccgcttctattctatcgtcgccgacgagcgacgacttcctccttccacagttccacttcctcttcctcctgcccggcgcgctcccacctcctctcacaatcacaagccacacccatggcgacgacggcccatccggcgctccccttgctcatcgtcctagcatgtgccggcgccgccagcgggttctacctccccggcgtcgcccccgccgacttccgcaagaacgacttgctcgccgtgaaggtgaaccagctgagctccatcaagacgcagctgccatactcctactactccctccccttctgcaggccggacaccatcgtcaacagcgccgagaacctcggccaggtcctccgcggcgaccgaatcgagaactcaccctacgtgttcgagatgatggagcctaaactgtgtcagatcgcgtgcaaggttgttctgaccgagcagggagcaaaggacatcatggagaaaatccacgacgagtaccgtgtaaacatgattcttgacaacctccctatggtcgtcccgattgagagattggatagagacgcgcctccattctatcagcaaggtgtgcacgtgggtgtcaagggccactacgctgggagtaatgaattcaagtatttcatccacaaccactactcatttctcgtgaagtataacaaggatgcacaaacagatctcgctaggattgtggcctttgaggttaaaccgttcagtcttaaacatgaattcgatggtgattggaaggggaatgcaactcgacttaaaacctgtaatacacaatctgagcatctaatagtgaactccgatgggcctgaagaagtaaaggcaaacaaagagatcattttcacctatgatgttaactttgaggaaagcagtatccagtggtcatcccgctgggacacctacctccgcacgcctgacgatcattggttttccatcgtgaattctctgaccacggtcctcttcctgtctgtgatggttgccatgatcatgctccgaactctgtaccgcgatatttccaagtacaaccagctagaggaccaggaggaggcccaagaggagtctggatggaagcttctccatggcgatgtgttcaggcctcctgccaatgccgacctgctgtgcgtgtacgtgggcacaggtgtacaattctttgggatgctgctggtcaccttgctgattgccatcctggggctcctgtcaccttcaaaccgtggagggttcatgacagccatgatcctgctctgggtcttcatgggcctgcttgcagggtactccattgcacgtcttcacaagatgttcggggggctggaatgggagaaggtcgccatcaagacggtcttggtattccctggagtcgtcttcgtgatattctttgccctgaacaggctcctctggggcgtgaaatcatctggggctgtgccattcaccaccatgttggcactggttttcctgtggctcggaatctcaatgccactcatcttcgtcggcagctaccttgggtttaggaagcctgccatacagggcccagtgaggacaaacaagatcccacgcctgataccgcagcagccatggtatatgaacccagccgtctcggtgttggtcggaggtatcctaccctttggtgcagtgttcatggagctcttcttcatcctgacaacgatctggatgcaccagttctactacatcttcgggttcctgttcctcgtctttgtgatcctgatagtgacctgcgccgagatcaccatcgtgctttgctatttccagctgtgcagtgaggactaccagtggtggtggaggtcctacctgacacccggctcgtcggctctgtacctcttcctgtatgcagcattctatttcttcacgaaactgcagatcacgaaggcggtctccggcgtgctctacttcggctacatgctcatcgcggcttatgccttctttgtactcaccggcaccattggcttttatgcctgcttctggttcaccaggcttatatactcttcggtgaagattgactaggaagctagaatgccatcgtttcatggtcggcaagagaaatcagaggtcaatgttgtgaaagaatacatgaaatgatgaaaatgtagcatggtttatgcacaaaagtaaggtgtccatagggtatctattcgtctgataattcagttacacttttgcgttcagtaaaacttgaggtatgtgcgctcattattatcacgcagtatacagaattgagatggtacttctagcctgaaatgctgagcatttcatgttgacatgttgtactccttctctttcatacaaaagatgagtcgtcatttggggcaggggcatgaccacagtctacaaaagataatactttcactatgttttctatgaggaagtaatatttcaattaaaagactgtacgatattgtaatattttttcatcataagtctagtaaaaatgattgtggtgtc

SEQ ID NO: 134675 - DNA, 1290 bp, Zea Mays
gaggtcagcgtcatggatggagagaagaaggtgtcgtttagggtgagggagttcgacatggagagcgacctggcggcggtcgaggagctcgagcgccggtgccaggtcggcctgtgcggtgacgacaccgcagccgacgacggcagtactggcggcagcaagatgaggaagaagacaaagagaaagaagaagggcatgtcgctctgcgtcgagcaggtcggcgacccgctggcgagggtccgccacgcgccggagcacgtcatgctggttgccgagtacggcgaggcggcggagatggtcgggctcatcaaggcctgcgttagggtggtgagcagaggcggcggcaagaaacagaaaccttcttcctccacgaaggaggagccgtcgccgccggcgtacgtgaaggtggcctgcctcctcggtctcagggtctctccgtctcacaggcggctggggatcgcgacggcgctggtggagcgcgcggaggagtggtgccgtgagcgcggtgcggcgcacgcgacgatggcgacgaccacgtccaacgcggcgtcactggcgctgttcacgggccggttcgggtacacaccgttccggcggccggagttgctgggaaggccggtgcacgcgcaccgcctgcccatcccgagcgcgcaccgcgtgttccagctgccgccgccgctggcggccgcggcctacgcgcgcctgtccccgccgcaggccacggagttcctccccgccgacatgccggcgctgctggcccacaagctcacgctgggcacgttcgtggccgtcgagagcggcccgccggagccggaccagtccgcgcccccgtccttcgccgtgctcagcgtctgggactccacccgctccatgcgcctccgcgtgcgcggcgcgcgcgcgctgctccgcgcgtcgctcgccgcgctcagggcgctcgaccgtggcgcgccgtggatgcgcgtcccctccgtcccggacatcttccgccccttcggcgcctacctcctctacggcctccgcatgtccggccccgcgggccccgccctgctccgctccctctgccaccacgctcacaacgtggcccgcaacaacccggcctgcgccgtcgtcgccgccgacgttgcgcccgacgacccggccgccgctgccgttccgaggtggcgccgcttctcctgcgacgaggacgtctggtgcatcaagaacctcaacaatgccgacgacgaggatggctggccggcgccggccgtccggaactgtcctgttcgtcgatccccgcgagttctgacgtag

SEQ ID NO: 134676 - DNA, 1029 bp, Zea Mays
tgagttgacaactgaatgaactagttcaagcatttcttaaacagtacagatgacacctgactctagtagtctgctaatcacatggtacaatcaaccacccaatacaaggcttcaattctgaaacaactccatgtaacagataccataagcagaaactacaagaactttttaatctagcaaccacccctcagagcaagaacaagatggagcactgaaccaccttcaatgttgtaatccttggcagttttgtcatcagcaagttgcttcccagcataaatgagcctatgcatggaacatttttattaggaccacacaatgctaaaaaagattacaagaatttggagcttagaaaaaggtttcacattcatttagattttgggggcaagtagagtacctctgctgaataggtgggatgccttctttctcctcaacacgctccttgatcctataaattgtgtcattgggctcgatgtcaatctcgatttccttcccagttagtgtcttcaccttgatcatagttccacccttgagcctcaagaccaaagggagtgttgactccttctgaatgttgtaatcagctaaagttttcccatcctccaattgcttgccagcaaaaatcagcctctggtggtcaggcaaaatgccctccttacctggatcttggccttgacattatcgatggtgtcgctgctctcgacctcgaccgtgatggtcttccccgtcagcgtcaagatgaagagctgcatctcgttggctacgacccgcggtctggggctagggtttacggtggcctaccgcgtgaagtcgccgaagcaaaagtccgaaccgaacgaggagggaggctctcgcagtgttgattaaagaagaatatgatgattgaggaatgaggaagcgaagagggcgtgtggttgttttgcatatttgcacctggaggtgttcatgttcgcatcgaggtcctccgtgtcaggttgcggccgctgcatgtgggccccagtgccatctccgattcgaagccaggggactcggggg

SEQ ID NO: 134677 - DNA, 172 bp, Zea Mays
atgccctcctccctccatcgccgccggctcctcctcctcgtcgtcgctgccgccgcgctgcggggggcgccgttggcggacgccggcgcggacacctgcaaggcgtggttggtgcagtccatccccacggacatgccgcacctgagccgcatccccggggtcctatccacgg

SEQ ID NO: 134678 - DNA, 966 bp, Zea Mays
agatttcgtttctctattgacaagctgtggtatcatttcaggattgtccagcactctggatttgctcctgattttgaccaagagagcgcagacctggctgcaggaagaccaaatgttgagaacgcaaccgttcttttcgaggactggtggggatctggtgttgtgcacgcaaaggtctggatatcagataagaaggatgtgtatataggttccgcaaacaacgactggaaatcccttactcaggttaaggagcttgggatttattttgctggttgcccacagatagcaaaaactgtggaggtctattttcaaaacctgtggacgctttcaaccctcaactcaactttttacaccaaacaagcctgggatacgcagtggcaagtttctagaaaggttccatgctggtctcatttcctacagcccaaagaaagatgcaggtcacccataccactttcagttgacatcccatatgtagatggatatccagctcttgcaaatcctgaaatgattgatgtttcgtttgaaacccctgggtacaagaaacctactcaggagcactacttgagctacctttcctttgcgccacctgaggtgacatttggcagattccaagcagatgagcaggggtgggttgacaccatcaagtctgttaagcttgggggaattgtaagaatgaataccatggattggcttgggcagtcacagtatgctacccaaacagtctactggtcatctttatcgtcagcaatctcagaggtagtattctcaaagaacgcgaccgtgaggctactcgtcgcctactgggcgcatctcatcccaaacaccgagaaatacctgaagagcctactgtactccaacgttctctgcgcgtcttcggcgtacaaccactgtggcggcaaggtcgagatcaagtactacgtggttcctgggcacaacgagaccggacctgctctgtcccagggcggc

SEQ ID NO: 134679 - DNA, 2117 bp, Zea Mays
ccccagtccccctcaacctctctgccaaccgcttcgtcccctcctttctctccttggattccactactccctcgtcctcggagcagttgctgcagctgcaacccccctgcgcctctcttctcccggtcccacccgcccctccgccgcctagggcttccaaatcccctcagcttccccggattccgctttcccccgtcgctgcaaggttccgggaggttctaatctcctttgagcgccgcctgcccgccgtggctgtttctcggtgttcaccgcgttcctccgtgcaatgcggggcctaaacgcggctggggttagggttcctggcccgcagctcgcttcaatttgattttttggaggtttttatagggaggagaaagagtccggatttcgaggagttagtggttgcgtgcttgtctcggcggaggtgaatctcaagttcgtggccggggttttagctcgacgaggcggacaattttctacgagggattggaattctttgctcggtttttgaggtgcccgtgtggaaagcccggtaatttttgaatttttgggcggtaaaaacctgttggttaggctgtggtggtttctatggccggggcgccgagggcccggtccctgaacatcgcggttccggaggcagaggcgaggccggtgctggtgccaggaggcaacaaggccaggtcgggcccggcgaacgcccggaaaccgtcgccgaagcccgtgaggaaggcggagccggcgccggcggggacgccagcggagactgtgcccgccgcgaccaaggcggaagagggcgcaaagaggaatgcagtcggcgggggtggaggtggcgcgcccaagagtgcgtccccggtgccgtcgccgcggcgcacacctcctgggccgccgtcgaggaggaacgacgcgccgctgtcgcatccgggcttgccgctcagcgcgtcttgctcctcggatgcatccgcggagtcggtccgcgcccggcgggctttcaccgggaaagtagagaagggccggtcggtgccgacggctcaaccgaagcaaggcaaggctgtgggtaaggcggtggagagcaagcccatccgcgtggaggttgttgctccgatgacagtgacaccagaggctgtgcaagggaagaggaggtgcgcgtgggttactccaaccaccgatccttgctatgtcactttccatgatgaggagtggggagttcccgtgcacaatgataggagattgttcgaactacttgtactatctggtgcattagctgagcttacgtggcctgaaattctcaagaagaggcaacttttcagggaaattttcatggagtttgaccctgctgctgtctctgaaataaatgagaagaagcttgtggcacctggatgcgttgcccattctcttttatcagagcaaaagctccgagctgtacttgagaatgctcgccagatactaaagatcgctgacgaatttggatcctttgatcggtactgctggggttttctgaaccacaagcctatagtaagcaagttccgctatccaagacaagttcctgtgaagagccccaaggcagatataatcagcaaagacatgatgagaagggggttccgaggcgtgggcccgacggtcatatattccttcatgcaggctgcggggctaacaaatgatcacctagtcagttgcttccggttcgagcattgcagtgccgtgccaactctttgcgcatgcgacatcgacagggcaaacacgaaggcggatctgaaaaaagatgaggtgacagcgaagatctatcgcgaggaggtaatcgcaaacccagagatgctgaggacgatcgatgctcttaccgtttcgtagcaccatgtgggaatggaagagcaacgtggtcgctgaacttgtgtcatctcttatgtagacagtgtgctaggctatcctttgcattgaggtcagaaatcaaaaaaatgcttattatgtaaaaaatcgttctgttgctaatgcttactctgttgtacattgaatggttgggggaagctaaggatggtggccttttcttactgatccagaaactgtcgaattacttgctgtcaataattcagcagttttctcctgaccactgttgtttatcagaa

SEQ ID NO: 134680 - DNA, 545 bp, Zea Mays
ggagaaatttgagcttgatccaaactcgttcttttgcaactgtgtaatccagtttgagtcgctactattttttgtctttaagattatgtatgctcagaatatactagtaaatttacattcacttgtttcccttgcaggtacttgaatgctatacagacaaatgcacaccatcttattaggtatctagctactgcagttgttgtcaacaaaaggagaaggaatatgcttaaagagttgattaaggtcattcaacaggagcaccatagctacaaggatcccataactgaatttctggaatgcttatatgttaactatgtagttgtgggcttttgaacaatagctggagtgatatgaaacattagtgatgtagttgtgggcttttgaactgcttcaagctggagtgatgtcattgtggtgcttttgtgactgatcatctctggagcttttgtgaatgatctagctagctatctgtaaatgatctagttgtgaatgatattataattgtgatgcttttgtgaatatataattgtggtgcttttgtgttt

SEQ ID NO: 134681 - DNA, 243 bp, Zea Mays
atggcgaggtggtcctgtgtacttgcgatgggatgcgggccgatggtggtcctgtgcgctggatggcgacgaggggattgggttgcgattccttccatggcggcgaggcatggattgcgtttgaggcgtggagtatatgggcggagcatctgcggtgcatgggaagaacgattgggcggggtggtcctgcgcgtcgttggcgatgggattcctgcgtgctggattgctgcgaggcgtggatag

SEQ ID NO: 134682 - DNA, 411 bp, Zea Mays
atgatgctccctcatatccatatgctggggaggaagacgacggcgatggaaaagcagcaaagagcacaagagtcactcagcagcactttccatcagtataacgagcagcagcgtcgtcctcttctctccacccctacctgcgtacgtacatctcagatgcagaccagatctggcaaagggcaaggcgagtccacggtctttgccaaatttgggtcatcacatggtgccccccacgctccatttttgtgcaaacaggagcttgctagcgccggcgcgcgcaaccacccggaccgccatggccgcaggaggaaccgagcaagaactcgagagagcgagaagagaacccccgagcaagcaagagcagaaacagcgcgagctagctggaataatggctacagtgttcaaagatga

SEQ ID NO: 134683 - DNA, 549 bp, Zea Mays
atggtggagggcacgataaggctgttgggtgagcgtaaaatgcgtagacaacaggcagacgaggatggcggtcacgacatgcacgaatgcggttggagcagacgcggcaagaacagagcacgacatggatttcgggaggccatggttggagtgcctgtgggcgaggatggcggctgttgttggagcgcccgcggttacgggtgggtttatggcgagcagaggggttgcgagatatgtggagcgctcgagtcggttgcaagctccacggtaatggaggcatggtggaggcggtgtggggagggaggtcgcacggaggcgataggcggagcagcgaagtggggagggaggtcatggggagatccggatgagcgtaggtgtggcggaggcggcgtggagagggagggcacaaggaggcggcgtggggagggaggttggggacggcggcgtggggagggaggttgcgaggaggcgacgtggggagggaggttagggacgaagatggtgtgggccaaagaggcggacagagaagtgtgtaggacagtgggttga

SEQ ID NO: 134684 - DNA, 3382 bp, Zea Mays
attgattactccaagcaccacaaaagcttgtgttttctggagatactggagaagcaattcatacgaatactgtaattgaaaataaggtaaaagttaagttggggcagctgatgttttttcttccaaatagcaacaccaaagcttccaagaaatcaaatcacaatagctgtcaaagaatgcagcaaaaagatatagaataatggtgcactacaagtctacaacacgataacgtgaaaacttcagcagagaacactgaacttgttcttgcctataaaatctgtaatacagatctgctataactccaaaaatataactatatgagacctgttatggcaagtggagctggcccaggggaaccccgtggtactgcatcgtgtcaacaacattagaattggtttggtttggtttggtaggaaaaggacaatttagattgatgatgttagatattttcttaggagtcaagtcagcccatctctataaaagagacagttaggtaccaattagaggcaagcagaaatagatctaagaagctcagagcctccagagggagggcgtgttagcagatatatctattgctcttgtatcctgctccacattgaatctaccatgacatctttggtatcagagacttcaatattcggtcctgaagtcatagaagaagtggcacgaagttttgagatcgaggcagattccatgtccattcatcagaccttcccagaggacttcatcctgattctttcggatgaggatgctgcaacaaaggtgctcaatggaggaagagttctcagagggcctcagtttaatattcagttcaagcgctggacaaggctggctcatgcaacggcagctccattgccgtcgctggtcgacatcgagatacaagggattccgttgcacgcttgggggcggtccacagctgaacagctacttggtaattcctgttggatcacagatgtgcacccggctacttccctgaaaagtgatttttcatccttcaggcttcgggcttggtgttgcgagttagagaagcttcaacgtgccatgaatctggtcattgttgagccaacgccagcggatcatgtgaaacggtgtttatcctacagtattgaagtgactgtcaccccagtcgagaagccactgtcagatgggacccctccacttcctcctcctggcaacgacaacaggcatgaagatggcgatcgtcgccgtcctgaggctccaccccctcgacgccggcgagaagaccttcggaggggacccatccaccgacgcctgggccctcttgctcctgtgaatgactgtggtaggggctctgctaaccacagcaccagcgatgctctagaggcgccaagatccgctgagacagagacggttcaggtcccaagggcaacaagatccaaagaggcagcggcggtccaggttctagctttggacaatgaagtcctttcaacaccccttcctgttctcgagttgtcggctctctcgggggacgtgttctggccggcggcgattggagtaaagcaccatggaggttgcctcgggcctcacgtctggggcacgcgtacagccgcccaacagtatgaggcactcctggcagttgaagtggttgggtcgctggaattggccaggcaaacctcgccccagctgtctgggccgctgatggttcctgggccggtttcgccccactcactcctgcgtaataatctgctgggcagttctgatttggatgggccgctggaatctggtgcgttggtttcgccccagcatacctttgtcgggtcgctggaaccgagcgtccaaatttcgccccctccagagtctgcttggaccctcagtttagttgcagcccagaataaaaatttaactggccagggcagtacgtccctaaaagtttatactaggaggacagctgataacaggaggcaaaagtatgattctcaggattccccactcattcaagcccttcagccgaatcgagtctcttcttctcaagaacagaatggtattgcaaatacagtccaagcttttgttgacaaagtaaccaggaaggtgaatggtctgctccctccaccactcccccacagaagacgatccaagcagcttccatctgacttcatcccacgcagaagcaatcgcctggcaaagcgagagactaaaacaaatgctgcacgcagacagattcaagctgacctgataagaagcctggatgtgccttgcgatggagagttgttaagtcctaaagcccttgaagcttatggcaacttgttcaaaaactcactctctgaagctcatatcaaagcgctgtcagccctcttcggatggacagtcccagatgtttttgaacctgttaatgtgttgtgtatcgccggacaaggcccagaagaccttgagtaaggttgctgttcaagcagcgcatagttgttttatttggtttttcctgatggatccttcaaaggttttgttttggaatgtaaggggtctgaacaaaaaggcaagaagagactcagtgcgtgttgtgattaataacactaagcctgatattgtatgtttgcaagaaacaaagaaagcatccatttctcggcatatgattctctctctgttaggttctgattttgaagagtatgttgttcttccggcgactggtacgcgggggggaattattttagcttggaggatttcggtctgcaagatgctccaaactagaatagacaatttttcagtctctgctcaaaaccagcagcaggatggtgtggcttggtggtttacgggtgtttacggtccccaactcgatgagcataaaattcaatttcttaatgagctgcgcctgattcgatcacagtgtcttggtccgtggatgattggtggggatttcaaccttatatatagagctgaggacaagagcaatgacaatcttgatagagctatgatgggaaggtttaggcggctgcttaatgacttacttctaaatgaactgcccctttcaggtaggaagttcacctggtccaatgaacgggcctcacctactttggttcgcctggatcggattttctgtacagcagattgggaggacatgtttccgaattgtctcttgcagagctctgcatcccagatttatgatcattgtccattactgttggggctgcatgatcttgtccaaggaaaaataagatttcattttgaaagtttctggatcagattagaggggttcatggaagaggtggaaaactcttggtcacaacctctggaagtctgctgccccttgcagcggttccatgacaaactaaaaaggcttgcaaggcaccttcaagcctagagtcagaaaaagtgggcaacattaagcagcagatcctgatggcaaatgagatccttcacaggctggaaa

SEQ ID NO: 134685 - DNA, 113 bp, Zea Mays
ccactaatattgatattgcataagaaacaaagtaaaagctggacaaagaagggctacgcagtgtacccatatagaacgtccaagtggcgaaacaaaactgtcattacaaaaac

SEQ ID NO: 134686 - DNA, 199 bp, Zea Mays
ttttttttcttttggcgaattcaattttataggcactattatgttcttggaaaaggatttggacttggaaaataatatatatacattctccgatcagaaaagtctaatgaaacggaaattaatggtaggtaattaacaacagtagtacatgatatgtatatactaaccctactagattattttacatggcaataaaaat

SEQ ID NO: 134687 - DNA, 1398 bp, Zea Mays
atggcctcgtcatcacattcactgatccaccccagctcttttgatatgttctgtccccggtcgtcccatgatgcttcgtctcgtctcccaagtcccacccaggtcccggaactagccgtcgctctccgcccagccagccactcatcagtccagcctccttcctccactgcctatatatttgcctgccctgctggagccacggcccctctcatccatccatgcacaagcgcgactcctcagcttcctcctctccttccttccttagctgtcccccttcccgccacctctgacccgtttcctgctcctgatcctgacgcacgtacgtctgggctgctgtactacgcgattctcgcggcggcgcccatggacccgtggatcgggcagccttccctgagcctggacctcaacgtcggccttccgacggcggcgaggccgcctgcgaccaccaccaccgccgaggtcttggtcgaggaggacttcctggccgtcaagaaagaccgagaggtgcaggtgcaggcgctcgaggcggagctccggcgagccggcgaggagaacaggcgcctcagcgacatgctccgggcggtggtggccaagtacgcggagctgcagggccaggtcaacggcatggcggcgccggtggtgtccacggcgggcaacagcgccgccgccgccgccgccaaccgccagtcctccgcgtcgtccgacgacggcggctccgcggccggctcgccgtccaggaagcggccggtccggagcgacagcctcgacaccgcgccccagcatcacaaccgcaagccgccgtcgccgtacgcggccgcccccgcccccggccccgaccagatggagtgcacgtcggccgccgtcaccatcgtcgcagccgccgccgcctaccaccacgagccggccaggcgcatccgggaggcggagcgcaagcccaaggtgtcccggcgattcgtccacgccgacccctctgacctcagcctcgtggtgaaggacgggtaccagtggcgcaagtacgggcagaaggtgaccaaggacaacccgtgcccgcgcgcctacttccggtgctcgctcgcgccgtcgtgcccggtgaagaagaaggtgcagcgcagcgcggacgacagcgccgtcctggtggccacgtacgagggcgagcacaaccacgcccgcccgccgcagcacgacggcggcgccaagaggtcgtccgcgccgccggcgggcgaggccgcgcgaccgccggcgccactgccgctgcagaagcaagaggccgggccgtcgtcggaggtcgcgaggaagaacctcgcggagcacatggcggtcacgctcacgcgggatcccgggttcaaggcggcgctagtcagcgcgctctccggccggatccttgaccagggattatag

SEQ ID NO: 134688 - DNA, 2304 bp, Zea Mays
gccacaccaaagaccaaacttggctcgtgtcgtgtctcagtgtctgccaccgagacaaaaatcgtcgtcagaaatttaacgacgcatattcgtctgactgacccgcccgtgcgccttcctcccgcctccccttccaccaccaagagtgacgacagagagacagacagagagaatggcggcgccagatgcccggccctcgtcagccggtccaccgccggcccgctccctcctcctgcctctcctgctcgtgctcctcctcgcggcctactcgctcccagccgactcagcagcgcgcccgtcctccaactccaacccacggcctgccttcacgccgccgctgctgaagcgccaccagctgcggcgcccgagcagcagcagcgccgagctcgtcgccgggcccgccaacgcgtcgaccaagcccttcacggcgcactacttcccgcagctgctcgaccacttcgccttcacgcccaacgcgtccacggtcttccgccacaagtacctcctcaacgacaccttctggcgccggcccggcgccggcgccggcgacgacggccccggcccgctgttcgtgtacacgggcaacgagggcgacatcgagtggttcgccaccaacaccgggttcatgttcgacatcgcgcccacgttcggcgccctcctcgtcttcatcgagcaccggttctacggggagtcgaagccgttcgggaacgactcgtacaggtcggccgagacgctgggctacctcacgtccacgcaggcgctggccgacttcgccgtcgtcatcaggggcctgaagcgggacctcggcgccgaggccgctcccgtcgtcgtcttcggcggctcctacggcggaatgctggcttcctggttcaggctcaagtacccccacgtcgccattggtgccctagcttcctccgcgccgatcctgcagttcgaccacataacgccgtggagcagcttctacgacgccgtctcgcaggacttcaagtccgagagctccaactgcttcggtgtcatcagggcagcctgggacgtcctggatgagaggggggccacagacaaagggctcctggacctcagcaaactcttcagagcctgcaagactgtgaagtacgcttattcaatccggaactggctgtggacagcattcacctacactgccatggtggactacccgaccccagccaacttcctggagaacctgcctgcctacccagtcaaggaggttgtccatttgtctgcaaaagtgaacctggactccagctctaccgatcatgaagctttcgcgtgaaaacatctgcagatgtgcaagaccatcgacgcgttccccgcgggcgcagacgtcctggagaaggcgttcgcggcggcgagcctgtactacaactacacgggagaccaggcctgcaacaagatagaggacggagacgacccgcacggcctcgatggctggcaatggcaggcctgcacagagatgatcatgcccatgacgatctccaacgagagcatgttcccgccgtccgccttcagctacgacgacaggtccgacgagtgtttccagagctggggggttcggccgaggccgcactggatcaccactgagtacggtggatataaaatcgataaggtgctcaagaggttcggcagcaacatcatcttctccaacggaatgcgagacccatggagccgtggcggggtgctcaagaacatctcgtccagcatcatcgcccttgttacagagaaaggtgcccatcatttagacttgaggtcttcaacgaagggtgatccagactggctcatagaacagaggaggcaagaggttgagatcattcagggatggattgatcagtatcatcaggacatggcggaaacatcttcctgaagacagggcaagtcagtattcttcttcttacacatggtggaaacagggcgtgtatcatcaggacatggcggaaacatcttcatgaaaacaggacaccttcctgttacggtcatgtttggatccatggaaaaaaataaaggacaaaaaatcaataatttacacactaaacatcagaaattgctgaatcttacacaaagcaggcccctttgtgaattagtaaggggtggtgcaggtgctgggacttcaatccgcgccagagcagtgatcgactgatctcgcaggcctctggccagcggaccaaggcagtcttgagtcttgactcagtttctgttttttttaactgtattgtttcttcttttgttctcggcaaggaacagtcttgacatttttctctgttttatgcatgtagattagggctgggtatc

SEQ ID NO: 134689 - DNA, 2226 bp, Zea Mays
gccacaccaaagaccaaacttggctcgtgtcgtgtctcagtgtctgccaccgagacaaaaatcgtcgtcagaaatttaacgacgcatattcgtctgactgacccgcccgtgcgccttcctcccgcctccccttccaccaccaagagtgacgacagagagacagacagagagaatggcggcgccagatgcccggccctcgtcagccggtccaccgccggcccgctccctcctcctgcctctcctgctcgtgctcctcctcgcggcctactcgctcccagccgactcagcagcgcgcccgtcctccaactccaacccacggcctgccttcacgccgccgctgctgaagcgccaccagctgcggcgcccgagcagcagcagcgccgagctcgtcgccgggcccgccaacgcgtcgaccaagcccttcacggcgcactacttcccgcagctgctcgaccacttcgccttcacgcccaacgcgtccacggtcttccgccacaagtacctcctcaacgacaccttctggcgccggcccggcgccggcgccggcgacgacggccccggcccgctgttcgtgtacacgggcaacgagggcgacatcgagtggttcgccaccaacaccgggttcatgttcgacatcgcgcccacgttcggcgccctcctcgtcttcatcgagcaccggttctacggggagtcgaagccgttcgggaacgactcgtacaggtcggccgagacgctgggctacctcacgtccacgcaggcgctggccgacttcgccgtcgtcatcaggggcctgaagcgggacctcggcgccgaggccgctcccgtcgtcgtcttcggcggctcctacggcggaatgctggcttcctggttcaggctcaagtacccccacgtcgccattggtgccctagcttcctccgcgccgatcctgcagttcgaccacataacgccgtggagcagcttctacgacgccgtctcgcaggacttcaagtccgagagctccaactgcttcggtgtcatcagggcagcctgggacgtcctggatgagaggggggccacagacaaagggctcctggacctcagcaaactcttcagagcctgcaagactgtgaagtacgcttattcaatccggaactggctgtggacagcattcacctacactgccatggtggactacccgaccccagccaacttcctggagaacctgcctgcctacccagtcaaggagatgtgcaagaccatcgacgcgttccccgcgggcgcagacgtcctggagaaggcgttcgcggcggcgagcctgtactacaactacacgggagaccaggcctgcaacaagatagaggacggagacgacccgcacggcctcgatggctggcaatggcaggcctgcacagagatgatcatgcccatgacgatctccaacgagagcatgttcccgccgtccgccttcagctacgacgacaggtccgacgagtgtttccagagctggggggttcggccgaggccgcactggatcaccactgagtacggtggatataaaatcgataaggtgctcaagaggttcggcagcaacatcatcttctccaacggaatgcgagacccatggagccgtggcggggtgctcaagaacatctcgtccagcatcatcgcccttgttacagagaaaggtgcccatcatttagacttgaggtcttcaacgaagggtgatccagactggctcatagaacagaggaggcaagaggttgagatcattcagggatggattgatcagtatcatcaggacatggcggaaacatcttcctgaagacagggcaagtcagtattcttcttcttacacatggtggaaacagggcgtgtatcatcaggacatggcggaaacatcttcatgaaaacaggacaccttcctgttacggtcatgtttggatccatggaaaaaaataaaggacaaaaaatcaataatttacacactaaacatcagaaattgctgaatcttacacaaagcaggcccctttgtgaattagtaaggggtggtgcaggtgctgggacttcaatccgcgccagagcagtgatcgactgatctcgcaggcctctggccagcggaccaaggcagtcttgagtcttgactcagtttctgttttttttaactgtattgtttcttcttttgttctcggcaaggaacagtcttgacatttttctctgttttatgcatgtagattagggctgggtatc

SEQ ID NO: 134690 - DNA, 2775 bp, Zea Mays
atggcggcggcctccgcctccgcgtcgctggaagacctcaagaacgagaacgtcgacctcgagagcgttccgatccaggaggtgttcgccgtcctcaagtcctcgccgcacgggctcacctccaccgatggcgccagccggctcgagatcttcggccccaacaagctcgaggagaagaaggagagtaaactgctcaagttcctgggattcatgtggaacccgctctcctgggtcatggaggccgccgccatcatggccatcgccctcgccaacggaggggtgctgagggacggcaagtggtcggagcaggaagcggcgatcctggtgccgggcgacatcatcagcatcaagctcggcgacatcatccccgcggacgcgaggctgctggagggcgacccgctcaagatcgaccagtcagcgctcacgggcgagtcgctccccgttaacaagatgcccggcgacagcatctactccggctccacctgcaagcagggcgagatcgaggccgtcgtgatcgccaccggcgtccacaccttcttcggaaaggccgcccacctcgtcgacagcaccaacaacgtcggccacttccagaaggtgctgacggcgatcgggaacttctgcatctgctccatcgcagtcgggatgctggtcgagatcatcgtcatgtacccgatccagcaccggcagtaccgcgagggcatcgacaacctgctcgtgctgctcatcggcgggatccccatcgccatgcccaccgtgctgtcggtgaccatggccatcgggtcgcacaggctgtcggagcagggcgccatcaccaagcgcatgacggccatcgaggagatggccggcatggacgtgctctgcagcgacaagaccggcacgctcaccctgaacaaactcaccgtcgacaagaacttgatcgagccgtttgtgaaggatctggacaaggacgccgtagtcctgtacgcagctcgagcgtcgagaaccgagaaccaggacgccatcgacgcctccatcgtcgcaatgctcgccgacccgagcgaggtagtggcgattcatggatctcatctcacgaacattgtaacgccgcaggcccgtgccggcatccaggaggtgcatttcatgccgttcaatcccgtcgacaagcgcactgccatcacctacatcgactccgacgggtcatggcaccgcatcagcaaaggtgcaccagagcagatcatcgagctgtgccggctccgggaggacctgagccggcgggtgcacgccatcatcgccaagttcgcggaccgtggcctgcgttcgctggccgtggcgcggcagagagtccccgagggcaacaaggacgcgccaggcactccgtggcagttcctggccgtgctcccgctgttcgacccgccgaggcacgacagcgccgagaccatccgccgcgcgctcaacctgggcgtgaacgtcaagatgatcacgggcgaccagctggccatcggcaaggagaccgggcggcgcctcggcatgggcaccaacatgtacccgtccagctccctgctcaaggacggcgacacgggcgggctccccgtggacgagctgatcgagaaggcggacgggttcgcgggcgtgttcccggagcacaagtacgagatcgtgcggcggctgcaggagcggaagcacatctgcgggatgacgggggacggcgtgaacgatgcgccggcgctgaagaaggcggacatcgggatcgccgtggcggacgcgacggacgcggcgcggggcgcgtccgacatcgtgctcacggagcccggcctcagcgtcatcatcagcgccgtgctgacgagccgcgccatcttccagcggatgaagaactacaccatctacgccgtgtccatcaccatccgggtggtgctgggcttcctgctgctggccctcatctggcggttcgacttcgcgcccttcatggtgctcatcatcgccgtgctcaacgacggcaccatcatgaccatctccaaggaccgggtgaagccgtccccggtgccagacgcctggcgcctccaggagatcttcgccaccggcgtcgtcctcggcacctaccaggctctcgccaccgtcctcttcttctgggccgttcgcgacaccgccttcttcacgaatacgttcggggtgcaccacatcggggacagcacggaggagctgatggcggccgtgtaccttcaggtgagcatcatcagccaggcgctcatcttcgtgacccgcgctcggagctggttcttcgtggagcgccctggcctgctgctggtggccgccttcctggccgcgcagctggtggcgacgctgatcgccgtgtacgcgcactggccgttcgccaagatcaagggcatcggctgggggtggggcggcgtcatctggctcttcaccatcgtcaccttcttcccgctggacgtgttcaagttcgccatccgctacttcctgagcggcaagcagtggaacaacgtgttcgacaacaagacggcgttcgccagcgagctggactacggcaggggcaagcgcgaggcgcagtgggcgatcgcgcagcggtccctgcacgggctgcagcagcccgaggcgtcgggcctcttcaacagcgacaacagcaacgatttcatcgagctctccgagatcgccgagcaggccaagcgccgagcggagatcgccaggctaagggagctgcacacactgaaagggcacgtggagtcggtggtgaagctcaaggggctggacatcaacaccatccaacataactacaccgtgtga

SEQ ID NO: 134691 - DNA, 207 bp, Zea Mays
agtgtttgtcgtaacaaccgagtaccaatctgttatgcaactcattttagctatatggcgaagtgcagctagcacatgctggcataacatccaaacgttaagatcattcgttaccgttatgaagccatttcccacattaataattcaatcacggttaataattgagattaatctataccctctattcttaacaaagaaaaaaaagaa

SEQ ID NO: 134692 - DNA, 1359 bp, Zea Mays
ctttcgctcgtctcgcctcgtctccacgcccctctcattcgcaccgctcccacccacatcctcttcgcctcccctcccactctctctctctctctctctctctctccgcacgcctccgcgtgggcttccgctcgggcggtggtccacctcgcccaggcacaggcagcgggacgcgacatgaccgcggccgacggggaggcctgcgcggtggtcgcgacggccgccgacatcatatgctctctccgtggcgcggacctcgctggctggaccccgccgtggagccagcgccagcacgagcccgatcccgcccgcgacggcgtgcaggcggagggcggggacgacgcgcgggacctggcctggccggcggtggcgcgcgggaagcgctcgcggtcccgccgcgagtccccgtcggcctcgggctccgctgcctccgcgggcgcgacgacgacggcgacgaagaagaagacggcgaggcgaggcgcccgaggcagccccgcgtcgcccctcgactacagcggcgcgtccggctccggctccggcgcgtccactagcggcggcgaggacggcgccttctgctcccggccagacccagcgctccctccggccgccgcgtgccagcagctcgcggcgcccccgcctcccagcaaggtgggtggcctcgccggacggcggacgatccccgcggtgccagtgccactgccaccacctcggcccgccggacagcgggcgcggaagaagatgaggctcccggagatccagcagatggtgcggtcgctgtcggtggagaacgacgccctccgcaaggagatgagagcgttgcagagggattgcacggcgctgtcccaagagaacggcaagctagagacaaggctccatcagtccattacgctgagcgaggcgatctccgtggagaacaaggggaagccacgcccactacagcctgagcaggaagctccgagcggcttcgtgctccctgacctcaacctcccggcagacgtctgatgatggctgagtttgtcggcgtggctacagtacgtcttcagatcgaactagcacgctaacctgatgattaactgtacatagaagaagctgggccgggttctggaagatcacgcttgccaggatactgaagacgaacggagattatctttttttttgtttcatatgttgttgacatttagggtttagagctgtcgtcgtcgtagtcctccggcctgaatgacgtcgtttttctgttcagggtggaggatcggttttaacgtttattacctcacgtacgttttctggtaaggttgtagatgctgccgcagtcttcactaacagctatagaagatgagagaactcgagccattggaggcc

SEQ ID NO: 134693 - DNA, 1496 bp, Zea Mays
cgacacaggatcagagccgtcttggccgcgtcgcctccttggcgaacgggcgcgtttggcgccacgccacgccataccgctgccacccaccgcaatccaagcaagcagccccgctatgtcggtcgctgtgctgcgagtgcgagccatggagctactggcacgacccgcagcggcagcgtcgtcctcctgcgcgcgaccctcgctacagctccccgccccgggcacatcccgtccccgtcggcccgggttccctactctccgcgcagctgcggcggcagcggcggcgatcgccgcggagccgcaatcgaacgagcagcagaatatcattatggaaactgaggtgtttgcctgccctgtctgctacgagccattgatgagaaaagggccaccaggcataaacttgccagcaatttataggtcgggattcaagtgttcaaagtgcaacaagtcatttaccagcaaagacatcttcctggacctcactgtaactgcagggacaaaagaatatagcgaacagaagcccgctagaactgagctgttcaggagtccacttgtctcatttctttatgagagagggtggcgacaaaactttaatcggagtggtttccctggtcttgacgaagagtttcaaatggctcaagactatttttcaacccattgctggtggtatccttcttgatgtcagctgtggcagtggcttgtttactaggaagtttgcaaagtctgggacatactcagctgtgatcgctttggacttctctgagaatatgctccgccaatgctatgaattcattaagcaagatgattctctcctcaatgtgaatctcgcactcgtgagagcagatatttcgaggctcccttttgcttcttgttcagtagatgccattcatgctggagcggctatccattgttggccctcaccctctaatgcggtagctgaaataagccgcgtcctgaggcctggtggagtgtttgtgggaaccaccttcttatcctctcccaggaacaacccattctctgttgaagcactaaggccacttagacagattgttggaccagttaacaccagctacaactattttactgaaggagagctagaagacttgtgcaaatcctgtggccttgtcaactacagcagcaatgttcagaggtcatttatcatgttctccgggcaaaagccatactgaagaatcctgtcaaatccaaactctgttgtttcttcaggattccttgcaaaaacacgtttagaagtatttgcgtatatttgtgccatactgtgcataggttccttaatttctgtactattccttaatgtattcagtaccaaaaaaaaatgcatgctgcagactcttagaaaagccctacgtttctgtgaatcaacaaacctgaaagcctagaataatgcttgaattctattgctctcctaaaattgcacgttaaccgtgcttgctctcaagtgcttctagttagatgccctatataaaaacacaaaaata

SEQ ID NO: 134694 - DNA, 979 bp, Zea Mays
cacaggatcagagccgtcttggccgcgtcgcctccttggcgaacgggcgcgtttggcgccacgccacgccataccgctgccacccaccgcaatccaagcaagcagccccgctatgtcggtcgctgtgctgcgagtgcgagccatggagctactggcacgacccgcagcggcagcgtcgtcctcctgcgcgcgaccctcgctacagctccccgccccgggcacatcccgtccccgtcggcccgggttccctactctccgcgcagctgcggcggcagcggcggcgatcgccgcggagccgcaatcgaacgagcagcagaatatcattatggaaactgaggtgtttgcctgccctgtctgctacgagccattgatgagaaaagggccaccaggcataaacttgccagcaatttataggtcgggattcaagtgttcaaagtgcaacaagtcatttaccagcaaagacatcttcctggacctcactgtaactgcagggacaaaagaatatagcgaacagaagcccgctagaactgagctgttcaggagtccacttgtctcatttctttatgagagagggtggcgacaaaactttaatcggagtggtttccctggtcttgacgaagagtttcaaatggctcaagactatttttcaacccattgctggtggtatccttcttgatgtcagctgtggcagtggcttgtttactaggaagtttgcaaagtctgggacatactcagctgtgatcgctttggacttctctgagaatatgctccgccaatgctatgaattcattaagcaagatgattctctcctcaatgtgaatctcgcactcgtgagagcagatatttcgaggctcccttttgcttcttgttcagtagatgccattcatgctggagcggctatccattgttggccctcaccctctaatgcggtacaatttctcatttgcacttttgactagtgcagttgtgttcatattcc

SEQ ID NO: 134695 - DNA, 1340 bp, Zea Mays
tcagagccgtcttggccgcgtcgcctccttggcgaacgggcgcgtttggcgccacgccacgccataccgctgccacccaccgcaatccaagcaagcagccccgctatgtcggtcgctgtgctgcgagtgcgagccatggagctactggcacgacccgcagcggcagcgtcgtcctcctgcgcgcgaccctcgctacagctccccgccccgggcacatcccgtccccgtcggcccgggttccctactctccgcgcagctgcggcggcagcggcggcgatcgccgcggagccgcaatcgaacgagcagcagaatatcattatggaaactgaggtgtttgcctgccctgtctgctacgagccattgatgagaaaagggccaccaggcataaacttgccagcaatttataggtcgggattcaagtgttcaaagtgcaacaagtcatttaccagcaaagacatcttcctggacctcactgtaactgcagggacaaaagaatatagcgaacagaagcccgctagaactgagctgttcaggagtccacttgtctcatttctttatgagagagggtggcgacaaaactttaatcggagtggtttccctggtcttgacgaagagtttcaaatggctcaagactatttttcaacccattgctggtggtatccttcttgatgtcagctgtggcagtggcttgtttactaggaagtttgcaaagtctgggacatactcagctgtgatcgctttggacttctctgagaatatgctccgccaatgctatgaattcattaagcaagatgattctctcctcaatgtgaatctcgcactcgtgagagcagatatttcgaggctcccttttgcttcttgttcagtagatgccattcatgctggagcggctatccattgttggccctcaccctctaatgcggtagctgaaataagccgcgtcctgaggcctggtggagtgtttgtgggaaccaccttcttatcctctcccaggaacaacccattctctgttgaagcactaaggccacttagacagattgttggaccagttaacaccagctacaactattttactgaaggagagctagaagacttgtgcaaatcctgtggccttgtcaactacagcagcaatgttcagaggtcatttatcatgttctccgggcaaaagccatactgaagaatcctgtcaaatccaaactctgttgtttcttcaggattccttgcaaaaacacgtttagaagtatttgcgtatatttgtgccatactgtgcataggttccttaatttctgtactattccttaatgtattcagtaccaaaaaaaaatgcatgctgcagactc

SEQ ID NO: 134696 - DNA, 1949 bp, Zea Mays
atatcgatatgaatggcgacgtggcgctcaactgcagcatgaattgaaccagctgaaacgcaaataaagctagctgatggacaaatttcagccatgcatgccgaaatggccaaggcaggcagcacagcagggcagccatgggaccgtccgggtccggcagaagctggctcgtcgtcctcgtcgtcgtctctgcaaccctctgcgcccatgcgtcagctgcggcgtccgacacgacgacgaccgtgctggcggcggagcgcacgcggcggaaggaccccctggacgggctcaggtactacaccggcggctggaacatcagcaacaggcactacctggcgtcggcaggtttcagcgcggcgcccgtgttcgcgttcgccgcgctctggttcatcgcggcggcggcggcgctcgtctgctgctgctgctgcttctgctgccgcggcggcggcaacggcaacagctactcctactcgcgccgggtgttcgcgctctcgctcctgctgctgctcgccttcacagccgcagccgtcgtcgcgtgcgcggtcctgtacgacgggcagcgcaagctgagcggcagcacgacggcgacgctggactacgtggtgggccaggcggacggcgccgcggccaccatgcgcaacttcacggccctcctggaggcggcgaagacggcgggcggcggcgtggcctcgctgccccccgacgtcgcgcggggcgtcgacgacgtcgcgcgccgggtggacgcggccgccgacgccaccgccgcgcgcgcggccagcaactcccgcaggatccggacgtcgctggacgccgtgttcttacgcaatttctatccacaacctgttgcagcgttctcgttgacggggaagaagtcgcttgtgtccacagcggtgtttcttgcatggatcataattacggcgaccctaatactgtccggcactttccttctcctgcacaacgtgataggagacacctgcgtggcgatggacgagtgggtggcccagccgcaggggcaggggcagagccacaccgcgctggacgacatcctgccctgcgccgacgcggcggtgacggcggaggcgctgcggcggagcaaggaggtgaactaccagctggtctccaagctcaaccagctgctctccaacgtgtcgaacggcaacgtgcctccgcaggccgggcccccgctctactacaaccagtcggggcctcccgtgccgctcctctgcagcccctacagcgccgacctctccgaccggccctgcgccgtcggcgaggtcaccgccgccgacgcgcagcaggtctggcagcgctacgtgtgccgcgcggcggcggggtcgggccgggaagaggtgtgctcgacggcggggcgcctgacgccggcgatgtactcgcagatggtcgccgtggccggcctcagcgacgggctgaggcggcagtccccggccctggccgacgtcgcgagctgcgtgaccgtgcggcgcgcgttccggacggtgggccagcgcggctgccccccgctgcggcgggacagccgccgggtgtaccaggcgctgctcgcggcgtcggcggccgggatgctcgccgcggccgcgtggctcgtgcactcccgggagcggcggcggcggcgggacagcgagcggttcaaggtgtcgccgtacaggctccccatcgaggacaaggtgctgctcaacagccccagacggccgtacaggcgagtgtagctgtagtgtaaacacaagcttggtcatcgaccagacgctgacggatcggatcggacctctcgagcacagtgacgacgacggtccagtgcaggtccggtaggggagaaaatggattccgagcagttttggcagtacaattctgtaaagtatataaatgtgtccttgtactgtggtaactgtacatgagtggctacgcgaataaggtaccttcttggattggatcaaacc

SEQ ID NO: 134697 - DNA, 959 bp, Zea Mays
tgtgctcactggccgctcagccgcgcgggaagtgtaggttggtggacagggaagctgagggcaggctgcctgcaacgccaatacgccatggacgacgactggtgcgcgtggctggcgcggacggggctggcgccggcgctggcgcacgagtacgggcgcctcttcagccggaacgagctggagcccggggacgcggcgcacttcgaccacgacctgctcaagagcatgggcatcgccgtcgccaagcaccgcctcgagatcctcaagctggccaaggagcaggccgccgcgtcgtcgggctcgcggctcgcgcgcagggccaccaggtgcctgtcgcggtgcgtgcgccggctggccggaggcggcgcaaggcggggcgcgccgtcgtcggtcgccgccgtcgtcccgaggatctgcagcggcgacgacgccgtccaagtcggcgccgtgcagcggaagagcaccggtagcgccgccaagaagatggtgctcatgatcaccgacggcgccgctgccgtcgccggagcgggcggcctcagcggcggcggcggcgcgaggctgtcgtcggcgaaggcgagcctgatgttccacgacgaggagtgcggaacggaggaggaggaggagggcggcgcgggcaccggcaatgacgacatcaagtgggactccatgtttcaggacctcaaacccacgtgaagataaagttgctttgcttgtctcctctccgatctccggcagctcgggttcggtgctgctgcgtcagtcgttgtcatagctttgcttttgtggaattgtggtggagaggattttagtaaactctcaaccgtggtgttcgtcgttttcagttccctgagaagagaaggaagaatgcgtgtttcgtaatgttgagcaaataatgtcgaaaatgtgtaatttcccccgtcggttttgcagtatctaagcttcagcacgaatcagagacc

SEQ ID NO: 134698 - DNA, 122 bp, Zea Mays
gtacttgtgtccaacaacctaaatttagtggcaccctaaatcatcctcctacctcaaagacactacccatccaccctatcttaagaaaaataggaggttgattttaggggaactgctatggg

SEQ ID NO: 134699 - DNA, 3847 bp, Zea Mays
ccacaaccaatttccagttccattccctttccgtttctgttcctcagactctcttttcccgtcgccgcctctcgcccccgtactcctcgccaccaccaccaccaccacttccctcccctcccggcctccccccaccccacccgcacccgcccgcgcgcccctcattcattcgcctcgatctcgccggcgatgtacggcaacgacaactggatcaacagctacctcgacgccatcctcgatgccggcaagggcgccggccccgccaggggccggggaggcggcggtggcggcggcggggaccggccctcgctgctcctgcgcgagcgcggccacttctccccggcgcgctacttcgtcgaggaggtcatcaccggctacgacgagaccgacctctacaagacctggctccgggcgaacgcgatgcggagtccgcaggagaagaacacgcgcctggagaacatgacctggaggatctggaacctcgccaggaagaagaaggagtttgagaaagaggaagccaatcgcttgtccaaacgccgtctagaggctgagaagccacaaaatgatgctactgcagacatgtctgaagatctttttgaaggtgtgaagggagaagacgttggtgatccatctgttgcctacggtgacagcacagctgggaacacacctaggatcagttcatttgacaagctatacatagtgttaatcagtcttcatggcctgatacgtggagagaatatggagcttggccgtgattcagatactggtggccaggtaatggtatcgttgaacgtagcagctattatgccatttgatgtttcgaagatattcactaaaacgatactagtgtcatacaaggacatgatttcactttcatccactgtgtgctgtttcataggtcaaatatgttgtggaacttgctaaagcattaagttcatgtcctggagtttaccgggttgatctattgacaagacaaatcatagccccaaattttgatcgtggctatggtgaaccagacgagatgctggctttgacaagtttcaagaactttaaatgcgaacgaggagagaacagtggtgcacatatcatcagaataccatttggccccaaagaaaagcatctagctaaagaaaatatctggcctttcattcaagaatttgttgatggtgcactaggtcatattgtgcggatgtcaaaaactttaggcgaagaaactggcagtgtgtgtccagtgtggcctgctgtgattcatggtcattatgccagtgcaggagttgctgctgctctactatctggagcacttaatgtcccgatggtgtttaccgggcattttcttgggaaagataagcttgaagggcttctcaagcaagggagacagacaagagaacaaataaacgtgacatacaaaataatgcgccgaattgaggcagaggagttgtctcttgatgcgtctgaaatagttatcgctagcacaaggcaagaaatagaagaacaatggaacttgtatgatggttttgaagtcatgcttgcgaggaagctccgtgcgttagtcaagcgtggtgctaactgttatggtcgttatatgcctcgtatggttataattcctccaggagttgaattcggccaattgattcatgattttgatatctatggagatgaagataacccatctccagcctctgaggatccatctatttggtttgagataatgcggttcttcacaaatcctaggaaacctatgattctggctattgcccgtccatatgctgagaagaatatcgcaacacttgtgaaggcatttggtgaatgccatccgttgagggaacttgctaaccttacattgataatgggtaaccgtgaggctatttccaagatgaacaaaatcagtgcagctgttttgacatcagtgcttacattgattgatgaatacgatttatatggtcaagtggcatacccaaagcatcacaagcactctgaagttcctgatatttatcgtttagcagcaagaacaaagggcgcttttataaatgttgcttactttgaacaatttggtgttaccttgatagaggctgccatgcacgggctgcctgttattgcaacaaaaaatggggctcctgttgaaattcatcaggttctggaaaatggtctccttgttgatccccatgatcagcatgcaatcgcagatgccctctataagatgctgtctgaaaagcaattttggtcaagatgtcgagagaatggattaaaaaatatacaccagttttcttggcctgaacattgcaagaattacttgtcaaggatattaactctaggtccaagacatcctgctttcgcatgcaaagaagaccataaagtgcctgtgaagtgcaggaagcatatattcgttattgctgtagactccgttaacaaggaagatttaattcagattatcagaaattctgttgaggctacacgctctggaactatgtcagatttgacaggttttgtgctgtcgacttcactgacaatagcagagttacagtctgtaatagtacgcacaggcatgctccctactgactttgatgcctttatatgcaatagtgggagtgacatatattatccatcacagtctagtgatgtgccaagcaattcccgtgttacatttgcatcggaccataactaccgatcacatattgagtatcgttggggtggagaaggtttaaggaagtacttagttaagtgggcctcttcagtagtagaaagaagggggagaaccgaaaagcaagtcatctttgaagattcggaacactcttcaacatattgtcttgcatttaaagtgattaatccaagtcatttgcctcctttgaaggagctgcaaaaattgatgagaatccagtcactgcgttgtcatgcactgtataaccatggcgccaccaggttatctgtaattccaattcatgcatcgcgatctcaggctctaaggtatttgtctatttgctggggcatagagttgccagatgctgtggtcattgttggtgaaactggtgattctgattacgaggaactgtttggaggtcttcacaagacagtcatccttaagggtggattcaacactcctgccaataggatccatacggttagaaggtaccctttacaggatgttgttgctcttgatagctcaaatatcattgcaattgagggatttagcactggtgacatcaggtctgctatgcaacaaaagcttggtatacccacacgatgacaccaagtgcgatctattttgttattaatagaaagaaacaaagaaaaaaatggccaatacaaatatacgatacaaacacttcgtttccattctattggaaatgcccgattttgcctgccagtcgtttaatgtatgtgtgccagtgtgtggtccctgcatgggttatgaatgacattcccttggatccctgcactggaaatttttggagcgaagagcatgtcaatggatacatccagctgtacagaagaaacaaatttgttcaaatgttgatagtgaaaacattttatggaagcattttcagcaacaaagcttccaatatacaaagctcacactttcacatcacttcaaagtggagcttatgattacagagcaaccctctaaaccttttttttccctttctaagaggggtgtcttatatttgtgtaaatactgtgtagcaccaatgcaccatcttgttttcttgtttcctgaattaatatgcgtaagcgtttactctctttctatatgtttttccaacagcctgtcttgtggttacatcatgaatacctttattcatctgctgctgtattggttatgaaattatagtagcaagcgtggtgctcccaa

SEQ ID NO: 134700 - DNA, 1867 bp, Zea Mays
gcagtgtcgtgggttgtgctcctgccctacctgtatttgtccacgtctccttcgaagcaatgaggccccctcctttcccctcgtgtgtgttgtcttggcatgtgagccttggcctggcctggccgcctggcctggccccctggagcaacacagtggtggtgctggacatttgttttcggggtttcgcttcatgtcggggagataaatccagaggccagtacgtaaagcagcttaaataccacttcagccttgcgttgcgttccttgccttgccttgcctgcttgcgtgcagtgcagtgcagctcacagcctcacaccatatcgctctgcggtgctagctccaggcctttatcaagccttccctgccccccttgataattccagagagagagaaggcgcgcagctagggaggtgcagagagaggagcggcaaggcgtgggctgtgggcacacatggcgagtgaggaggtcgccaccacagtgtgtgccgacgccgaccaagaagcagcggcggcggcggcggcggccatgaaggaggaaggaggaaggggcaagaggcggcggaggaggcagccgaggaagggagaggaggaaggcgggaggaagaagtacgcgctggtgagctaccacgagctgcccgagtacatgaaggagaacgagttcatcctcaactactaccgctccgagtggcccgtcctcaacgccgtgctcagcctcttctcctggcacaacgagaccatcaacgtctggacgcacctgctcgggttcatgctcttcttcggtctcaccctggtgcacctcggccagtacttcccccaggtggctgatctgattgggcatctctcctggccaatctcgaaggtcgctgaaaatgtctccagcaatattggagatgtcctatcaggcgcggccatgttcatccagacgaacccgagcctggcctcgcatggcacggcggtggcgtcgcagacgacgcggtggcccttcttcgtgttcctggcgggggccatgttctgcctgctgagcagcagcgcgtgccacctgctgtcgtgccactcgcaccggctgaacctgctgctgatccgcctcgactacacgggcatcgcggtcatgatcgtggtctccttcttcccgcccatctactacatcttccagtgcgagccgcgctggcgggcggcgtacctgtcggcgatcacggcggccggggcgggcacggtgtacgcgctcatgtcgccccgcctgagcgcgccgcgctaccgcgcccgccgcgcgctgctgttcgtcggcatgggcctgtccggggtggtccccgcggcgcacgcggccgccgccaactggcacgagccgcgccgcaacgtcacgctggcgtacgagggcgccatggccgcgtcctacctggtcggcaccgcgttctacctcgcccgggtgcccgagcgctggcgccccggcgccttcgacctcgccggccacagccaccagatcttccacgcgctcgtcatcgccggcgcgctcgcgcactacggcgccgccatcgtgttcctcagggctcgcgacgagatgggctgcccggccagttaggtgctcagacagtacgggcgcgccggccggatgcttgcccgcgacgacattatatttgcgggtgtccgtccagtgatcgatacgatatgatgattgggaaagaagaaactaaaccatatttttttttgtttacaccttttccttacagcagcagcagcaagtgtgcgagattcatcgttaatgacagagagttgattggcgtcagtcacagattccttgtcaatttgtacatagacgaagctcatcgagtaatgattgattaatacattctttcgatcggtttgaaaatgc

SEQ ID NO: 134701 - DNA, 1931 bp, Zea Mays
tttttttcaggtggctatacaacatagtatcctgcaaaacccatagaggccaaagcattttgtgttgttgttgacagcaaaacttcctactgcattcaaagacctgcctttataatagataatgaagtttttttttttttgcaactgcgacgaataatataggccgggacctcctccataatccggtcattgcggacagtcctaggctcctagcagctaccacaacgaacatgatgtatttttaccagattttacagtcctagttcttgtttgttatttcatgagagtatcaggccacaaagaacatgggccgtgctgcgcggaacacatacatgggctcacactggaccaggaggggagaagaaacacggaagggaggctctcaccagtcaccactcacctgacggctgacgacgagtgagcgagaggaacggggagagggaagttaaacgcgcggcgatgccggagctgccggaggtggaggcggcgcgtcgggcgctgcaggcgcactgcgtggggaggcgcatcgcgcgctgcgccgtggcggacgacgccaaggtggtcgttgccgccgccggccgcgcggccttcgagcgggccatggtcggccggaccatcgtcgccgcgcgccggaggggcaagaacctctggctccagctcgacgcgccgcccttcccgtccttccagttcgggatggcaggcgcgatatatatcaaaggcattcctgtgacgaattataagagatccgttgttaattccgaagaggagtggccctccaaacactctaaattctttgctgagcttgatgatggtttggagttctctttcactgataaacggcgctttgcaagagttcgtttgtttgaagatcctgaaaccttacccccaatttctgagttaggcccagatgctctgtttgaaccaatgtccgtcgatagtttcttggactccctgggtagaaagaagatagggataaaagctcttctacttgatcaggtgaccagcatccaacctacaagctttgcctgtgcaaaaatgttttccctgcactgtacatacttgacttgttgcagtttttttttataaaatgagcagagcttcatatcaggcattggcaattggattgcagacgaggtgctttaccaggatccatccattacagattgcttcgaatctacctagggagagttgtgaagcactgcaccagagtatcgaagaggttgtcaaatatgctgtcgaagttgatgctgacatggaccgctttccgaaggaatggttatttcatcaccgttggggcaagaagcctggcaaagtcgatggaaagaaaatcgagttcataacagctggtggcaggaccactgcctacgtgccgcaactgcaaaaactggttggaacccagtccagcaaaacgatatccgtggccgagaacggtgatgccaaggattcagggaccgagggagaagatgcagatgcagatgttttgaagccaagaaagcgagccgcgacctccaggggacagcgaaacaaagataccgccggctcgagaaaagcaagaggaaatggcgccgatgctgaggcggctgaaccagcaacaggtgtcgtcggaagcaacagtgagcaagcttttggccaagccaacagtgacgctgtcgataaatcagatcgggctacaagacgatcgtcgaggaaagtgaaagcccgcaagtaaatctgaacaaggtagccagggatctgtccatggagtttcatactggccagcgtatttgcgcctctgagtaatgtatcttaggaacagaagattatattcatgctgcatattcctgggggattcgctccggaccaacgtttgctctgttccctcggtgctatggatagtagcatatctaggttgtgcataaatgcactgaggtttatgtactctttccaatctt

SEQ ID NO: 134702 - DNA, 1663 bp, Zea Mays
gctgcgcggaacacatacatgggctcacactggaccaggaggggagaagaaacacggaagggaggctctcaccagtcaccactcacctgacggctgacgacgagtgagcgagaggaacggggagagggaagttaaacgcgcggcgatgccggagctgccggaggtggaggcggcgcgtcgggcgctgcaggcgcactgcgtggggaggcgcatcgcgcgctgcgccgtggcggacgacgccaaggtggtcgttgccgccgccggccgcgcggccttcgagcgggccatggtcggccggaccatcgtcgccgcgcgccggaggggcaagaacctctggctccagctcgacgcgccgcccttcccgtccttccagttcgggatggcaggcgcgatatatatcaaaggcattcctgtgacgaattataagaggcaggtgatattttaccgttttatacgtacgttgtgattatgtgagttcaccaatcggtttctaggaaataatttcttcacaaggctgcagatccgttgttaattccgaagaggagtggccctccaaacactctaaattctttgctgagcttgatgatggtttggagttctctttcactgataaacggcgctttgcaagagttcgtttgtttgaagatcctgaaaccttacccccaatttctgagttaggcccagatgctctgtttgaaccaatgtccgtcgatagtttcttggactccctgggtagaaagaagatagggataaaagctcttctacttgatcagagcttcatatcaggcattggcaattggattgcagacgaggtgctttaccagtcaaggatccatccattacagattgcttcgaatctacctagggagagttgtgaagcactgcaccagagtatcgaagaggttgtcaaatatgctgtcgaagttgatgctgacatggaccgctttccgaaggaatggttatttcatcaccgttggggcaagaagcctggcaaagtcgatggaaagaaaatcgagttcataacagctggtggcagggtaaaccactgcctacgtgccgcaactgcaaaaactggttggaacccagtccagcaaaacgatatccgtggccgagaacggtgatgccaaggattcagggaccgagggagaagatgcagatgcagatgttttgaagccaagaaagcgagccgcgacctccaggggacagcgaaacaaagataccgccggctcgagaaaagcaagaggaaatggcgccgatgctgaggcggctgaaccagcaacaggtgtcgtcggaagcaacagtgagcaagcttttggccaagccaacagtgacgctgtcgataaatcagatcgggctacaagacgatcgtcgaggaaagtgaaagcccgcaagtaaatctgaacaaggtagccagggatctgtccatggagtttcatactggccagcgtatttgcgcctctgagtaatgtatcttaggaacagaagattatattcatgctgcatattcctgggggattcgctccggaccaacgtttgctctgttccctcggtgctatggatagtagcatatctaggttgtgcataaatgcactgaggtttatgtactctttccaatcttccatgatgctatggaagaggtgattaggtgaaatgatgtttcccc

SEQ ID NO: 134703 - DNA, 1914 bp, Zea Mays
gctgcgcggaacacatacatgggctcacactggaccaggaggggagaagaaacacggaagggaggctctcaccagtcaccactcacctgacggctgacgacgagtgagcgagaggaacggggagagggaagttaaacgcgcggcgatgccggagctgccggaggtggaggcggcgcgtcgggcgctgcaggcgcactgcgtggggaggcgcatcgcgcgctgcgccgtggcggacgacgccaaggtggtcgttgccgccgccggccgcgcggccttcgagcgggccatggtcggccggaccatcgtcgccgcgcgccggaggggcaagaacctctggctccagctcgacgcgccgcccttcccgtccttccagttcgggatggcaggcgcgatatatatcaaaggcattcctgtgacgaattataagagatccgttgttaattccgaagaggagtggccctccaaacactctaaattctttgctgagcttgatgatggtttggagttctctttcactgataaacggcgctttgcaagagttcgtttgtttgaagatcctgaaaccttacccccaatttctgagttaggcccagatgctctgtttgaaccaatgtccgtcgatagtttcttggactccctgggtagaaagaagatagggataaaagctcttctacttgatcagagcttcatatcaggcattggcaattggattgcagacgaggtgctttaccagtcaaggatccatccattacagattgcttcgaatctacctagggagagttgtgaagcactgcaccagagtatcgaagaggttgtcaaatatgctgtcgaagttgatgctgacatggaccgctttccgaaggaatggttatttcatcaccgttggggcaagaagcctggcaaagtcgatggtaagactttcctcactgccagtcatgatttccctgaacatactcgggcaggcaaaccgttcgcttacagtgtttgctgatatctgtctttgtataagacaaaccaatcatgttaattccaatgctgcgtacacactcgcatcagatttcgatcccttctgagaattaattttgtttttttggccgttcaggaaagaaaatcgagttcataacagctggtggcagggtaagtaagtaaactatccgcttcagtactagaccttgagcctcagatatggccaggccagccagccaggtcaaacttctgatgctgctttgttcactcagaccactgcctacgtgccgcaactgcaaaaactggttggaacccagtccagcaaaacgatatccgtggccgagaacggtgatgccaaggattcagggaccgagggagaagatgcagatgcagatgttttgaagccaagaaagcgagccgcgacctccaggggacagcgaaacaaagataccgccggctcgagaaaagcaagaggaaatggcgccgatgctgaggcggctgaaccagcaacaggtgtcgtcggaagcaacagtgagcaagcttttggccaagccaacagtgacgctgtcgataaatcagatcgggctacaagacgatcgtcgaggaaagtgaaagcccgcaagtaaatctgaacaaggtagccagggatctgtccatggagtttcatactggccagcgtatttgcgcctctgagtaatgtatcttaggaacagaagattatattcatgctgcatattcctgggggattcgctccggaccaacgtttgctctgttccctcggtgctatggatagtagcatatctaggttgtgcataaatgcactgaggtttatgtactctttccaatcttccatgatgctatggaagaggtgattaggtgaaatgatgtttcccctggcgcgtgcggttccacgcatagttgccgtaaagtgaaaaaaatacagattgc

SEQ ID NO: 134704 - DNA, 1724 bp, Zea Mays
gctgcgcggaacacatacatgggctcacactggaccaggaggggagaagaaacacggaagggaggctctcaccagtcaccactcacctgacggctgacgacgagtgagcgagaggaacggggagagggaagttaaacgcgcggcgatgccggagctgccggaggtggaggcggcgcgtcgggcgctgcaggcgcactgcgtggggaggcgcatcgcgcgctgcgccgtggcggacgacgccaaggtggtcgttgccgccgccggccgcgcggccttcgagcgggccatggtcggccggaccatcgtcgccgcgcgccggaggggcaagaacctctggctccagctcgacgcgccgcccttcccgtccttccagttcgggatggcaggcgcgatatatatcaaaggcattcctgtgacgaattataagagatccgttgttaattccgaagaggagtggccctccaaacactctaaattctttgctgagcttgatgatggtttggagttctctttcactgataaacggcgctttgcaagagttcgtttgtttgaagatcctgaaaccttacccccaatttctgagttaggcccagatgctctgtttgaaccaatgtccgtcgatagtttcttggactccctgggtagaaagaagatagggataaaagctcttctacttgatcaggtgaccagcatccaacctacaagctttgcctgtgcaaaaatgttttccctgcactgtacatacttgacttgttgcagtttttttttataaaatgagcagagcttcatatcaggcattggcaattggattgcagacgaggtgctttaccagtcaaggatccatccattacagattgcttcgaatctacctagggagagttgtgaagcactgcaccagagtatcgaagaggttgtcaaatatgctgtcgaagttgatgctgacatggaccgctttccgaaggaatggttatttcatcaccgttggggcaagaagcctggcaaagtcgatggaaagaaaatcgagttcataacagctggtggcaggaccactgcctacgtgccgcaactgcaaaaactggttggaacccagtccagcaaaacgatatccgtggccgagaacggtgatgccaaggattcagggaccgagggagaagatgcagatgcagatgttttgaagccaagaaagcgagccgcgacctccaggggacagcgaaacaaagataccgccggctcgagaaaagcaagaggaaatggcgccgatgctgaggcggctgaaccagcaacaggtgtcgtcggaagcaacagtgagcaagcttttggccaagccaacagtgacgctgtcgataaatcagatcgggctacaagacgatcgtcgaggaaagtgaaagcccgcaagtaaatctgaacaaggtagccagggatctgtccatggagtttcatactggccagcgtatttgcgcctctgagtaatgtatcttaggaacagaagattatattcatgctgcatattcctgggggattcgctccggaccaacgtttgctctgttccctcggtgctatggatagtagcatatctaggttgtgcataaatgcactgaggtttatgtactctttccaatcttccatgatgctatggaagaggtgattaggtgaaatgatgtttcccctggcgcgtgcggttccacgcatagttgccgtaaagtgaaaaaaatacagattgctta

SEQ ID NO: 134705 - DNA, 1726 bp, Zea Mays
gctgcgcggaacacatacatgggctcacactggaccaggaggggagaagaaacacggaagggaggctctcaccagtcaccactcacctgacggctgacgacgagtgagcgagaggaacggggagagggaagttaaacgcgcggcgatgccggagctgccggaggtggaggcggcgcgtcgggcgctgcaggcgcactgcgtggggaggcgcatcgcgcgctgcgccgtggcggacgacgccaaggtggtcgttgccgccgccggccgcgcggccttcgagcgggccatggtcggccggaccatcgtcgccgcgcgccggaggggcaagaacctctggctccagctcgacgcgccgcccttcccgtccttccagttcgggatggcaggcgcgatatatatcaaaggcattcctgtgacgaattataagaggcaggtgatattttaccgttttatacgtacgttgtgattatgtgagttcaccaatcggtttctaggaaataatttcttcacaaggctgcagatccgttgttaattccgaagaggagtggccctccaaacactctaaattctttgctgagcttgatgatggtttggagttctctttcactgataaacggcgctttgcaagagttcgtttgtttgaagatcctgaaaccttacccccaatttctgagttaggcccagatgctctgtttgaaccaatgtccgtcgatagtttcttggactccctgggtagaaagaagatagggataaaagctcttctacttgatcagagcttcatatcaggcattggcaattggattgcagacgaggtgctttaccagtcaaggatccatccattacagattgcttcgaatctacctagggagagttgtgaagcactgcaccagagtatcgaagaggttgtcaaatatgctgtcgaagttgatgctgacatggaccgctttccgaaggaatggttatttcatcaccgttggggcaagaagcctggcaaagtcgatggaaagaaaatcgagttcataacagctggtggcaggaccactgcctacgtgccgcaactgcaaaaactggttggaacccagtccagcaaaacgatatccgtggccgagaacggtgatgccaaggattcagggaccgagggagaagatgcagatgcagatgttttgaagccaagaaagcgagccgcgacctccaggggacagcgaaacaaagataccgccggctcgagaaaagcaagaggaaatggcgccgatgctgaggcggctgaaccagcaacaggtgtcgtcggaagcaacagtgagcaagcttttggccaagccaacagtgacgctgtcgataaatcagatcgggctacaagacgatcgtcgaggaaagtgaaagcccgcaagtaaatctgaacaaggtagccagggatctgtccatggagtttcatactggccagcgtatttgcgcctctgagtaatgtatcttaggaacagaagattatattcatgctgcatattcctgggggattcgctccggaccaacgtttgctctgttccctcggtgctatggatagtagcatatctaggttgtgcataaatgcactgaggtttatgtactctttccaatcttccatgatgctatggaagaggtgattaggtgaaatgatgtttcccctggcgcgtgcggttccacgcatagttgccgtaaagtgaaaaaaatacagattgcttaacctctgctg

SEQ ID NO: 134706 - DNA, 1584 bp, Zea Mays
ggggagaagaaacacggaagggaggctctcaccagtcaccactcacctgacggctgacgacgagtgagcgagaggaacggggagagggaagttaaacgcgcggcgatgccggagctgccggaggtggaggcggcgcgtcgggcgctgcaggcgcactgcgtggggaggcgcatcgcgcgctgcgccgtggcggacgacgccaaggtggtcgttgccgccgccggccgcgcggccttcgagcgggccatggtcggccggaccatcgtcgccgcgcgccggaggggcaagaacctctggctccagctcgacgcgccgcccttcccgtccttccagttcgggatggcaggcgcgatatatatcaaaggcattcctgtgacgaattataagagatccgttgttaattccgaagaggagtggccctccaaacactctaaattctttgctgagcttgatgatggtttggagttctctttcactgataaacggcgctttgcaagagttcgtttgtttgaagatcctgaaaccttacccccaatttctgagttaggcccagatgctctgtttgaaccaatgtccgtcgatagtttcttggactccctgggtagaaagaagatagggataaaagctcttctacttgatcagagcttcatatcaggcattggcaattggattgcagacgaggtgctttaccagtcaaggatccatccattacagattgcttcgaatctacctagggagagttgtgaagcactgcaccagagtatcgaagaggttgtcaaatatgctgtcgaagttgatgctgacatggaccgctttccgaaggaatggttatttcatcaccgttggggcaagaagcctggcaaagtcgatggaaagaaaatcgagttcataacagctggtggcaggaccactgcctacgtgccgcaactgcaaaaactggttggaacccagtccagcaaaacgatatccgtggccgagaacggtgatgccaaggattcagggaccgagggagaagatgcagatgcagatgttttgaagccaagaaagcgagccgcgacctccaggggacagcgaaacaaagataccgccggctcgagaaaagcaagaggaaatggcgccgatgctgaggcggctgaaccagcaacaggtgtcgtcggaagcaacagtgagcaagcttttggccaagccaacagtgacgctgtcgataaatcagatcgggctacaagacgatcgtcgaggaaagtgaaagcccgcaagtaaatctgaacaaggtagccagggatctgtccatggagtttcatactggccagcgtatttgcgcctctgagtaatgtatcttaggaacagaagattatattcatgctgcatattcctgggggattcgctccggaccaacgtttgctctgttccctcggtgctatggatagtagcatatctaggttgtgcataaatgcactgaggtttatgtactctttccaatcttccatgatgctatggaagaggtgattaggtgaaatgatgtttcccctggcgcgtgcggttccacgcatagttgccgtaaagtgaaaaaaatacagattgctt

SEQ ID NO: 134707 - DNA, 2149 bp, Zea Mays
ccccctcctccccggtctcgcacgcgatgccccgccgtgacagtcgccgcccatcaacggcctcgccctccttcctccatcgtcccgctcgcacgaatctagctagctaggcgaagagctcgagcaagacgggcgggtcggcggcgcccccgcgggcccgctgcagcgcgtcggcggcgcgccagacccaggcatcggcggcgcccgtcgtcgtctcctcgcggtgccgcctcatgtggccgcccagcgcctgccccatctcgaagccgagcccgcagacgtggcactcgtgctgcgcctgcggctccctgtctcctcctccgcctccgccgccgccgacgccgtcgccggcctgctgatgatgcttgtgctgctgcctgagcgccctggcgccgacgccgagctcgaggccgtggcggccccgcaggtggctggtccggtggccgccgagcgcctggaacgaggtgaaggcgcggctgcaggtcctgcacacgaacaagctattccatggcggagcaggatggcgacgcggggcagaggccacccgactccgttccggttattatattggtttaaccttggatcgcgttaattcgggccatgaggaggttattccggtggtttgatatcggatctcgttaattcgggccctgaggagtttgtgcgggttgaaatccccaacacgctaattcgttcgggaacattcctcggtgctaatgaagactcaactagaacccttgcagaaatcgagaagaagattgcaagggctaccgtgttacccagaaatcatggggagaatgggagaaactatgttcccatatgaggtctcctattcttcagctgaagatcatacttgctgtggagcctttgatcccttcagagggaccaaggattggagagaacattttcggttacacgatagtggacatcttcagtagcagctgccgtggccaccataagaatcctccttcagagccatatgtccttgaggttggggttttgcaagattatgttggaagtggaggctgtgtgcaaggcgtgacagcgtgtcgtggtcaaggaccctaagctctagcgccaaattcatatcacatttgttctagaatgagatcatgaatggtccctggggttggcctggttcacgctccattctcagtgcgttttccgacatcgttcttcaagcaagcatgcgagctggctcctattttcactgagcttgtggattgtgtgagcttagatggggagtccttgcaagctgctttgtctagaacaaagcaggttcatgaatttaccgcaaggctgctagatattcatgataagatgatgttgataaataataaagaggattaccaatgctagaatctgtatggattctatcagctgttcgcctactgatgcttatgtgccaatttagtgagactggagtcatacactccatacaaatctatacaaaatcaaagtggttggcaatgcagtgatgctcggtgaaatcataaactacgtgcagtccctacaatgacaagttgagtttatgtccatgaaactggccaccgtgaatccccaggtggacttaaatagcctgcctaacgtcctccctaaagatgtacatcagtcttgtggtccgccacatttctcgctggagacctcagacgcttcgttgtcgtacctcagccagcctcaccatggaagccctcttggctgcatggacaaccagagttgtatgcatccacttgacacgacgttttgcctggcgataaatccgcagtatcatttcctcaacggtgttagcgatgcatcgtctcagttgcagctaatttgatgcttgtgtttatggaaaccaagaggtggcgctgatccattggaaacctggttgtgtatgaatgggtttccagctacttctattcttggagatagaaaccaacatgtttggtttttgtttttattcgctttagaacaactcatttttgtacgaaaagaggcatttagctataattgtttgttgtagtatgtttaccgcaggatagccgttccatgaaatacataaaaacctgatactgttgttatatttggtttagtcatgctcttatggaacctttaatgaggatttttctatatcaagatatcatcgtcatcgtcattattattgcat

SEQ ID NO: 134708 - DNA, 2161 bp, Zea Mays
ccccctcctccccggtctcgcacgcgatgccccgccgtgacagtcgccgcccatcaacggcctcgccctccttcctccatcgtcccgctcgcacgaatctagctagctaggcgaagagctcgagcaagacgggcgggtcggcggcgcccccgcgggcccgctgcagcgcgtcggcggcgcgccagacccaggcatcggcggcgcccgtcgtcgtctcctcgcggtgccgcctcatgtggccgcccagcgcctgccccatctcgaagccgagcccgcagacgtggcactcgtgctgcgcctgcggctccctgtctcctcctccgcctccgccgccgccgacgccgtcgccggcctgctgatgatgcttgtgctgctgcctgagcgccctggcgccgacgccgagctcgaggccgtggcggccccgcaggtggctggtccggtggccgccgagcgcctggaacgaggtgaaggcgcggctgcaggtcctgcacacgaacaagctattccatggcggagcaggatggcgacgcggggcagaggccacccgactccgttccggttattatattggtttaaccttggatcgcgttaattcgggccatgaggaggttattccggtggtttgatatcggatctcgttaattcgggccctgaggagtttgtgcgggttgaaatccccaacacgctaattcgttcgggaacattcctcggtgctaatgaagactcaactagaacccttgcagaaatcgagaagaagattgcaagggctaccgtgttacccagaaatcatggggagaatgggagaaactatgttcccatatgaggtctcctattcttcagctgaagatcatacttgctgtggagcctttgatcccttcagagggaccaaggattggagagaacattttcggttacacgatagtggacatcttcagtagcagctgccgtggccaccataagaatcctccttcagagccatatgtccttgaggttggggttttgcaagattatgttggaagtggaggctgtgtgcaaggcgtgacagcgtgtcgtggtcaaggaccctaagctctagcgccaaattcatatcacatttgttctagaatgagatcatgaatggtccctggggttggcctggttcacgctccattctcagtgcgttttccgacatcgttcttcaagcaagcatgcgagctggctcctattttcactgagcttgtggattgtgtgagcttagatggggagtccttgcaagctgctttgtctagaacaaagcaggttcatgaatttaccgcaaggctgctagatattcatgataagatgatgttgataaataataaagaggatatacgcttaatattgcaccggtcggactatatgttggattctgaaatcaattcactgcttcaaattgaaaactctaggagctatattttgccaccaacgctgcaactttctgttgttccatcaggtggttggcaatgcagtgatgctcggtgaaatcataaactacgtgcagtccctacaatgacaagttgagtttatgtccatgaaactggccaccgtgaatccccaggtggacttaaatagcctgcctaacgtcctccctaaagatgtacatcagtcttgtggtccgccacatttctcgctggagacctcagacgcttcgttgtcgtacctcagccagcctcaccatggaagccctcttggctgcatggacaaccagagttgtatgcatccacttgacacgacgttttgcctggcgataaatccgcagtatcatttcctcaacggtgttagcgatgcatcgtctcagttgcagctaatttgatgcttgtgtttatggaaaccaagaggtggcgctgatccattggaaacctggttgtgtatgaatgggtttccagctacttctattcttggagatagaaaccaacatgtttggtttttgtttttattcgctttagaacaactcatttttgtacgaaaagaggcatttagctataattgtttgttgtagtatgtttaccgcaggatagccgttccatgaaatacataaaaacctgatactgttgttatatttggtttagtcatgctcttatggaacctttaatgaggatttttctatatcaagatatcatcgtcatcgtcattattattgcat

SEQ ID NO: 134709 - DNA, 1133 bp, Zea Mays
acataatctatttaaagatagtggacatcttcagtagcagctgccgtggccaccataagaatcctccttcagagccatatgtccttgaggttggggttttgcaagattatgttggaagtggaggctgtgtgcaaggcgtgacagcgtgtcgtggtcaaggaccctaagctctagcgccaaattcatatcacatttgttctagaatgagatcatgaatggtccctggggttggcctggttcacgctccattctcagtgcgttttccgacatcgttcttcaagcaagcatgcgagctggctcctattttcactgagcttgtggattgtgtgagcttagatggggagtccttgcaagctgctttgtctagaacaaagcaggttcatgaatttaccgcaaggctgctagatattcatgataagatgatgttgataaataataaagaggtggttggcaatgcagtgatgctcggtgaaatcataaactacgtgcagtccctacaatgacaagttgagtttatgtccatgaaactggccaccgtgaatccccaggtggacttaaatagcctgcctaacgtcctccctaaagatgtacatcagtcttgtggtccgccacatttctcgctggagacctcagacgcttcgttgtcgtacctcagccagcctcaccatggaagccctcttggctgcatggacaaccagagttgtatgcatccacttgacacgacgttttgcctggcgataaatccgcagtatcatttcctcaacggtgttagcgatgcatcgtctcagttgcagctaatttgatgcttgtgtttatggaaaccaagaggtggcgctgatccattggaaacctggttgtgtatgaatgggtttccagctacttctattcttggagatagaaaccaacatgtttggtttttgtttttattcgctttagaacaactcatttttgtacgaaaagaggcatttagctataattgtttgttgtagtatgtttaccgcaggatagccgttccatgaaatacataaaaacctgatactgttgttatatttggtttagtcatgctcttatggaacctttaatgaggatttttctatatcaagatatcatcgtcatcgtcattattattgcat

SEQ ID NO: 134710 - DNA, 697 bp, Zea Mays
accaaagagaccctcattttgttcgacgcagaaccaaacaagccgggactggacgcggctccggcgtggcatcgctggaccttcttgctcaccaagaagcccaacccggcctccatcaaagcccacaaccgtcgtagtcgctacttcccctccgatcgtcgacgacgacgcatccacccgagcccttctccgcgaaatagccgtcgccgcactgccgcagctccggctatgtcaatcttcgagtacaatgggtccgccgtggtggcgatggtggggaagaactgcttcgcgattgccagcgaccggcggctcggcgtgcagcttcagaccatcgcgacagacttccagagggtgttcaagatccacgacaagctctacatcggcctctcagggctcgccaccgacgcccagacgctgtaccagcggttggtcttcaggcacaagctgtatcagctgcgcgaggagagggacatgaagcctgagacctttgccagccttgtctctgcgctcctctacgagaagaggtgaggattttgctagtgcgcttttgggggaattgtgtaggattctgggtaaacctactgcgggtagttgttattttaaattttgaatgcgctgccagaccgtggactctgtaaagagatgcaaaactatgttggttgcatgctgctgaaggatttggtcgtaggaagctagt

SEQ ID NO: 134711 - DNA, 1095 bp, Zea Mays
accaaagagaccctcattttgttcgacgcagaaccaaacaagccgggactggacgcggctccggcgtggcatcgctggaccttcttgctcaccaagaagcccaacccggcctccatcaaagcccacaaccgtcgtagtcgctacttcccctccgatcgtcgacgacgacgcatccacccgagcccttctccgcgaaatagccgtcgccgcactgccgcagctccggctatgtcaatcttcgagtacaatgggtccgccgtggtggcgatggtggggaagaactgcttcgcgattgccagcgaccggcggctcggcgtgcagcttcagaccatcgcgacagacttccagagggtgttcaagatccacgacaagctctacatcggcctctcagggctcgccaccgacgcccagacgctgtaccagcggttggtcttcaggcacaagctgtatcagctgcgcgaggagagggacatgaagcctgagacctttgccagccttgtctctgcgctcctctacgagaagagatttgggccatatttctgccagccagtcattgctggacttggagatgacaacgtaccattcatttgtaccatggactgcctcggtgcaaaggagctggccaaggattttgttgtttctggaacagcatcagaatctttgtatggtgcttgtgaatccatgtacaagccggacatgcaacctgatgaactcttcgagactatatcccaagccctgaattcatcagtagaccgtgactgccttagcggatggggtggctatgtgttgattgtgacaccgactgaagtgagggagcatgtgattaagagcaggatggactaaataatggccactagaattattagctggtttccaatgcttaagaccaatgttgtgtttgtattctggagtaacattgtatcatcacagttggtatgagaaggaacgtttgttttctttatctctgttttacaacacttctgtttggtggaatactgagttggtaatatcctagattgcctgttttacaacacttctgcttggatttcaactgaatggtggaataatgagttggtaatattctagattgaggaa

SEQ ID NO: 134712 - DNA, 3081 bp, Zea Mays
cacactaaggggtatttggaatcaaagtatttttggagttttaagacaaaaccatgatatttaagaataccatttttttcaagaggtgtttggttacactgtaaaaaaactctgttttaaatatcgtagttttatggatactatgatatgttttgagtatttgaaacttcactctaatctaaagtttttgtctatgattaattttgcatatgtatactaaatatcattgttcagatactttgtctttaaacacacattgctaaaagtgttgtaaaaaatacggttatgtaatgacattttaaaaaacatagtgttcaaaaacatgcaactcgtgagccgacagatccgcatcgctccaagctaccgctcccgcccagctcgcaccacggcgatggaaccaaccgtggaagggacggccaagggcggacgctgccctggctggcgttgacagttagatgcgaccgcgggagcgtccgtccaaccgccaccgcgtctgcctcagctccgcgcctccgcctagcctcctctaatctccagcccagtagtggcagactagaatcgtgggcgcgacgcctcggctgattcgtccgccccgatcccaccaccaccgtactccgcgggcgacgtcggccgctagcgatggcgacgtcgtcgtcggcgggggcgcgcaagaaggcccccagccccccgaagcaccgccacgatggcacctcgccgctgccgctcggcatggactggagccctcccccgaagagatgggagggaaggaacaccatatggccacataatcctcaaacaggttggagttactgtgtgatgataccttcttggatcactcaaacacctgaaactggtgtgaccgctgatagctttttgaaatctgtcgttgacagttttacaggatacatgtcggtatacaatctccagaaggctttagctctagccatggaattctcagaaggtttagtgactttctgaatctatcttctgatcttaagagcgcatttcccagaaaagatgccccgtcggctcctccgaagcatgctttcttaagaataaattcaagcaggttgcttctagaagagagaaggcatgcattggaggagtggatgcaaaagttactttctgacattgacttgtcaagaagtgctcctgttgctgctttttttgagcttgaagctgctgcacgttcatatttccaagaacggaatgggcgtccttctgaagtaggttcttctacaaaaagcagtactgcctcttctccacatcctgatggacctgcttctggttctcttgctgagtccaatcaaataaatcaaactcttactcgtggcagcagtctgacaggagcaactggtaatggtgtgcttggagaagctatcttagatcagtccgatgagcttgttagtaatgccttgaatcacaggaaagggaaccttgtattggaacatgatggtaggaatggttcagcagcgtcttataggggagttgtttcagatgaggaccgtgtatctaatcccggccatgctaggaaggactctgctgaaagtattgggagtgatttgagttctttaagaggaattgaattatctattccaggggttagtagttccctttgggatggtgctgtggtggatggacatattagtcaaacagaacatcttactggtttagatatgcatcttttgtatgatatggatgcacaagtcatccttccaaatgatcaaaaacagaagttgactagacttttgatcacaatgcaacaaagaataggggcagcaaaaactgatatggaggatctcatagcacgactaaatcaggaagcagctgttaaagaatatcttactacaaaggttaaggatttggaggttgaattggaagccgcaaagcaaaagggtagagagacactgcaacaagctatcctgactgaaagagagaggattacccagatgcagtgggatatggatgagctccgtaggaagtattctgagatggagtcaaacctgaaggctgaacaaaatgagaaaactcgtgcagagtcagagaaaacaaccgctagtgataaaaatgaaacattacttgaagaattagaaatcaaacgaaaagaagtcgagactttgaaacatcatcttgtagaagctgaggcaaagtctaaagcagataagaaagttcttgtaaaagaggtcaagtctcttagaaactcccaaacagagatgaagaaagtgttgaatcagtatcttgaacagaagactggtttagagagagttattattagagataaacagaggtcagcacgtgcaaagttatgccgagtgaaatttcttcatgagtgtcgactgctgcatgagcgtctactggaatgtagtgctaaatttctagcagaagaacaaggcaattttactattgatccttcgtccttgcctgatgcattagatcttctagcaacatcagacaatagagtacgcttactcattgctgaggctcaacttttagcacgagatgatgaacaaggctcttctgatgatggcgacaattctgatagcatatcgtcattaactatgagctgggaagatgcaaaagttacagatgaagatgcaacgaaaatactttctgatctacttattgacaacgcgcagctgaggctgcgtcttaatgctgtcatccgcaacgctgtaaatactgccgtgaagccagagaaagaaggtagtggcgaggttcttcccaaaaagacagtccttaactggttgttagacagatgagaacacctatgtatattcctgtgatttaggtttcaaacttacgcggcttgaccaaaattatatgatgagcatacctatatagtgccagggcagcatcaggataaaagtttccggccatgagggaagaagatcctggagaagcgtgcgttgctgctgtacggttgtttatttacacatggaaatatcggaggatagtatatttaggcccgtttggttcagggcaactaaactttagttatttttagtctctaaagaagcaaacagggtgactgaaagtaggtgactaaagtttagtcatctagtcaccaaataagtgactaaa

SEQ ID NO: 134713 - DNA, 3174 bp, Zea Mays
cacactaaggggtatttggaatcaaagtatttttggagttttaagacaaaaccatgatatttaagaataccatttttttcaagaggtgtttggttacactgtaaaaaaactctgttttaaatatcgtagttttatggatactatgatatgttttgagtatttgaaacttcactctaatctaaagtttttgtctatgattaattttgcatatgtatactaaatatcattgttcagatactttgtctttaaacacacattgctaaaagtgttgtaaaaaatacggttatgtaatgacattttaaaaaacatagtgttcaaaaacatgcaactcgtgagccgacagatccgcatcgctccaagctaccgctcccgcccagctcgcaccacggcgatggaaccaaccgtggaagggacggccaagggcggacgctgccctggctggcgttgacagttagatgcgaccgcgggagcgtccgtccaaccgccaccgcgtctgcctcagctccgcgcctccgcctagcctcctctaatctccagcccagtagtggcagactagaatcgtgggcgcgacgcctcggctgattcgtccgccccgatcccaccaccaccgtactccgcgggcgacgtcggccgctagcgatggcgacgtcgtcgtcggcgggggcgcgcaagaaggcccccagccccccgaagcaccgccacgatggcacctcgccgctgccgctcggcatggactggagccctcccccgaagagatgggagggaaggaacaccatatggccacataatcctcaaacaggttggagttactgtgtgatgataccttcttggatcactcaaacacctgaaactggtgtgaccgctgatagctttttgaaatctgtcgttttttacaggatacatgtcggtatacaatctccagaaggctttagctctagccatggaattctcagaaggtttagtgactttctgaatctatcttctgatcttaagagcgcatttcccagaaaagatgccccgtcggctcctccgaagcatgctttcttaagaataaattcaagcaggttgcttctagaagagagaaggcatgcattggaggagtggatgcaaaagttactttctgacattgacttgtcaagaagtgctcctgttgctgctttttttgagcttgaagctgctgcacgttcatatttccaagaacggaatgggcgtccttctgaagtaggttcttctacaaaaagcagtactgcctcttctccacatcctgatggacctgcttctggttctcttgctgagtccaatcaaataaatcaaactcttactcgtggcagcagtctgacaggagcaactggtaatggtgtgcttggagaagctatcttagatcagtccgatgagcttgttagtaatgccttgaatcacaggaaagggaaccttgtattggaacatgatggtaggaatggttcagcagcgtcttataggggagttgtttcagatgaggaccgtgtatctaatcccggccatgctaggaaggactctgctgaaagtattgggagtgatttgagttctttaagaggaattgaattatctattccaggggttagtagttccctttgggatggtgctgtggtggatggacatattagtcaaacagaacatcttactggtttagatatgcatcttttgtatgatatggatgcacaagtcatccttccaaatgatcaaaaacagaagttgactagacttttgatcacaatgcaacaaagaataggggcagcaaaaactgatatggaggatctcatagcacgactaaatcaggaagcagctgttaaagaatatcttactacaaaggttaaggatttggaggttgaattggaagccgcaaagcaaaagggtagagagacactgcaacaagctatcctgactgaaagagagaggattacccagatgcagtgggatatggatgagctccgtaggaagtattctgagatggagtcaaacctgaaggctgaacaaaatgagaaaactcgtgcagagtcagagaaaacaaccgctagtgataaaaatgaaacattacttgaagaattagaaatcaaacgaaaagaagtcgagactttgaaacatcatcttgtagaagctgaggcaaagtctaaagcagataagaaagttcttgtaaaagaggtcaagtctcttagaaactcccaaacagagatgaagaaagtgttgaatcagtatcttgaacagaagactggtttagagagagttattattagagataaacagaggtcagcacgtgcaaagttatgccgagtgaaatttcttcatgagtgtcgactgctgcatgagcgtctactggaatgtagtgctaaatttctagcagaagaacaaggcaattttactattgatccttcgtccttgcctgatgcattagatcttctagcaacatcagacaatagagtacgcttactcattgctgaggctcaacttttagcacgagatgatgaacaaggctcttctgatgatggcgacaattctgatagcatatcgtcattaactatgagctgggaagatgcaaaagttacagatgaagatgcaacgaaaatactttctgatctacttattgacaacgcgcagctgaggctgcgtcttaatgctgtcatccgcaacgctgtaaatactgccgtgaagccagagaaagaaggtagtggcgaggttcttcccaaaaagacagtccttaactggttgttagacagatgagaacacctatgtatattcctgtgatttaggtttcaaacttacgcggcttgaccaaaattatatgatgagcatacctatatagtgccagggcagcatcaggataaaagtttccggccatgagggaagaagatcctggagaagcgtgcgttgctgctgtacggttgtttatttacacatggaaatatcggaggatagtatatttaggcccgtttggttcagggcaactaaactttagttatttttagtctctaaagaagcaaacagggtgactgaaagtaggtgactaaagtttagtcatctagtcaccaaataagtgactaaaagtgactaaagtaggatttttaccttttaccctctctctttattgtccttgctgttgtcaccctctgatagaggtaatgcagttattattcacactaa

SEQ ID NO: 134714 - DNA, 1753 bp, Zea Mays
gccctggctggcgttgacagttagatgcgaccgcgggagcgtccgtccaaccgccaccgcgtctgcctcagctccgcgcctccgcctagcctcctctaatctccagcccagtagtggcagactagaatcgtgggcgcgacgcctcggctgattcgtccgccccgatcccaccaccaccgtactccgcgggcgacgtcggccgctagcgatggcgacgtcgtcgtcggcgggggcgcgcaagaaggcccccagccccccgaagcaccgccacgatggcacctcgccgctgccgctcggcatggactggagccctcccccgaagagatgggagggaaggaacaccatatggccacataatcctcaaacaggttggagttactgtgtgatgataccttcttggatcactcaaacacctgaaactggtgtgaccgctgatagctttttgaaatctgtcgttgacagttttacaggatacatgtcggtatacaatctccagaaggctttagctctagccatggaattctcagaaggtttagtgactttctgaatctatcttctgatcttaagagcgcatttcccagaaaagatgccccgtcggctcctccgaagcatgctttcttaagaataaattcaagcaggttgcttctagaagagagaaggcatgcattggaggagtggatgcaaaagttactttctgacattgacttgtcaagaagtgctcctgttgctgctttttttgagcttgaagctgctgcacgttcatgttaaggatttggaggttgaattggaagccgcaaagcaaaagggtagagagacactgcaacaagctatcctgactgaaagagagaggattacccagatgcagtgggatatggatgagctccgtaggaagtattctgagatggagtcaaacctgaaggctgaacaaaatgagaaaactcgtgcagagtcagagaaaacaaccgctagtgataaaaatgaaacattacttgaagaattagaaatcaaacgaaaagaagtcgagactttgaaacatcatcttgtagaagctgaggcaaagtctaaagcagataagaaagttcttgtaaaagaggtcaagtctcttagaaactcccaaacagagatgaagaaagtgttgaatcagtatcttgaacagaagactggtttagagagagttattattagagataaacagaggtcagcacgtgcaaagttatgccgagtgaaatttcttcatgagtgtcgactgctgcatgagcgtctactggaatgtagtgctaaatttctagcagaagaacaaggcaattttactattgatccttcgtccttgcctgatgcattagatcttctagcaacatcagacaatagagtacgcttactcattgctgaggctcaacttttagcacgagatgatgaacaaggctcttctgatgatggcgacaattctgatagcatatcgtcattaactatgagctgggaagatgcaaaagttacagatgaagatgcaacgaaaatactttctgatctacttattgacaacgcgcagctgaggctgcgtcttaatgctgtcatccgcaacgctgtaaatactgccgtgaagccagagaaagaaggtagtggcgaggttcttcccaaaaagacagtccttaactggttgttagacagatgagaacacctatgtatattcctgtgatttaggtttcaaacttacgcggcttgaccaaaattatatgatgagcatacctatatagtg

SEQ ID NO: 134715 - DNA, 2187 bp, Zea Mays
cgttgacagttagatgcgaccgcgggagcgtccgtccaaccgccaccgcgtctgcctcagctccgcgcctccgcctagcctcctctaatctccagcccagtagtggcagactagaatcgtgggcgcgacgcctcggctgattcgtccgccccgatcccaccaccaccgtactccgcgggcgacgtcggccgctagcgatggcgacgtcgtcgtcggcgggggcgcgcaagaaggcccccagccccccgaagcaccgccacgatggcacctcgccgctgccgctcggcatggactggagccctcccccgaagagatgggagggaaggaacaccatatggccacataatcctcaaacaggttggagttactgtgtgatgataccttcttggatcactcaaacacctgaaactggtgtgaccgctgatagctttttgaaatctgtcgttttttacaggatacatgtcggtatacaatctccagaaggctttagctctagccatggaattctcagaaggtttagtgactttctgaatctatcttctgatcttaagagcgcatttcccagaaaagatgccccgtcggctcctccgaagcatgctttcttaagaataaattcaagcaggttgcttctagaagagagaaggcatgcattggaggagtggatgcaaaagttactttctgacattgacttgtcaagaagtgctcctgttgctgctttttttgagcttgaagctgctgcacgttcatatttccaagaacggaatgggcgtccttctgaagtaggttcttctacaaaaagcagtactgcctcttctccacatcctgatggacctgcttctggttctcttgctgagtccaatcaaataaatcaaactcttactcgtggcagcagtctgacaggagcaactggtaatggtgtgcttggagaagctatcttagatcagtccgatgagcttgttagtaatgccttgaatcacaggaaagggaaccttgtattggaacatgatggtaggaatggttcagcagcgtcttataggggagttgtttcagatgaggaccgtgtatctaatcccggccatgctaggaaggactctgctgaaagtattgggagtgatttgagttctttaagaggaattgaattatctattccaggggttagtagttccctttgggatggtgctgtggtggatggacatattagtcaaacagaacatcttactggtttagatatgcatcttttgtatgatatggatgcacaagtcatccttccaaatgatcaaaaacagaagttgactagacttttgatcacaatgcaacaaagaataggggcagcaaaaactgatatggaggatctcatagcacgactaaatcaggaagcagctgttaaagaatatcttactacaaaggttaaggatttggaggttgaattggaagccgcaaagcaaaagggtagagagacactgcaacaagctatcctgactgaaagagagaggattacccagatgcagtgggatatggatgagctccgtaggaagtattctgagatggagtcaaacctgaaggctgaacaaaatgagaaaactcgtgcagagtcagagaaaacaaccgctagtgataaaaatgaaacattacttgaagaattagaaatcaaacgaaaagaagtcgagactttgaaacatcatcttgtagaagctgaggcaaagtctaaagcagataagaaagttcttgtaaaagaggtcaagtctcttagaaactcccaaacagagatgaagaaagtgttgaatcagtatcttgaacagaagactggtttagaggtatagtggtacctaatgcctatcaaattagagttattattagagataaacagaggtcagcacgtgcaaagttatgccgagtgaaatttcttcatgagtgtcgactgctgcatgagcgtctactggaatgtagtgctaaatttctagcagaagaacaaggcaattttactattgatccttcgtccttgcctgatgcattagatcttctagcaacatcagacaatagagtacgcttactcattgctgaggtaaactataaatgttattgtaaacttgtttcttttgattcatagaggaagaatattgttcacactggaatgcaatttccatggatgtacactccacagttttaaatatactttctattaattct

SEQ ID NO: 134716 - DNA, 1518 bp, Zea Mays
cgaaaaaggacgcacgggaatacgtaaaaaatccaacgttaacgagaggggagaagaagagaaataaagtgcgaggtaaccgtaaccctacccccttgcgagcacgacccaacccatcatctcgcccgtcacccgtcaggacccggaccaaaccaatcaggcggctcgggcgcggcggcgacacagggcaaggaggccggacgttggggggaccggggctcgacgccagccgtggatcgcgtgcggagggggacaagcgtctgcctcatgtcccgcgacggcggggaatagggcgacggcgtcggcggcggggatcggttgcggcggcgtgacgaggcggctgcggcggcggctcgggagggaggcggcaccatgtctgcggtagtctgtggcaagaggtcctcctccatcttcgccgacgagctcctcccgccgtctccttcctcccctcactcctcccaccagccggcggccaagaggtcccgccgctccccctcgcaccgcggcggctccgacggactccgaccggaggcgctcgtcgactatctacttgccctcttccccgacatggatccacagttgcttgaaaaagctctggaagcatctggagatgacttggattctgcaataaaaagtttgaatttgctgcgcttagagtcagcagaagctatcttgtcatcgactggtttcaaacctgaaaattgtctgcaaacagcaattcagccttctcttgaaggtattcctaatggtggtgtggatacggctacagaacatccgcctagcgtagataattaccagacaagctataatggctctgaatgggttgagctattagtcacagagatgagaaatgcttctgacataaacgatgcacgggctcgtgcgtcaagagctctggaggctttggagaaaacgattgtagagcgtgcaggagctgaagctacacaaaacctgcataaggaaaacatgatgctcaaggagcagttgactgttgttctgcgagagaactccgtgctgaagcgggcagtcgccattcagcacgagcgccaaaaggagttcgacgagaggtctcacgaggtccagaacttgaagcaacttgttctgcagtaccaggagcaagttaggactctagagatgaacaactacgccctcacaatgcatctcaagcaggctcaacagaacagctccatacctgggcgtttcaaccctgatgttttctaagcgtagtagctgctgaacggtccgccccagattaataagctatgtatgaatatatcttgttctaccaactgctcctgagatggggatatccgataggtggattcaccgcccaagggtccagaattttcaagtcactatggttttgatttcgatatactccgtatttatttaaacgtgttgctttcatgcaattggctatccgatatattgtgtgcgcccacttttccgggtatggtttatttgatccatggctacaatcaatattcgtcaacgtaatgtaggaactaatattactgt

SEQ ID NO: 134717 - DNA, 3803 bp, Zea Mays
ccctatccgcgtaccgccccccgggcgatcgatcgaacgcggctagcctcgccgccgacccgtcgaggcagccatggcggagatcgccgaacgggccgtcgcgggcgaggtgccggaggagccgcggccgccgcacggggaggaggacgacgaaggggaggaggagggggacgtgtgccggatctgccgtaaccatggcgacgaggatcacccactgcggtacccgtgcgcctgcagcggcagcatcaagttcgtgcaccaggactgcctcctccagtggctcgaccatagcaactcgcgccagtgcgaggtctgtaaacatgcattctccttctcacccgtgtacgctgataatgctccgacaagacttcctttccaggaactgatggttggtgttggaatgaaagcatgccatgtgtttcagttcatccttcggcttgcctttgttctctcagtttggctcatgattatcccattcataacctattggatatggcggttaacatttgtgagaagtctcagtgaagctcaaaggctgttcctcagtcacatcagcgctcagttgatccttagtgattgccttcatgggttccttctctcagctatcattgtccttatatttcttggagccacctcattacgagactacataaggcatttgcgtgaacttggtggacacgatgctgagagggatgatggtgggcgtgaaaggcatggtgctcgggctgttaggaggctagctggtcctaataatagggttcctgcagatggaaatgttgatgaattagcagaagcccaaggaatcggtgctggtgaacttctgaggagaaatgctgaaaatgttgctgctcgattagaacgacttgaggctcaggttgagcagatgcttgatggtctagatgatgcagatggtgcagaggacgttccttttgatgaacttgttggtatgcaaggccctgtcttccacttggttgagaacgcaataacagttttggccagcaatgctatattcctcattgttgtgatctttgttccattctcattgggaaggattatcctgtactatctatcctggtttttctcttcggcttctactcctatgctggcaaaagtgatgcccttcacagaaacagctatttctatagctaatgatacattaaagagcgcacttaatgttgtgaagaatttttcttctgacagtaataatgaaggtgttatcgggcatgtgattgaggttgttactcaatccttgaagataaatgccactggacttagtgtaattcaaggcactgggaagaacagtctgatgaaaggaacaacaattgcctcatcttatctttcagatctgacaactcttgctgttggatacatgttcatcttctgtcttgtgtttttgtatattggatcactggctttacttcgatatgccaggggagaacgttttaccattggaagactctacggtatagctactatattagaggccatcccttctctatgcagacagttctttgctggaatgaagcaccttatgactatggtcaaagttgcattccttctggtcattgagcttggtgtatttcctcttatgtgtggttggtggcttgatgtttgcactctaaagatgctgggcacaacaattgcgcagagagttgaattctttacaatgtcacccttggcgagctcatctatccattggctagttggtattgtgtatatgcttcaaataagcatatttgtgagccttcttcgaggggtgctgcgcaatggagttctttattttctgcgggaccctgctgatccaaattacaatccatttagggatttgattgatgaccctgtgcataaacatgcccgacgagttcttttgtcagttgcagtgtatggaagtttgattgtgatgttagtcttcttacctgtaaaagtggccatgagagtagctccttcaatgtttcctctggacataaccatatttgacccattcactgagattccagttgatgttcttctgttccaaatatgcatcccattcgctattgaacatttcaagcctcgtgcaaccattaaagctcttttacatcattggttttctgtggttggttggggccttggcttaaccgatttcttactgccaaaatctgaagaaaacggtgggcaggaaaatttgaatgcaagggcagaaagaagagacagaggacatggtgggagggaaatggtcgccccacaggttgaacaactcatgatacaacatgttgccgcagaagataatggcaggggggattcaaatgaagccaatgatgtaactgaggactctgatgtagatgaccagggagactctgagtatggctttgtgcttcggatcgtgctcttgcttgtactggcatggatgacattactaatattcaatgctggaatgatagtttttcctatctcacttggccgtctggtttttgaggctgttccccgcctgccaatcacacatggcatcaagtgcaatgatctgttctcctttagcattgggtgctatattctctggagtgtggcagctgggaccagatatgcgattgattacatcacatcacgacagctggggtttttggtacaacagatctgcaagtggtgctcaattgttttgaagagctctgttctcttgtcgatatggatctttgttattcctgtgctgattggactcctttttgagctgctggtcatcgtacccatgagggtgcctattgatgagagccctgtcttcctattgtatcaggattgggctctggggttaatattcttgaaaatatggactagactggttatgttggatcagatggcacctttggttgatgaaagctggaggtcaaagtttgagagagttagagacgatggcttctcccgtttaaagggtctgtgggtcctccatgaaattataatgccgatcgtgaccaagctccttactgctctctgtgtcccatacgtccttgcaaggggcatcttcccgttgctgggttacccactcatcgtgaactcagcggtgtaccggtttgcctggcttggaagcctgatcttcagcgccctcttcttttggggcaagagatttcatgtctggttcaccaacctccacaactctatcagggatgaccgctatctgattgggcggaggctgcacaactttggcgaggactcacactcacctgagcggagtgaatctggagcaagtatagggtcagatgatcaggacagagatattgtactgcgagatcaggaagaggaagtggggttgaggatgaggcgcaataatatgcatgcaaaccaacaacctaggtttgctttataagtaggaagtagttttggacaaagagctcataaccatggtataagcttcggtctgcaggttctgcttgtgctttgtaatgggcgttgtagagtgagtttatgtgttagtgataggaaatagtctaaggactgttctacgataaagcctggagaaagctgaagtggctggtgattacaaaactggtggcaactcccattcctgtggtagtcctggctaactgtaaatatcgtttgacagagcattaccatgccaactcaatctgttgtgatcctcttgtaatgactagtgagttaaggtgaactgttgggtagatacgagatactagattattatcgcgttcactcttttttttttgggtcccatctttgtttttttagaaactgcaattgcattctgtttatatcatggagcatctagcggcttgaaatgaacaagaacaagatgcatgggcagtgggcagtattggttgtgg

SEQ ID NO: 134718 - DNA, 648 bp, Zea Mays
cccgcgacgctggtgacggtcgatggcgacggcgagctcaagatggagacgctgctcaaggcgtcggcctacatcctcggcgccacgagttcgagcatgtacaaggccgtgctcgccgacggcaccgcgctggcggtccggcgcatcggcgacagcggcggcaccgaaaagctcaaggacttcgaggtgcaggtgcgcgccatcgcccggttccgccaccccaacatcctccggctgcgcggcttctactggggcgtcgacgagaagctcctcatccacgactacgcccccaatggcagctttgccaacatcgcattcagcagtaagccattcgtcgcccgcgctgcatctgcagggcggttgtggggtcgtcatcgagcctggagacgcggctgcggatcgcgcgcggcgtggcgtacatccacgagaaaacatcctcctgggtcctggcgtgccgacatggagccctggatcggcgacgtgggcctggaccggctggtgtcgggtgaggcggcgccgcactcccgcgcgggcgcgtcggcgcggctgttcgggagcaagcggtcgatgcactcgacgcgtagcttgcagccaccggcatgtgtctccggggtccgtgtccatccggcaagaaaccgttggaagtaa

SEQ ID NO: 134719 - DNA, 1424 bp, Zea Mays
attgctctccaaccaaacctcgtctcgtcttctctccgctaccaccaccactgctcgttttacagaaaccggaaggaaccaaacgcctttccgccccgggccgccgctacccaagcccagcaaccaccactcgttgtcgtcgactactaggcggcaagcaggcgtcctgttttttttttttggtcctcgtcgtcgtccggactccggacaggacaggacatgggcgcggaggcggcggagcgcgacagaatcaggggcccgtggagccccgaggaggacgaggcgctgcggcggctggtggagcggcacggcgcgcgcaactggacggcgatcgggcgcggcgtcccgggccggtcgggcaagtcgtgccgcctgcggtggtgcaaccagctgtcgccaagggtggcgcgccgccccttcacggccgacgaggacgcggccatcgcccgcgcccacgcccgcctcggcaaccgctgggccgccatcgcgcgcctgctccccggccgcaccgacaacgccgtcaagaaccactggaactgctccctcaagcgcaagctcggcgccgccgccgccgcgtccggttcggcggtttccgctgacgactccgccgccgccgccgagaccgaggcgcgccggggcaagatgatgatgatgagcatctcgccgcccgacagcccctcggggtcggggtcggggtccgaccgtagcgacctcagcagccacggcgccgggtccgggtccgggtccgggtccggccagatttaccgccccgtggccgcgcgctccggcgggttcgagccggcggactgcgccatgagccgtccgcaggaggaggacccgctcaccgccctcagcctctcgcttcccggcacggaccagcggtttcaccaccacagcgccgccgccgacagccacttccaggagctcccgccgtcgccctcctcacccgcgccctcggcctacccgttcagccccgagttcgcggcggcgatgcagcagctgatccgcaccgaggtgcagcggtacatggcgagcgcgggcctgcgcgccggctgcggcgccgttggcgcgaccgacctctgcatgccgcagctggtggacggcgtcatgcgcgctgccgccgaacaggtcggccggatgcagtagccccgcgcccccggcgggggcatcaaaccgtcagtgctcccaaatcgtcgtctagctagggcgaccgcaacgcaacggttgttggagtagcaaacttggttttaaggtggagggaaaaattggctgggctgaaagcagaaagccttgtaatgtacatgaaagaaacggaacggatggcgcgctacaatctgagctcgccattgccgcatatatctgctttaagagagcattgcgctgccttgcctaatcgaaacgaaacgacacgaaatgttgcctgc

SEQ ID NO: 134720 - DNA, 897 bp, Zea Mays
ggagagagagaatcgatccgagtgatgtatacaattgttggctgcacttgtgttgttgtttgaggcacctaggggtcccttttatagccccaaatggcctaggagccgttagagcttcatttggaagctcccagccttccctggttgcgggtgcatcggacagtgaacagtaacggatctgattgacagtttccttctctggaacagctagccgttggtgcaccggacaggttactattcactgtcctgtgcaccggacaggtcactattcactgtcctgtgcaccggacacagctactattcactgtcctgtgcaccggacgctgcgactattcactgtcctgtgcaccggacgctgcggctattcactgtcctgtgcaccggacacagttactattcactgtcctgtgcaccggacagagttactattcactgtcctgtgcaccggacagctactattcactgtcctgtgcaccagccaacagcacactaagtgctttttcctccgttctttctccgtttgacttcaacttttgggaggattttcctgagacttaaacaaacacatttagagtataatccaattgatttagtcctagaaacttacatctttcttgttcttctcctagcttttctgtttctcctccagcagagctcagaatggtactttctctacagaaagagttagagagcaaaccaaagcaccaaacttgtagtaagaggtgtatgcaaaatggttgaacactcaaaccttacatacttaacctttttcatcgttttacccaatttggcttgtttgaggtcgatgttggactctaaaccatcaagtcaacttgacttgatctagattgacatatctgagccccaacccccgttcacttctcgagcttgatcttg

SEQ ID NO: 134721 - DNA, 846 bp, Zea Mays
aacgccggcagcagcagtctgcagatcgagcacagccgcgcgcggcttgccaccgtacaaacaagcacgagcactccgctagctgctccgccgcgcaacaacaatggcgtccccgcgcggccatcgtcatcgccgggccaacgtgctgcagcgtgcggcggcggcggcggcgctcctgctcgctctatcctgctgctgcagcagcgctgatccgtggccgccgccgccgccgccgcccaaggtgccggcggtgatcgtgttcggggactcgacggtggacacgggcaacaacaacgcgatcggcaccgtgctgaagagcaacttcgcgccgtacgggcgcgacatggccggcggggcccggcccacggggcggttctgcaacgggcgcctgccgcccgacttcgtctccgaggcgctgggcctgccgccgctggtcccggcctacctcgacccggcctacggcatccaggacttcgcccgcggcgtctgcttcgcctccgccggcaccggactcgacaacaagaccgccggcgtgctgtcggtgatcccgctgtggaaggaggtggagcacttcagggagtacaagcggcggctgcggcggcacgtggggcgcggcagggcgcggggcatcgtctccgacgcgctctacgtgggctggagaacgtggaggagggctgctgcgcgacggggaaggtggagatgtcttacctgtgcaacgacaagagcccccacacgtgcgccgacgccgacaagtacttcttctgggactccttccaccccacccagaaggtgaaccagttcttcgccaagaagacgctggacctgtgctacgagcagctcctgtga

SEQ ID NO: 134722 - DNA, 1384 bp, Zea Mays
cagcagtctgcagatcgagcacagccgcgcgcggcttgccaccgtacaaacaagcacgagcactccgctagctgctccgccgcgcaacaacaatggcgtccccgcgcggccatcgtcatcgccgggccaacgtgctgcagcgtgcggcggcggcggcggcgctcctgctcgctctatcctgctgctgcagcagcgctgatccgtggccgccgccgccgccgccgcccaaggtgccggcggtgatcgtgttcggggactcgacggtggacacgggcaacaacaacgcgatcggcaccgtgctgaagagcaacttcgcgccgtacgggcgcgacatggccggcggggcccggcccacggggcggttctgcaacgggcgcctgccgcccgacttcgtctccgaggcgctgggcctgccgccgctggtcccggcctacctcgacccggcctacggcatccaggacttcgcccgcggcgtctgcttcgcctccgccggcaccggactcgacaacaagaccgccggcgtgctgtcggtgatcccgctgtggaaggaggtggagcacttcagggagtacaagcggcggctgcggcggcacgtggggcgcggcagggcgcggggcatcgtctccgacgcgctctacgtggtgagcatcggcaccaacgacttcctggagaactacttcctgctggtgacggggcggttcgcggagctcacggtgggcgagtacgaggacttcctggtggcgcaggcggagcggttcctgggcgagatccaccggctgggcgcgcgccgggtcaccttcgccgggctcagccccatgggctgcctgccgctggagcgcacgctcaacgcgctccgcggcggctgcgtcgacgagtacaaccaggtggcccgcgactacaacgccaagctgctcgccatgctccgccgcctccaggcggcgcgcccggggctcagggtagcttacgtcgacgtgtaccagaacatgctcgacctcatcaccaacccttccacgctggggctggagaacgtggaggagggctgctgcgcgacggggaaggtggagatgtcttacctgtgcaacgacaagagcccccacacgtgcgccgacgccgacaagtacttcttctgggactccttccaccccacccagaaggtgaaccagttcttcgccaagaagacgctggacctgtgctacgagcagctcctgtgatgctggacgctgcttgctattgctactaatcaatcaatcgcggtgtatagcatagcattcgattgtcttccatgtactgtatctgtatgtagcatggttgttctgcctgttccgaatcccgatgcgtcgattcttttggatttaaatgatcagatcagagtggtttataattt

SEQ ID NO: 134723 - DNA, 1761 bp, Zea Mays
atgcaccggtatggacaggttgttggtgatgcagcccgtcctgaagatcttggcgaaggagcgccagagcctgagctcctggtgcgccgtcaccggcatcccctccttcacgcagtggtcgtacttctccagcaccgacacaatgtagctgaactccggccgccgcgccgggttcgccgaccagcacttcttgatcaggttgttgagcaccggcgggcacgagctcgacagcggcgggcgcaggttctgctccgacgcggcgtacgcggcctgcaccggcgtcatgccctggaacgggaggaggcaggtggtgagctcccagagcacgatgccgaagctgtacacgtccaccttgcgcgtgtagggcttctccttggtcatctccggcgccatccaccggtaggtgcccttgttgcccttggtggcctggcacttggtctccaggcaggaggtgccgaagtcggccaccttgacgcgcatctcgtcgttgagcagcaggttctgggacttgaggtcccggtggatcacgccctgcgcgtgcaggtactccatgccgcgcgagatgtccagcgccagcttcaggatcgtctccgccgacagcgagtaggggtccttcttgttcaggtacatccgcagcgtcccctgggacatgtactccgtgatgatgcagtacaccggcggcttcttgcacgccgcgatgaactgcacaatgttggggtggtagaggcgggagaggaaggcgacctcggagttgaactgctcctcgagctcggcgcgccgggcctcgtcgcgctccgggatgcgcaccatcttcacggccacggcgcgctgcttgtagatgccgcggtagatgcggctgttggcgcccgacgcgaacttgttgccgatgaagagctgcgacaggtcggccatccactcctcccgccgcccgctgtcccgggacgacccctcgccgccggaccccatcaccgtgtccagcagcatggaccacgactccatgctgtcccaccgcttcttctccatgccgtccgcctccggcggccacgcgctcctcccgcgccccgacgtcgacgtcgacggggacgcagcgaacaggctcgccgcgaacggcagcgacggcccccgccggggagacaccgccgcggcctgctggtccgcgtccccgccgccgccgccgaccggccgcggcagccggaagcaggagagcatgtggggcgccaggatcaagattcgcagcaggagcacgacgtcgcacacggcatgtttggccggcgtcggtaccactacggcactactgcgctaccaacgcgatcgacgacgttgcgacacgccggacgacgcccgcgccacctccacgggcattgctcaccgcgccgccgcgtccgtccaccaccactctcacgatatgcttaattacaggtcacaaggaattaaatcaaagcatcaagctaaacaagatcccaaactcctacgaccatgcaagcaacgcccggatagatgcctacgcaataatccagcgtacgtactgggggccggccgggttcgctaccctatccacaaagcatgcgcgcgtggcacggacccagctgctatccgatgcgagcttctgggaggatgcaaaacggcacgaaagcgaataaaggcaggcacgcgcaggcgcagcgggaagaaggggacgctagcggctagctctccttgttcctcctcgagtcctcctctcctctccgtctctggcacccttgagaagctctggtacggtgt

SEQ ID NO: 134724 - DNA, 2137 bp, Zea Mays
gctaacagttggtagttggtactatagttcttcagttatgtgtgtccttttcataatttatatcttctgtttctaaacatgcagggacttaagcaacaaccacttgcatgattcaatcccttaccagttgccatcaaaccttacctatctgaatctggcaaaaaataacttctccggtaatcttccatactctatatccaacttggtttcacttgagtacctcaatctcagccacaactcgttatttcaggaaattggtgaactatttggaagcctcaattcactttcagaactagacgtatctttcaacaacctcacggggaatcttcctttctcaatgggcgctctgtcgaaactttctagcctttatatgcaaaacaatcaactatcaggcacagttgatgtcctcagcaacataagccttgcgacactaaatattgcagacaacaattttagtggcatgatacctcaagaattcagctcaattccaaatttaatagttggaggaaactcatttgtcaatatgcctgcctccccgccatcaactctgaagccacctctggaggaacctcaaggacccgttagcgctccaactagccctgatacccctattgatcaagacgacaggaagatacagacaggtcctcttatagggatagctgttggctcaatagctgctgcctcatgtgttcttttcgtcttggtgttctgcctccacaatgcacgcagaagaaatgacgatgagatcagcgaaccaaaagatcttgtgggttctcttgcagtaagcatagaaacagcatccagtagggaagtcctgaacaacaaccatgaaaatagtgctgtagcaacttcagatctccaacatgctgggaagatgatgatgactccggacagagtactgcatgatacgacgaacggttcttctactgccaaaaggccaaaggttcctgtgacggtgacttcatatacagttgctgatctccaagtcgctacgaatagcttctgtgaagactctctcctaggcgagggttcgcttggtcgtgtttacaaggctggttttcctaatgggaaggtacttgccgtgaagaaggtagacgacagtgccttgctgtctctgtatggaggaggagaagacgccttccttgagctggtctcgaacgtttctcggctgaggcatccgaacatcgtgcccctcacaggctactgcgtcgagcacggacaaaggcttctcgtgtacgagtacgttgggaacggaacgctgcgtgatgtgctgcagcactgcttgtctgacgacgagggggcgagcaagaagctcacgtggaacacccgcgtaaggatagcgctaggcaccgctcgcgccttagagtacctgcatgaggtgtgcatacccccagtggtgcatagtaggaccttcaaggcatctaacatcctgcttgatgaagagtacagcccgcatctatctgactgtgggcttgctgctctcactactgtggtctccccggaagcggttggctcctttggatatagtgctcctgagctcgccatgtcaggaacatacactgcaaagagcgacgtgtacagtttcggagtagtgatgctggagctgctgacaggccgcaagccactagacagctccagagagaggtcagaacagtctctcgtgagatgggcagccccgcagctccacgacatcgatctcctcgccaggatggtcgatccggcgctggacgggctgtacccttccaagtccctctcccgtttcgccgacatcatcgccatctgcgtccagccggagccggagttccgcccgccgatgtccgaggtcgtgcagcagctggtgcgcctgatgcagagggcggccatcataaggcggcaatcggacgatctgggctactcgtacagggtccccgaccgcgacggcggcgcagcagcaggcgacgtcctctgactctgagaggctaggaggagacccaagttggttcacgttttgtttccgtccgtcacctgtaaatgacatttgacatgtactatagggttcggagtgtacctggacttttcgtcagctgcgagtgtcatgtattgtgtgcgctcttgcaagtggtagatatatagatatatttgtactacttattatgaa

SEQ ID NO: 134725 - DNA, 1893 bp, Zea Mays
ctcctaagccctatgaattcatattgtgataattaaaatccttacagagacgtatctttcaacaacctcacggggaatcttcctttctcaatgggcgctctgtcgaaactttctagcctttatatgcaaaacaatcaactatcaggcacagttgatgtcctcagcaacataagccttgcgacactaaatattgcagacaacaattttagtggcatgatacctcaagaattcagctcaattccaaatttaatagttggaggaaactcatttgtcaatatgcctgcctccccgccatcaactctgaagccacctctggaggaacctcaaggacccgttagcgctccaactagccctgatacccctattgatcaagacgacaggaagatacagacaggtcctcttatagggatagctgttggctcaatagctgctgcctcatgtgttcttttcgtcttggtgttctgcctccacaatgcacgcagaagaaatgacgatgagatcagcgaaccaaaagatcttgtgggttctcttgcagtaagcatagaaacagcagcatccagtagggaagtcctgaacaacaaccatgaaaatagtgctgtagcaacttcagatctccaacatgctgggaagatgatgatgactccggacagagtactgcatgatacgacgaacggttcttctactgccaaaaggccaaaggttcctgtgacggtgacttcatatacagttgctgatctccaagtcgctacgaatagcttctgtgaagactctctcctaggcgagggttcgcttggtcgtgtttacaaggctggttttcctaatgggaaggtacttgccgtgaagaaggtagacgacagtgccttgctgtctctgtatggaggaggagaagacgccttccttgagctggtctcgaacgtttctcggctgaggcatccgaacatcgtgcccctcacaggctactgcgtcgagcacggacaaaggcttctcgtgtacgagtacgttgggaacggaacgctgcgtgatgtgctgcagcactgcttgtctgacgacgagggggcgagcaagaagctcacgtggaacacccgcgtaaggatagcgctaggcaccgctcgcgccttagagtacctgcatgaggtgtgcatacccccagtggtgcatagtaggaccttcaaggcatctaacatcctgcttgatgaagagtacagcccgcatctatctgactgtgggcttgctgctctcactactgtggtctccccggaagcggttggctcctttggatatagtgctcctgagctcgccatgtcaggaacatacactgcaaagagcgacgtgtacagtttcggagtagtgatgctggagctgctgacaggccgcaagccactagacagctccagagagaggtcagaacagtctctcgtgagatgggcagccccgcagctccacgacatcgatctcctcgccaggatggtcgatccggcgctggacgggctgtacccttccaagtccctctcccgtttcgccgacatcatcgccatctgcgtccagccggagccggagttccgcccgccgatgtccgaggtcgtgcagcagctggtgcgcctgatgcagagggcggccatcataaggcggcaatcggacgatctgggctactcgtacagggtccccgaccgcgacggcggcgcagcagcaggcgacgtcctctgactctgagaggctaggaggagacccaagttggttcacgttttgtttccgtccgtcacctgtaaatgacatttgacatgtactatagggttcggagtgtacctggacttttcgtcagctgcgagtgtcatgtattgtgtgcgctcttgcaagtggtagatatatagatatatttgtactacttattatgaa

SEQ ID NO: 134726 - DNA, 1581 bp, Zea Mays
gtactgttcctttgccagcttgcctgctgccaccagtggcacctgcaagcgaacctccacgcgagctgcccggccccggctgcccctgcgccctgcgcccctgcccctgtccctgccggccccttccaaaataaagcgggagggagatgcgctgagccggatggcggcccactcgctctcgctctacctccccgtcgtcacgcgctcgcttgtgcccctagcgtttcgccacctcctgctcccgcaccgcctccggctccggctccggctccgcctcgtctccgccgtctccccatcccgggcgcggcccctcggcctcggcgcccgcccgccccgcccccacgccgcacccctcggctacggagttggtgcagggagaaggccgagtggtggactggaccacagagccatgtcaagttccacaaattcaacagtggccacggagttgtcggtgtctgagaatagcagggaaattgagccgctaccttttgtgaatgacaaacatggaggcgtcatcattgagatgaagactccaatggatcctggagtgttttcagcttacttgaaagcagcgctggcaaaatggagggagcagggaataagaggtgtctggatcaaattacccatcaccctttccaaccttattccaacagttgtagaggaaggtttctggtaccatcatgcagaggaaacttacttgatgcttgcgtactggcttccaaatacaacacatacactaccagtaaacgcaacccaccgtgttggtgttggagcttttataatgaatgacaaaagagaggtcttggttgtacaagaaaagagtggtgtacttcgaggcctaggtgtgtggaaatttccaactggcgtagttgaaccgggggaagatattaacgttggagccataagagaagtaaaagaagagaccgggattgatgcagaatttgttgaagtgctggccttcaggcagagccacaaagctttttttgataaatcagatctatttttcgtgtgcctgctacgaccgctgtcatatgacattacgaagcaagactcggaaatagaagcatgccagtggatgccagtagaggaatttgcagcacaaccatttgtccagaaacatgagcttgtgaagtacatcctcgaagtaggcctggctaaagttgacaagaaatatgcagggttttcgccaatctccataaaatcggcgtttacagacaaattgtccttattttacatgaaccggagggacctggacaaagcctcaggatagagtaatatgtaattaaacacagggaattcaagatagttgaaatttcagttctggtatgtaaaagcaggccaagtcatattcatacttgattattttgttaacaaattggaagtttcgggcatccgacacttgtgatttttcgaccatatgtcgtctgctacacatctgtgtttcaaaggagtgttgcaatccaaaagtagagatgaaactgttgcaatctaattgtaggtctacagacaataaaatactgttttcctttattatatactccccttttgtcgtgaaatatatctaaatgatttattaataaa

SEQ ID NO: 134727 - DNA, 1572 bp, Zea Mays
gtactgttcctttgccagcttgcctgctgccaccagtggcacctgcaagcgaacctccacgcgagctgcccggccccggctgcccctgcgccctgcgcccctgcccctgtccctgccggccccttccaaaataaagcgggagggagatgcgctgagccggatggcggcccactcgctctcgctctacctccccgtcgtcacgcgctcgcttgtgcccctagcgtttcgccacctcctgctcccgcaccgcctccggctccggctccggctccgcctcgtctccgccgtctccccatcccgggcgcggcccctcggcctcggcgcccgcccgccccgcccccacgccgcacccctcggctacggagggagaaggccgagtggtggactggaccacagagccatgtcaagttccacaaattcaacagtggccacggagttgtcggtgtctgagaatagcagggaaattgagccgctaccttttgtgaatgacaaacatggaggcgtcatcattgagatgaagactccaatggatcctggagtgttttcagcttacttgaaagcagcgctggcaaaatggagggagcagggaataagaggtgtctggatcaaattacccatcaccctttccaaccttattccaacagttgtagaggaaggtttctggtaccatcatgcagaggaaacttacttgatgcttgcgtactggcttccaaatacaacacatacactaccagtaaacgcaacccaccgtgttggtgttggagcttttataatgaatgacaaaagagaggtcttggttgtacaagaaaagagtggtgtacttcgaggcctaggtgtgtggaaatttccaactggcgtagttgaaccgggggaagatattaacgttggagccataagagaagtaaaagaagagaccgggattgatgcagaatttgttgaagtgctggccttcaggcagagccacaaagctttttttgataaatcagatctatttttcgtgtgcctgctacgaccgctgtcatatgacattacgaagcaagactcggaaatagaagcatgccagtggatgccagtagaggaatttgcagcacaaccatttgtccagaaacatgagcttgtgaagtacatcctcgaagtaggcctggctaaagttgacaagaaatatgcagggttttcgccaatctccataaaatcggcgtttacagacaaattgtccttattttacatgaaccggagggacctggacaaagcctcaggatagagtaatatgtaattaaacacagggaattcaagatagttgaaatttcagttctggtatgtaaaagcaggccaagtcatattcatacttgattattttgttaacaaattggaagtttcgggcatccgacacttgtgatttttcgaccatatgtcgtctgctacacatctgtgtttcaaaggagtgttgcaatccaaaagtagagatgaaactgttgcaatctaattgtaggtctacagacaataaaatactgttttcctttattatatactccccttttgtcgtgaaatatatctaaatgatttattaataaa

SEQ ID NO: 134728 - DNA, 1987 bp, Zea Mays
gtactgttcctttgccagcttgcctgctgccaccagtggcacctgcaagcgaacctccacgcgagctgcccggccccggctgcccctgcgccctgcgcccctgcccctgtccctgccggccccttccaaaataaagcgggagggagatgcgctgagccggatggcggcccactcgctctcgctctacctccccgtcgtcacgcgctcgcttgtgcccctagcgtttcgccacctcctgctcccgcaccgcctccggctccggctccggctccgcctcgtctccgccgtctccccatcccgggcgcggcccctcggcctcggcgcccgcccgccccgcccccacgccgcacccctcggctacggagttggtgcagggagaaggccgagtggtggactggaccacagagccatgtcaagttccacaaattcaacagtggccacggagttgtcggtgtctgagaatagcagggaaattgagccgctaccttttgtgaatgacaaacatggaggcgtcatcattgagatgaagactccaatggatcctggagtgttttcagcttacttgaaagcagcgctggcaaaatggagggagcaggtgacccccccccccttctctcagcatcaatgttaccatttatcctatcatgccaagtaaatatcccaatatttaagttttgaactgtggacgacatacctcaaagatccatcaatccatgcaagcatctttatatggtaggtttggtaggtgaaaaaaatggtgctgtgcatgacaactattttaaaggtttaaatacactgtatatcttctatgagccttgaagagccaaccatattgcaaggcatgtgacaatagacatgtggagattactgtacatgtacatcattattttcaatctcagttattcatgagtacctcaaggagagatgtggttacaaatgcatagcctgcacttgtcattgaaaagagctttacatctattactgtactttcctcattgtagggaataagaggtgtctggatcaaattacccatcaccctttccaaccttattccaacagttgtagaggaaggtttctggtaccatcatgcagaggaaacttacttgatgcttgcgtactggcttccaaatacaacacatacactaccagtaaacgcaacccaccgtgttggtgttggagcttttataatgaatgacaaaagagaggtcttggttgtacaagaaaagagtggtgtacttcgaggcctaggtgtgtggaaatttccaactggcgtagttgaaccgggggaagatattaacgttggagccataagagaagtaaaagaagagaccgggattgatgcagaatttgttgaagtgctggccttcaggcagagccacaaagctttttttgataaatcagatctatttttcgtgtgcctgctacgaccgctgtcatatgacattacgaagcaagactcggaaatagaagcatgccagtggatgccagtagaggaatttgcagcacaaccatttgtccagaaacatgagcttgtgaagtacatcctcgaagtaggcctggctaaagttgacaagaaatatgcagggttttcgccaatctccataaaatcggcgtttacagacaaattgtccttattttacatgaaccggagggacctggacaaagcctcaggatagagtaatatgtaattaaacacagggaattcaagatagttgaaatttcagttctggtatgtaaaagcaggccaagtcatattcatacttgattattttgttaacaaattggaagtttcgggcatccgacacttgtgatttttcgaccatatgtcgtctgctacacatctgtgtttcaaaggagtgttgcaatccaaaagtagagatgaaactgttgcaatctaattgtaggtctacagacaataaaatactgttttcctttattatatactccccttttgtcgtgaaatatatctaaatgatttattaataaa

SEQ ID NO: 134729 - DNA, 103 bp, Zea Mays
gtcgtctcttctccgcacacagcattacctacggaagatttctctggcaaactttctgcatttctaacttctatctgtcttgcaaaatgtcaaaaagaaaaaa

SEQ ID NO: 134730 - DNA, 1690 bp, Zea Mays
ttcgtctactgagcccaaggaatagaatcaatcagtgtctactctctccacaggcccaaaacgcctccaagccgtccaagggtactcgagctcgagctacactcggcgtttacggcgccggcgatcacccaccgcgtcctccgccttgtcctctttcctcaacctaacccccatccagcgaggtttctccgctctcatatagaatcagatatgaagagggcggcgccgtctcaggagcccctcgacgtttcttccggggactcctcgggctcggattccgatcaattaggcggcaaggataagggcgggagcgcctctaaagctgctgcaggggctgaagatgtgaagagggtggtgctgcataaggaatcccaggacgtatcttctgatgatgaccttagctcggattctgatgatgatgctgggaaggggaatgcttggaatgcctttgggctgcccaattcctccaaagctgcttcgacggcagaaggtgctctgatcaggagggccgaaatgtatcagcaatacatgaagcgcattccggttcctgcttaccgtgattctgtaatcccattcacatcgtggctgggactcgccggatcgctgaagcagctgtatgagcaacccttgcattacctcaccaatgtcctcttaaaaaagtgggaccagcaaaggattgggagcgatgatgagcaccggcgtctggacgctatcatccaccctgccagagctgagaccctggtttgggccactgaagaggtccataggctgaccacctctggccagcacttggctagcctctgggcctcagatcccatgtatcatgctcacgtagatcccgtgtttgcttccgtaaagctggagtagccaccgttatgaattggggggttttggtgtttccatggtgtaagcctgcacattttgatttgctaaaacagcaagtaccaatctagtgacgcgaactccagtccagatgacgcttgttctgagtatgatatcttgtcgttacggttcattttaacattaatcttagctctgtgaacagcagccaggtcaaagaagaagaagaaaaccggtgtggatttcagcgctctgagccggcacggataccatggcggcccatccgtcttgacagttcgtccggcagcggaggaaccgaactggtcctggtccactgggaaagaccgcgacggcaaagaggacgcacacgcacccgagtcctacgaggaacgcgagcgtaccagggccgcagtaaccgaaggggagaagttcatcgggctgcagaacgcgccgccgaaccagctgttgctggagaaagacaggaaggagaaggacgcctccttctcgcagaaagagaagcggaagagggaccggggccaagccagcagggggaagaactacgtcgaggaggagaagcggctcctgaggggcagcggcgtgtactctggctttgacacttagcaaataccaagagctctagcatgtgtgcataccgagggttagctgcctttcatcgtgtgctttggctgtgtttatttgggctttggatgtagctatgcattgcgttcaaatagtaccgctgccatattctgtgtgccatgtcttgctgcattcgcgagttgccattgatataaaaaaaattggaacttcaaatatcttatgaacatatttgcttcaaattggaagttac

SEQ ID NO: 134731 - DNA, 965 bp, Zea Mays
acaggcccaaaacgcctccaagccgtccaagggtactcgagctcgagctacactcggcgtttacggcgccggcgatcacccaccgcgtcctccgccttgtcctctttcctcaacctaacccccatccagcgaggtttctccgctctcatatagaatcagatatgaagagggcggcgccgtctcaggagcccctcgacgtttcttccggggactcctcgggctcggattccgatcaattaggcggcaaggataagggcgggagcgcctctaaagctgctgcaggggctgaagatgtgaagagggtggtgctgcataaggaatcccaggacgtatcttctgatgatgaccttagctcggattctgatgatgatgctgggaaggggaatgcttggaatgcctttgggctgcccaattcctccaaagctgcttcgacggcagaaggtgctctgatcaggagggccgaaatgtatcagcaatacatgaagcgcattccggttcctgcttaccgtgattctgtaatcccattcacatcgtggctgggactcgccggatcgctgaagcagctgtatgagcaacccttgcattacctcaccaatgtcctcttaaaaaagtgggaccagcaaaggattgggagcgatgatgagcaccggcgtctggacgctatcatccaccctgccagagctgagaccctggtttgggccactgaagaggtccataggctgaccacctctggccagcacttggctagcctctgggcctcagatcccatgtatcatgctcacgtagatcccgtgtttgcttccgtaaagctggagtagccaccgttatgaattggggggttttggtgtttccatggtgtaagcctgcacattttgatttgctaaaacagcaagtaccaatctagtgacgcgaactccagtccagatgacgcttgttctgagtatgatatcttgtcgttacggttc

SEQ ID NO: 134732 - DNA, 1072 bp, Zea Mays
acaggcccaaaacgcctccaagccgtccaagggtactcgagctcgagctacactcggcgtttacggcgccggcgatcacccaccgcgtcctccgccttgtcctctttcctcaacctaacccccatccagcgaggtttctccgctctcatatagaatcagatatgaagagggcggcgccgtctcaggagcccctcgacgtttcttccggggactcctcgggctcggattccgatcaattaggcggcaaggataagggcgggagcgcctctaaagctgctgcaggggctgaagatgtgaagagggtggtgctgcataaggaatcccaggacgtatcttctgatgatgaccttagctcggattctgatgatgatgctgggaaggggaatgcttggaatgcctttgggctgcccaattcctccaaagctgcttcgacggcagaagcagccaggtcaaagaagaagaagaaaaccggtgtggatttcagcgctctgagccggcacggataccatggcggcccatccgtcttgacagttcgtccggcagcggaggaaccgaactggtcctggtccactgggaaagaccgcgacggcaaagaggacgcacacgcacccgagtcctacgaggaacgcgagcgtaccagggccgcagtaaccgaaggggagaagttcatcgggctgcagaacgcgccgccgaaccagctgttgctggagaaagacaggaaggagaaggacgcctccttctcgcagaaagagaagcggaagagggaccggggccaagccagcagggggaagaactacgtcgaggaggagaagcggctcctgaggggcagcggcgtgtactctggctttgacacttagcaaataccaagagctctagcatgtgtgcataccgagggttagctgcctttcatcgtgtgctttggctgtgtttatttgggctttggatgtagctatgcattgcgttcaaatagtaccgctgccatattctgtgtgccatgtcttgctgcattcgcgagttgccattgatataaaaaaaattggaacttcaaatatcttatgaacatatttgcttc

SEQ ID NO: 134733 - DNA, 1589 bp, Zea Mays
actcatctttctcgctcccgttcgttgcagccgccaggcaccgccgcccgccgcgcccccacgcccgcctgctggtgcccccgccgcgcccctccccgcaccgccggcacgcccgcttcgccccagcccgcagacacccccgcccgcgacgagctgtgctgctggtggcggtggagcgcagtgaggatgaggcgcgcgtcgcgcctggtggccgggtcatggaggcgcgccagcagagccctgagctcgccgtaggcggcatcgccagagggctcgcaccgctgcagggactccttgacgatgctgccgtcgtcatccgcctccacgcccacgctgcccatctgattccgatctgattccagtcgctgaggtccgccggagctagctagagcctatagcttggcttcttgtttgcttcttccagcctgtacgcaaggttctgtttatatggatttttgtatataagattgcattgttctttcgtatgaggctgcatatgacgagacgatgtctagtcagcacggaccagactatgactggaggacctcacctattgatcctcaggttgtgtatgcaagtggtggaaaaggtcatggaaggtgcggactctacatatcttatattgtttcattggttgagtgcaatacatgtattctgaatctgtcgtgatgttacttgttttgtaggtacacaatatttgctaacgtcaacgactcgatccaggtgagagttcagtgtggaggttcgtcgagatctgctgctcgtagctcccgtcgctccaatcaagatctagtagaagtggcgcaactgcaagaagaacttaggcgacatcaggattacttgagacaataagctgcgcaacatgaatactatgctacacagattcaacaacaacaaacactcatacaacaactagcacaggcccaagggatacatgtcccggtgtccccaccaccaccaccaccacctcccgtacattattcttggtcttcacatccacctacacctacatctccacctaccgaacatcagacccctccagctacctttccgacacatgaacgagaagacgggttagactttgtcaaaaccctcttcgctagtggaggtatcgaccatcactcatcactgtaccccaatggtgatcgacgatcgtgagcttccatgttatgtgttgtaatacttgagacttttattatgactatgtatgagatattgtctcttataatgactggatgagatgtgtcttattatgactatggatgagacttttgtgatgtaattgatgagactatggatttaaatatcgttatgtgattgtgtgtgagttgatttatgtgaaaatatgttgtgctatatagctgttgatatatttgttatgttgtggaatatggtgtaaaataaaaataaacaacatttgtaatgctggtcaaattaacttcctagaggccaactgggccgtaggaagttagtcagctaacttcctaggggctacagtcagccgtaggaagttagtcgtaggaagttagtcacctgacggtgctgacggcgtgaagctactaacttccgagaacctactaacttccgag

SEQ ID NO: 134734 - DNA, 3013 bp, Zea Mays
cttgcttgcgcttcctccgtccccctagccgctgcaggtcctagttgccccacccctcacgccaatgcagcttccccctgttttgttgctttgaccgccttaaacacctcagggcctgcagatgtcgcaccgaatcacatccccttcacgcctcctgctcgaattcctaacgcccgagaaaccaataacctggtggtgatgccgctgagcaacgccgtcaccgtcacttaatcccaactcccccactagttgtctctcttcttctcttcggttacaagagcagaccggagttagcgggcagtggaggccgcgatgaagagcccccctgtcatggaccccgaggcgccgccggcgggcactcctcccgatgacgaggaggagaagcggggaggacggaagggggtgccgtggcggatgacgctgagcctggcttaccagagtctcggcgtggtgtacggcgacctcagcacatcgccgctgtacgtctacaaggcggcgttcgcggaggacatccagcacacggagagcaacgaggagatcctcggcgtgctctccttcgtcttctggacgctcacgctcgtcccgctcctcaagtacgtctgtgtcgtcctccgcgccgacgaccacggcgagggcggcaccttcgcgctctactccctcctctgccgccacgcgcgcgccgcgctcctcccgccaggacgaaccgccgcctgggacgaggaccagttctcggacggagccggcggtggcaccaacaaggctacggcgcagaatggcaatgctgtgacgctgggagggggcgccgccgccagcgtcaggaggctgctggagcggcacaaagtgctgcagcgggttctgctcgtgctggcgctggtgggcacctgcatggtgatcggcgacggcgtgctcacgccggccatctccgtgttctctgcggtctccgggctggagctgtccatggcgaaagaacatcataaatatgtggaacttcctattgcctgtatcatactggtttgcctgtttgcactgcaacactacggtacacaccgggttggcttcatttttgctccagtggtgatcacatggctcctatgtataaccctgatcggtgtttacaatattattcactgggaacccactgtatatcgagcattatctccgtattacatgtacaagttcttgaggaagacacagagaggaggttggatgtccctgggaggaatactgttatgtgtaaccggttctgaagcaatgtttgctgatctggggcatttcaaccagttgtcaatacagattgcttttacatgcatggtgtatccagcattgatccttgcatacatgggacaagctgcttatctgtgtaagcatcatatcatggaaagtgactacaggatcggattctatgtgtctgtgccagagaaaattaggtggcccattatggcaattggtattcttgcagcagttgtgggaagccaagccgtcatcactggtacattctcaatgatcaagcagtgcgcttctctgggctgctttcctcgggtgaagataatccatacatctgccaaagtacacgggcaaatatacatccctgagatcaattggattatgatgatactgtgcttagctgtaaccattggttttaggaacacaaaacacttgggaaatgcatcaggattggctattataaccgtcatgctggtcacaacgtgcctgatgtccctggtgatagtcctgtgctggcataagagcatattccttgcgattggcttcatcctgttctttgggaccattgaggcactgtacttctcagccgcactcatcaagttcagggagggagcctgggtcccaatcgttcttgctctcatcttcatcctgataatgtgcgtctggcactatggcaccatcaagaagtacgagttcgacgtccagagcaaggtctccatcaactggctccttggtctcagcccgaaccttggcattgtccgcgtccgtggcattggcctcatccacaccgagctcgaaaccggcatcccagctatcttctcgcatttcgtcaccaacttgcctgcctttcaccaggtactcatatttatgtgcatcaagaacgtgccgataccacatgtccggcctgaagagcggttcctcgtcggaaggatcggccccaagcagtacagaatctaccggtgcatcgtcaggtacggctaccaagacttccacaaggacgacgtggagttcgagaaggagctggtgtgcagcgtggccgagttcatccggtcagggtcgtccaagctgaacggcacggctgaggaggtcgacgaggaggaggagcagcgcatggcggtcgtccgctccaacagcgtccgcatgctggaggaagaggccacggtgcagaacaccgtcggggtcggcccgtcgtcgcgggccagcagggagatacagtcgccgtcgccggccccggcgactggggttgggcccaagaacaagaagcgggtgcggttcgtgctgccggcagcgagcccgaagccggacgccggcgcgcaggaggagctgcaggagctgtcggacgcgcgggaggccggcatggcgttcatcctgggccgctcgcacgtgaaggcgaagagcgggtccggcttcctccgccggctcgtgatcaacttctgctacgacttcctgcggaggaacagccggggaccccgctacgccgtcaccgtcccgcacgcctccacgctggaggtcggtatggtgtactttatctgactggactgaactgaacagccccctgaaactaactctgggagtgagaaactcagaaacataggaacatgaaaagataagatgaggtgaaacaaaaaaaaaggttttcagctgtatatgctaggttttgtaactgctggtgagtttcgttgtaaaatgcagccctgttttcttgttaggcgttcagcttctctcgtaatccactagaaaatttattattatgggctagtttggtaatatattttttcgaggtatttct

SEQ ID NO: 134735 - DNA, 4375 bp, Zea Mays
ccatccgaccccatggcctcggcctcattccagcccgtcgcggcgtcggcggcctccgcgccgccgcgcccggccccgcgccaccccttcgcagccgctgccgccgcgcgccgctcctctctctcgttacgccccgccgcgcaccgtcccgttatcccgctccgctcctccgccgtcgcggctaacaccctccgcgccacgcaccgccgtgccgtctcggcgaggtcgaggagacgcgcgcaagggctcggcgcggcgcccgcgttggctgcgtcgacctggggcggcggtgacaagggaggttgcctctcttgcttccccaagagtaggcggggcaggtcggggctcgcgccttgcgcgctcccgcacgcgtcgggactatcgtttcgcagccggttgagcgggtcgaaggtcaggcctagccatatattgcacgccgctggtcctgatgaaccacatgttgcaagtccaacatggtccgatacttcccttgatacaactgacatggatcatgctattagtaaggaggagcttgaagatgtcctcaacactccgcttcccgagcatccgaagctaattcgtggtcaattgaagaatggcctccggtatcttatcttaccaaataaagttccagcaaacagattcgaggctcacatggaagttcatgttggatcaattgatgaggaggaggacgagcagggaattgcacatatgattgaacatgttgcgtttcttggcagtaaaaaacgtgaaaaaattttggggaccggtgcgaggtctaatgcatataccgacttccatcatacggtgttccatatccactctccaactaaaacaaaggaatatggtgaagacttacttccttttgtgctggatgcattgagtgagatagcttttcatccaaagttttcttcatctcgtgttgagaaggagagaagagcaattctttctgagctccagatgatgaacacaatagagtatcgggttgattgccagttgttgcaacatctgcactcagaaaacaaactgagcaacagatttcctattggacttgaagagcaaatacataaatgggatcctgataagatccgcagatttcacgagcgttggtactaccctgcaaatgccactttatatctggtgggggaaattgatgatattcctagagctgtgcgggaaatagaggcggtatttgaacacactctttcagaaaatgaaggaaatcctgtaccgagcgctaatccatttggtgctatggcaagcctttttgcaccaaagctcccaggtggttttacttcaaacctaactggtgaaaaatcacctgccacagataaaataaagcctgcaaaaagggaaagacaagcagttaggccacctgtagagcataagtggtcccttcctggagttgctcaggatgccaaacccccagcaatttttcaacacgagttgattcagagtttctctatcaacatgttctgcaagatacctgttagcaaagttcagagctacaaggacctgcgcagtgtactcatgaaaaggatatttttgtctgccctacattttcgaatcaatacaagatacaagagctcaaaccctccttttacttcagttgagctggaccacagtgactctggaagggaagggtgcacggtcactactctcacagtaaccgctgaaccccaaaattggagaagtgcaatcaaagtcgctgttcatgaggtgcgaagactgaaagaatttggtgttacaatgggagaaatgacccgttacatggatgcactgataaaagatagtgagcagctggctatgatgattgacagtgttccctcagttgacaacttggacttcatcatggagagtgatgcacttggccacactgtcatggatcagttgcagggacatgaaagtttgcttgcagttgctgaaactgtcacccttgaagaggtcaacactgttggcgcggaagtattggagttcatttcagattttggaaaactcaatgctccccttcctgctgctattgtggcatgtgtcccccaaaaggtgcatgttgatggcgcaggtgaaactgaattcgagatatatccagaagaaatcactgaggctatcaaggcaggtcttgaggaacctatttaccgagagcccgagcttgaggtgccaaaggaattgattactcaatcagagctcgatgacctgaaatctcaatgcaatccttcatttgttcctttaaccaaagaggagaatgcggtgaaagtgtttgacagtgaaactggtatagcacaacgccgtctttctaatggaatttccatcaactacaagataacacaaaatgaagctagggttggtgtcatgcggctcatagtagggggagggagagcaacggaagattctgaatcaaagggatctgtcattgttggtgttcgtaccctgagtgaaggtggctgcgttggtaacttttctagggaacaggttgaacttttctgcgtcaataaccttatcaactgttcactggaatcgaatgaggaattcatatttatggaatttagatttgctttaagagacaatggcatgcgagctgctttccaacttcttcatatggtccttgagcataatgtatggctagaagatgcatttaatagagcaactcagttgtatttgtcttactatcgctctatccccaaaagtttggagcgttctacagctcataagcttatgttagccatgctaaaccatgatgaaaggttcgtagagccgtcaccacattcactgcagaagttgactcttcagtcagttaaaaatgctgtcatgaaccagtttgtgggtggcaacatggaggtcagtattgttggtgatttcactgaagaagaagtagaatcttgtgttcttgattatcttgggaccgtgagggcttcgagttctctaaacacagaggagcgtattgagaagatttccttccgaccatttccatcagatgttcatttccagcaagtatacataaaggacacagatgagagagcctgtgcgtatattgcaggccctgctcctaaccgttgggggttcactactgaaggaaatgacctatttaatgtcattcggatatctgatgctgatgcagaagtatctgaaccagtgagcttggatctaacagggaagagacacgttgatgttcgcagccacccccttttctttggcatcactttgagtctgcttgctgaaattattaattctaggctatttacaacagttcgagattccatgggattaacatatgatgtttcttttgaattaaacctttttgacaaattgggtcttggttggtatgtaatcgcggtcacttcaactcccagcaaggtccataaagctgttgatgcctgcaaaggtgttctgagaggattacatagtagtcgaattgtggaaagggagcttgaccgggcaaagaggacgctgttgatgaaacatgaggctgagacaaagacaaacgcgtactggcttggtttgctagcccatctacaatcttcatctgtaccaagaaaggatgtatcatgcatcagggaattgacgacattatatgaaagtgccacaattgaggatctgtatcttgcatatgagcatctgaaagttgatgattcttctttgtttgcttgcattggaattgctggcgctgaatctggtgaagatacaaatgatgatgagcttgatgtggatcttcatggcatggctcccatgggaggccggggtctttcaacaatgaccagaccaaccacatgatcaccattgggatggccagcccttccaaggtgacatattaaatgctgtgttactgcatcatggacaagttgtgctgaaacctactcggaattggttgtggatctttatatggattttaaccttgctcctgaagacaggagccacatggccctaggagactattctcgtttcccagcaaaacggtttaaagataattgaaacattggatctgtatctggggagactattgtttgtttcctatgagccacaaccaaaaagcttggccgttgcatttccccccgagaagaagcgttggagttaatgactcgcaaggtcgtggaaaggagataatatttttcgaggtcattatgtagcttggcatgtacaggaaagcaggctgattcttgcatacagcagttgtaactaggtcgttgagggcattgaagataggatgacagtagaatcacatataagttgctggtctgcgaattcggaaataatgatgaaggcgtaggctagtaacattttggtgttattctttttttttttaatcaaaaaattgtagcctttgttaccggtaataaatagatccatagctttgatgaaaaaagaaaattcaaaaaatatt

SEQ ID NO: 134736 - DNA, 651 bp, Zea Mays
ctcggcaccctcttcgatggtgctgagcgccctcctctcagtcacagtcacagtcacaggcggggccggtcgcgccgcgacagcgggcttcctggccggaccacgtggaggagccgtctcgaagccgccaagagtcctctggttgagcttctcgttgacagcctcctcgtcgccgtgcgcgtgcgcgtggtgcgccgccgccgccggcacgacgcgcgccctggtggacccgcgagggcgtcgcccgccacgcggcggcctcgctcccgccgccagcgcctggctggcgcgcacggccagcgcggccatgtcggcgcccgagagcggcctgccgagcatggccgcggggaggacgaagtagacctgccccggccggagcagctcgctggcgccgagcgccgggacgtcggtctcgaagtagagcgcgctggagctgcacacgaagtaccggccgccgtcgtcgtccgcattcgcgcccagcacgtcggagacggagacggggagaaggagcggcgccgccgccggcgtgacgaactcccgcagcgagccgtcggccgcgacgaccagggccggggccgccgccggtggctggtgaagcgacgacgacgcgccgctgctccggtggtggctgcttgagaggcctgatcccat

SEQ ID NO: 134737 - DNA, 594 bp, Zea Mays
aggcttggccatggcccctctacaacttccctctctctctctctctctcctgagaggcggatcggcgacagaggggagacgctcagtctacacacatcggcaaagggcactcgagtgggtggagtgtggcgaggagggggacgacggcgccattgcgacggagcgaggggacaggtcacaggtgaaatttgacggtgagttcgcgtctcctccttggcattgccctctccatcttttgggaaccggaggcatcccgtggtcactgaaactaggggattctggccagattcctgaggagtccagggacctgaccctctgcactggtggacaagcccatgaaatcccaggaatgggtggtgcgcagtcgcctctttgtgtttgggaacaccgagacgacgccaggcatctctgaagaaattgaagacgcgcatcagaattattaggcgcctttttggcatcacagctagctagactcatttaggggccgtctgtttgggaaatgaaacccgtataatctactcagactatgatgtaatctaacttgttttggaccaagattaaattctaaaagagtagcctgtgttgtgaaactaa

SEQ ID NO: 134738 - DNA, 1308 bp, Zea Mays
aggcttggccatggcccctctacaacttccctctctctctctctctctcctgagaggcggatcggcgacagaggggagacgctcagtctacacacatcggcaaagggcactcgagtgggtggagtgtggcgaggagggggacgacggcgccattgcgacggagcgaggggacaggtcacagtttggccgcgaagccctggaagccggcgctgtaagtgtagacgtgtgatgcctgcgccttctccgagctgcggagaggaagcgtccgactcaagatatatatatactgctgcatggaaacggcactgggaggtgggagctagctagctaagcctaggaggggttatggaggaaggaattcaaattaacgagtctgctgtggacctgccgtcgtgaacagccgtcagcatctggcggtgcagcccggcgtgtcgtcgtcgacggggtgccctgtcgccctgcggcgctttgcccatgtagaccacgtacacctgaaggaagagttggcatcatccatccatttgctagctactacagaagtgcagctgaccaccaccgtggagatataatataagcatatcggcgtgcgttggagtaggcacctgagaggcagagcagcggcgaaggtcgtcgcccagtagcgccagggacagcgcgaggaagaacatggctgtgcgtggagaagaagccatggcagacacggtcggacaccagctagcgcagatacagcgggtttggatggattggcaagcgtgtaccgacgagtacgagagacctagacaccccaccagctgctgtatatgtatgtatgtatgagactgagactgagactgagactgagagctagcagcagccagcagcttcctgaaaccgctgccaagtttactggagcagagagcctgcgcactgaccggaatcccggtttgtttgtgtggccgttattcctgcgcttttcttcgtcggccgagatggcaacaagagtacataaataaatgcggacaaagatgtcatgatgcggtatgggagccaaggagggtcggctagtgagagcagacaaacagggcatccgatctttggagatatacaaggaacatgcatgtagattgtagggtggctgcttgctttcgtggacatacctgtgtgtgtcatgtatgcagatatgaggtataataggtgtatttatttcttattattgtcgtagatcggtgtgccacctgccatcgtgtgtctatagtctatatatctatctatatatatagatagagagagaaagaataaagtgatacaaggagtatatatctttctgtc

SEQ ID NO: 134739 - DNA, 1814 bp, Zea Mays
gtcctctccctccctccctcctgcctggccgtccaggcttggcgcgttcgttgcttggcagatggcaaaagagtttaccaactcccttctccctccccttccccgccccgctcccgcgtaatctaaccgctgctccgattagcgccatcccaccgctataattacgctcccgccctgcgcgcgcgggcctatcagcgctagcttagctatccggccgcatccgctgctcgcctcctcacttgcgcgtgtgtcgtgtagcatttagtcagctgctcctgcttgctagggttagggtttgcgggcgcgcgcgcgcgtgcccgcgcgtgagctggccgcgggagggatgacgccgcaccggtcgccggcggggaccggaggaagtggcggcggagggccgccggcgctacactacctgagcggcccttacggagacaccaccttcaccaaggttttcgtgggcggcctcgcctgggagacgcggagtgaggggcttcgcgcccactttgaggtctacggggacatcctcgaggccgttgtcatcaccgaccgcgccacaggccgctccaagggctacggattcgtaaccttccaggacccagagtcggcgaggatggcctgcatggacccatatccagtgatcgatggccggcgtgctaattgcaatcttgccatcttagggcgtcctggtccagctgtgcctttcgtagcacctataaggccggtcatcccttacaatggaggtgtggcggttccagggggcatgtatgtgcaaagcccaacatatcagcaatccccttacaactacccacaggcctttgtatattcttcttatgggccatcagcatatggacctgaatacctatatcagcagaatgcatatggtccatatgttggacaacagtatattccagtttacggtggcccaaggacagtaggcccagcagtctacccatatgggcagtctggccaacctgtaccaagtgatcatgcttattctcttggttatgccccaagtcgtgttctcccactatcgaatcagaatgttaacgctgcaaatgttgtgcgcataccaccacttcaacaatttcctccaggagctccacgacctcagcaacagcttttggcccctgctcgtgcaccgccattcccacagaacaacgtttctgaacaagcgacaggttgacaaggatgccagaaagtgacgaattttaggtatcctatagtctgcagcaggactaagaaaagttgtaccgctaaattgggcggcatgcttttttcttgcaaattgttttcgtttgctctctaaagtctgcaggttgtccctatccatggttacctgaacttcttataacgtgagtgtctgatctgctccgcgggaaggggcaggcaagctcgagcgactgaagatgaagcccctcttgctcagcttctgtcagtgtctgtacattccccatctgccagacatcctgatagctgatggtctgtgcaggaccaaagtggatgccggaaatggagtccggcctccaacctgtgtataatataggtcatgtagtggtccaaatcgtagaacaggtccattctttgaaaacatctggttgtgtatattaattctcttagcaccttcagtgcatgttttcatgtctcattagagggaataggtatttcaatgtcattgcattgtcagtgagtcatgtacattattatactgaaaatgtaaactatatatgtcatctgtgtcaactgacaactgtaatcaaataatgacatccctatcttgggaaagaacatgatttattgcaagttgcaacggatgg

SEQ ID NO: 134740 - DNA, 1783 bp, Zea Mays
aagagtttaccaactcccttctccctccccttccccgccccgctcccgcgtaatctaaccgctgctccgattagcgccatcccaccgctataattacgctcccgccctgcgcgcgcgggcctatcagcgctagcttagctatccggccgcatccgctgctcgcctcctcacttgcgcgtgtgtcgtgtagcatttagtcagctgctcctgcttgctagggttagggtttgcgggcgcgcgcgcgcgtgcccgcgcgtgagctggccgcgggagggatgacgccgcaccggtcgccggcggggaccggaggaagtggcggcggagggccgccggcgctacactacctgagcggcccttacggagacaccaccttcaccaaggttttcgtgggcggcctcgcctgggagacgcggagtgaggggcttcgcgcccactttgaggtctacggggacatcctcgaggccgttgtcatcaccgaccgcgccacaggccgctccaagggctacggattcgtaaccttccaggacccagagtcggcgaggatggcctgcatggacccatatccagtgatcgatggccggcgtgctaattgcaatcttgccatcttagggcgtcctggtccagctgtgcctttcgtagcacctataaggccggtcatcccttacaatggaggtgtggcggttccagggggcatgtatgtgcaaagcccaacatatcagcaatccccttacaactacccacaggcctttgtatattcttcttatgggccatcagcatatggacctgaatacctatatcagcagctttgtagaatgcatatggtccatatgttggacaacagtatattccagtttacggtggcccaaggacagtaggcccagcagtctacccatatgggcagtctggccaacctgtaccaagtgatcatgcttattctcttggttatgccccaagtcgtgttctcccactatcgaatcagaatgttaacgctgcaaatgttgtgcgcataccaccacttcaacaatttcctccaggagctccacgacctcagcaacagcttttggcccctgctcgtgcaccgccattcccacagaacaacgtttctgaacaagcgacaggttgacaaggatgccagaaagtgacgaattttaggtatcctatagtctgcagcaggactaagaaaagttgtaccgctaaattgggcggcatgcttttttcttgcaaattgttttcgtttgctctctaaagtctgcaggttgtccctatccatggttacctgaacttcttataacgtgagtgtctgatctgctccgcgggaaggggcaggcaagctcgagcgactgaagatgaagcccctcttgctcagcttctgtcagtgtctgtacattccccatctgccagacatcctgatagctgatggtctgtgcaggaccaaagtggatgccggaaatggagtccggcctccaacctgtgtataatataggtcatgtagtggtccaaatcgtagaacaggtccattctttgaaaacatctggttgtgtatattaattctcttagcaccttcagtgcatgttttcatgtctcattagagggaataggtatttcaatgtcattgcattgtcagtgagtcatgtacattattatactgaaaatgtaaactatatatgtcatctgtgtcaactgacaactgtaatcaaataatgacatccctatcttgggaaagaacatgatttattgcaagttgcaacggatggggaaaactagggatggatacggatactta

SEQ ID NO: 134741 - DNA, 1531 bp, Zea Mays
atcagcgctagcttagctatccggccgcatccgctgctcgcctcctcacttgcgcgtgtgtcgtgtagcatttagtcagctgctcctgcttgctagggttagggtttgcgggcgcgcgcgcgcgtgcccgcgcgtgagctggccgcgggagggatgacgccgcaccggtcgccggcggggaccggaggaagtggcggcggagggccgccggcgctacactacctgagcggcccttacggagacaccaccttcaccaaggttttcgtgggcggcctcgcctgggagacgcggagtgaggggcttcgcgcccactttgaggtctacggggacatcctcgaggccgttgtcatcaccgaccgcgccacaggccgctccaagggctacggattcgtaaccttccaggacccagagtcggcgaggatggcctgcatggacccatatccagtgatcgatggccggcgtgctaattgcaatcttgccatcttagggcgtcctggtccagctgtgcctttcggccatcagcatatggacctgaatacctatatcagcagctttgtagaatgcatatggtccatatgttggacaacagtatattccagtttacggtggcccaaggacagtaggcccagcagtctacccatatgggcagtctggccaacctgtaccaagtgatcatgcttattctcttggttatgccccaagtcgtgttctcccactatcgaatcagaatgttaacgctgcaaatgttgtgcgcataccaccacttcaacaatttcctccaggagctccacgacctcagcaacagcttttggcccctgctcgtgcaccgccattcccacagaacaacgtttctgaacaagcgacaggttgacaaggatgccagaaagtgacgaattttaggtatcctatagtctgcagcaggactaagaaaagttgtaccgctaaattgggcggcatgcttttttcttgcaaattgttttcgtttgctctctaaagtctgcaggttgtccctatccatggttacctgaacttcttataacgtgagtgtctgatctgctccgcgggaaggggcaggcaagctcgagcgactgaagatgaagcccctcttgctcagcttctgtcagtgtctgtacattccccatctgccagacatcctgatagctgatggtctgtgcaggaccaaagtggatgccggaaatggagtccggcctccaacctgtgtataatataggtcatgtagtggtccaaatcgtagaacaggtccattctttgaaaacatctggttgtgtatattaattctcttagcaccttcagtgcatgttttcatgtctcattagagggaataggtatttcaatgtcattgcattgtcagtgagtcatgtacattattatactgaaaatgtaaactatatatgtcatctgtgtcaactgacaactgtaatcaaataatgacatccctatcttgggaaagaacatgatttattgcaagttgcaacggatggggaaaactagggatggatacggatactta

SEQ ID NO: 134742 - DNA, 766 bp, Zea Mays
gcttagctatccggccgcatccgctgctcgcctcctcacttgcgcgtgtgtcgtgtagcatttagtcagctgctcctgcttgctagggttagggtttgcgggcgcgcgcgcgcgtgcccgcgcgtgagctggccgcgggagggatgacgccgcaccggtcgccggcggggaccggaggaagtggcggcggagggccgccggcgctacactacctgagcggcccttacggagacaccaccttcaccaaggttttcgtgggcggcctcgcctgggagacgcggagtgaggggcttcgcgcccactttgaggtctacggggacatcctcgaggccgttgtcatcaccgaccgcgccacaggccgctccaagggctacggattcgtgagcacgccttcctcctgttttttttctttctgttcctatgtgctatgctggtcgaggtgttggccaggtttgattctggagctgaatgtttgttgtattcgaatatggagacgaatgtgtgatactgattctgtatgcaaagatgaactttgtggtttgaattgggagcttttgtgatcatctgtggatgctgttgtggcggtggcaattggcagtggaggtgttagaatttgggagttttgcattccgtatgcaggaatcttgatgcagtggaggtgttagaatttgggagttttgcattccgtatgcaggaatcttgatgggtgttgacttattaccaataggattgagggaaatagttaaatttgttacctggagccagt

SEQ ID NO: 134743 - DNA, 1568 bp, Zea Mays
ttagctatccggccgcatccgctgctcgcctcctcacttgcgcgtgtgtcgtgtagcatttagtcagctgctcctgcttgctagggttagggtttgcgggcgcgcgcgcgcgtgcccgcgcgtgagctggccgcgggagggatgacgccgcaccggtcgccggcggggaccggaggaagtggcggcggagggccgccggcgctacactacctgagcggcccttacggagacaccaccttcaccaaggttttcgtgggcggcctcgcctgggagacgcggagtgaggggcttcgcgcccactttgaggtctacggggacatcctcgaggccgttgtcatcaccgaccgcgccacaggccgctccaagggctacggattcgtaaccttccaggacccagagtcggcgaggatggcctgcatggacccatatccagtgatcgatggccggcgtgctaattgcaatcttgccatcttagggcgtcctggtccagctgtgcctttcggccatcagcatatggacctgaatacctatatcagcagaatgcatatggtccatatgttggacaacagtatattccagtttacggtggcccaaggacagtaggcccagcagtctacccatatgggcagtctggccaacctgtaccaagtgatcatgcttattctcttggttatgccccaagtcgtgttctcccactatcgaatcagaatgttaacgctgcaaatgttgtgcgcataccaccacttcaacaatttcctccaggagctccacgacctcagcaacagcttttggcccctgctcgtgcaccgccattcccacagaacaacgtttctgaacaagcgacaggttgacaaggatgccagaaagtgacgaattttaggtatcctatagtctgcagcaggactaagaaaagttgtaccgctaaattgggcggcatgcttttttcttgcaaattgttttcgtttgctctctaaaggttagctatcacatttatctaacatttgcagcggggccatttattaaagggcatcagtctacgttgcatctaggctgatcgatgtactgtttcttatcatactgcagtctgcaggttgtccctatccatggttacctgaacttcttataacgtgagtgtctgatctgctccgcgggaaggggcaggcaagctcgagcgactgaagatgaagcccctcttgctcagcttctgtcagtgtctgtacattccccatctgccagacatcctgatagctgatggtctgtgcaggaccaaagtggatgccggaaatggagtccggcctccaacctgtgtataatataggtcatgtagtggtccaaatcgtagaacaggtccattctttgaaaacatctggttgtgtatattaattctcttagcaccttcagtgcatgttttcatgtctcattagagggaataggtatttcaatgtcattgcattgtcagtgagtcatgtacattattatactgaaaatgtaaactatatatgtcatctgtgtcaactgacaactgtaatcaaataatgacatccctatcttgggaaagaacatgattt

SEQ ID NO: 134744 - DNA, 127 bp, Zea Mays
ggaattaaatccatgcctcaatccatgccccaaaataatccatgactacttaattttttttattcggttaaacccatcatggaatataacccaaaggtttaggaattttttaaactatggaagacat

SEQ ID NO: 134745 - DNA, 488 bp, Zea Mays
catcgaccacgaggacggcgcaccgtgggacgccatgccaccgacgcggcccaagataaagatcatccacatcatcacgccggagatcatgaagaccgacgtcgcccacttccgggcgttcatgcagcggctcaccggcaagcctgcctgctgttccgacgtcacatcgacaccgccgccgccggtaggggagaggaggagacagagacgtccaagaagaggcgaggccgacactggctccggtgaccgacgacgagaggagcggtttcacggtgcaaggattggcggcgacaaggagaggaagatcaagtgcgaggtgaaggtggaggatcggaaagagctaggcttcgacgggtatgagtatgagctcggccgtagcgacctgtggatggacatggacctcagcccgggaggagggttcttgagcttcctgtaaaaggaggagggcgtcttccaaggcctggcctggctgttgaccatgacttctt

SEQ ID NO: 134746 - DNA, 1571 bp, Zea Mays
ctttgtattactgtatatgcatcgcgtcttctttgatcttgaaaccaggtggtgcgcaaggaagcttggaagttggttccctctgcaccacttttcgagtctgaaacacactttccagctctcctccgacaaagactcagaccgccggcggcatgctcctcctcgacggcgaccttgtcctctcctcctccggaagcaccggcgctgcctctcgcacgagcgacagcgggagggagctcgtggcggcgctcttggagagccccgggatccgccacgcggtcgaccggctgaaggtcgcgccggagaggcggatctcggcagggcaggagggggcgccgaagcacgtctacgtgttccagcgggagtacgccacggtggatccggcgcgcgtcgagttagttggcacagatgaggctactacatgcattggtgttgtaattcgcaacaacaagactggaatgacctctgttagccatatggattttccagaaattgtggagggagggatcaagcagatgttagaattacttggttcaccttattggtggctttgctgatgcttccacaaaggttgttcgttcctctggaaagaaacacatcaaacaggaagggtattcctatccactatgttgcaaaatagttgaagtgctgcataagtcccagctacaattccaccttcgatcattttgtgtccttgagaataacacgaagagtgactcatttggaaatgcgctacctataattggtggatttgtggttgaaacctcatctggagttgtgataccagcaacctttgatatggattcaaggtgcccagatgaagttgtcaggagaattcgtgtgagcgttagctcttatgatccaacttggcaaggaaggttgctggagacttacgatactcaggacgatgttttccaaattgcacctgcctgctggatgccagattgggccgatatagcgtcctcactcaaccagctctcggactccgaagtcctgctgcggtgctccacctctccagccgcagaaccacctcacttcgtggaaaacgaaagaaggatctggaaatacctgatcgataacccggactgggaagagacgttcccaaaacacaagccccgggtgttccatagggcaagcgacggaagctggtcaaggtactcgtagtgcaagccaagggcttccatcgtctgctgttatcgtcggtgctcccacacatggaacgaaccagaagggaaacccccctctccgttgatttgaacagtgacatattaagtttgagtgcaaagttttctgcgcactgcgattagcacatccgtggacgcttggagatgggagtaaattttataaagtctcttggagatggcagctgctctaaggaccagctaaaaactaaaaaaacgcatgctcttgggccgaaaatgatgagcgattcctcacatctccgttctttttctttatcgaaattttcatttctacgcagttttgtatttttctgaagttataaggttccttgttttgtgcacaaacttataatgcaacttccccaaaactcatataacaccacttcctgc

SEQ ID NO: 134747 - DNA, 1629 bp, Zea Mays
ctttgtattactgtatatgcatcgcgtcttctttgatcttgaaaccaggtggtgcgcaaggaagcttggaagttggttccctctgcaccacttttcgagtctgaaacacactttccagctctcctccgacaaagactcagaccgccggcggcatgctcctcctcgacggcgaccttgtcctctcctcctccggaagcaccggcgctgcctctcgcacgagcgacagcgggagggagctcgtggcggcgctcttggagagccccgggatccgccacgcggtcgaccggctgaaggtcgcgccggagaggcggatctcggcagggcaggagggggcgccgaagcacgtctacgtgttccagcgggagtacgccacggtggatccggcgcgcgtcgagttagttggcacagatgaggctactacatgcattggtgttgtaattcgcaacaacaagactggaatgtaagtgaaaaagaagtgagcatttatctgatcctgacctctgttagccatatggattttccagaaattgtggagggagggatcaagcagatgttagaattacttggtgatgacaatgcaccatttgatgttcaccttattggtggctttgctgatgcttccacaaaggttgttcgttcctctggaaagaaacacatcaaacaggaagggtattcctatccactatgttgcaaaatagttgaagtgctgcataagtcccagctacaattccaccttcgatcattttgtgtccttgagaataacacgaagagtgactcatttggaaatgcgctacctataattggtggatttgtggttgaaacctcatctggagttgtgataccagcaacctttgatatggattcaaggtgcccagatgaagttgtcaggagaattcgtgtgagcgttagctcttatgatccaacttggcaaggaaggttgctggagacttacgatactcaggacgatgttttccaaattgcacctgcctgctggatgccagattgggccgatatagcgtcctcactcaaccagctctcggactccgaagtcctgctgcggtgctccacctctccagccgcagaaccacctcacttcgtggaaaacgaaagaaggatctggaaatacctgatcgataacccggactgggaagagacgttcccaaaacacaagccccgggtgttccatagggcaagcgacggaagctggtcaaggtactcgtagtgcaagccaagggcttccatcgtctgctgttatcgtcggtgctcccacacatggaacgaaccagaagggaaacccccctctccgttgatttgaacagtgacatattaagtttgagtgcaaagttttctgcgcactgcgattagcacatccgtggacgcttggagatgggagtaaattttataaagtctcttggagatggcagctgctctaaggaccagctaaaaactaaaaaaacgcatgctcttgggccgaaaatgatgagcgattcctcacatctccgttctttttctttatcgaaattttcatttctacgcagttttgtatttttctgaagttataaggttccttgttttgtgcacaaacttataatgcaacttccccaaaactcatataacaccacttcctgc

SEQ ID NO: 134748 - DNA, 1691 bp, Zea Mays
ctttgtattactgtatatgcatcgcgtcttctttgatcttgaaaccaggtggtgcgcaaggaagcttggaagttggttccctctgcaccacttttcgagtctgaaacacactttccagctctcctccgacaaagactcagaccgccggcggcatgctcctcctcgacggcgaccttgtcctctcctcctccggaagcaccggcgctgcctctcgcacgagcgacagcgggagggagctcgtggcggcgctcttggagagccccgggatccgccacgcggtcgaccggctgaaggtcgcgccggagaggcggatctcggcagggcaggagggggcgccgaagcacgtctacgtgttccagcgggagtacgccacggtggatccggcgcgcgtcgagttagttggcacagatgaggctactacatgcattggtgttgtaattcgcaacaacaagactggaatgtaagtgaaaaagaagtgagcatttatctgatcctgacctctgttagccatatggattttccagaaattgtggagggagggatcaagcagatgttagaattacttggtgatgacaatgcaccatttgatgttcaccttattggtggctttgctgatgcttccacaaaggttgttcgttcctctggaaagaaacacatcaaacaggaagggtattcctatccactatgttgcaaaatagttgaagtgctgcataagtcccagctacaattccaccttcgatcattttgtgtccttgagaataacacgaagagtgactcatttggaaatgcgctacctataattggtggatttgtggttgaaacctcatctggagttgtgataccagcaacctttgatatggattcaaggtgcccagatgaagttgtcaggagaattcgtgtgagcgttagctcttatgatccaacttggcaaggaaggttgctggagacttacgatactcaggacgatgttttccaaattgcacctgcctgctgtacatgccttgtttgcttacagttttcccttaccataaaatccatcgcctgttgatacataggatgccagattgggccgatatagcgtcctcactcaaccagctctcggactccgaagtcctgctgcggtgctccacctctccagccgcagaaccacctcacttcgtggaaaacgaaagaaggatctggaaatacctgatcgataacccggactgggaagagacgttcccaaaacacaagccccgggtgttccatagggcaagcgacggaagctggtcaaggtactcgtagtgcaagccaagggcttccatcgtctgctgttatcgtcggtgctcccacacatggaacgaaccagaagggaaacccccctctccgttgatttgaacagtgacatattaagtttgagtgcaaagttttctgcgcactgcgattagcacatccgtggacgcttggagatgggagtaaattttataaagtctcttggagatggcagctgctctaaggaccagctaaaaactaaaaaaacgcatgctcttgggccgaaaatgatgagcgattcctcacatctccgttctttttctttatcgaaattttcatttctacgcagttttgtatttttctgaagttataaggttccttgttttgtgcacaaacttataatgcaacttccccaaaactcatataacaccacttcctgc

SEQ ID NO: 134749 - DNA, 2485 bp, Zea Mays
ctttgtattactgtatatgcatcgcgtcttctttgatcttgaaaccaggtggtgcgcaaggaagcttggaagttggttccctctgcaccacttttcgagtctgaaacacactttccagctctcctccgacaaagactcagaccgccggcggcatgctcctcctcgacggcgaccttgtcctctcctcctccggaagcaccggcgctgcctctcgcacgagcgacagcgggagggagctcgtggcggcgctcttggagagccccgggatccgccacgcggtcgaccggctgaaggtcgcgccggagaggcggatctcggcagggcaggagggggcgccgaagcacgtctacgtgttccagcgggagtacgccacggtggatccggcgcgcgtcgaggtgcgtggagttgccttgtcgcggcttggtctaatagggttggggaatttcgttccccacctgcctttgggtgataaaaacgggatcttgttacgtcgttgatggagttccttgtgtatctgatcgattatatgtgtagctcagtgatgatttgtgctgtgaaggtgaacttcgttttcctgtctaaatcatcactgttgctgtcgagacaaagggctcaggttctgaagtagtggatcggcaagtcttcgtagtttcacttcactcgatttgggaattggttcgggacgaagcagaaacctttttgggtgcgaaggataaagcagggattcttgtgctgggagctttggggacgttgtcaggggttactgctgctacctgtaaaactagggtttggcagtcatcttagcagctttttttttaccttttattagctggtttcttaggtttttttacctgtactttaccaactttgtggattgtgatgatttactagtattggaacctgtactcctaaagcctttgtgtccaccaaatttcatgattcttatattttttatgaatcaattacttgcattttttcatggttttcttaaaaaccagtatctgtcatagctccgctatagcggtgctatagctttatagcttctgggaaaaatatgccactacttactatagcccgcaatttgaaaccttgcatatgtcatttaaaattgaataacacctgagttaatatgtcttttgcgttatagttagttggcacagatgaggctactacatgcattggtgttgtaattcgcaacaacaagactggaatgtaagtgaaaaagaagtgagcatttatctgatcctgtaaggcttcagtttcttgttaactttataactcttgtattttctgaatgaactgagattaaggacttatgacaatgcttgtgatcttccattgcttactccaggacctctgttagccatatggattttccagaaattgtggagggagggatcaagcagatgttagaattacttggtgatgacaatgcaccatttgatgttcaccttattggtggctttgctgatgcttccacaaaggttgttcgttcctctggaaagaaacacatcaaacaggaagggtattcctatccactatgttgcaaaatagttgaagtgctgcataagtcccagctacaattccaccttcgatcattttgtgtccttgagaataacacgaagagtgactcatttggaaatgcgctacctataattggtggatttgtggttgaaacctcatctggagttgtgataccagcaacctttgatatggattcaaggtgcccagatgaagttgtcaggagaattcgtgtgagcgttagctcttatgatccaacttggcaaggaaggttgctggagacttacgatactcaggacgatgttttccaaattgcacctgcctgctggatgccagattgggccgatatagcgtcctcactcaaccagctctcggactccgaagtcctgctgcggtgctccacctctccagccgcagaaccacctcacttcgtggaaaacgaaagaaggatctggaaatacctgatcgataacccggactgggaagagacgttcccaaaacacaagccccgggtgttccatagggcaagcgacggaagctggtcaaggtactcgtagtgcaagccaagggcttccatcgtctgctgttatcgtcggtgctcccacacatggaacgaaccagaagggaaacccccctctccgttgatttgaacagtgacatattaagtttgagtgcaaagttttctgcgcactgcgattagcacatccgtggacgcttggagatgggagtaaattttataaagtctcttggagatggcagctgctctaaggaccagctaaaaactaaaaaaacgcatgctcttgggccgaaaatgatgagcgattcctcacatctccgttctttttctttatcgaaattttcatttctacgcagttttgtatttttctgaagttataaggttccttgttttgtgcacaaacttataatgcaacttccccaaaactcatataacaccacttcctgc

SEQ ID NO: 134750 - DNA, 1594 bp, Zea Mays
ctttgtattactgtatatgcatcgcgtcttctttgatcttgaaaccaggtggtgcgcaaggaagcttggaagttggttccctctgcaccacttttcgagtctgaaacacactttccagctctcctccgacaaagactcagaccgccggcggcatgctcctcctcgacggcgaccttgtcctctcctcctccggaagcaccggcgctgcctctcgcacgagcgacagcgggagggagctcgtggcggcgctcttggagagccccgggatccgccacgcggtcgaccggctgaaggtcgcgccggagaggcggatctcggcagggcaggagggggcgccgaagcacgtctacgtgttccagcgggagtacgccacggtggatccggcgcgcgtcgagttagttggcacagatgaggctactacatgcattggtgttgtaattcgcaacaacaagactggaatgacctctgttagccatatggattttccagaaattgtggagggagggatcaagcagatgttagaattacttggtgatgacaatgcaccatttgatgttcaccttattggtggctttgctgatgcttccacaaaggttgttcgttcctctggaaagaaacacatcaaacaggaagggtattcctatccactatgttgcaaaatagttgaagtgctgcataagtcccagctacaattccaccttcgatcattttgtgtccttgagaataacacgaagagtgactcatttggaaatgcgctacctataattggtggatttgtggttgaaacctcatctggagttgtgataccagcaacctttgatatggattcaaggtgcccagatgaagttgtcaggagaattcgtgtgagcgttagctcttatgatccaacttggcaaggaaggttgctggagacttacgatactcaggacgatgttttccaaattgcacctgcctgctggatgccagattgggccgatatagcgtcctcactcaaccagctctcggactccgaagtcctgctgcggtgctccacctctccagccgcagaaccacctcacttcgtggaaaacgaaagaaggatctggaaatacctgatcgataacccggactgggaagagacgttcccaaaacacaagccccgggtgttccatagggcaagcgacggaagctggtcaaggtactcgtagtgcaagccaagggcttccatcgtctgctgttatcgtcggtgctcccacacatggaacgaaccagaagggaaacccccctctccgttgatttgaacagtgacatattaagtttgagtgcaaagttttctgcgcactgcgattagcacatccgtggacgcttggagatgggagtaaattttataaagtctcttggagatggcagctgctctaaggaccagctaaaaactaaaaaaacgcatgctcttgggccgaaaatgatgagcgattcctcacatctccgttctttttctttatcgaaattttcatttctacgcagttttgtatttttctgaagttataaggttccttgttttgtgcacaaacttataatgcaacttccccaaaactcatataacaccacttcctgc

SEQ ID NO: 134751 - DNA, 902 bp, Zea Mays
aaaacggaccggatcccgacccaatttaaccaagcccccatcagttgcggccgcgcgctcgtgccgttgcgctgcggcaaagcctccccccacacctctctcctccacccgccgcccccgcgggaccgaaaccctagctagggttctgcccgccgccgccgccgccttcgatccagacgcggccaggcttcccgcaacaccgccatggacacgggccgcaagcggaccgcaccggagggcgccaacggcgcgggcggccccaagcgcgcgagagaatcggagacaactggtgtaggaagcaaatccaagccgtgcaccaaatttttcaggttctaatctagcttaaaatgaacagtcatccggtaacatctactatcgttattatgctcttcttttttttaaattaaaatttgttatgttactaaatgctgtgcttgatgctaacaaatgggtcggtctagattctgctacaggatggttttatctaatcattgcttaagaacactcaacggagtaaaaaattggaatctactgctgtttatcactgtgaaaattggtgcaacaagggaacgtactgctgtttatcactgtgaaaaccgatgcaacaagggaacctactgctgtatatcactgaaaatctgaaccatgcaacaatgttttcaaggaagcaaaacttcctctcaaaaggaacaatcagtcaataacaccatggaacaggttcacttgaagaaatcaagaagattagattgaacatggggactgtaattcaattccttgtgaattgtaccagttatttgttcaattgcatttccttatcaatatgttgcagtagtagttctgaacaccttgaagcttgattatgaatggcatttctatataaagcatgatttctaaaagattag

SEQ ID NO: 134752 - DNA, 1698 bp, Zea Mays
aaaacggaccggatcccgacccaatttaaccaagcccccatcagttgcggccgcgcgctcgtgccgttgcgctgcggcaaagcctccccccacacctctctcctccacccgccgcccccgcgggaccgaaaccctagctagggttctgcccgccgccgccgccgccttcgatccagacgcggccaggcttcccgcaacaccgccatggacacgggccgcaagcggaccgcaccggagggcgccaacggcgcgggcggccccaagcgcgcgagagaatcggagacaactggtgtaggaagcaaatccaagccgtgcaccaaatttttcagcactgcgggttgcccctttggtgcaagttgccattttctccataacttcccgggtggctaccaggccgtttcaaagatgaccaacttgggtggaccgcctgttccggctccaccaggaagaatgcctatgggacctggtggtcctgatgggccaccttcacctgctgtgaagactcgcatgtgtaacaagtacaacactgccgaaggatgtaaatgggggagcaagtgccactttgctcatggagagagggagcttggaaagcccctgcagatggacaacccgatgggacctcctccaatggggccagggcccaacgggcacttcatgccaccgccaatgcctttcccagacatggttcctccctccacattcggtgcttccgccacagccaagatcagcgtcgatgcatcccttgctggtgccatcattgggaagggtggtaccaacacaaagcatatatcccgagtgactggggccaagttagccatccgggacaacgaggctgatcccaaccataaaaacatcgagctcgagggaacatttgaccagatcaagcacgctagcgcaatggtcacagagttgattgtccgcatcagtggtaagccgcctccacaagccaagaacaacccaggtagggggcctggttctcatgccgggggtcctggaagcaacttcaaaaccaaattgtgcgagaacttcaacaaaggctcctgcacctttggagacaggtgccacttcgcccatggcgaaggtgagctgcgcaaacctgctgctgcttgacaggcatgcttattgtggcctgtggtgattaatctgcctgtatggctgaataacaccatgaccaaggacagtggcgccagcgccatggtgaagtgtgctgagccacatgctgcctgagagagagcatttccctgtggctcgtatttgatcttaatgctgtaacaaactctcctcgatggagattaagcaatggccgtttatttaggatttgtaggattgccgtattggtcacccttttatctatcctgtttttggcctgtggtgattaatctgcctgtatggctgaataacaccatgaccaaggacagtggcgccagcgccatggtgaagtgtgctgagccacatgctgcctgagagagagcatttccctgtggctcgtatttgatcttaatgctgtaacaaactctcctcgatggagattaagcaatggccgtttatttaggatttgtaggattgccgtattggtcacccttttatctatcctgtttttgtaccgtttcttaggcactcttggctggcagatcattgtgagtctgttgaacttgagaatagttgctattgatgttatcggtttgtggattcttacta

SEQ ID NO: 134753 - DNA, 1465 bp, Zea Mays
aaaacggaccggatcccgacccaatttaaccaagcccccatcagttgcggccgcgcgctcgtgccgttgcgctgcggcaaagcctccccccacacctctctcctccacccgccgcccccgcgggaccgaaaccctagctagggttctgcccgccgccgccgccgccttcgatccagacgcggccaggcttcccgcaacaccgccatggacacgggccgcaagcggaccgcaccggagggcgccaacggcgcgggcggccccaagcgcgcgagagaatcggagacaactggtgtaggaagcaaatccaagccgtgcaccaaatttttcagcactgcgggttgcccctttggtgcaagttgccattttctccataacttcccgggtggctaccaggccgtttcaaagatgaccaacttgggtggaccgcctgttccggctccaccaggaagaatgcctatgggacctggtggtcctgatgggccaccttcacctgctgtgaagactcgcatgtgtaacaagtacaacactgccgaaggatgtaaatgggggagcaagtgccactttgctcatggagagagggagcttggaaagcccctgcagatggacaacccgatgggacctcctccaatggggccagggcccaacgggcacttcatgccaccgccaatgcctttcccagacatggttcctccctccacattcggtgcttccgccacagccaagatcagcgtcgatgcatcccttgctggtgccatcattgggaagggtggtaccaacacaaagcatatatcccgagtgactggggccaagttagccatccgggacaacgaggctgatcccaaccataaaaacatcgagctcgagggaacatttgaccagatcaagcacgctagcgcaatggtcacagagttgattgtccgcatcagtggtaagccgcctccacaagccaagaacaacccaggtagggggcctggttctcatgccgggggtcctggaagcaacttcaaaaccaaattgtgcgagaacttcaacaaaggctcctgcacctttggagacaggtgccacttcgcccatggcgaaggtgagctgcgcaaacctgctgctgcttgacaggcatgcttattgtggcctgtggtgattaatctgcctgtatggctgaataacaccatgaccaaggacagtggcgccagcgccatggtgaagtgtgctgagccacatgctgcctgagagagagcatttccctgtggctcgtatttgatcttaatgctgtaacaaactctcctcgatggagattaagcaatggccgtttatttaggatttgtaggattgccgtattggtcacccttttatctatcctgtttttgtaccgtttcttaggcactcttggctggcagatcattgtgagtctgttgaacttgagaatagttgctattgatgttatcggtttgtggattcttactagctc

SEQ ID NO: 134754 - DNA, 3042 bp, Zea Mays
gacttcacttcgtccccgtcgaacactccacgccgctctagcactctctgcgctctcccatcctcctcgctagccgtactcttcaccgccgaagcttctggttcctcatcgccgccgctacgcgtgagatcgacccgccgccgtcggtctttttccctgactggtaatctagtgttcattctcttaattcaaatggtttcctcccacggagcaagatgaggaaatattcaaactgctcttagccgtgtagcacgacaagtttgttgcagaggtggacagctgggatttcttggcactttgtcaagtccacgagtagaagtgtggtggaagattgtcttcgttcaagatgatgcagaggccactgctccgtccggaggagtactccttgaaggagacctcacctcaccttggtggtgcagctgctggtgacaagctcaccaccacctatgacctggttgagcagatgcagtacctttatgtaagagttgtaaaagcaaaggaacttccaaacatggacatcactgggagctgtgacccgtatgttgaggtgaagctaggaaattataaggggcaaactcagcatttcgagaagaagaacaacccagagtggaatcaggtctttgccttctcaaaggagcgtattcagtcatcagttgtggagattgtagtcaaggacaaggatcttgtcaaggatgacttcattggccgtgttatatttgatctgaatgaggtcccaaagagagtgccacctgatagcccgttggctccacagtggtatcggttggaagaccgaaatgggcacaaggtgaagggggagttgatgttggctgtttggatgggcactcaagctgatgaagcattccctgaagcatggcattctgacgcagcctcggtccctggtgatggccttgcaagcattagatcgaaagtgtatcttactccaaagctttggtatctccgtgtcaatgtcattgaagcccaggatcttataccaaatgacagggccaggttccctgaagtttatgtcaaagcaatgctaggcaatcaagtcctcagaaccagggcaccgagccggaccttgaatccaatgtggaatgaagacttgatgtttgtcgcagctgagccatttgaagaacacctaattttgagtgtagaggacagggtggccccaggaaaggatgaagtaattggaaggacaatgatttcactgcaccatgtaccccggaggctggatcacaggttgctaaccagccagtggtataaccttgagaagcatgtgattattgatggtgagcagaagaaagagaccaagttttcaagtcggattcacttgagaatatgcctcgaaggtggatatcatgtcttggatgagtcaacacattacagtagtgatttaaggccaactgcgaagcctctgtggaaacctagcataggcatgcttgagcttggtatcttgacagcacaaggcctgttgccaatgaagaccaaggatgggcgtggcacaactgatgcgtactgtgttgcaaagtatggacagaaatgggtgcgtactaggactataatcgacagcttcactcccaaatggaatgaacagtacacctgggaggtgtatgatccatgcactgtggtcacaattggtgtatttgacaactgccacctgaacggcggggaaaaggtcaatggtgccagggataccagaatcgggagggtccgcatccgtctctcgacgcttgaaactgatcgggtgtatacccactcataccctcttattgtcctgacacctggtggcgttaagaagatgggcgaggtgcagcttgctgtccgtttcacgtgttcgtcactgctcaacatgatgcatctgtacacacagcccttgctgcccaagatgcactacgtgcacccgctgtccgtgatgcaggtggacaacctcaggcgccaagccacgaacattgtctcgacaaggctgggccgcgcagagccaccgctgcgaaaggaaatcgtggagtacatgctcgacgtggactcgcacatgtggagcatgaggaagagcaaggcgaatttcttccgcatcatgagcgtcttgagccccttggtcgcggtgacaaagtggttcgatcagatctgccgctggaggaacccactgaccaccatactgatccatgtcctcttcatgatactggttctttacccagagctgatactgcccacagtcttcctctacctgttcctgataggggtgtggtactaccggtggcgtctgaggcagccgccacacatggacacccgcctctcccacgcggagactgcccaccccgacgagctggacgaggagtttgacaccttccccacttcccgcccgccagacgtcgtgcggatgcggtacgacaggctgcgcagcgtcgcggggaggatccagaccgtggtcggcgaccttgcgacgcagggcgagcggttgcagtcgctgctgagctggagggacccgagggccaccgccctgttcgttgtcttctgcttcgttgccgccatcgtgctgtacgtcacaccgttccgggtcgtggtcttcctcgcgggcctgtacatgctgaggcaccccaggttccgccacaagatgccgtccgtcccgctcaacttcttcaggcgtctgccggcgaggactgacagcatgctgtaggttgtgggcttgtggcagatgcctggctccattgctggttcagtggtttcacccgtcagttgcagctcacagatggtcactctcctaaggtagtgtatccgaaaacaatgaactgccagctatcttcgtgacttttgtagcttctctctgtcgcatggttggttatgtattcagatggttgtgaacctttcctgtagctaggtatgcgtgatgcatgatgcttgaaaactccgggcgttggttaagttattgctttacctacttgctcagcagcagtggtctgctaacgtggtcctctgctgctgcatgtgcatcgtgttgtttggtttccagctcaatttgtcagtttgccacgtgattggtttcagttt

SEQ ID NO: 134755 - DNA, 3138 bp, Zea Mays
gacttcacttcgtccccgtcgaacactccacgccgctctagcactctctgcgctctcccatcctcctcgctagccgtactcttcaccgccgaagcttctggttcctcatcgccgccgctacgcgtgagatcgacccgccgccgtcggtctttttccctgactggtaatctagtgttcattctcttaattcaaatggtttcctcccacggagcaagatgaggaaatattcaaactgctcttagccgtgtagcacgacaagtttgttgcagagctggtctacgacaggtggacagctgggatttcttggcactttgtcaagtccacgagtagaagtgtggtggaagattgtcttcgttcaagatgatgcagaggccactgctccgtccggaggagtactccttgaaggagacctcacctcaccttggtggtgcagctgctggtgacaagctcaccaccacctatgacctggttgagcagatgcagtacctttatgtaagagttgtaaaagcaaaggaacttccaaacatggacatcactgggagctgtgacccgtatgttgaggtgaagctaggaaattataaggggcaaactcagcatttcgagaagaagaacaacccagagtggaatcaggtctttgccttctcaaaggagcgtattcagtcatcagttgtggagattgtagtcaaggacaaggatcttgtcaaggatgacttcattggccgtgttatatttgatctgaatgaggtcccaaagagagtgccacctgatagcccgttggctccacagtggtatcggttggaagaccgaaatgggcacaaggtgaagggggagttgatgttggctgtttggatgggcactcaagctgatgaagcattccctgaagcatggcattctgacgcagcctcggtccctggtgatggccttgcaagcattagatcgaaagtgtatcttactccaaagctttggtatctccgtgtcaatgtcattgaagcccaggatcttataccaaatgacagggccaggttccctgaagtttatgtcaaagcaatgctaggcaatcaagtcctcagaaccagggcaccgagccggaccttgaatccaatgtggaatgaagacttgatgtttgtcgcagctgagccatttgaagaacacctaattttgagtgtagaggacagggtggccccaggaaaggatgaagtaattggaaggacaatgatttcactgcaccatgtaccccggaggctggatcacaggttgctaaccagccagtggtataaccttgagaagcatgtgattattgatggtgagcagaagaaagagaccaagttttcaagtcggattcacttgagaatatgcctcgaaggtggatatcatgtcttggatgagtcaacacattacagtagtgatttaaggccaactgcgaagcctctgtggaaacctagcataggcatgcttgagcttggtatcttgacagcacaaggcctgttgccaatgaagaccaaggatgggcgtggcacaactgatgcgtactgtgttgcaaagtatggacagaaatgggtgcgtactaggactataatcgacagcttcactcccaaatggaatgaacagtacacctgggaggtgtatgatccatgcactgtggtcacaattggtgtatttgacaactgccacctgaacggcggggaaaaggtcaatggtgccagggataccagaatcgggagggtccgcatccgtctctcgacgcttgaaactgatcgggtgtatacccactcataccctcttattgtcctgacacctggtggcgttaagaagatgggcgaggtgcagcttgctgtccgtttcacgtgttcgtcactgctcaacatgatgcatctgtacacacagcccttgctgcccaagatgcactacgtgcacccgctgtccgtgatgcaggtggacaacctcaggcgccaagccacgaacattgtctcgacaaggctgggccgcgcagagccaccgctgcgaaaggaaatcgtggagtacatgctcgacgtggactcgcacatgtggagcatgaggaagagcaaggcgaatttcttccgcatcatgagcgtcttgagccccttggtcgcggtgacaaagtggttcgatcagatctgccgctggaggaacccactgaccaccatactgatccatgtcctcttcatgatactggttctttacccagagctgatactgcccacagtcttcctctacctgttcctgataggggtgtggtactaccggtggcgtctgaggcagccgccacacatggacacccgcctctcccacgcggagactgcccaccccgacgagctggacgaggagtttgacaccttccccacttcccgcccgccagacgtcgtgcggatgcggtacgacaggctgcgcagcgtcgcggggaggatccagaccgtggtcggcgaccttgcgacgcagggcgagcggttgcagtcgctgctgagctggagggacccgagggccaccgccctgttcgttgtcttctgcttcgttgccgccatcgtgctgtacgtcacaccgttccgggtcgtggtcttcctcgcgggcctgtacatgctgaggcaccccaggttccgccacaagatgccgtccgtcccgctcaacttcttcaggcgtctgccggcgaggactgacagcatgctgtaggttgtgggcttgtggcagatgcctggctccattgctggttcagtggtttcacccgtcagttgcagctcacagatggtcactctcctaaggtagtgtatccgaaaacaatgaactgccagctatcttcgtgacttttgtagcttctctctgtcgcatggttggttatgtattcagatggttgtgaacctttcctgtagctaggtatgcgtgatgcatgatgcttgaaaactccgggcgttggttaagttattgctttacctacttgctcagcagcagtggtctgctaacgtggtcctctgctgctgcatgtgcatcgtgttgtttggtttccagctcaatttgtcagtttgccacgtgattggtttcagtttttacttgggtaataccgacctgaattccaggcgaattatgaacaggagaccctgcgagttttctactccgcagactggaact

SEQ ID NO: 134756 - DNA, 3210 bp, Zea Mays
gcctctttggtcgttggtgtttttagatctgttattagtttgcgtgctctgtgctgagttccgtttactccttttcttccacccaagcaaagaaaaaacggtggattttttagaaatcctttggtttctcactgtggtagttgcgagtcttgtttattgagattattcgtattgtttcgatggactaaattccttgttcttggtttggtgcgcaactactaaagttgcttgcttttcagcagccccccgccccccctttttttgggcttcgcttagctactatctggacgttgcaattgtttactgaatatctggagtcagatggctgcagtactcaggcgggatttagattgactgaattgcagttccttatactacctggttggttcattccatcttagtacttgctgcaggtctttttccctgactggtaatctagtgttcattctcttaattcaaatggtttcctcccacggagcaagatgaggaaatattcaaactgctcttagccgtgtagcacgacaagtttgttgcagagctggtctacgacaggtggacagctgggatttcttggcactttgtcaagtccacgagtagaagtgtggtggaagattgtcttcgttcaagatgatgcagaggccactgctccgtccggaggagtactccttgaaggagacctcacctcaccttggtggtgcagctgctggtgacaagctcaccaccacctatgacctggttgagcagatgcagtacctttatgtaagagttgtaaaagcaaaggaacttccaaacatggacatcactgggagctgtgacccgtatgttgaggtgaagctaggaaattataaggggcaaactcagcatttcgagaagaagaacaacccagagtggaatcaggtctttgccttctcaaaggagcgtattcagtcatcagttgtggagattgtagtcaaggacaaggatcttgtcaaggatgacttcattggccgtgttatatttgatctgaatgaggtcccaaagagagtgccacctgatagcccgttggctccacagtggtatcggttggaagaccgaaatgggcacaaggtgaagggggagttgatgttggctgtttggatgggcactcaagctgatgaagcattccctgaagcatggcattctgacgcagcctcggtccctggtgatggccttgcaagcattagatcgaaagtgtatcttactccaaagctttggtatctccgtgtcaatgtcattgaagcccaggatcttataccaaatgacagggccaggttccctgaagtttatgtcaaagcaatgctaggcaatcaagtcctcagaaccagggcaccgagccggaccttgaatccaatgtggaatgaagacttgatgtttgtcgcagctgagccatttgaagaacacctaattttgagtgtagaggacagggtggccccaggaaaggatgaagtaattggaaggacaatgatttcactgcaccatgtaccccggaggctggatcacaggttgctaaccagccagtggtataaccttgagaagcatgtgattattgatggtgagcagaagaaagagaccaagttttcaagtcggattcacttgagaatatgcctcgaaggtggatatcatgtcttggatgagtcaacacattacagtagtgatttaaggccaactgcgaagcctctgtggaaacctagcataggcatgcttgagcttggtatcttgacagcacaaggcctgttgccaatgaagaccaaggatgggcgtggcacaactgatgcgtactgtgttgcaaagtatggacagaaatgggtgcgtactaggactataatcgacagcttcactcccaaatggaatgaacagtacacctgggaggtgtatgatccatgcactgtggtcacaattggtgtatttgacaactgccacctgaacggcggggaaaaggtcaatggtgccagggataccagaatcgggagggtccgcatccgtctctcgacgcttgaaactgatcgggtgtatacccactcataccctcttattgtcctgacacctggtggcgttaagaagatgggcgaggtgcagcttgctgtccgtttcacgtgttcgtcactgctcaacatgatgcatctgtacacacagcccttgctgcccaagatgcactacgtgcacccgctgtccgtgatgcaggtggacaacctcaggcgccaagccacgaacattgtctcgacaaggctgggccgcgcagagccaccgctgcgaaaggaaatcgtggagtacatgctcgacgtggactcgcacatgtggagcatgaggaagagcaaggcgaatttcttccgcatcatgagcgtcttgagccccttggtcgcggtgacaaagtggttcgatcagatctgccgctggaggaacccactgaccaccatactgatccatgtcctcttcatgatactggttctttacccagagctgatactgcccacagtcttcctctacctgttcctgataggggtgtggtactaccggtggcgtctgaggcagccgccacacatggacacccgcctctcccacgcggagactgcccaccccgacgagctggacgaggagtttgacaccttccccacttcccgcccgccagacgtcgtgcggatgcggtacgacaggctgcgcagcgtcgcggggaggatccagaccgtggtcggcgaccttgcgacgcagggcgagcggttgcagtcgctgctgagctggagggacccgagggccaccgccctgttcgttgtcttctgcttcgttgccgccatcgtgctgtacgtcacaccgttccgggtcgtggtcttcctcgcgggcctgtacatgctgaggcaccccaggttccgccacaagatgccgtccgtcccgctcaacttcttcaggcgtctgccggcgaggactgacagcatgctgtaggttgtgggcttgtggcagatgcctggctccattgctggttcagtggtttcacccgtcagttgcagctcacagatggtcactctcctaaggtagtgtatccgaaaacaatgaactgccagctatcttcgtgacttttgtagcttctctctgtcgcatggttggttatgtattcagatggttgtgaacctttcctgtagctaggtatgcgtgatgcatgatgcttgaaaactccgggcgttggttaagttattgctttac

SEQ ID NO: 134757 - DNA, 2979 bp, Zea Mays
ggcggacgctttgccttccctcccggctcccgccacgatccccctcccccctgtgtacagtacaggcgcagccgcagggccatcggccagacgcttgcctgctcaaaaagttgctctgtggtctgcatgccgtttgcagatgaatgaagcagcctgcggggattctagcctaggtgtcatataagtgcctcgcgcgccattgttaccgagccaaccagcttctcaagtttcaacagtaagtgcgctaaaaaaacttatcagtaatgagattttacggagttttcgttcatggagttttcctgatcgatttcgtttgtgcttttgcgggcggcaatggagataggttcggagcaagcacgtatagtaggtgaggtcaacatcagtgcaaggtcggggctcaccagctagcagcggcgaccaaatggcccaggggcacggcggcgacccgcaccacgaggacttccagctcaaggacaccaacccgctgctgggcgagcaatggcccaagggcgcggcgggcccggtgcgacccgcgggcggcgggatcgccggctggctgggcgtggacaagccgtcgagcacgtacgacctggtggagcagatgttctttctgtacgtgcgcgtcgtcaaggccaaggaccttccccccaaccccatcaccggcgcgcccatggacccctacgtcgaggtccgcctcggcaactacaagggcaagacgcgccacttcgaccgccgcgccaacccggagtgggaccaggtgttcgccttctccaagtcccgcgtccagtccaacgtcctggaggtcttcctcaaggaccgcgagatgctgggccgcgacgactacgtcggcaaggtcaccttcgacctggccgaggtgcccacgcgggtgccccccgacagcccgctggccccgcagtggtaccgcctggaggagcggcgcggggaagggggcaaggtgcgcggggagctgatgctggccgtctggatcgggacgcaggccgacgaggcgttcccggaggcgtggcactccgacgccgcggccgtgcgcggggagggcgtcgccagcgtgcgctccaaggcctacgtgtcgcccaagctctggtacctccgcgtgaacgtgatcgaggcgcaggacgtgcagccgcaggagcgggggcgcgcgccggaggtattcgtgaaggcgcaggtgggcaaccagatcctcaagacgtcggtggcggcgcccacgcccacgctgagcccgcggtggaacgaggacctggtcttcgtcgtcgccgagccgttcgaggagcagctggtgctgacggtggaggaccgggtgtccccgcgcaaggacgacctgctgggccgcgccgtgctgccgctcacgctcttcgacaagcgcctggaccaccgccccttcgtgcagtcccgctggttcgacctcgagaagttcggcgtcggggcggccatcgagggcgagacgcggcgggagctccgcttcgccagccgcgtccacgtgcgcgcctgcctcgagggcgcctaccacgtcatggacgagtccaccatgtacatcagcgacacccgccccacggcgcgccagctgtggaagccgcccgtcggcgtgctcgagatcggcatcctcggcgcggccgggctgcagcccatgaagacccgcgacggccgcggcaccaccgacgcgtactgcgtcgccaagtacggccagaagtgggtgcgcacccgcaccatgatcggcagcttcgcccccacgtggaacgagcagtacacgtgggaagtgttcgacccctgcaccgtcatcaccatcggcgtcttcgacaactgccacctcggcggcggcagcaacggcggcgccgggcagccggcgagggacgcccgcatcggcaagatccgcatccggctgtcgacgctggagaccgaccgcgtgtacacgcacgcgtacccgctgatcgcgctgcagcggtccggggtgaagaagatgggggagctccgtctggccgtgcgcttcacctgcctgtcgctcatgaacatggtgcacctgtacacgcagccgctgctcccccggatgcactacctgcacccgttcacggtgacgcagctggacgcgctgcggtaccaggcgatgggcatcgtggcggcgcggctggggcgcgcggagccgccgctgcaccgggaggtggtggagtacatgctggacgtggagtcgcacatgtggagcatgcggcggagcaaggccaacttcttccgcgccgtgtcgctcttctcgggcgtcgccggcgccgcgcggtggttcggcgacgtgtgccgctggaggaacgtggcgacgacggcgctggtgcacgtgctgctgctcatcctggtgtggtacccggagctgatcctccccaccgtgttcctctacatgttcctcatcgggctctggaactaccggcgccggccgcgccacccgccgcacatggacaccaagatgtcgtgggcggaggcggcgcacccggacgagctggacgaggagttcgacacgttcccgacgtcgcggccgcaggacgtggtgtacatgcggtacgaccggctgcggagcgttgccgggaggatacagacggtggccggcgacatggccacgcagggggagcgcctgcagtcgctgctcggctggcgcgacccgagggcgacgtgcctcttcgtcgtgttctgcctcctcgcggcggtggtgctctacgtcacgccgttccgcatcgtggcgctcgtcgcggggctctacgtcctgcgccaccccaggttccggagcaggctgccttccgtgcccagcaacttcttccgccgcctgccgtcgcgcgcggacagcatgctttgaacccccgatcgagaatagaatgctacggattcacaaatcacaatgctctcttcttcagtcgagaatgtttgcttcgttttccattttatattttgtctttgaacgtgcgtgtatgctgctaatcttgggtg

SEQ ID NO: 134758 - DNA, 2947 bp, Zea Mays
ggcggacgctttgccttccctcccggctcccgccacgatccccctcccccctgtgtacagtacaggcgcagccgcagggccatcggccagacgcttgcctgctcaaaaagttgctctgtggtctgcatgccgtttgcagatgaatgaagcagcctgcggggattctagcctaggtgtcatataagtgcctcgcgcgccattgttaccgagccaaccagcttctcaagtttcaacagttcggagcaagcacgtatagtaggtgaggtcaacatcagtgcaaggtcggggctcaccagctagcagcggcgaccaaatggcccaggggcacggcggcgacccgcaccacgaggacttccagctcaaggacaccaacccgctgctgggcgagcaatggcccaagggcgcggcgggcccggtgcgacccgcgggcggcgggatcgccggctggctgggcgtggacaagccgtcgagcacgtacgacctggtggagcagatgttctttctgtacgtgcgcgtcgtcaaggccaaggaccttccccccaaccccatcaccggcgcgcccatggacccctacgtcgaggtccgcctcggcaactacaagggcaagacgcgccacttcgaccgccgcgccaacccggagtgggaccaggtgttcgccttctccaagtcccgcgtccagtccaacgtcctggaggtcttcctcaaggaccgcgagatgctgggccgcgacgactacgtcggcaaggtcaccttcgacctggccgaggtgcccacgcgggtgccccccgacagcccgctggccccgcagtggtaccgcctggaggagcggcgcggggaagggggcaaggtgcgcggggagctgatgctggccgtctggatcgggacgcaggccgacgaggcgttcccggaggcgtggcactccgacgccgcggccgtgcgcggggagggcgtcgccagcgtgcgctccaaggcctacgtgtcgcccaagctctggtacctccgcgtgaacgtgatcgaggcgcaggacgtgcagccgcaggagcgggggcgcgcgccggaggtattcgtgaaggcgcaggtgggcaaccagatcctcaagacgtcggtggcggcgcccacgcccacgctgagcccgcggtggaacgaggacctggtcttcgtcgtcgccgagccgttcgaggagcagctggtgctgacggtggaggaccgggtgtccccgcgcaaggacgacctgctgggccgcgccgtgctgccgctcacgctcttcgacaagcgcctggaccaccgccccttcgtgcagtcccgctggttcgacctcgagaagttcggcgtcggggcggccatcgagggcgagacgcggcgggagctccgcttcgccagccgcgtccacgtgcgcgcctgcctcgagggcgcctaccacgtcatggacgagtccaccatgtacatcagcgacacccgccccacggcgcgccagctgtggaagccgcccgtcggcgtgctcgagatcggcatcctcggcgcggccgggctgcagcccatgaagacccgcgacggccgcggcaccaccgacgcgtactgcgtcgccaagtacggccagaagtgggtgcgcacccgcaccatgatcggcagcttcgcccccacgtggaacgagcagtacacgtgggaagtgttcgacccctgcaccgtcatcaccatcggcgtcttcgacaactgccacctcggcggcggcagcaacggcggcgccgggcagccggcgagggacgcccgcatcggcaagatccgcatccggctgtcgacgctggagaccgaccgcgtgtacacgcacgcgtacccgctgatcgcgctgcagcggtccggggtgaagaagatgggggagctccgtctggccgtgcgcttcacctgcctgtcgctcatgaacatggtgcacctgtacacgcagccgctgctcccccggatgcactacctgcacccgttcacggtgacgcagctggacgcgctgcggtaccaggcgatgggcatcgtggcggcgcggctggggcgcgcggagccgccgctgcaccgggaggtggtggagtacatgctggacgtggagtcgcacatgtggagcatgcggcggagcaaggccaacttcttccgcgccgtgtcgctcttctcgggcgtcgccggcgccgcgcggtggttcggcgacgtgtgccgctggaggaacgtggcgacgacggcgctggtgcacgtgctgctgctcatcctggtgtggtacccggagctgatcctccccaccgtgttcctctacatgttcctcatcgggctctggaactaccggcgccggccgcgccacccgccgcacatggacaccaagatgtcgtgggcggaggcggcgcacccggacgagctggacgaggagttcgacacgttcccgacgtcgcggccgcaggacgtggtgtacatgcggtacgaccggctgcggagcgttgccgggaggatacagacggtggccggcgacatggccacgcagggggagcgcctgcagtcgctgctcggctggcgcgacccgagggcgacgtgcctcttcgtcgtgttctgcctcctcgcggcggtggtgctctacgtcacgccgttccgcatcgtggcgctcgtcgcggggctctacgtcctgcgccaccccaggttccggagcaggctgccttccgtgcccagcaacttcttccgccgcctgccgtcgcgcgcggacagcatgctttgaacccccgatcgagaatagaatgctacggattcacaaatcacaatgctctcttcttcagtcgagaatgtttgcttcgttttccattttatattttgtctttgaacgtgcgtgtatgctgctaatcttgggtgtcttgagatttgatgaagttacggtgtttatatctcaggaataaggacgaatggatgaccgcattttttggacctt

SEQ ID NO: 134759 - DNA, 1276 bp, Zea Mays
ggagcagctcacgcgcgtgcggcacaccacctctcgcctcagcgccgccccacccccactataaataacgggaccatcctccccttcccctgcctccacctccgctccagtcccgtgtcctcctcccgccgtctctctcgtcccggacgcctccgccgcgccaatgcgccacgcctcgccaccgcaggagctccccgccgccgggcgcgagatccaggcggcgctggcccccgccaacggcaacgccgcgggcgcccgcgggggcggaggctccttcacggcgctgctgggactccccactccgcaggccatggagctgctcctcccccgcacgacgccgcccgccctagccctagccccagccgcagcgcccgcgcccacgcccaccttcccctccgacccgcacctcgtggaccgcgccgggcgcttctccacgttcgcgcccccgtcgccgccctccccatccccaacgcagcagcctccaccgccccctcccgccgccgtcgccggcaagcgcaaggccgaccccgtcgaccgcgcctccaaggggaaggcggcgaagaaggggaagacggcggaggagaagcccgcggccgccggcggcgaggacgagaagccggcgtacgtgcacgtgcgggccaggcggggccaggccacggacagccacagcctcgccgagcgggcgagacgcgagaagatcaatgcgaggatggagctgctcaaggagctggtccccggctgcagtaaggtatcaggaacagcgttggtgctagatgagatcatcaatcatgttcagtctctccaaaggcaagttgagtacttgtcaatgaggcttgcaactgtaaacccgaggggcgattttggtgggctagatagctttctgaccacggagtgtggaaggatagcaagcttcaactgcaagaacggaatcgacttggagcaggtaacctggccagaaatgggtgttcatggagcaaggcagctgatgcaactccaacagcagttctggcatggtgatttggcgcatccacaccaagtggcttcacagtgggaaaagcggggggatggccatcctcccgtcttcagcaactccagtccctctctcttcggctatgatctaacaagctctggtaaaccttgcacgcagtcctatatcaccttcctgaatgaatttagttgtttgtcgcttacttcacatatcacagcctggcttgccccacaacttttgtctcttagtttgtcccgccagtgctctcttgagaacaaagtgtactga

SEQ ID NO: 134760 - DNA, 129 bp, Zea Mays
gtttttattatgtatttagacatgtgttatgtgcaagaatggcttatttaagccacgtatctagaaaaagtggaacgattcattataatttgaaacgtaggtactccaaagaaaaataaagtagacaat

SEQ ID NO: 134761 - DNA, 745 bp, Zea Mays
acagcagcagaagcaaaccgagaggtgaaccagcagcctccaataaaagccagcacatccaaataaaaccgagagacctcagccctcaggcaagccgaccgccgacgtaccaccgcgccaacccgagagaaagatggagatgatcaagaggatcctcatcgccgcgctcctcgtagtcgccgtctcggccaccgcagtgctggcctccaccgaggccgccgccgccggcgccccagccgcctccgagtcgtcggcgtccgccgaagcccccgctggcgccgccggcgccggcgccggcaccggcaccgccgcggggccctccgccagcggcgccgcgcccgccctcgccgccgcgcccgccgcgctcctcttctccctcctcgcctactacctgcactaagcggacggacggacggacgcgcgcatggcattggcatgcatggactgttgaacatctatgcatgcatggacgacgtcacttgcaacgctgttcccatatagtactactggtctgctatgaatatctatgcatgcatggtaacgggttgtgttatttaattattattattacgtagacattactatttaaaattcatgtgttcgcgtcaagtcgttctgtaatcttgtgatggaatatatatgatatttccttttaaaatcattcgtttgaaatgcaatgtgtccagtcctcaaactgttactaccattatattgacggaatatatatgatttcctttttatgtgg

SEQ ID NO: 134762 - DNA, 655 bp, Zea Mays
gcaactctccagcccaacccaacccaacccaacccagaggtgcctccactccaccatgggagacccctacgacaccaacttcctcagaggctactactcccacttccctccctccaacgctccccccgccacctccttccccagcagctactgcgcctcctcctacctccaccacccgcctcccccgtcccctcccatcagggaagccctccccctcctcagtaacctcacgccgtcgtcgtcaggaaccaaccaccaccaccaccagcactgcggcggcgacgtccaggaccacaaggactgcacacacgccacctcgtgcagcgacgaccaagaggcggccggggaggtcacggtggccttgcacatcggcctgcccagccccagcccctctccctctgagtcggcggcagacggtggcgagaaccaggaacaggcagcggaagggaggagcctgcaggagcaaggaggagaagaggaggaggaggaggccgccgccatgccggtgggctgcgcgtccatcgtcgggatcggcaggctgacgaaagggcagtactggatccccaccccgtcgcagatcctcattgggcccacccagttctcctgccccgtctgctacaagaccttcaaccgatacaacaacatgcagatgtga

SEQ ID NO: 134763 - DNA, 266 bp, Zea Mays
tttttatttgtttccttcatgttatatggttggcatttgcaagcagtaagccccaaagaaagtgattgttatttatttgtttccttcatgttccagggaatcacaaacactgtaggcgcggtgctaggaattgtaggcgttgcactcacatgctttcttcttgattcaactcattcttggagtgtacgacatcaacccatcttcataatctatattgcattttatgaatcactctgatcaccataatggtactgctttgtgtgcag

SEQ ID NO: 134764 - DNA, 255 bp, Zea Mays
aacagactcaaaatgttatacaacaaacctttccatccatacaagacacaagtgaagctagtcctagcatgttgtatcctccacaattggattcttcgtcatgggaatgatgaacatattccactagaagaaacatgggttacaaatgaagttcatgaggaagctccccttgaccttgtcatggacaatgctgcctggtctgttactagagacaattgggttcaacaaatgtggcaaaatagggcctcacatagg

SEQ ID NO: 134765 - DNA, 185 bp, Zea Mays
aaaactactggagaggaagataaaaatagagccctctatttattttgttcgtcgatcacttggcataatcatgcattgacttcccaaatgatttttaaggagggttttggagacgttctgagtgtatgcatatatagagatagattcgatggaatttagcttttaaactgctacgtggtgcttgc

SEQ ID NO: 134766 - DNA, 1617 bp, Zea Mays
ttttctttttttgaaatttctaatgtcttttctattttaatttctttatggttttcaaatcaaactcaaaccaaatttcaaattcaaaccaattcaaacatgtgcatcaaacaaaagaataatttaggctcagcatgatgcaacatttcatgactcacataagttttgacaaaataaataattaaaccctcgcctaattcacttacttttaatcaaaaggaaaagagagagagagacaagaggtaacacctgaatttggttggcatttagagaagaaattttataccctcaaattcagggttttacaccgtcgaacataatatagctgtcggatgtctgtcgttttactgttgtgcgttaccaatggatagcaactaatgggcaatgcaaggacgagagaaaaattataactagagagatgggtcagtcgacggagggtctagaagcatgcaagctccttgaggcaacccttggtgctgcccttggcgttcgtgcatataaccatggtcttgttgttggtgccgctatactcgacgttgacgtcacccatggtgacgccggtgcatgggatcttggcagtgcagagcaggctaacggcctccggggtggaggaggtgccggtgatgttcttgaaggtgacgtccttgacggtgaccttggaggcgccgttggcggtacacaacttgttggggcagtacttcatgtcgatgaagatggggttggctgagtcctccatcttgatattctcgtagtggatcttggagacggtgagcacggaggcggcgtcctcgtacgccttgatgcggacgccgaacatcgtcttcttaagagtgcaatccttgacgttgatgtccgtgacgtccttctcgtccttgtcacgccagtgatgttcaccttggaggtcccagggccgatggagatgcagtcgtcgccgacgccaatgacggtgttggtgatggtgatcccggatgagtcgcccatgtggatgccatccgtgttggggctgtccccgggcgccgtcacggtcacgtccttgatcagcatgttcttgcactggtacatgttcatgtggaagaacttggagttgagcagcgtgaccccggacacctccccgttgttcacgaagtacatcaccagcgagttgggaaggatcttgcagtcgtacttcttggtgcaggagttcttgctccacacggctgggccctgcccgtcaaggtttcccttgccggtgatgaccaggttatccacgcgtagaatctcgatccaattaccatgttccttgtactggcttaggtccatggtcgccagcagattgccatccacctggatggtcacgtcgcccttgcaagggcatgtgaagttgagttgtccgacaaaaaaaaacgcccttgggtatgaggattgtctgcttcccagtgccgccgcacgccgatgcacatgcctcctgcacagccttcgtgttgtctgtcttgccattgccggaggcgcccaacttggtgatgtcgaaggacccaccaggcctggacgctttcgcatcgatgccctttgactcttccttctcaccatgcacgatgcagaagaggaccaggaggaacaagtctctcatcgcattgtctg

SEQ ID NO: 134767 - DNA, 1529 bp, Zea Mays
catttcatgactcacataagttttgacaaaataaataattaaaccctcgcctaattcacttacttttaatcaaaaggaaaagagagagagagagagacaagaggtaacacctgaatttggttggtatttagagaagaaattttataccctcaaattcagggtgttacaccgtcgaacataatatagctgtcggatgtctgtcgttttactgttgtgcgttaccaatggatagcatgtaatgggcaatgcaaggacgagagaaaaattataactagagagatgggtcagtcgacggagggtctagaagcatgcaagctccttgaggcaacctttggtgctgcccttggcgttcgtgcatatagccatggtcttgttgttggtgccgctatactcgacgttgacgtcatccatggtgacgccggtgcatgggaccttggcagtgcagagcaggctaacggcctccggggtggaggaggtgccggtgatgttcttgaaggtgacgtccttgacggtgaccttggaggcgccgttggcagtacacaacttgttggggcagtacttcatgtcgatgaagatggggttggctgagtcctccatcttgatattctcgtagtggatcttggagacggtgagcacggaggcggcgtcctcgtacgccttgatgcggacgccgaacatcgtcttcttaagagtgcaatccttgacgttgatgtccgtgacgtccttctcgtccttgtaccgccctaggcttccgatgctgatgccgtggccagggccgcaggtcacgccggtgatgttcaccttggaggtcccggggccgatggagatgcagtcgtcgccgacgccaatgacggtgttggtgatggtgatcccggatgagtcgcccatgtggatgccatccgtgttggggctgtccccgggcgccgtcacggtcacgtccttgatcagcatgtccttgcaccggtacatgttcatgtggaagaacttggagttgagcagcgtgaccccggacacctccccgttgttcacgaagtccatcaccagcgagttgggaaggatcttgcagtcgtacttcttggtgcaggagttcttgctccacacagctgggccctgcccgtcaaggtttcccttgccggtgatgaccaggttatccacgcgtagaatctcgatccaattaccatggtccttgtactggcttaggtccgtggtcgccagcagattgccatccacctggatggtcacgtcgcccttgcaagggcctgtgaagttgagttgtccgacaaggaagtcgcccttgggtatgaggattgtctgcttcccagtgccgccgcacgccgatgcccatgcctcctgcacagccttcgtgctgtctgtcttgccattgccggaggcgcccaacttggtgatgtcgaaggacccaccaggcccggacgctttcgcatcgatgccctttgactcttccttctcaccatgcacgatgcagaagaggaccaggaggaacaaggctctcatcgcattgtttgtgcatg

SEQ ID NO: 134768 - DNA, 2215 bp, Zea Mays
tcatgtctgatgagaattaacataaaggctcaattgggtcctgaattaataatagagtgaaaattaatccagaggctctattagagccttcaattagtaataccaagatatatataagatagtagagtatagtttaaatgttggcattgttcattctttcttttgttatttaatttatgctttccacggtggttagtggttacttctgaagggtccaaataatgcatgaagagtttgaggacaagaagtctgccctaaaaatagcgatgcaaaggcatggtgtccaagccatacatatagcgcactaattttatcagcagaacaatggtatttataggtcctagtgcccaggcaacaagagacacgaataaagcatcgatcacgacaagatggcgtgcacaaacaatgcgatgagagccttgttcctcctggtcctcttctgcatcgtgcatggtgagaaggaagagtcaaagggcatcgatgcgaaagcgtccgggcctggtgggtccttcgacatcaccaagttgggcgcctccggcaatggcaagacagacagcacgaaggctgtgtaggaggcatgggcatcggcatgcggcggcactgggaagcagacaatcctcatacccaagggtgacttccttgtcggacaactcaacttcacaggcccttgcaagggcgacgtgaccatccaggtggatggcaatctgctggcgaccacggacctaagccagtacaaggaccatggtaattggatcgagattctacgcgtggataacctggtcatcaccggcaagggaaaccttgacgggcagggcccagccgtgtggagcaagaactcctgcaccaagaagtacgactgcaagatccttcccaactcgctggtgatggacttcgtgaacaacggggaggtgtccggggtcacgctgctcaactccaagttcttccacatgaacatgtaccggtgcaaggacatgctaatcaaggacgtgaccgtgacggcgcccggggacagccccaacacggatggcatccacatgggcgactcatccgggatcacgatcaccaacaccgtcattggcgtcggcgacgactgcatctccatcggccccgggacctccaaggtgaacatcaccggcgtgacctgcggccctggccacggcatcagcatcggcagcctagggcggtacaaggacgagaaggacgtcacggacatcaacgtcaaggattgcactcttaagaagacgatgttcggcgtccgcatcaaggcgtacgaggacgccgcctccgtgctcaccgtctccaagatccactacgagaatatcaagatggaggactcagccaaccccatcttcatcgacatgaagtactgccccaacaagttgtgtactgccaacggcgcctccaaggtcaccgtcaaggatgtcaccttcaagaacatcaccggcacctcctccaccccggaggccgttagcctgctctgcactgccaaggtcccatgcaccggcgtcaccatggatgacgtcaacgtcgagtatagcggcaccaacaacaagaccatggctatatgcacgaacgccaagggcagcaccaagggttgcctcaaggagcttgcatgcttctagaccctccgtcgactgacccatctctctagttataatttttctctcgtccttgcattgcccattagatgctatccattggtaacgcacaacagtaaaacgacagacatccgacagctatattatgttcgacggtgtaacaccctgaatttgagggtataaaatttcttctccaaataccaaccaaattcaggggttacctcttgtctctctctctctctcttttccttttgattaaaagtaagtgaattaggcgagggtttaattatttattttgtcaaaacttatgtgagtcatgaaatgttgcatcatgctgagcctaaattattcttttgtttgatgcacatgtttgaattggtttgaatttgaaatttggtttgagtttgatttgaaaaccatagagaaattaaaatagaaaagacattagaaatttcaaaaaaagaaaaggaaagcagctcaaacctcctccctccttggcctttcggcccatccagcccaattaaccgcccgcatccgctgacaagcgggccccacctatcggcgccacgccccgctcgccctctccctctcttctcagtgggaccgcctcgtcagca

SEQ ID NO: 134769 - DNA, 334 bp, Zea Mays
atagctgtcggatgtctgtcgttttactgttgtgcgttaccaatggatagcaactaatgggcaatgcaaggacgagagaaaaattataactagagagatgggtcagtcgacggagggtctagaagcatgcaagctccttgaggcaacccttggtgctgcccttggcgttcgtgcatatagccatggtcttgttgttggtgccgctatactcgacggtgacgtcatccatggtgacgccggtgcatgggatcttggcagtgcagagcaggctaacagcctccggggtggaggaggtgccggtgatgttcttgaaggcccaccaagtgatgattag

SEQ ID NO: 134770 - DNA, 554 bp, Zea Mays
tgcatcaaacaaaagaataatttaggctcagcatgatgcaacatttcatgactcacataagttttgacaaaataaataattaaaccctcgcctaattcacttacttttaatcaaaaggaaaagagagagagacaagaggtaacacctgaatttggttggcatttagagaagaaattttataccctcaaattcagggtgttacaccgtcgaacataatatagctgtcggatgtctgtcgttttactgttgtgcgttaccaatggatagcaactaatgggcaatgcaaggacgagagaaaaattataactagagagatgggtcagtcgacggagggtctagaagcatgcaagctccttgaggcaacccttggtgctgcccttggcgttcgtgcgtatagccatggtcttgttgttggtgccgctatactcgacgttgacgtcatccatggtgacgccggtgcatgggatcttggcagtgcagagcaggctaacggcctccggggtggaggaggtgccggtgatgttcttgaaggtgacgtccttgagaggagaatt

SEQ ID NO: 134771 - DNA, 2266 bp, Zea Mays
accaagatatatataagatagtagagtatagtttaaatgttggcattgttcattctttcttttgttatttaatttatgcttcccacggtggttagtggttacgtctgaagggtccaaataatgcatgaagagtttgaggacaagaagtctgccctaaaaatagcgatgcaaaggcatggtgtcctagccatacatatagcgcactaattttatcagcagaatagtgttatttattggtcctagtgcccaggcaacaagagacatgaataaagcatcgatcgcaacaagatggcgtgcacagacaatgtgatgagagccttgttcctcctggcgctcttctgcgtcatgcatggtgagaaggaagagtcaaagcgcatcgatgcgaaagcgtctgggcctggtgggtcctttgacatcaccaagttgggcgcctccggcaacggcaagatagacaacacgaaggctgtgcaggaggcatgggcatcagcatgcggcgacaccgggaagcaaacaatcctcatacccaagggcgacttccttgtcggacaactcaacttcacaggcccgtgcaagggcgacgtgaccatccatgtggatggcaatctactgtcgaccatggacctaagccagtacaaggaacatggtaattggatcgagattctacgcgtggataacctggtcatcaccggcaagggaaaccttgacggattgggcccagccgtgtggagcaagaactcctgcgccaagaagtacgactgcaagatccttcccaactcactggtgatggacttcgtgaacaacggggaggtgtccggggtcactctgctcaactccaagttcttccacatgaaagcacttacttctaggggaagggtcaaggcataggcagaaggtctaattccagactaaactaataatagtttgctcgagaaatgtaccagtgcaaggacatgctgatcaaggacgtgaccgtgacggcgcttgggggacagccccaacacggatggcatccacatgggcgactcatccgggatcaccatcaccaacaccgtcatcagcgtcagcgacgattgcatctccttcggccccgggacctccaaggtgaacatcaccggcgtgacctacggctccggccacggcatcagcatcggcagcctagggcggtacaaggatgagaaggacgacacaaacatcaacgtcaaggattgcactcttaagaagacgaccttcggcgtccgcatcaaggcgtacgaggacgccgcttccgtgctcaccgtctccaagatccattatgagaatatcaagatggaggactcagccaaccccatcttcatcgacatgaagtactgccccaacaagttatgtactgccaacgacgcctccaaggtcaccgtcaaggacgtcaccttcaagaacatcaccggcacctcctccaccccggaggccgtcagcctgctctgctctgccaagatcccatgcaccggcgtaaccatggacgacatcaacgtcgagtatagcggcaccaacaacaagaccatggctatatgcacgaacgccaagggcagcaccaagggttgcctcaaggagcttgcatgcttctagaccctccgtcgactgacccatctctctagttataatttttctctcatccttgcattgcccattagttgctatccattggtaacgcacaacagtaaaacgatagacatccgacagctatattatgttcgacggtgtaacaccctgaatttgagggtataaaatttcttctctaaatgccaaccaaattcaggtgttaccttttgtctctctctctctcttttacttttgattaaaagtaagtgaattaggcgagggtttaattatttattttgtcaaaacttatgtgagtcatgaaatgttgcattatgctgagcctaaattattcttttgtttgatccacatgtttgaattggtttgaatttgaaatttggtttgagtttgatttgaaaaccatagagaaattaaaatagaaaagacattagaaatttcaaaaaaagaaaaggaaagccgcctgaacctcctccctcctcggccttttggcccatccagcctagttaaccgcccgcgtccgctgacaagcgggccccacctgtcggcaccacgccccgctcgcccgctcgccctctccctctcttctcagtgggaccgccccgtcagcacgacgccctactcacctacgcgttcccttgctgactcgtggcccctcttgtcagacccatcccct

SEQ ID NO: 134772 - DNA, 1088 bp, Zea Mays
gaatattagctataacctatgtttgattgtgtatatttgtatacttttattgtgtttcaggaaggacaaaatcatgttgtacaggatcctcccacatatggtgcaccaaagtttgatagaacccccagttagtcatgtcgtgacatgttcttatctctactactaattatgtgcctatcgtaggcgttcacaattccttggttctgtcgtcgcgctcgcctgccatctccctccgcgctccatccgccaccatccgcgctcgcctcccttcgcgcatcctacaaccgcgtgctccttccttcgatggtgcggatcccccgtgactaccatctccctccgccctcccgcgctccatccgccaccatccgcgcttcctacagccgcgcgctccttcgacggcgcggatcccgcaccctcgaatcacgccagcagatcccacaatcaagcagcggcgacaggaataggggcgggctacgcgggcgctactacgacgagggtgagggcgagcgctccggcgccgcggcgccattcatcataatcggtcgagctcctggagggaacggctgcagagcggacgagatcgaggagcgggcgggcgggtgccgcccgtgacggcgcctaggctcaggctccgcgacggccgccacctcgccgcgcaaaggtctcaccggctcccgagaggacagcgcccgcgcctcccaggtttcaaaaaaccttctgagaaggcatgtataaaactttgggcaaaaggagatcttcctacctagcatatcttgcctcggaggagggttgttatattcaatactatgggtttgatggaggtaatttttaacaggcctgttgatattctaaggaaattgtttgatgggaacaccttgagatcacaaatcaaagaattctttaatcgctttggtgctggagaggctgctgcaatgtgcttaatgatagctgcgaagctactttatgttgaagatagtctgataagcaattctgtttctgagaaagccactgaggcatttgaggaccctgggcttgttgggatgcctcaaattgttggtaccactgctttatctaatacacgaacttag

SEQ ID NO: 134773 - DNA, 2200 bp, Zea Mays
gctttattatctttcacacacttgaagttaatgaaactgcagctagggagaaagaagataagtgagaggatgaagcttcttcaagatcttgttcctgaatgcagtaagatcattggcaaggcaatcatgctcgatgagattatcaactatgtgcagtcattgcaacgacaagtcgaggtagtgttagtgcatctgtagctgaattgttttgtaatatatgtggcatcttgttagtgcatctgcagttcttgtcaatgaaactcgcaactgttaaccccgagcttggctttgacattgagcagatcatatccaaacaaatgctgctttcacaagactgacatcttgctttctatggagtcaaaccaggatcaagcggccttactggcccatttaaccaaggaatcatgcagccataattgatgtgcaccattgccaatcccgttgatgttttgcatggagctattcacgaggcgtcaacaatgaaccattattgatttgtccactgttatgttcgttgctggtgcaatcatgggatacattatgttcactgaatctacactcccagttcacactgaacttacccctaaatcttgtggcttccaagattgcagtctagactacggtgatgaatccaataaccaaatatccttggacttttattgtagctttttgtgtgcatttgttccgatacttaacaattaacattatatgacaccatagtttctctaatcacatgtaactccatctagccatctaggtttgtcctaagtcaaacatatcttttaattttgattagaaatatctataaaaaataattgtcttaaataagcagagttatttggttttagtaatgaatttagcaatgccaatgctatttttatcgttctatataaattttagatattcatggtcaaacttaaaaatgtttgacttggacaaatatagatagacctacacatgcattgtgattttaggaagtcctacaattctcctccccaaagtctgctatcaacttctaacagttagtccagttttcatgaacaaatttagttttaatcattctatgttgtgccaaccgccagcaactaataatcagagctgggtcatatcatcatatcatagtagattgtatagctttcttccctgtgcatgcttactggttactagatgaaaaaggtcgtgttacgttatggcgcactcctctcctttgaataggacatgctttcacactctcaattcggcatatccttctagagactagctgtgagttgggtcctaaatgtttcttccatgttcaattcgaatggcattgttgtgttaattagccgtcctgttttgtatttttttcctacaagttatagtggttacattaatgactaaatcaagatcttgacccactttattgatgacacccttttttcttcttattgcttctcctatcgtctctgagtttgtcattccattcaaacacgaaatttgtgtcagtatagatgccatggaaattttggtttagcttgagtattttgtagatacttcattcttgagtattcttgagtttgccttgttataaattgcagcacactccaatggtcttctaaatgaatagcacactatagtcaagagtatgacttaccaaattcattattggttccaagcatcttgaaagagaagtccatcgtctctcttactgtcatctcagcatggctaacagaagcacgcaggtactgtggtgttgaataattcatttattatccattgtacatgacttttcctttgaattgttgtcaattgttgtccattagaaaatatatactatagtcgatgataacatatgcgcaaaggttttatcgaataatttttgtgttctcgcaacttacgtgcattgtattatactaatataaagtaggagtttctccaccttcctttcatcatgctacttcttgctgagggtggcgtgaaaaagtcagcaacaagttcctctatggtggcgacagagaagacaagggaggctctggcgacattgtggcgacgacgagaagcgagcaaggatataaatcgatctgtttctttggaaattagctgtagtagaatatttacgtgatacaaatctctattctctatatctctatatctattacgtttctcatgtctctatttttattataatggtttggaaaaatgtcgctcatcttctgctcta

SEQ ID NO: 134774 - DNA, 2160 bp, Zea Mays
gctttattatctttcacacacttgaagttaatgaaactgcagctagggagaaagaagataagtgagaggatgaagcttcttcaagatcttgttcctgaatgcagtaagatcattggcaaggcaatcatgctcgatgagattatcaactatgtgcagtcattgcaacgacaagtcgaggtagtgttagtgcatctgtagctgaattgttttgtaatatatgtggcatcttgttagtgcatctgcagttcttgtcaatgaaactcgcaactgttaaccccgagcttggctttgacattgagcagatcatatccaaacaaatgctgctttcacaagactgacatcttgctttctatggagtcaaaccaggatcaagcggccttactggcccatttaaccaaggaatcatgcagccataattgatgtgcaccattgccaatcccgttgatgttttgcatggagctattcacgaggcgtcaacaatgaaccattattgatttgtccactgttatgttcgttgctggtgcaatcatgggatacattatgttcactgaatctacactcccagttcacactgaacttacccctaaatcttgtggcttccaagattgcagtctagactacggtgatgaatccaataaccaaatatccttggacttttattgtagctttttgtgtgcatttgttccgatacttaacaattaacattatatgacaccatagtttctctaatcacatgtaactccatctagccatctaggtttgtcctaagtcaaacatatcttttaattttgattagaaatatctataaaaaataattgtcttaaataagcagagttatttggttttagtaatgaatttagcaatgccaatgctatttttatcgttctatataaattttagatattcatggtcaaacttaaaaatgtttgacttggacaaatatagatagacctacacatgcattgtgattttaggaagtcctacaattctcctccccaaagtctgctatcaacttctaacagttagtccagttttcatgaacaaatttagttttaatcattctatgttgtgccaaccgccagcaactaataatcagagctgggtcatatcatcatatcatagtagattgtatagctttcttccctgtgcatgcttactggttactagatgaaaaaggtcgtgttacgttatggcgcactcctctcctttgaataggacatgctttcacactctcaattcggcatatccttctagagactagctgtgagttgggtcctaaatgtttcttccatgttcaattcgaatggcattgttgtgttaattagccgtcctgttttgtatttttttcctacaagttatagtggttacattaatgactaaatcaagatcttgacccactttattgatgacacccttttttcttcttattgcttctcctatcgtctctgagtttgtcattccattcaaacacgaaatttgtgtcagtatagatgccatggaaattttggtttagcttgagtattttgtagatacttcattcttgagtattcttgagtttgccttgttataaattgcagcacactccaatggtcttctaaatgaatagcacactatagtcaagagtatgacttaccaaattcattattggttccaagcatcttgaaagagaagtccatcgtctctcttactgtcatctcagcatggctaacagaagcacgcagcgacaagattaccccacatgttgtatcatggtttactagctagagaggctactcaagatgaggaatttgaagttatgtatggtgaggacgatgatgaagacaaagatgacgaggatgatgatgattatgatacaaagaccaagggggctactggagggggaagggcagcagcgaacgacctgttgagtgcaagcaggagtgagtgctgcacattgaatattggcatgcattggttgtggagcaattagtctggttctacttgatgcaaggtcattgagttattgaagtgatattttgtcgaatattttatatgccattgcaaagcacgggcatctaactagtctttcttatatatgtacactacaatacataatcatttatgccattgtttactacaaatatatatattaggcaactcttgaactggttgcaaggaata

SEQ ID NO: 134775 - DNA, 2121 bp, Zea Mays
gctttattatctttcacacacttgaagttaatgaaactgcagctagggagaaagaagataagtgagaggatgaagcttcttcaagatcttgttcctgaatgcagtaagatcattggcaaggcaatcatgctcgatgagattatcaactatgtgcagtcattgcaacgacaagtcgaggtagtgttagtgcatctgtagctgaattgttttgtaatatatgtggcatcttgttagtgcatctgcagttcttgtcaatgaaactcgcaactgttaaccccgagcttggctttgacattgagcagatcatatccaaacaaatgctgctttcacaagactgacatcttgctttctatggagtcaaaccaggatcaagcggccttactggcccatttaaccaaggaatcatgcagccataattgatgtgcaccattgccaatcccgttgatgttttgcatggagctattcacgaggcgtcaacaatgaaccattattgatttgtccactgttatgttcgttgctggtgcaatcatgggatacattatgttcactgaatctacactcccagttcacactgaacttacccctaaatcttgtggcttccaagattgcagtctagactacggtgatgaatccaataaccaaatatccttggacttttattgtagctttttgtgtgcatttgttccgatacttaacaattaacattatatgacaccatagtttctctaatcacatgtaactccatctagccatctaggtttgtcctaagtcaaacatatcttttaattttgattagaaatatctataaaaaataattgtcttaaataagcagagttatttggttttagtaatgaatttagcaatgccaatgctatttttatcgttctatataaattttagatattcatggtcaaacttaaaaatgtttgacttggacaaatatagatagacctacacatgcattgtgattttaggaagtcctacaattctcctccccaaagtctgctatcaacttctaacagttagtccagttttcatgaacaaatttagttttaatcattctatgttgtgccaaccgccagcaactaataatcagagctgggtcatatcatcatatcatagtagattgtatagctttcttccctgtgcatgcttactggttactagatgaaaaaggtcgtgttacgttatggcgcactcctctcctttgaataggacatgctttcacactctcaattcggcatatccttctagagactagctgtgagttgggtcctaaatgtttcttccatgttcaattcgaatggcattgttgtgttaattagccgtcctgttttgtatttttttcctacaagttatagtggttacattaatgactaaatcaagatcttgacccactttattgatgacacccttttttcttcttattgcttctcctatcgtctctgagtttgtcattccattcaaacacgaaatttgtgtcagtatagatgccatggaaattttggtttagcttgagtattttgtagatacttcattcttgagtattcttgagtttgccttgttataaattgcagcacactccaatggtcttctaaatgaatagcacactatagtcaagagtatgacttaccaaattcattattggttccaagcatcttgaaagagaagtccatcgtctctcttactgtcatctcagcatggctaacagaagcacgcagctagagaggctactcaagatgaggaatttgaagttatgtatggtgaggacgatgatgaagacaaagatgacgaggatgatgatgattatgatacaaagaccaagggggctactggagggggaagggcagcagcgaacgacctgttgagtgcaagcaggagtgagtgctgcacattgaatattggcatgcattggttgtggagcaattagtctggttctacttgatgcaaggtcattgagttattgaagtgatattttgtcgaatattttatatgccattgcaaagcacgggcatctaactagtctttcttatatatgtacactacaatacataatcatttatgccattgtttactacaaatatatatattaggcaactcttgaactggttgcaaggaata

SEQ ID NO: 134776 - DNA, 1454 bp, Zea Mays
atccaccaccacccctatccccatcaacaacgcaaaaacctaaaccgctcgctctggtccatccagatccacagtcgccatcgcccccacctctcgtcgtcgtctccgtgcaccactcggcccccactgtcggccgcgcctcccagccacctcgtgccgctctgccaccccgcccgtcctccactgcccctatggctgccatgggcgagcgctgcccgagtagccgaccgccctttccccgccgtcttcagctgccgcgcgctgccccgcctccccgccaggcctccactgcccacttctccggcggctacagcggaaggcaaggagaaggacagcgggcagcggtagctggatctagcaagcacagggcgtcttctccatccgccacctctcggcgcatcatcagctgagagtttcaggcatttgctcaggtgttttcatttcataatatagctactactattttaatgatgggtaagagattaggtggttgtactgtacaaaatattcatgtgttttactggccatcaagtttcccttaaattaatgcctaattgcatttgttggggttacgtactaatgccttgaaaggactgtgtaatattccagaatattgtgttcattttcataagtaaaatttgtttgggtgaagttgatttttcacatatatttgagatctgtttagacaagccttgatgaacttggttgtttagcatagttcggctttcacaaatcacaatgtttagaatctttttatacgcatggggcttatatgatgaagcttcactgctccactactatttgacatacaatatgtttagaatgttttttataattgagctttcacaatgtttagaatcttttattcttataatgtatgtttttatgccacgtactcatagtttttacaatcagttgcttatgatccttcagttcattaacgaacttttaggtggttgtgcttgatcggtggtgttctcatgccttctgttttgtggctgtaggatatcaagaggagggaagaggcgctgaagaatggtgcagatacacatttgtttttgcataattgctgccatagctccaccaattgtatttcatgggaaatcattaacatatttcgttccctccgttgagaagatccagcaactccttgtgctatgtagccccctttgaagataaaaaaacttctgataggtttggagctactgctctcagctgcaggtgtccatctcttgaacataacctttgtggtttgctcagtctggagctattttgtttcagctgtgttgtgtgattaaaattgggtctcggaggtattttgcagaactaccactatgttttaatcttgtatgtttggtctgtcgatcttgttgtcattactgaaggagttttgatctgataccacatctctggtagctacaaacctacaagctttgactaggccgatacaaagt

SEQ ID NO: 134777 - DNA, 720 bp, Zea Mays
ctgccaccccgcccgtcctccactgcccctatggctgccatgggcgagcgctgcccgagtagccgaccgccctttccccgccgtcttcagctgccgcgcgctgccccgcctccccgccaggcctccactgcccacttctccggcggctacagcggaaggcaaggagaaggacagcgggcagcggtagctggatctagcaagcacagggcgtcttctccatccgccacctctcggcgcatcatcagctgagagtttcaggcatttgctcaggatatcaagaggagggaagaggcgctgaagaatggtgcagatacacatttgtttttgcataattgctgccatagctccaccaattgtatttcatgggaaatcattaacatatttcgttccctccgttgagaagatccagcaactccttgtgctatgtagccccctttgaagataaaaaaacttctgataggtttggagctactgctctcagctgcaggtgtccatctcttgaacataacctttgtggtttgctcagtctggagctattttgtttcagctgtgttgtgtgattaaaattgggtctcggaggtattttgcagaactaccactatgttttaatcttgtatgtttggtctgtcgatcttgttgtcattactgaaggagttttgatctgataccacatctctggtagctacaaacctacaagctttgactaggccgatacaaagt

SEQ ID NO: 134778 - DNA, 207 bp, Zea Mays
atgccaagtacagaacagagatcgtgcactgaactcacggattcaagaatccttgagagcctagtactcttttccttttgcagggcttgtagttcagaaagatattcatttaatctcctcactgaaagatcatccgcattaacatggggtgtttccaactgttcaccaatatgtagatccccagcaatttcatcacgaagtatctga

SEQ ID NO: 134779 - DNA, 108 bp, Zea Mays
tattgaacgagacattttttcaagtattccaaatgatcaaattttataccagtttcaagaaatgaagtctcgcatgaaaatgttgcctaaacaacctcagactactag

SEQ ID NO: 134780 - DNA, 2270 bp, Zea Mays
actcccgtcccgtcgcagccgtctcgctcctccgtctccattccccgcctcgtcccgccgcagccgcggccgcgaggagccttccccgcctctcttcccgctcgctgggccctgcggctcgcagccagcattccgggctcctggtcgccgtgagccttgggaggttttgcgcggatctgaggctgcccgggctggggaattcgggctgatacctcgcggcgggagtcgggctgagttgatttggcgagtttaggtgtgcggagggaggaattccgggaggaacagttggttggtctgcgagagtttggtgggcggtagggtggtcgggcgggcgggcgggcgacgtacttgcgccccggaggccgccgtcgctgcttcgggcaagcgatgatcgagcagttcgtcaacttcgtcatccggccgcctcgagtacaatccagatcagtatttatgggagccagagttcactcttgccggaaggaagtataaaaggctagatttggagcttacgaatgaaagaagtcagaccttaaagtgcagccactatgttcctgctgtcatcccagaaaacacttcccttccatgtgtagtctactgccatgggaatagtggatgcagagcagatgcaaatgaagccgctgtcatacttcttccttcaaatatcaccctttttacacttgactttgcgggatcagggctatcaagtggagattatgtcagccttggttggcatgagaagcaggatctcaaatgtgctgtgtcctttctgcgtaagaataagcaagtttcttgtataggtctttggggacgctcaatgggtgctgttacaagtctgctatatggagcagaagacccctcaattgctggcatggttctggatagtgctttcgctaacttatatgacttaatgatggagcttgtagaagtttacaaaatacgagttcctaagttcacggttaagatggctgttcagtacatgcgatgcgtcattcagagaagagctaaatttgacataatggatcttaatgttgtccagtttgcacccaagacgtttattcctgcactatttggacatgcttcaaatgatatgtttattcagcctcatcacacagaccatattcatcaggcttatgcgggggataaaaatctaatcaaatttgagggtgatcacaattcgccaagaccccagttttattacgactctgtttcaatattcttctacaacgttcttcacccacctcagtttccttcaacctgcacacataaacttgataagtattataaccttggtgcttttaagggtgctgctggtactaatgagagcttattgtatgagatcatcaatggtctacgggcagctggcactgatgcaggaagttcatcagctgctacagctagtttcacgaatgctacaaaatcagtagttgaattgctgacagagagggtaaatcagctatctgttaaaaatgataatgacttggattttcttttggatgaaaaccataaccttactgagatggacggtaacacaggagagtgtcatttagaggataaatcaaacagacaaacagatgaatgctgttcgtataccagctcaaaccgagagagctggggaagatgttcttccttgggtggagctagtgatggattgtcatcaggcgaacagcctgagatacctaatcataagcttaagagcttgacactaagggctctagcaaccccactgagacgggtacaaaggaaacctctcgcgatcccgaaggagaagaatcgatcactgtggaagaggttgaaaaaggagaggcaacagatgggggaaaacatatcccagcgtctgcggttgtgtctccaaggccaggctcgacacaagagaaccaaatcgtcttgacaactgtggatacatatttagctcttggacaaatctgctaggaactcactgatgattcagcaaccgagccgcgccgcaatttggagcttctggcactcagcgccaatcgtgccgtgtacattggttgaacattacctagaaatcttagatcatggattgtcccggacccaatgtgttaactgtcagtctttaatgttcgtttcttatgtttttttccccaatgtaatcctgtaaatttgaaggctagaactgcccatgtacttgtggttgagggagggacaccggttcgttgcttttttcaggatttgtgtagggtttggaggtcgagctgtatcgacagaatctcattttctatgttgctcggtaacgtctctgatttgct

SEQ ID NO: 134781 - DNA, 320 bp, Zea Mays
gatgaagattcaaatggcgaaatagggtaaagaagaactgtaacattgtttccactggaaatctcattcatagaggaggagatatgtgatctctttgaagcttgcgatatagatgaagataagggcatgaagttcaatgagttcattgcctttttgtgccttgtctatcttcttaatgaatcagctgcgtcagaagcaatgataaagatgggactagaaaatcttgaggcaacttttgagaccttggttgatgcatttgtcttcttggatagaataaagatgggtatgtgagcaaggacgagatagtccaagcaataaat

SEQ ID NO: 134782 - DNA, 721 bp, Zea Mays
agggtcccccacctaagatttcattaccagcaaacgcatacaaacaacagtctcatacttgtactaacaagtcattgagtcctcaaactatcattgtaccgagttgccgagccagtcaaggtgcccgggctccgacactgattctacaaccgcaaagatagtctacaacactgcaggcaccctgacaaactgaagatgatcaagagcatcaggacttgtgtcgcacacatgaaacatgcatcacatatagcctacaggtggatttaaactctactgattgagtggtatccactccagctccagttccacctcccccgattccacgttctgcagcctcagagagacctcctgcttgaccttgccaccaacgacattgacggcgctgtcccttgccagcgcattatctggggacctgagccacttgccgatctgcatgtccgcgagcagatcagggtcgccaaacgctgtagctgcactgatcatcggctgcaggtcaatctctgcgtcacccatctcgtcatccttcgatagcatgtcgtggtcgaacacttgctgggttgggtcatgaaagattgaagaaaaggtgtctgttagacgccgttatcaatgtacttccgaatctgaagtctatggttagaatgctcgtaataaggactgtggactcacaagtttcagaggcccgtagtgctggggaactgacagcttaagctcttcattccaa

SEQ ID NO: 134783 - DNA, 1546 bp, Zea Mays
agtaattgacttgacctcacttcccctgtggggaggctttaattttcttccgatcgatcatagtatccgctgcggtgtgattgcctgcccccaccccattgcgcctgcgcctgcgcctcgcttcatccggtgcgctgcccgcctcactcccgtcgtcctcttcctcgtcctcgctctcgtcgcggagcggtgtggaggcgcgcgctccttgaaggcacggggcaagagcggaggtgagtgagtccgagccccgtggattgctggttcggtggtcggaactcgtggagtagcaagagcggcggcggttacgatatctcacgccagcagtttgtcctcatctaccacccacttcccctgatcccctccccagtacccacttctctcatatcccctcccgcatcatctctctttttttcctcctcttagcgaggacgccgaattcgcgattggcttaggcggtgtgtgcggatcaaatcgagtctggaagatcatctgggtgttggagtcatccagaggcacaagctgaggaatggggcaaaaggactccaagccttcacatggatatggctactcttcttatgattacgggagtgcttcatcgggatacacctcgagaaacactgggaattcgtcctccagttatagcgtcaggtacgcgccttcttcggagaacagtgtacagccggagacacatgccaggttgcagaggaagtattccaagatcggtgatgactaccgttctttgagccaggtgactgaagctttggcacaggcaggccttgaatcttcaaatcttattgtaggcattgattttacaaagagcaatgaatggacaggtaaaatttccttcaatcgccgctgcctgcatgatattggaaacactccaaacccatatgagcaagctatatctattattggaaggacactttcagcatttgatgaagataatttgattccctgcttcggatttggtgacgcgtcaactcatgatcaggaggtattcagcttttacccagagaaccgcccatgcaatggatttgaagaggcgctagacagatacagagaaatcgttccaactcttcgattagcaggacctacatcttttgcgccgatgattgagacagcaattggaattgttgacagcactggtggtcaatatcatgttcttctgataatcgccgatggacaggttacccgaagtgtcgatacacaatctggacagttgagtccacaggagcgggatactattgatgcaatagtaagagcaagccagttccccctgtcaattgttcttgtcggggttggtgatggaccatgggacatgatgcaccagtttgatgacaatatacctgctcggtcatttgacaatttccagtttgtgaatttcacggagattatgtcgaagagcatagcagctgacagaaaggaggcagaatttgcattgtcagcgctgatggaaatccctacacagtacaaagcaacaattgatctccaactcttaggccgtcgccaaagaataaccccaagaattgctctgccaccacca

SEQ ID NO: 134784 - DNA, 107 bp, Zea Mays
ggcgttcatgagcctgggaaacaatccaatcacgaagaggttattgggattcttctccgattcattccataagtgcagcagtttaggaaagaaaattggtcaacggg

SEQ ID NO: 134785 - DNA, 4152 bp, Zea Mays
ggcgttcatgagcctgggaaacaatccaatcacgaagaggttattgggattcttctccgattcattccataagtgcagcagtttaggaaagaaaattggtcaacgggaaaaaaaagccctactgctgtacagctaggaaaaaagtgttagctccattttcgtatattgtttatactgctatttgatttattagttcaatgcatattgtttgtactgctatttgatttattaaagaatttgcagctcacagtttcttgttcgtgcgcggggttgattttgcgtccacattatagctgagcaactctttcatccctagcagattcatctctccggtaagtactaattagttgtactctgttgtgctttttagaaattttctcattttcatgaaggtagatttcatgtatcaattgactagaatagagaaaaaagctaattgggtaattcaaaccggcctagtggctaaaccaactgataacaagggcctatggtgtaatcaagtagctaaaaactcatactaactgcacttacgaagtcacacgaattttcttctgctttgttcgaccaatccagtcagcaaattcaactgtatttggaacctgcgaagaaacaattagggtcagacacttcaactccctagtaaatttgaacaagagaaataacatagagtactcaaactttagttatagcaagaaaaataaatttcaattattgcaatgcattcaaatggtaatttttgtattaaattattatattaaccccagctcatatatagagggccaattttcagttatactatttccatgcggtagtattcaattttcaattgaatgaataacatcgtcgaacatatcattttattgcatgatgatcagttaaaataacttcaacaactacaaatgcacttcctagcaaaatttacctaagattagagttatgcatcccagcgccgtttaaaaaagcatatagatctattggctgaaccgtttgaattagtatctgatcctaatgttaaattagtgccagttctttacgtcgttaatcctatgttacttacagtacgcccgagatcccaaagcttcccagcaccggtcctcgctcggctgagatggcggctttaggtcacctttcacgtttgcttagttctaccgtccaccgctctggaggccttgtgcgcgcggcgcgccttctccatgttggtcgatgtctccgatttgtacctgccacgtgacgcccattgctactacatattgtatgtgtatcatttctgtattcatattcctttgagattgtctctgttcacatattttggtctgcttaaatcataaacatagtttatgagtagttcggtatataaatttgttttaccttgtgatccttcaaatttagtatattgtttgaatttggaatgcatctttcattgtgtttggacaaagctttagtcaatgattacttaattaatatgcagatatgcttttgtgatacaaaacataactttcttatcatatgaacctagtaacattcaatacatcttttttgtgctcttctaaatgtgatttcttttaaactaactcaattaaatcttccagtggaaagcatgggcctctgaagttatcctctaccagattgatcagcattccagaatatttcaagtaagtgtctttgcttgacagggcacctatgaaccgtctcattgaagatattgacaatgacctcccgttcttaacccatgatagggttcgcaagctaatgagatctggattactccctttgtatttcagcaagacatgtggtttatcgattcctgacaccgatttcattgaagaaaaccttggtgtgctgcctgagttggatttactggtattcagatcactgaacatgagtcgctctgagtctgaaatagataattgctacaagtcatttgtgaagctcttcaaggctcttgtgggtaagtatgctgcaagggatgcaatcttcaagctacccaagtcactttatctgcatttgaagtaccttgagttgtctattgtcaaggactatcgtgtgatatatggtacatccctcttccccaagcttttgatctctataatgtactgcgaagtgcatcgacttttgagggagcagtgtccggcacgtggactgggtgctgcagccaatgcaatcatggtgacgattgaagagaaaatctttaacttcatgaagtcatgcagcacaaatactctgctaattagctattctggtgctcatggtgagagggcaaagaagcacattgtgggcagtgaagatagaggagatgaggcgctgacatctgaagttagtgatgacactaaagatctcaaagcgtcgaatgtcccactgaaagttagaaattttatgggtaacaaggagcttagtgttaagggcaaaagaactaccgcagaaggaaacgttgagattgttacaggagatgagctgacaactactctcttggacgttgtgaatactattcagcgcactactactggatatgatcagattcgttcagcaaagaaaaaagttatgtcacacgtcaaacagatgaggatgtgccagattcggcttcttaagctgctacaagagaaagttatgcacaaagatctggaaattgatcttgaggacccagattccatgtcacagcttaagatcaatgacagaagcattcacaacttttaacttcacataggcattctttgggcactcaagataaatttccagatctttgtgcgtatctttctcttgtagcagcttaaaaagccgaatctggcacatcctcatctgtttgacgtgtgacattacttttttctttgttaaacgaatctgatcatatccagtagtagtgcgctgaatagtattcacagcgtccaaaagagtagttgtcatctcatctcctggaacaatctcaacgtttccttttgcggtagttcttttgccctcaacactgagcttcttgttgcccataaaatttctaactttcagggggacattcgacgctttgagatctttagcgtcatcactaacttcaaatgtcagtgcctcatctccatcttcactgacccaatgtgcttttttgccctctcaccatgagcaccagaatagctaattagcagagcatttgtactgcaagacttcatgaagtcaaagattttctcttcaatcgtcaccatgattgcattgcctgcagcaccctatccatgtgtcgggcacaactcactcaaaagtcgatgcatttcgcagtacattatagagatcaaaagcttagggaagagggctggaccatatatcacacgatagtccttgacaataagcaactcaaggtacttcaaatgcagatcaagacttgggtagcttgaagattgcatcccttacagcatacttacccacaagagccttaaagaacttcgcgaatggcttgtagcaattacctatttcagactcagagcgactcatgttcagtgatctgaataccagtaaatcaaactcaggcagcacatccaggttttttttaatgaaatcggtgtcaggaatcgataagccataggtcttgctgaaatacaaagggagtaattcagatctcagtagcttgcgaaccctatcatgtgttaagaacgggaggtcatcgttaatatcttcaatgagacggatcctaggtgtcctgtccagtaaagacacttccttgaaatactctgaaatgttggtcactctgctagaggataactttagaggcccatgcttttgacttaaagatttaattgagttagtttaaaaaatcacatttagaaaaacacaaaaaagctgcattgaatgttactaggttcatatgacaagaaacttatgttttgtatcacaaaagcatatctgcatattaattaagtaatcattggctaaagcttcgtccaaacacaatgaaagatgcattccaaattcaaacaatgtactaaatttgaaggaccacaagctaaaataaatttatatatcgaactacacataaactatgtttatgatttaaccagaccaaaatatatgaacagagacaatctcacaaggaatatgaatacaaaaatgatacacatacaagttgtagtagcaatgggcgtcacgtggcaggtacagatcggagacatcggcgacctcggc

SEQ ID NO: 134786 - DNA, 1011 bp, Zea Mays
atgaaccgtctcattgaagatattgacaatgacctcccgttcttaacccatgatagggttcgcaagctaatgagatctggattactccctttgtatttcagcaagacatgtggtttatcgattcctgacaccgatttcattgaagaaaaccttggtgtgctgcctgagttggatttactggtattcagatcactgaacatgagtcgctctgagtctgaaatagataattgctacaagtcatttgtgaagctcttcaaggctcttgtgggtaagtatgctgcaagggatgcaatcttcaagctacccaagtcactttatctgcatttgaagtaccttgagttgtctattgtcaaggactatcgtgtgatatatggtacatccctcttccccaagcttttgatctctataatgtactgcgaagtgcatcgacttttgagggagcagtgtccggcacgtggactgggtgctgcagccaatgcaatcatggtgacgattgaagagaaaatctttaacttcatgaagtcatgcagcacaaatactctgctaattagctattctggtgctcatggtgagagggcaaagaagcacattgtgggcagtgaagatagaggagatgaggcgctgacatctgaagttagtgatgacactaaagatctcaaagcgtcgaatgtcccactgaaagttagaaattttatgggtaacaaggagcttagtgttaagggcaaaagaactaccgcagaaggaaacgttgagattgttacaggagatgagctgacaactactctcttggacgttgtgaatactattcagcgcactactactggatatgatcagattcgttcagcaaagaaaaaagttatgtcacacgtcaaacagatgaggatgtgccagattcggcttcttaagctgctacaagagaaagttatgcacaaagatctggaaattgatcttgaggacccagattccatgtcacagcttaagatcaatgacagaagcattcacaacttttaa

SEQ ID NO: 134787 - DNA, 530 bp, Zea Mays
atgtaaatggaaccatcattagtccactcacaagcgacaagatatatcttagacattttaagtttgataatggatccaagatatgttactttattcatcttcttagtacttgccttacatggagatactactttggcagaaacttgcaggcagtttgttaaagtgcatccattctgctttaaagcaatgtgcaaggcaaattgtgctatagagggaaaattctctgatggttcctatgtaaaggattacagatgtgaatcaggtggatttcactcggtgtgcgtttgcattttgtgcaaacattagttatctaaagacaagcggagatatcttcttgtattcctatatgttatttaggagtattgtccaaataattatacggtagcttagttaactagctagtttgtttatttatagacatatgtagcactagttaactagttgttatttcttaaattctcatctatataccaggaaacatgtttttagcgcttcaataatatatctttgttctcccttattataaagtt

SEQ ID NO: 134788 - DNA, 530 bp, Zea Mays
atgtaaatggaaccatcattagtccactcacaagtgacaagatatatcttagacattttaagtttgataatggatccaagatatgttactttattcatcttcttagtacttgccttacacggagatactactttggcagaaacttgcaggcagtttgttaaagtgcatccattctgctttaaagcaatgtgcaaggcaaattgtgctatagagggaaaattctctgatggttcctatgtaaaggattacagatgtgaatcaggtggatttcactcggtgtgcgtttgcattttgtgcaaacattagttatctaaagacaagcagagaaatcttcttgtattcctatatgttatttaggagtattgtccaaataattatacggtagcttagtcaactagctagtttgtttatttatagacatttgtagcactagttaactagtcgttatgtcttaaattctcaactatataccaggaaacatgttttcagcgcttcaataatatatctttgttctcccttattataaagtt

SEQ ID NO: 134789 - DNA, 202 bp, Zea Mays
acgcatgttgtcgtgcatagccgcgtctggtgcgttaggggcaacaccatcatggagtggatgggcacccgtcgtggctagcacaagattagggccgtacccactgggcctcaaggccggcacgacgtgcgtcgtctacattggcgactgagagaagatggtggtcaccagcgcgctcgacggtgatggcagtagcgaccga

SEQ ID NO: 134790 - DNA, 240 bp, Zea Mays
atgcatgatgaggaatcttgccgaattagtcacccaccgctcgacccacacctaaggcctggtggtggttctgcctcttgcccggcagatcgaccggtgcggtcggtgctggttccggtgccgcgccgctatgccggcctccctctgtcctgggtgaggctgttgcccaacacggtgaagaagaggttgatggcgacgcacggggcggcaacactcgaggaagatgaggatggtagatga

SEQ ID NO: 134791 - DNA, 104 bp, Zea Mays
gttcataataaaaatagccgcacatatagcagtcaacaacttagctcattctgaagaaaccaatggacacaaaaccttgggtaagcacctacctgaccaaaact

SEQ ID NO: 134792 - DNA, 121 bp, Zea Mays
ttttttatttgaggacacacaagtttaggtggagtttttctgctttactttatttgaagaaatttatgtttgttctcggtgtgcctaaacataatacttgattcatttaaggcatactgcc

SEQ ID NO: 134793 - DNA, 948 bp, Zea Mays
atggctccagggaagaggtccgcatggacctcacggaaacccgaagaacctatgccaactgattacgagaaaataagggctatgaatatgatgaagaacaatcaattgtttcaacggctaggccttggacaactgaaatcactggtgactgctacagctgcaaacaacaaagacgactctcctcagcaatcagagagtttatatgatggtgaaaacactgacaattctaatgaagagttttgggttcgcaatgaatttgatatgcatatccttattgtattctacatattcaggaatcccaatgtcgttacaatggtcgtgccaacttatccaatgatggtgatcagatctcaacaaaagaggagagtgataaccacaatgcagttgaaggatagttgtatgaagaataaacttaatcgtgaaaaagtacagtatcaacaatgcacaggatcccaatcatatattgcaaaagcttatttactgaaacaagagaaatataaggatgctgaaccgagtgcaatagatcttttcaaggatatgcattgcagcaagaagaaaggtttttctgaaaatgtaaagaaagcaattgttgacatggaagcaatggtgacaacaccagttgaggatggacaacaacagaagtctcctatggaagttgtttctgaagtgctagggggttctagtttatttctacataattttggtctgcaagataactccaagaaaagctccacaacaactgtttctgcaaaggttcaagaacttcagaatcaattggagtctgagaggctagaaaaagatggacttcgggaagaagtagaaaccttaaaggctcaggcacaggcctcaaaggaaaccatggacaatatgaagagatcgatggaagaaaataacagtctcctccatcaactgttgagcttcaatcgaagccaagcgcccccatcttaa

SEQ ID NO: 134794 - DNA, 237 bp, Zea Mays
atggattcaagatatatcaccctatgcatctttcttgtacttgtcttacatggagatacaactttggcagaaacctgcaagcagtttcctaaatggagtccactctgctttagtgcaatttgcaaggcaagttgttttatagagggaaagttctccgatggttactatgtaaaggggcatagatgttgttcaactggatatgaatacgtgtgtaattgtcttttgtgtaaaaattag

SEQ ID NO: 134795 - DNA, 579 bp, Zea Mays
atgaagaggcgctcttcggggcgccgctgcgacagggcctggggccggcggcgcgccgatgccccatcgcttgctccggcggacggcagcgcagcggcagccaagcaaagatctttgggacaggtgaccaccagttgcatgggtgaatcccagacgacgaccacatctgatgagacatacacaacgtcgtcgtctttgtcatcattctacctgacagttgagaagacgacgaccacaactgatcagatgtacacagcgccaccgtctttaccatcattgtaccttacacccaaggagacgctgaacaatggtgtcatttcgataagcaactacaacactgatgaagcaccttcgccgcaacctgtatcgttggtatctgatgagatagacatttctgaatcatcacctccgccatctccgtcgccacatacagtggatgagatggacaactctgaggagtcaccttcacctttgtctcacaccatagaactccaaatgtttgaggtaccaaccacctcaggcaataatgaggaggacgaggaggatgacgattcttttagagaatgggagagtgattaa

SEQ ID NO: 134796 - DNA, 1728 bp, Zea Mays
atcgcttgctcgctcgttgcttttggcaggtatagcaagcacacccccttcagccatcgagcctcagttagcatctctagctagctgctatagctcttctccacgtttagctttcaataatccatcgtctctgcaggtagccagcagacaccacttcacaagcaggatggcaatgaactctggttgttgttttgccagggtcccagccctatgaaagcgcgttacgtttacgcagtgctctttctactggccaacttgtgtgcgtggctcatgcgagagaaccgtatatcatattacttagcgcagcggggcaacgcccgctgtcacggtgaccagggctgtctcgcggctcagagcgtgctgacaattagccagactttctgtatgtttttcgtgggcatgctaatatccactgtgaccacgaccaagttgaatgaccgcagaaattcatggcactgcgggtggtggccggtgaaggttgccctgattataggttgtttcttcttctctcaggttgttccatccggttggatcgaaacctacgggaaagttgcgcaggttggagcaggggtatttcttgtacttcagcttatgtctaccataagatttatcacacagctgaactacaaattatgcgagaccaattttgaagaaaggtacatccgtgtcatcgcaatctctggtactgccatcctcacatttttgggattgatagtattcttgagcctaaagtttgtacagtgttggcacaatatggagctcattgtcatcacaatggtgctatttttcatcatgtgtggagtctcactaatgtccaaggctaacaaatttttcatggagcctgcattaattggtgggtacgctactttcatatgcctgttagcgattacaagtgaacctgagtcaggatgcgacataaaatgcaaagcaggttcagttgctggttggttaaccatttccttttttgtttctggactcctcggcactgtttattctgcttttactatgggcaccggctacaaatgtacacgaaacacgttggagtcggaagacaatgtaccatatgggtacggtttttttcatttcatcttcatgtcgggctgcatgtactttggaatgatgtttgttgcctgggacacacatcataccatggaagaatggaacgtagatattgggtggatcagcacatggatccatatcgctagcgaggctctggtggtagtatcctacttaacgatactgctggccagaattttgggagtagactggctccaacacttcctcgcaaagatctttggaacagatgaccagctccacggcgatgaatcccatacgacgatcgtgcatggtgatgaatccgagacgacgaccgtgcatggtgatgaattcaagacgacgaccgtgcatggtgatgaatccgagacgaggaccgtgcatggtgatgaatccgagacgacgaccgtgcatggtgatgaatccgagacgacgaacacgcatgtcacatcgtcgtcctctttgtatcacacagcgtcgccctcttcgctctactactcccccgagcaatcaccgcccaataacactgaccatcaacctcctccgccaccgccttcatcgtcctcccctcacaccatagaactgcaaatgttcgagataccaaacatcggtacctctggcatgaatgaagaggaggacgatgatgaccatattagagaatgggagagtgaataa

SEQ ID NO: 134797 - DNA, 754 bp, Zea Mays
aaatagcatatgcatgataaatgatgaacactgtgcccacaagtttagcaaattacatgataaatgatgacacaaactaaaaaaatcatgatgaaaatcagcaacaaccagatcagtagtttcacagcacttgaaccccttacgaagataatctcactgaaagcggaggagcagctgggcctaggagggaggtttactaggctgcattatagagcatccctgctgcatcatacaaaaatatgttacaacagcttcccttcatttttgtctactaatgagggaatatagtctttgcttatatacctgatcaggtgcaacgcatttaacaatttgcttagaagatttcatacacctacaatattttggagagggattgaacagacccttaaaactgcaaccactttcatgtaattggcgcacaaatgtttcttccaataattgaagataaagcatgtgcttttcatctgtccatcaattagatgagcatacctcgagaacatcctgaggcatgaatggaagaactttaccataggtcctccaaaagaaatgctgactacaaattttaaacactgagatatgagtatttgtggtctttggactcttggtctctaagtgacatgatagaaatctgggaatactgctcaagcattacaagggtacatccagaagaaaaatctacattaaaaagaacagttaaataaccagctaccacctccaccacaacaacaacagtaataaaagatttaaccaaaat

SEQ ID NO: 134798 - DNA, 525 bp, Zea Mays
atgtaaatggaaccatcattactccactcacattcgacaaaatatatcttagacaggttaagtttgacgataatggattcaagatatgttaccctatgcattttcttagtacttgccttacatgaagatactactttggcagaaacttgcaggcagtatgttgaagggcaggcattctgctttaaagcaatgtgcaaggcaaattgttttatggagggaaaaattctctgatgattcttatgtaaagggttacagatgtgaatcaggtggattccactcggtgtgtgtttgccttttgtgtaaaaattagttatctaaagacaagcggagatatcttcttatgttcctatccattttttaggagtattgtccaaataattatacgatagcttagttaaatagtttgtttatttatagacaaatgtagcactagttaactagttgtgatttttaaaatttctcagctatatatcagaaatattttttaacacttcaataatatatctttattctcccttattataa

SEQ ID NO: 134799 - DNA, 724 bp, Zea Mays
acacacgaagaagataatcacaaagataatcacaaaagagataatcacaaagatcgaagaagctgcaaagccgcttggctttgatgttcagaagaaaaaatacaagatgcggatggagaacccgaaagcaggtagaaagggcaatctgaatgttgcaactgaggtcttccaaatagccccatccctacatgtagtcgagctaaagaaggcgaagggggacactctgagttccaaaagttctacagaagcctgtcgacccagctgaaggatgttgtgtggaagtgcgacggcgaggtgggcggcaacagcacggcagcatgaaaccgccctttgaactttccactggacggcaccagttttcctttgtacatagcttctctttcgtatgatcctgtgtccattgcagagtcagttttgcaacaagttctttggtttatttgttgacggcgaaaacaaccgccctggaggctgttgtggatgagcttactggcgtgtttagttcgtttcacggtcgggaggttgaatggaatgggaaccacaatcaaggctgtagtagtttgtgtagtaacgaggtatcgaggtagatacatcagatggtgtaaggaagtaccagctgttagttcatggcttcaagcttagccccccttcaatttgtttgatgatgtattacttcacaataaacattattacttagatgtatgaggtgagcacacttggtcttttg

SEQ ID NO: 134800 - DNA, 1077 bp, Zea Mays
atgccgcactcgcgcaggcttgagcgatgcattgaccgcgctcaagcgcgtgttcggttgactgcgtcttcgtccatggccctgcacgcgcgtatgcagttcagcccatttttcactgtcttgcctgcacgtctggagatgtggaaaatgaacttccctggaggtccagcctccgcggatgctgcgccgccgccatccccactgaagtccgaccagcgcctcgtcgaggtcttcacccccttcctcgagaagctcatacacctaccggatctcacagcctccgcatatgacttgatgagcgagtcaaaggggcgcgacggcgaggaggggaggaggtggagcgcgcggaggaagcagacgaggagcgggagtggagggaaggacgcgacgaggcgggaggccgtggggagcgagagcgggaggtggaggcggctgagagggagcggaggcaagcgcgcggaagcgttgaggagagccgtgaggtgcgcgtggtggacgtggctactgcacgcctcctccgtcgcttgtcgcgtggaggcggaggcggaggcggctgccgtattcttcaggcccccgctagtaggagtactgccccctgctctggcgcctgcagtggaaggcaaggagaaggtcaacggtagctggatctggcgagcacgtgaccgcaccccgcctgcggccaggcggtgcccagatccgtttcggtttgcaaccccgcaacgatattctcaagtaacatccaatctgatgtcttactatggcatgtgtgggctggcgaaggagtgcctacatcagcggtacttcagcaaggaatactctgaatttctgattgagtttatggccgcagttaggcagaactatggacaaaaggtccttgtccagtttgaggactttgcaaaccacaatgcttttacacttctcgagaagtacatgacaaaccatcttgtatttaatgatgatatccacttatacgatcaagtgactagtgatgtgatttgccatggtgagaaaacttcttacaagatgggcgcaagagctttcctagtggccattagcgcttacacagacctgttttga

SEQ ID NO: 134801 - DNA, 2012 bp, Zea Mays
cagctttggaggaacgcagaaacgtcgaaaccagcacccggaaacccagacaaagcacgagccacgcacgccccgctgtctccctcccgccgtcccgccgccaccgctactgccggagtctctcgccaccgtcgttgctctcccgccttcaccgtgccaactcccctccttgcctcccccgcgcttcagtcgctccactccccatcgctttcgcctggtcagaattccagatccaggtgtcctttgacccagaccgcgcctgcctttccctccgctcggattcttcgccgtcttcgttcctactgggcgccgccggggtggagcggagatcggatccgccaggagctgattccttctctcgtagtctagtttgatgcggattcattcgctgaccggcatagcatgatcctgcggtgattgcggtcgcggatagcttgtgcaagctgttggcttgggagttatctttctaatctggcctaaagaaatcctgaggcggtagcgtcacatggatgcaagtacggaggttactgatgctattgctgcagtgggcattgacaatgggccaacggggaagttgccgccccgtgatagtgtaggggggcacgcagaagaacacgacgtgctggctgatggaacacattcgggtgagagcgaggtgatcaacccgtctgaagaagtggaaatggaagccacctcgcaatcccaggacataaagccccgagttcctgagggggttcaaggccattcaccgaaggttgttactaaatctccgcgacagagccctcggggcggggataagagtgaagccaggaaaatctctcccagtccttatcctaaggtgcccatcgcacgggtttctgatctagatatagttgatagctcttcgagcaatggtgatactggtgccagtaagaaaaagactgaaaagagcagtttccgcccaattgccaaggagagcctgtcacttgaggactcaaaagagaagaataaaactcagaaggcatcaaaccaacgctctgccaaaaacgatattgacgaagaatcaaatgaaagtgtgaaacctcaaagggtgggcagcactccttcatatggatttagttttaagtgtgatgagagagctgaaaaaagaagagagttctactcaaagctcgaggagaagattcatgcacaggaactggagaaaagcaacttgcaggcaaaatcaaaggaaactgaagaagctgaactcaaaatgctgagaaagagtttaaagttcaaggcaacaccaatgcccagcttttataaggaaccacctcctcccaaggttgagttgaagaagatcccaacaacaagagctcgatcaccaaagcttggtcgctccaagaacacaccctcaggagggacagaaggaaattcaaaccccccagctcgttcagctcgactgagtctcgatcaaagggtcccccaaaatggtgccaagaaagcacctgctgcaaatgcggcgaagaagccccaacggaaatctctccctaaattgccttcggagcaaacagccaaagttgttgacattgcagcgtctgttccatctggagaagagctggggaagaagccatcgttgacgggtcttgttcgagagccaatccgcgcgcaacttacgcctgatgaacctggactcagcgtgtaggaaaggaacctatcaagccgactcatgaaagaagagagttgtgcctcagcttcctttatcacactttgctatttctgcattaactgctggctggtattatgtactaaaattagtctcatcaccaggatggagttgggagtttggagaatggcaagtgacccccgtgtattgtttatgctagtttctgttgacatacgaagtgtttgtagttggcaaattttttcagattatcatgtctcctatctccagggctcggagccaattttcttgccgtcgtagagaagccttgtgattcggtgcattagttcttgcagtttgatttcggctattgttcattgcttgtactgat

SEQ ID NO: 134802 - DNA, 2004 bp, Zea Mays
cagctttggaggaacgcagaaacgtcgaaaccagcacccggaaacccagacaaagcacgagccacgcacgccccgctgtctccctcccgccgtcccgccgccaccgctactgccggagtctctcgccaccgtcgttgctctcccgccttcaccgtgccaactcccctccttgcctcccccgcgcttcagtcgctccactccccatcgctttcgcctggtcagatccaggtgtcctttgacccagaccgcgcctgcctttccctccgctcggattcttcgccgtcttcgttcctactgggcgccgccggggtggagcggagatcggatccgccaggagctgattccttctctcgtagtctagtttgatgcggattcattcgctgaccggcatagcatgatcctgcggtgattgcggtcgcggatagcttgtgcaagctgttggcttgggagttatctttctaatctggcctaaagaaatcctgaggcggtagcgtcacatggatgcaagtacggaggttactgatgctattgctgcagtgggcattgacaatgggccaacggggaagttgccgccccgtgatagtgtaggggggcacgcagaagaacacgacgtgctggctgatggaacacattcgggtgagagcgaggtgatcaacccgtctgaagaagtggaaatggaagccacctcgcaatcccaggacataaagccccgagttcctgagggggttcaaggccattcaccgaaggttgttactaaatctccgcgacagagccctcggggcggggataagagtgaagccaggaaaatctctcccagtccttatcctaaggtgcccatcgcacgggtttctgatctagatatagttgatagctcttcgagcaatggtgatactggtgccagtaagaaaaagactgaaaagagcagtttccgcccaattgccaaggagagcctgtcacttgaggactcaaaagagaagaataaaactcagaaggcatcaaaccaacgctctgccaaaaacgatattgacgaagaatcaaatgaaagtgtgaaacctcaaagggtgggcagcactccttcatatggatttagttttaagtgtgatgagagagctgaaaaaagaagagagttctactcaaagctcgaggagaagattcatgcacaggaactggagaaaagcaacttgcaggcaaaatcaaaggaaactgaagaagctgaactcaaaatgctgagaaagagtttaaagttcaaggcaacaccaatgcccagcttttataaggaaccacctcctcccaaggttgagttgaagaagatcccaacaacaagagctcgatcaccaaagcttggtcgctccaagaacacaccctcaggagggacagaaggaaattcaaaccccccagctcgttcagctcgactgagtctcgatcaaagggtcccccaaaatggtgccaagaaagcacctgctgcaaatgcggcgaagaagccccaacggaaatctctccctaaattgccttcggagcaaacagccaaagttgttgacattgcagcgtctgttccatctggagaagagctggggaagaagccatcgttgacgggtcttgttcgagagccaatccgcgcgcaacttacgcctgatgaacctggactcagcgtgtaggaaaggaacctatcaagccgactcatgaaagaagagagttgtgcctcagcttcctttatcacactttgctatttctgcattaactgctggctggtattatgtactaaaattagtctcatcaccaggatggagttgggagtttggagaatggcaagtgacccccgtgtattgtttatgctagtttctgttgacatacgaagtgtttgtagttggcaaattttttcagattatcatgtctcctatctccagggctcggagccaattttcttgccgtcgtagagaagccttgtgattcggtgcattagttcttgcagtttgatttcggctattgttcattgcttgtactgat

SEQ ID NO: 134803 - DNA, 1843 bp, Zea Mays
tttcccttaccattttctttcatgcgctcaagagccaacacggctcgatccagaattccagatccaggtgtcctttgacccagaccgcgcctgcctttccctccgctcggattcttcgccgtcttcgttcctactgggcgccgccggggtggagcggagatcggatccgccaggagctgattccttctctcgtagtctagtttgatgcggattcattcgctgaccggcatagcatgatcctgcggtgattgcggtcgcggatagcttgtgcaagctgttggcttgggagttatctttctaatctggcctaaagaaatcctgaggcggtagcgtcacatggatgcaagtacggaggttactgatgctattgctgcagtgggcattgacaatgggccaacggggaagttgccgccccgtgatagtgtaggggggcacgcagaagaacacgacgtgctggctgatggaacacattcgggtgagagcgaggtgatcaacccgtctgaagaagtggaaatggaagccacctcgcaatcccaggacataaagccccgagttcctgagggggttcaaggccattcaccgaaggttgttactaaatctccgcgacagagccctcggggcggggataagagtgaagccaggaaaatctctcccagtccttatcctaaggtgcccatcgcacgggtttctgatctagatatagttgatagctcttcgagcaatggtgatactggtgccagtaagaaaaagactgaaaagagcagtttccgcccaattgccaaggagagcctgtcacttgaggactcaaaagagaagaataaaactcagaaggcatcaaaccaacgctctgccaaaaacgatattgacgaagaatcaaatgaaagtgtgaaacctcaaagggtgggcagcactccttcatatggatttagttttaagtgtgatgagagagctgaaaaaagaagagagttctactcaaagctcgaggagaagattcatgcacaggaactggagaaaagcaacttgcaggcaaaatcaaaggaaactgaagaagctgaactcaaaatgctgagaaagagtttaaagttcaaggcaacaccaatgcccagcttttataaggaaccacctcctcccaaggttgagttgaagaagatcccaacaacaagagctcgatcaccaaagcttggtcgctccaagaacacaccctcaggagggacagaaggaaattcaaaccccccagctcgttcagctcgactgagtctcgatcaaagggtcccccaaaatggtgccaagaaagcacctgctgcaaatgcggcgaagaagccccaacggaaatctctccctaaattgccttcggagcaaacagccaaagttgttgacattgcagcgtctgttccatctggagaagagctggggaagaagccatcgttgacgggtcttgttcgagagccaatccgcgcgcaacttacgcctgatgaacctggactcagcgtgtaggaaaggaacctatcaagccgactcatgaaagaagagagttgtgcctcagcttcctttatcacactttgctatttctgcattaactgctggctggtattatgtactaaaattagtctcatcaccaggatggagttgggagtttggagaatggcaagtgacccccgtgtattgtttatgctagtttctgttgacatacgaagtgtttgtagttggcaaattttttcagattatcatgtctcctatctccagggctcggagccaattttcttgccgtcgtagagaagccttgtgattcggtgcattagttcttgcagtttgatttcggctattgttcattgcttgtactgat

SEQ ID NO: 134804 - DNA, 2160 bp, Zea Mays
cccaagtctagagctttccacagcactccgctccgcccaggtcaccaacacaaacaaatccgttcataataagattcttatcctttagtttacgctggcctggcctttgttgcgttataaacgttgctggcgttaggcttcaattaattatataattaattaattagtttccttaggcatccatgatccatcgatcactccatgggtgttcgcatgcatgcagctaggatagcgtagccattttgaacacgcatgtatatgcccacacagtgccgcttgcagagaactcaaaatactacttgcaagctgtctgccaagctgtgactgcgattgtgaaaacccgtgttgcgttcaattcgtgctcgtttgcttgcttgacaggggggaggggacagcctttgaaaagaaaacccaccccaccgccgcgggggaccaggcggacgagcaggaatggcgtacgcggcgaggcggaagaagcgggtgggccgctacgaggtgggccggaccatcggccagggcaccttcgccaaggtcaagttcgccgtcgacgccgacaccggcgcgcccgtcgccatgaaggtgctcgacaaggagaccatcttcgcccaccgcatgctccaccagatcaaaagggaaatatcaatcatgaagatcgtaagacatcccaacatagtcaggcttaatgaggtgttggcagggaagacgaagatatacataatcttggaacttgtcaatggaggcgaactgtttgataaaatagcccgatatgggaagctacgtgagaatgaagccaggaagtatttccagcagcttattgatgccattgattattgccacagcaaaggagtttatcatagggatttgaagcctgaaaatatgcttcttgactcacgtggaaacttaaaagtttctgattttggacttagtacactgtctcagaatggagcaggacttcttcacacaacatgtggaacaccaaattatgttgctcctgaggtgctaggtagcgatggatatgacggacctgcagcagacatttggtcatgtggtgtcattctctatgttttaatggctggttaccttccctttgaggagaatgaccttccaagtttgtatgaaaagataactgcagctaagtactcatgcccatactggttctctccaggagccaagtcattgatccagagattacttgatccaaatccaagaactcgtatcactattggagaaataagagcagacccatggtttgagaagaactatgtagctattagacgcggtgaagatgagaatgttagcctggatgatgttcaagctgtttttgacaatattgaggacaagtacgtatctgaggaagtaactcacaaggatggtggtcctcttatgatgaatgcctttgagatgattacgctatctcaaggtttggatctctcagcgttgtttgataggcaacaggagtatgtcaagcgccaaacgcgttttgtctcaagaaaaccagctaagactatagtagctacaattgaagttgttgccgagtcaatgagtctcaaggtccactcccagaattacaagctgcggcttgaaggtgcatcatcgaacagaacgagccaattcgctgttgttctagaggtttttcaagttgccccttctctgttcatggttgatgttcgaaaggtcgccggtgacaccctggaataccacaggttttacaagaacctatgcagcagacttgacagcataatctggaggccaatcgaagtttctgcgaaatctaagctgctgaggacgaccacttgctagcccagcactgagctactgtaaatggcaaccaacaacaagagacgtggttcgtagccgttagaagagggggaaacttctgttaaatccagcgtatagctcgtggagctgggattcacgaggatttctgcatctcgctttctcaggtgatgcatgtaccatagctgtcttcgttagatcagacgaggcagctcaaagcaccaggtgtttgtatatatatattttttgtaacgctattgtagatagcctgtgtagctccagccgtgcagctgtatgtagcagaaacctgaatgtccgaaaacgcccctgaatgtcaggtagaatcgttgcttgcatccagttaacaagctggcctatgtggtc

SEQ ID NO: 134805 - DNA, 2097 bp, Zea Mays
acgcacacagtaatcctatcccagtcccagcagcagcaacttgcgctttggtccggcaaatgggctgtgaattctgcgccgcctgaccgtcgcccgcccccgccccccacaaacaaggggtggaagtgtttggtttctgtgtcttcaagtgtatctaccctgctagtatcttgtgtggcagcgttgacctggttgattaagccatttttggcatttcgcaggctctgtttacacgagtctggtcctccgctattcccacataaatgattaggaagagaagagtccagcctgaccaccgtcgctttctttttcccaaagctttttagaccgtattccaatgacagcaccggagatctgcattctaggtttaacacatgttgtgctaccgacaattactactagccaaagaccaaagtagaatcactggcaatgaaaaacaccaagttttggatccatcaaaatactacaagctcacaaaaacaataacttccttctctctctctcaagaattgagtattttttgtccgtgctccagtgagcttactgcttttttgctgccagatcaaaagggaaatatcaatcatgaagatcgtaagacatcccaacatagtcaggcttaatgaggtgttggcagggaagacgaagatatacataatcttggaacttgtcaatggaggcgaactgtttgataaaatagcccgatatgggaagctacgtgagaatgaagccaggaagtatttccagcagcttattgatgccattgattattgccacagcaaaggagtttatcatagggatttgaagcctgaaaatatgcttcttgactcacgtggaaacttaaaagtttctgattttggacttagtacactgtctcagaatggagcaggacttcttcacacaacatgtggaacaccaaattatgttgctcctgaggtgctaggtagcgatggatatgacggacctgcagcagacatttggtcatgtggtgtcattctctatgttttaatggctggttaccttccctttgaggagaatgaccttccaagtttgtatgaaaagataactgcagctaagtactcatgcccatactggttctctccaggagccaagtcattgatccagagattacttgatccaaatccaagaactcgtatcactattggagaaataagagcagacccatggtttgagaagaactatgtagctattagacgcggtgaagatgagaatgttagcctggatgatgttcaagctgtttttgacaatattgaggacaagtacgtatctgaggaagtaactcacaaggatggtggtcctcttatgatgaatgcctttgagatgattacgctatctcaaggtttggatctctcagcgttgtttgataggcaacaggagtatgtcaagcgccaaacgcgttttgtctcaagaaaaccagctaagactatagtagctacaattgaagttgttgccgagtcaatgagtctcaaggtccactcccagaattacaagctgcggcttgaaggtgcatcatcgaacagaacgagccaattcgctgttgttctagaggtttttcaagttgccccttctctgttcatggttgatgttcgaaaggtcgccggtgacaccctggaataccacaggttttacaagaacctatgcagcagacttgacagcataatctggaggccaatcgaagtttctgcgaaatctaagctgctgaggacgaccacttgctagcccagcactgagctactgtaaatggcaaccaacaacaagagacgtggttcgtagccgttagaagagggggaaacttctgttaaatccagcgtatagctcgtggagctgggattcacgaggatttctgcatctcgctttctcaggtgatgcatgtaccatagctgtcttcgttagatcagacgaggcagctcaaagcaccaggtgtttgtatatatatattttttgtaacgctattgtagatagcctgtgtagctccagccgtgcagctgtatgtagcagaaacctgaatgtccgaaaacgcccctgaatgtcaggtagaatcgttgcttgcatccagttaacaagctggcctatgtggtc

SEQ ID NO: 134806 - DNA, 141 bp, Zea Mays
atgacagccaatgtagataagagcgtaaccaggcagctcatcaatcttcttccttttggacccaaactttcacggtcttgtcattatcaagcgccccggatgcgatcatgttttccttgggatgacatgagactgcaatga

SEQ ID NO: 134807 - DNA, 2013 bp, Zea Mays
atgacgcggaacgaccgtccctacgccagcggaacaacagcggagaaacctccgctcgccgtatccccgtccttggtgccccgctccacgcttcctcggtgtcccgctccacgcccgtcgcatggtcccagccccaccccgtcctcctcgcgtcccccaccgctacagccaccagcagcaggaaaccccaccgcggggaggcaccgccccaagaagcgctgccatgggggcgtggattccgcatcaccgaccctgacccctgatagcgtcgtgctggctatcctcatcggggatgaggacatcgagcccgcgatgctagccaaagaggcgaacggcgggcacatggcgatcgaggctccgacgaggtggctccaccagatccagaagacggaagtagagaagagaagcgaaccaaagcaagcaggcttcaagaacaagttagaaaagcaccggagaactgatcaagggctgaagaagggggttctgaagcttgaatttttccttcaagaatctcagtctcagatgcgaaaattaaagaggactgcccaagcctcccccacgcccgcccgccgcaatccccgaccgccctccgcaatccgcccgcctgccgcgatccccgcaatccccgcccgccctccgcaatccgccttaggacgccctgatgacgcgctctcattcgctgccccccatcaatcgtcccaatccatcaatcgtcctctcgcgagccaaagccatggagaagagccgggtgctggtggtgggcagcaccgggtacatcgggcggcggctcgtgcgggcgagcctggcgcaagggcacccgacgctggtcctgctacggccggagatcggcctggacatcgacaagctccagatgttgccgtccttagaggcccagggcgcgcggctggtggaggcgtcgctggaggaccacaaatggggcacaacgttaatggtggcatgatcagggacggtgtaagtgaaggtcaattcagccatgttctccttcatgaaatggatgccatcagaaagaaaaggcatcacacaaggcttttccctgaggttcacggaaggcatgatatgactgataaaagtggaaacattcttcctggaactgtggttgaccaaaagatttgccaccctactgagtttgatttctacttgtgtagtcatgttggcattcagggacaaatgtcgagacaggtccaaaaggccaagaaccaccatcaattagctctagcaatattagttttgttgttcgtgtattggctaagttattggagatggcgcttgccttatgcttcagctgatcaagatctagaattcgaattgggccatgtgaagcatttcacatttcacgatctgcaaagtgcaacagacaattttaattccaggaatatattaggtcaaggaggttttggaattgtgtataaaggctgtttgagaaatggaactttagtggcagtgaagagattaaaagatcctgatgttaccggtgaagtccagtttcagacagaagttgagttgattggccttgctgtgcacaggaatctcttgtgtttgtatggattttgcatgacctctaaagaacggttgcttgtatatccatatatgccaaatggcagtgttgctgaccgcttgagagtttgggacactattgggcatattgctcctgagtatctctcaactggacagtcctcggaaaagactgatgtttatgggtttggcattctcctgttggaactgattactggtcctaagaccttgagcaatggacatggccagtctcagaaaggcatgattctagactgggttagagagctaaaggaggacaagagactggataagctggtcgacagggatctcatagattcatttgatattcttgagctggagtgttcagttgacgtgatcatccaatgcacgcagacgaaccctatgttgcggcctaagatgtccgaaattctgcatgctcttgaagccaatgtcacactggcggaaaccagctcgagttga

SEQ ID NO: 134808 - DNA, 1477 bp, Zea Mays
acaatccacagatacggtcataccgactgctgttgccccccgatttcccgtccgcccgcagtttctgaaggcacaccaaaacgatcagacctgtagacagtactccagtccacgaaatcctcgtacttgtgagttgtgttggctggccctcgactagcgtgttgtagcgcactagcgccacagtaatcgagagtgctttcccaggtcgaggtggtgtaggtgtttggcggagcagtcggggcgttggaatctgaggaggagaagatggtggtgctggtggtggccacgacgtcagacccggcgtccattgggcccgccgccgccttcctcgccatgcccggatggtcccccggcccgcccatcgccgaggcgatggagagttttactaatgggaatgttcgattactgaagcatgagcgtagcattgtcgcagaggatgatcttgaccagcgatggcaggaagccactggagagtctgtttctgaggtcatattcctcagcaaacacactgcagtctccaaacgtccagcactcacagtgcatccaattggtgtgccacatctgaaggaggatgaaaccccaccccaaggaggaactcctggatgggcagcaattccaagtcctcgaattggaccttggctccggttgatgcaaaagatagctgtagaacaaggccttgttccagagtttgaggttacgcttgaggctactcaccatggaccagttaccagcacacccaccatgtttgttgagataggaagtacagaagaccactggggtcgacaagatgctgcacaggcaattgctctagttctatggaaaggtcttggtctggaggatggaaatgctgttggaacttggcagaggaattgtgaaaaggttctattaggtataggaggtggtcactatgttcctcgtcacatggatattgtcatcaaagatggtgtatgggtcggtcatttactctctggttactccttgccaatggacatgtcgtcgcaagtaaatgtaaagagttctgaagaggttgctggaatgtggaagcactccatcaaagtttcttatgaagcaacaaaggcagcatttcctggtggtgaagttatcgcgcatcttgatcacaagagcttcaagggctggcagaagaatgctgttacatgcttcttgcaggagcagaacatcaggataggaaagcctagcgatttcctgtgacgtgctacgacagtgctggacaggacaggtggagaggctgtgaatgcttgagctgatttccctatgcgcacgctgaataaatatgagacataggggctgtttggttcgtggctaaatgtgtcatactttgcctaaggttagtcgttcgaattgaataactaaccttagttagaaaagttagtcaaaatgtggtaaattaggctcaaaccaaacagccctatagtaagactcgatccttaatgcggttcaagagcttgaatttgccgtt

SEQ ID NO: 134809 - DNA, 1664 bp, Zea Mays
acaatccacagatacggtcataccgactgctgttgccccccgatttcccgtccgcccgcagtttctgaaggcgagaaatttgctattttgccactctcaatttgggtatctgttattatgccatcccgtgtctatgactggtgggaccgtctgtgtctatgatttgtgggtccgatggcatactggcgaagcccacaaatgataatggcaaaattgccaatggctcgactgaaggcacaccaaaacgatcagacctgtagacagtactccagtccacgaaatcctcgtacttgtgagttgtgttggctggccctcgactagcgtgttgtagcgcactagcgccacagtaatcgagagtgctttcccaggtcgaggtggtgtaggtgtttggcggagcagtcggggcgttggaatctgaggaggagaagatggtggtgctggtggtggccacgacgtcagacccggcgtccattgggcccgccgccgccttcctcgccatgcccggatggtcccccggcccgcccatcgccgaggcgatggagagttttactaatgggaatgttcgattactgaagcatgagcgtagcattgtcgcagaggatgatcttgaccagcgatggcaggaagccactggagagtctgtttctgaggtcatattcctcagcaaacacactgcagtctccaaacgtccagcactcacagtgcatccaattggtccgttcttctttcgtgtgccacatctgaaggaggatgaaaccccaccccaaggaggaactcctggatgggcagcaattccaagtcctcgaattggaccttggctccggttgatgcaaaagatagctgtagaacaaggccttgttccagagtttgaggttacgcttgaggctactcaccatggaccagttaccagcacacccaccatgtttgttgagataggaagtacagaagaccactggggtcgacaagatgctgcacaggcaattgctctagttctatggaaaggtcttggtctggaggatggaaatgctgttggaacttggcagaggaattgtgaaaaggttctattaggtataggaggtggtcactatgttcctcgtcacatggatattgtcatcaaagatggtgtatgggtcggtcatttactctctggttactccttgccaatggacatgtcgtcgcaagtaaatgtaaagagttctgaagaggttgctggaatgtggaagcactccatcaaagtttcttatgaagcaacaaaggcagcatttcctggtggtgaagttatcgcgcatcttgatcacaagagcttcaagggctggcagaagaatgctgttacatgcttcttgcaggagcagaacatcaggataggaaagcctagcgatttcctgtgacgtgctacgacagtgctggacaggacaggtggagaggctgtgaatgcttgagctgatttccctatgcgcacgctgaataaatatgagacataggggctgtttggttcgtggctaaatgtgtcatactttgcctaaggttagtcgttcgaattgaataactaaccttagttagaaaagttagtcaaaatgtggtaaattaggctcaaaccaaacagccctatagtaagactcgatccttaatgcggttcaagagcttgaatttgccgttagcccgca

SEQ ID NO: 134810 - DNA, 1649 bp, Zea Mays
acaatccacagatacggtcataccgactgctgttgccccccgatttcccgtccgcccgcagtttctgaaggcgagaaatttgctattttgccactctcaatttgggtatctgttattatgccatcccgtgtctatgactggtgggaccgtctgtgtctatgatttgtgggtccgatggcatactggcgaagcccacaaatgataatggcaaaattgccaatggctcgactgaaggcacaccaaaacgatcagacctgtagacagtactccagtccacgaaatcctcgtacttgtgagttgtgttggctggccctcgactagcgtgttgtagcgcactagcgccacagtaatcgagagtgctttcccaggtcgaggtggtgtaggtgtttggcggagcagtcggggcgttggaatctgaggaggagaagatggtggtgctggtggtggccacgacgtcagacccggcgtccattgggcccgccgccgccttcctcgccatgcccggatggtcccccggcccgcccatcgccgaggcgatggagagttttactaatgggaatgttcgattactgaagcatgagcgtagcattgtcgcagaggatgatcttgaccagcgatggcaggaagccactggagagtctgtttctgaggtcatattcctcagcaaacacactgcagtctccaaacgtccagcactcacagtgcatccaattggtgtgccacatctgaaggaggatgaaaccccaccccaaggaggaactcctggatgggcagcaattccaagtcctcgaattggaccttggctccggttgatgcaaaagatagctgtagaacaaggccttgttccagagtttgaggttacgcttgaggctactcaccatggaccagttaccagcacacccaccatgtttgttgagataggaagtacagaagaccactggggtcgacaagatgctgcacaggcaattgctctagttctatggaaaggtcttggtctggaggatggaaatgctgttggaacttggcagaggaattgtgaaaaggttctattaggtataggaggtggtcactatgttcctcgtcacatggatattgtcatcaaagatggtgtatgggtcggtcatttactctctggttactccttgccaatggacatgtcgtcgcaagtaaatgtaaagagttctgaagaggttgctggaatgtggaagcactccatcaaagtttcttatgaagcaacaaaggcagcatttcctggtggtgaagttatcgcgcatcttgatcacaagagcttcaagggctggcagaagaatgctgttacatgcttcttgcaggagcagaacatcaggataggaaagcctagcgatttcctgtgacgtgctacgacagtgctggacaggacaggtggagaggctgtgaatgcttgagctgatttccctatgcgcacgctgaataaatatgagacataggggctgtttggttcgtggctaaatgtgtcatactttgcctaaggttagtcgttcgaattgaataactaaccttagttagaaaagttagtcaaaatgtggtaaattaggctcaaaccaaacagccctatagtaagactcgatccttaatgcggttcaagagcttgaatttgccgttagcccgca

SEQ ID NO: 134811 - DNA, 1198 bp, Zea Mays
atcaatctgatctgatttaatgcccataagcctcgagtcggtccatccggttttgtgttgcgctatctcctattttgtggaggcgatggagagttttactaatgggaatgttcgattactgaagcatgagcgtagcattgtcgcagaggatgatcttgaccagcgatggcaggaagccactggagagtctgtttctgaggtcatattcctcagcaaacacactgcagtctccaaacgtccagcactcacagtgcatccaattggtgtgccacatctgaaggaggatgaaaccccaccccaaggaggaactcctggatgggcagcaattccaagtcctcgaattggaccttggctccggttgatgcaaaagatagctgtagaacaaggccttgttccagagtttgaggttacgcttgaggctactcaccatggaccagttaccagcacacccaccatgtttgttgagataggaagtacagaagaccactggggtcgacaagatgctgcacaggcaattgctctagttctatggaaaggtcttggtctggaggatggaaatgctgttggaacttggcagaggaattgtgaaaaggttctattaggtataggaggtggtcactatgttcctcgtcacatggatattgtcatcaaagatggtgtatgggtcggtcatttactctctggttactccttgccaatggacatgtcgtcgcaagtaaatgtaaagagttctgaagaggttgctggaatgtggaagcactccatcaaagtttcttatgaagcaacaaaggcagcatttcctggtggtgaagttatcgcgcatcttgatcacaagagcttcaagggctggcagaagaatgctgttacatgcttcttgcaggagcagaacatcaggataggaaagcctagcgatttcctgtgacgtgctacgacagtgctggacaggacaggtggagaggctgtgaatgcttgagctgatttccctatgcgcacgctgaataaatatgagacataggggctgtttggttcgtggctaaatgtgtcatactttgcctaaggttagtcgttcgaattgaataactaaccttagttagaaaagttagtcaaaatgtggtaaattaggctcaaaccaaacagccctatagtaagactcgatccttaatgcggttcaagagcttgaatttgccgttagcccgca

SEQ ID NO: 134812 - DNA, 1275 bp, Zea Mays
agtcctggctgatccggaggcattcactcactcactgctgctgctcacagtgctcgcgtccggctcgcaccgctctgcagacgactgcctcctctgtccttccttccttccttcccttgccagtggcaggcagaggatctgcagtgcctgccgtccagcgccagcccgaccgacccctcctgccgcacagcacagagggaggggggaaacgcaggatcatcagctagcatggtgcagcagtcaaagaagaagaagttccgcggcgtcaggcagcgccactggggctcctgggtctccgagatcaggcacccgctgctcaagaggagggtgtggctgggcaccttcgataccgcggaggaggcggcgcgggcgtacgacgaggccgccgtcctcatgagcggccgcaacgccaagaccaacttccccgtagtgccctgcggcaggacgcgcggcggcggcggcggcgcctcgtccggcaacaacaccaacgccagcgccagcgccagcgccagcaccagcaccagcagcctgtcgcagtcgcaggtcctcagcgccaagctccgcaggtgctgcaaggcgccgtcgccgtcgctcacctgcctccgcctcgacccggagaggtcccacatcggcgtctggcacaagggcgccggcgcgcgcgccgactccagctgggtcatgaccgtccagctcagcgacaaggacgccgcgccggcgcccagcgccacgtcgtccacggccacgacggcgacggctgcctcgcctcctccggtggtggtggtggacgacgaggagaggatcgcgctgcagatgatcgaggagctgctgggcggcggcggcggcggcggcccggtctcgcacccgcatgggaatggtgggatgctccagatcgcggcagcaggcggcggcctcgtcatctgaagaccggccggacaacaacggaaattgcattgcatgcatgcatggttcgttcagcaagctacaattaagtttgatcggccggatcaagtatttggtacacacaagagtcgtcgaaagtagtgtggttggtgcagaaagcagttgagattgcatcatacatatgtatctctattactagctagctagctacatcagtcaagcttattaggagagagagaccatatagtaagtaattaatcttaatcacttcattccctgtgaagctctgtatctatatattaaaaggcttacttgtatgtatataagcatgcagccctttgttatacatgtatcaataatatcaggctatatata

SEQ ID NO: 134813 - DNA, 508 bp, Zea Mays
atttttgtcgccccttgcaacaatacaaaagttgtttgataaaattatagtgtgcaacgattacatagaaataaacaacatatatattctcgacatcaatatatcaaaatcatttgcataaatgaatgccaccacaagtataggcagacagatcacaccctacaattcaccggatttttttcccttccctatgtgtccaatgtaatacaacaataatataggcttgatatggcaagacacctatgcgacctgtgcgatggccgatccgatcgatcagatggtcaccttagtccagagagctccatggcttctacaccaagcgagcattcgtccgctgcaaaatccatgtacttttgaagtaggagctccgatgagacgaactctggcgtgtccacgttctgcgacacctcccatctctctgtgagcctgtctccttctagcatcctgatcacctcgaacattctaggccagtgagacaggtggtactgactcaaccctgcttatggtt

SEQ ID NO: 134814 - DNA, 1579 bp, Zea Mays
ctcctccttcttcctcccttttgcatttgtgctacctgccctgccccgcgccgccgccgccgccgccaacccgccattacctgcgccatgccaccgcgaaaacgcccgccgtcgccgccggaggagccctcccttgcctcgaagcctcgacctgacgcgcagccgtccaaacccgaccccgattccgagcagtcgaccatcaacccgaggatcctcgcccaactccccaaccagggagcgcctggtgtacaagctcatcttcgaggcgggcaacaagggcatgtggatgctggacatccgcaagaagctgctgatggcccccaacgtcgccaccaaggtcgtgcgcaccctcgtggcaagcgggctcctcaaagaggtcagcgacgtgcgccaccgcagcaggaagatcttcatggccaccgacttccagccctccgccgagatcaccgggggcacctggtaccacgacggccgcctggacaccgacgccgtaaccaccgcgcgccgctgctgccaggcgcaggtccagaggctcggcgccgcgaccgcgcagatgatccaccaaggcattctcaaggaagaccccagggccgggtacactatcgacaaggtcagggatatcatcaagaccatggtgctcgacaaggtgctcgaggaggtcaagagcaccggcgcgggggattttagcgccgtcagggccggcacaatgtgctaccggctggtcactggggctccgcagggagggatgatggagggaatcccttgtggggtttgccccaggattcatgagtgctcgccggaggggatcatctcacccagcacctgcgtttactacaagaagtggctgcagatggacttctaggcggtgacggtgagccctcttctgtccgtcacgatggggtgttggagtccattggagaatttagtttcatattgaccagtcgggacctctgaattctgaaaggataggtataacaacagttcagttttagattgtgatactcatattaataatcatctctatagttatttctacttatttgtccttttagcttggtataatcattcatatgtatttattccatcaagtttagatgtctttactcagtaccatatcaacttcctaaatatttaggtaatcggcaaacctttcagctcttctactgaagtcatgtattgagcatgtgaacccaaagtgtttctgtttgacagccaaagggccaacaaagatgcgccttctattcaactttgtgataggtgtcactaacagaacttagattgtgaaataaagtacaatattatgcttggaaaccgtgataggtgtcacgacgaagggggcagagtaaggagagagggggatagaggctagcttagcttgtctgtaatcatacacgcgtgtttgaagcaacaaactctcaacctatcgactgctgttatgagatatctaaagtacctaagaagctaacaagtaacaagccaaccgaaatacaaaatctcctcatctaacgaccatgccacctattcgactggacacgttgcctgcctggtcctttcttgtgcctggaataggtgttgctgt

SEQ ID NO: 134815 - DNA, 92 bp, Zea Mays
gttccaatccgttcccccggttattctattccctttccctcccccgcctcctctgctcctcgctctcccacccgctcgggtaggcctgggcg

SEQ ID NO: 134816 - DNA, 1685 bp, Zea Mays
gtaacgggttttttgcccagtcctacgctcgggcatccgccacacggccacaccaacactgcactccaccccggcaccgccacagtcctcctccgtcgccgtcgttcttcagcggcgccttcgcttcctcagcacggtaccctagcatcagcgattcagcgctcactacaagccaccgcggccatggcgcccgcaccggcagcgctctccgcggccaacgccctctcgctgctcgcgcccgctagagtctcctccgggaggtggaacaacctgtccgtctccgtttcggcccggcgggtggtgtctgtcgcgccgccagcggcggccacggcgcagaggaggctggtcgcggcggcggcggcgacggagatggcgcccgcggcgagcggggaagaagggagcaagccgttcgtggaggagatgcgggcggtcgcgatgaagctccacaccaaggaccaggcccgggagggggagaaggagccccaggcgccccccgtcgccaagtgggagccctccgtcgaggggtacctccgattcctcgtcgacagcaagctcgtcttccagacgctcgaagccatcgtcgagcgcgccgctgtcccgtggtatgcagagtttcggaatactgggctggagagatcagaggcgctgaaaaatgatctggaatggttcaggcaacagggccacacaattccagaaccatcggcccctggcaccacatacgcttctctactggaagagctgtctgaggaggacccccaggcctttatctgccatttctataacgtgtactttgctcatactgctggaggccgaatgattggcaaaaaggtgaccctccccccttgtgagaaaatgacaaaatactgagtagtacatggcatcatgtcacaacattgttttggcaagcataatttacacagcattggcacattcaggtgtctgatgccatcaaatccccaagcatgcctatgcattctctattgaatatgattccttgtgcctttttttctttgtcgatactacagtgcacttctggttaggaaaatgattacctttcgttgctgatctgggcagttcagaagtctgaaactacctgttcctccattatctcgtatcatttaacacagtaccatgtgctcctggtatcttaggtttccgagaagattctgaacaacaaagagctggagttctacaagtgggagggcaatctctcccagctgctgcagaacgtccgcaacaagcttaaccaagtcgctttgagctggtctcgggaggagaaggaccactgcctggaggagacggagaagtcgttctcttactcaggaggcctcctccgccatatattcacctgatctatcattgctggttgatccagtctcaaacgctgtaaatacatagtcctttgactgttaaaactttattactggtgagggggatctcctcccccaggtacggtttacctgcattcaagttgcccagtgtcttactggattgctggtgtttggtgtttctgtgatgcaatctgtattctgtaggtcgtttcatgactaatagagtcgaccccttccaatgtcgtcaatggctagagctcttccaatcaacatgcctagcgtatttgttttgtagtgtgcgtacgtgagtgcttagtaccgtaccaaatataaatacttctttgtgttttctgt

SEQ ID NO: 134817 - DNA, 1362 bp, Zea Mays
gtaacgggttttttgcccagtcctacgctcgggcatccgccacacggccacaccaacactgcactccaccccggcaccgccacagtcctcctccgtcgccgtcgttcttcagcggcgccttcgcttcctcagcacggtaccctagcatcagcgattcagcgctcactacaagccaccgcggccatggcgcccgcaccggcagcgctctccgcggccaacgccctctcgctgctcgcgcccgctagagtctcctccgggaggtggaacaacctgtccgtctccgtttcggcccggcgggtggtgtctgtcgcgccgccagcggcggccacggcgcagaggaggctggtcgcggcggcggcggcgacggagatggcgcccgcggcgagcggggaagaagggagcaagccgttcgtggaggagatgcgggcggtcgcgatgaagctccacaccaaggaccaggcccgggagggggagaaggagccccaggcgccccccgtcgccaagtgggagccctccgtcgaggggtacctccgattcctcgtcgacagcaagctcgtcttccagacgctcgaagccatcgtcgagcgcgccgctgtcccgtggtatgcagagtttcggaatactgggctggagagatcagaggcgctgaaaaatgatctggaatggttcaggcaacagggccacacaattccagaaccatcggcccctggcaccacatacgcttctctactggaagagctgtctgaggaggacccccaggcctttatctgccatttctataacgtgtactttgctcatactgctggaggccgaatgattggcaaaaaggtttccgagaagattctgaacaacaaagagctggagttctacaagtgggagggcaatctctcccagctgctgcagaacgtccgcaacaagcttaaccaagtcgctttgagctggtctcgggaggagaaggaccactgcctggaggagacggagaagtcgttctcttactcaggaggcctcctccgccatatattcacctgatctatcattgctggttgatccagtctcaaacgctgtaaatacatagtcctttgactgttaaaactttattactggtgagggggatctcctcccccaggtacggtttacctgcattcaagttgcccagtgtcttactggattgctggtgtttggtgtttctgtgatgcaatctgtattctgtaggtcgtttcatgactaatagagtcgaccccttccaatgtcgtcaatggctagagctcttccaatcaacatgcctagcgtatttgttttgtagtgtgcgtacgtgagtgcttagtaccgtaccaaatataaatacttctttgtgttttctgt

SEQ ID NO: 134818 - DNA, 303 bp, Zea Mays
cttggccacggccaccctgtaccccatccaggccctcaggctcacccctgctgcactgtccgtcgggctcccatcgagctcggccctgcgcgcgctggccaaggccgcgtcgaccgccacgttgggcgagatcgcactaggcgagatcgcgctgggcgatgtaatgttggacaggggcgcctcgtcggcatcataagcctagcccagggacacgtcgaccatggaagttgtatcatcgtcctgatgtttcatgagtattacgtgaacattaagagttgtttgcatcctgcaagttacaaatat

SEQ ID NO: 134819 - DNA, 1014 bp, Zea Mays
atggcaccattatttgctacaagcgtatcaaagttcgtagctatttcaattgaaagtacatctctaaaaatcaataaccattatttgctacaggcgtatcatggttgcctgtgcatgagatggcgggctctaacgcctagaaggggatccaagcgtgaagatggcggatggaagggaggcgcgcaggtgttcttgtggaagggaggcggagatggccggccaatggaatgggatcgctgccgttggacggagggcgccaaggatggaagggccaatggcgccaaggatggaaggggatccaagcgcgattcaaggcggggcgatgatcgtggagattgcttccctctcccccgtggcaggcgtggacgggggagtgggagaggggcagtgcccgcgtggacgggggagtgggagaggggcagtagaaccaagatatctggagcggcttcgtactggtggaaccccggatgcttggtgagcggcacgcccagctccgccatgcacgcctggatccggtcgccgctgccgcacagcgccgggtaccggcggaggcagccatcctgcatccgcgcgagcgcctcggccagcggccggctgatggcgaagccgccgccgccgtacgccggaaaagtagatgttctgcaggtggctctcggagatggagccgatgtagtagggctggcggtggtcgaacttgttgagcacggtgaggaggttgtccgggaagaagacggtgtcgtcgtcgcccaagacgaaccagcgcacgccggggaggccgaggcggaacgtctcggagacgatgcggcccggcaagcgggttggagcgcgatgagccgtgtggagggtgggggtgcctcctccacgtcgcgcgcagtcgctaccgcccaccgcaagctagggtttcggctgggagtctgtggaggggcggtgcagatgaggcgggcggttggtgcggggtgggggagaggaagggggcgggcacgactggatggcgcgtgcggctggatggcatag

SEQ ID NO: 134820 - DNA, 575 bp, Zea Mays
tgtggccattgcaagcaactcgctccagagtacgagaaggcagccgccgttctgagggatcacgacccgccgttggtgctcgccaaagtggacgcgtacgacgagaggaacaaggatatcaaggacaagtaccaggtgcacgcgtaccccaccctcaagatcatagagaacggagggaaggacgtgcgtggctatggtggtccgagggatgccgatggcatcgtggagtacctcaagaagcaggtcggcccggcttccatcgagctcagttcggcggaggctgctcaggcgtccatcggcgacaaaggagtgattcttgtaggtttccactgctgttaaggatgatgtctcctgttcttttcaaaaaaatgtttcctgtttattgagtgccatgagagagtgatggaagcgagcgagtgtgatgcgtgcgtgtgaaacattctgttacaggttggagttttccccgagtttgctggtgtggagtacgagaatttcatggccgtggcagagagaaaacggtcagactacgatttctttcacacgtcggacgcgagcattctgccgcgtggtgatgt

SEQ ID NO: 134821 - DNA, 1032 bp, Zea Mays
atgggtgtctgtgcaattatcatgaagctccttatggacgcggtggcgagttctaggaaggctgaaatagaatgggagaaggagtatgggcctccgtcgttcacgtacaaagatctgtcggccgccacgagaggattcgaggacaagatgctccttggaagaggaggcttcgggagtgtcttcagaggagtgctccaccactccgagcagatgatggttgctattaagcgggtgtcgccagagtcgaagaagcaggggatgaaggagttcatcgccgagatcgttatcatcctcgggcaccttcgccaccgcaatcttgttccactgattggctactgccgccacaagggagaactccctcttggttgggctcaaaggagatgcacatcgtcagaggcatcgcgtccggccttttatttctacctgcacgaggactgggagcaggtcgtcatccaccgagacatcaagacgagcaatgtcctgcttgatagcgagatgaacgcgaggataggcgactttggccttgcattgcgaggtcacatgatcatggagctgccgcgacgcccacaccacacgtgtggcggggacatggggttacattgctcccgagatagcaagaggcttggcaaggcaaccaaagcaaccgatgtgtttgcgttcggtgtgctcatgatggaggctgtctgtggcaggcgaccaatctgggtggacaaggccagtcgagagccccatgccctggcagactgggtgctcgccgcatggcgagatggatccatcgccgacgccgccgtcgacccgagactggatggttacatggaggaggaggtagacctggtgctgaaacttggcttgctctgttctcctcacccctcgccgcatgtgaggcctcgcatgcgactcgtcatgcagtatctacatgggcatgcgccgttaccggcagcacacttgcgagatgctgatactttccacaccattggtgtgagtgtcatgacgatgatgagctgcccatgtcttgtccactcactactataa

SEQ ID NO: 134822 - DNA, 439 bp, Zea Mays
atcttccgccgtccctgcgtacgtgcggaccgtccggccccagggcgcggaccgtccggccgtcaggcagaagccccagccgcgcaccaggccgcggaccgtccggccccaggccgcggacagtccgcccttgcgcagagagcaccaccgcgcctcgcaccaggccgcggaccgtccggcccctgcgcgcggaccgtccgcccctgtgcagagggcaccgccacggttcttcttgagtatttggcgctccgaaaaggcgtcaacagtaccgctgtgcttcgattatagatctctggcgacagcatcagcaaggcggagctgctcgagtcctgggaccaaatctccgacaccagcttcgacggccggctgcagacgttcttcgacatggtggacaaggacgccgacggaaggatcaccgaggaggaggtcaaagaggtaa

SEQ ID NO: 134823 - DNA, 767 bp, Zea Mays
acccacccccaccctctgcctagcgtagcgcaccgtccgcggcgacggcggtgtccgcccgcccacccacccaccgccgcacgtttcctcctgcgcgccgcctcggatcagcccgagcccaccgcgtcggcgccgcccccacccgtctaaacaaccacggaggccgcggccggccgcgtctctctctctctctctcctcgccgaggccaccgtccgtctcatctagccggccgcggggatgaggcgatcgtcgagcggggcgcgcgtgtcggacagcggcggcggcgtgagcgggagcgaggcggcgctgccgacgtatgaccctctgtcggcggcggggcggcgggaggcggcgcggacgcaggcgctgggacgcgccgtgcactgcatccctgtcgtgcttctcgtctgcgccctcctcctctggctctccgcctcctcccacacccacctcgattgagagtaccagcggggatcttaagtgaacctggcgggtagagtctggttctgttacacttgtaccactgaagagttccgagttccaaaagagaaagagaaaggtaaagcaggctagacatgatcatcagctggcaatacataggtgcggattagcatggaaagtagctcatttactagcaggcaattttttggaagtcttaaggccatactgagttggactggtttggctcagcgttacatactgtatacaacgaatgcccaatgtaacctttcccaacacaatgctgttctgatattctttctgtaca

SEQ ID NO: 134824 - DNA, 1889 bp, Zea Mays
actgaatttgcttatttccggctcttgttgaaaccgccacccgattcctccgctcgccaaatcctcgccgtgccctcgtagcaattccttgcgtcggcgcatcatcgcggcctcctctccctctctctctctatctctctcaatctctccgttggcaaatcgttgaatcgacgtgcttggccccggccgctctgagcccgccgccagcctcctcgtctgaagaagaacgacagccgtcgggctccggtggtcccgccgaagaacggcaggtagccagccgcgctcatcacgccggcgactcgattggcattgtattggcctttccgtttgttggtaagggaccctaacttcgcttgatgttttttttcttttctttttcctcggagacttatttgttcggtagatcgatctctttactctcttctatgatcacagtcagatcgaaaagaagaggaaagaatcgggaagcccgcccccctggtggatatgcgaggccatgtttttcatgtcacacccccgaccgattcgcctcgatttcgttcttctgttcttctgcgccgcaatggctccttcgctcgttcatatctgttattctgttgtgaatactcggtttgagtcaatgatgcgatttctttcattcaaaatcttctgggtgctcctgtgttattctgatttattcgctctgtttcgacgccagttaatctatcgtgtcggctgttgacaatatctttggtttcttgtccgcgacagagttctcgaagcaaaacgacctgatgagattcctcaaggggagcaaggtggaggtattgcaggaggcagatgtgccgtttggttcttggaggcctggtgagatcgtctccggcaatggacacgcctactttgtgagatatgatgaaagtcccgttgactccagcgtggctgttgaaagggtgccaagaaggttgatgaggcctcgccctcctgcggatgatcctgtacgctggagtttgggtagtatcattgaggcctttgacagctactcgtggaaggttgccgaggtggtgagagtgcttggaaagaatcaatatctagtcaggctccttgggtcctcgctggagttgagtgcacatgcatcggttcttcgaatgaggaagctttggctagatgacatatggattgtgactcagaagtattctgcaagatgcttggatggtggtgcattccgaggtcaatcaaaagataaaaatttagaccataacttcagaatggacagtcgtcaacttgagaaccagaatgcctttgagggtgatacatctagaggcatcaagagaaaatcgtctgctatatcaacacatcctcaatgcagtgaaatcactaagagattgcggacaccaaatagagatggaaggtactcaaagctggttgatagaagtttttcccctttggctgaaaaggtagatgatgttgattccccatgcattattctacgcgggaaatgcatccatgctggtcataaatggcatactggaacaactgaagaatttagtgatacagagagtatatcatcttctgttggcagttctagtcctaacagtacccctcatagatcacaacattataatttggtctaccaaagtggagatagctgtagtagaactgatgatgatgaagcttctacatctgaaagagaaacatcagaacatgataacaatgggtcgagggaagaaacccatgtgctggaattacatgcttatcgcgcaacaatgttagccttgcatgcttgtgggtcaattagctgggagcaagaggctttgttgactaacctaaggttaacactgaacatctcaattgatgaacatctagctgaattgaggagtttggttacccgtgctgttacttccagatagctt

SEQ ID NO: 134825 - DNA, 1727 bp, Zea Mays
gtacccctcatagatcacaacattataatttggtctaccaaagtggagatagctgtagtagaactgatgatgatgaagcttctacatctgaaagagaaacatcagaacatgataacaatgggtcgagggaagaaacccatgtgctggaattacatgcttatcgcgcaacaatgttagccttgcatgcttgtgggtcaattagctgggagcaagaggctttgttgactaacctaaggtcaagctgggtcaagactggttccagattaatactggttgctggataaaatggtcaaattagattggtttatcatccaaagacaaaaaggtgatctgcttgttgtgtgatttttcacagaacaagcatatttcttctatgatggcatgcacccgtttgactgtccagaagagcacttgagggaacatctgtatcagcaccggagtgtttcctctttccagcaccggagtgtttccaccatcgtcattagaggtaggaccctcccacaacctagaagcaagaccctcgcacgcccgatctgaggatgacttcgagggatatgacgattgacttctcgagtcagacgatgaacttacatttgatgcgcaacctgaaggcccggctaactggaactgggtggctgagctacaataggaggttcaaactgagctgcctgctgaactaagtatgattcaagacgaaaaccactctaagtatgacctctcggatgaggacgtctccgtggaagggacggacgcgtccgatgatgatattttggcagataatcaggacccggctgatgaggatattgaagatatcgagccgaaagaagatgagaaagattcagaggagctcattgttatcgatgatgagccatgggcgccagatccatttattcctgttgttcctaatccgaagactcgagcaccggagattcctgtaccagaagcccctgcgccagtagctcttgcttcagagggtcccccacaaggaaatacaatgcctgagctcgtcccgcaaccggattgggtaaggacaaaatctcacaatcatcaactcaggtgtggctgaagacaatattcgtatggagactactcaaatataccgctgccctgaacactgactgagcatgacgctgccttgattgaactcgaggaattaaagaagcagaatgcccaactgtgactcatctggagaatgaaggacaacctcaggctgccgtgaaacttagattttcctgacttgcagccgacttctatgtagacacaaaattgttgggattacatagtttggccttgcatcaaggaaaagttgcaggttatctgtacagtaatttgccagtcgtcttatgcatatgatgcatacctttttactgttctagtgttttgtaatccagatattgtagccggtgttcttggtgaaatatgcgccaggagagactgagacttattttgccaccttactttgtgcaaagccagctgcccttcaactttgctggacaggcaatcacatattttcagaagtgaagcggtaggccccggtagttctgatgagcaagcaagtgaaaagtttgtatgtggtgtatgacgatgtaccttggatctctttacttccaattgaacctgcacatgttcctggcttcgtgtcatcacaatgaccttgtattgtttcagtgttcacctacagttcatgtaccttaggttccttttctgtttttgccttacacgtaatt

SEQ ID NO: 134826 - DNA, 417 bp, Zea Mays
atgctcgcgggtctgtccatccttggagataccagcctcaaaaccaccagtagtggagtcaatgataagaacagcgcagtcagcttgggaagtgccagtaatcatattcttgatgaagtcacggtgtccaggggcatcaatgacagtgcagtagtacttggtggtctcgaacttccacaaagcaatatcaattgtgatacctctctcacgctcggccttgagcttgtcaagcacccaggcatacttgaatgaccgcttgttcatctccgcggcctctttctcgaacctctcaatcacacgcttgtcaataccgccgagcttgtagatcaggtggccagtggtggtcgacttgccagagtcgacatgtccaatgaccacaatgttgatgtgagtcttctccttgcccatggctgaagg

SEQ ID NO: 134827 - DNA, 1883 bp, Zea Mays
actgacaaaaatctctatataagcacagtgtccggcatcttggccccttccccacccttcgccctttcaaggaggccggcctcgcctcacactcccgcccgcctccggcgattcatccacccaataaagtatccaaccctaacgatccggatcgccttaccccgcgtcatccacgcgaattgattcgattatcctcggattttccccgtttttttgtgggtttcctatcttcttcgatcggagtgctagggtttgggcgcgctcggtgggcggcgtactccagggtcatcgttagttggacgggctagggtgctttctcaccgggggaagggaagcgaatccaaacgatggagaagaagaaggtggcgatcccgctggtgtgccacggtcactcgcggccggtggtggatctcttctacagccccgtcacacccgatggttacttcctcatcagcgccagcaaggacacaaatccaatgcttcgtaatggtgagactggtgactggattgggacttttcaaggtcataaaggagctgtttggagctgttgccttgacaggaatgctctgagggctgcatctgcttctgctgacttctcggctaaagtatgggatgcacttactggtgatgaactacattcatttgaacataagcatatagttcgggcatgtgctttctctgaggacacccaccttttactcactggaggcatggaaaagactttgcgtgtgtatgatattaatcgtcctgatgcagctccaagagagcttgacaaatcacctggttctgtccgaactgctgcctggcttcatagtgaccaaactatattgagttcctgcactgacatgggtggagtaaggctatgggatgtgagaacaggtaaaattgtccaaactcttgaaaccaaggcttctattactagtgcagaagtaagccaggatggcaggttcatcactacagcagatggctcaagtgtaaaattttgggacgcgaatcacttcggccttgtgaaaagctatgatatgccgtgcaatgtggagtcagcttcacttgaacccaagtctgggagtaaatttgtagctggaggagaagatttgtgggttcatgtattcgatttcttcactggtgaagaaatagcttgtaacaaagggcatcatggaccggtccactgtgtccggtttgcacctggtggtgaatcatacgcatcgggttcagaagatggcaccattaggatctggcagcttagcccagttaatgctgatgacgacgaggcggccaatgcaaatggcaaggcaaatgctgcagtgaacgaggttacaaccaagctcgagggcggcttccacattcccaaggagggacaggctggggggtaggacctcatgtgctttgttgtggtgcttgtggttcttattgcgaggagattgcccatagggctgccacggtcattcagtttctccctgcagagccatcaacacctgtttgcgatccaagggtatcatggcttcaagagtcatcaccctggtaactggggaaaaaccatacccctcgtaagcatggtggtgggtttttggatggggccttcgctttgatagaacatagcaactgtagtgtcaaaaataaacaagagaatacaacttgggtaggtatcgtgtcttcggtcattaaagtgaagtattctgtatcgccgccagtaatttttgtggcttttgatgttggaacgccgattttcaaatcaaagctgacgaccacttcttgatcatgaggcaatatagatagcgtcatgcccatatcaaatgacagatttctctgctcactggacatgcttttttggtggcatccgcggacacgatacgtgaaatttagttttatgttattgtacacct

SEQ ID NO: 134828 - DNA, 582 bp, Zea Mays
tgacctcattagttccttactgatcagaacaagtttattctttgcagagttgctgatttgggataatcatgttctctctaagtgaatgaacatgtctgggaatgatgataagccacatgctgctgcagacagaataaaggcagccacgttatcagtgactaagggattgagcagggctcaagctgaatgggctacgactgttgctgcccgcaatgtgaatgcctatgggcagaaggaagagggaccaagccgctggcaggagaggaaggaagccaagagtcagatgtatctgatgagtacagagaaggttgcgaagctgggcactgtgaagccaaaagcttcagaaacttcttctgttggcgcatatacccaatgccagaagtgtttccagcatggtcactggacatatgagtgcaaaaagagcgggtgtacatatcacgaccctcaagaacgtagcagcttaagaaccccaagctgaagaaatgtgtacctgtttcttatcgatttgagaatcctgatgttgaacacaagaaagaagaagaaaagcaatccaagcgcaagagctcaaatgaacacaagtca

SEQ ID NO: 134829 - DNA, 963 bp, Zea Mays
atggtcgatggaggaagggagtggacgaggcctgccggctcccgatgcaggaaggaggaaggggagctcgcggacgtctctggcatcggcaaagtgcgggaggggattgagaggggaactgactcggagaagagggatgcccttaataaccatgcagttcctcctgagcctgctcagccatccctgttctctcttgacacacatgaatatcctaatattactgttgttcttgttctgtcctggcaaaaatacttgatgcatttgtctatgattttcctggagatcgaattgtccttttgtgatcctaggtttggatacagtgctgcgattttctgctctcccaccgtaagaacacaagatgtggatagagaattgttgatagtcttggtgttggttggacttacttttagtgtccctatagtgaattactttcgtgtcgtcatagtcaattcaaagctccgtacaaacacctcatgtttcacagtgtaccacatttgcagattcccatcaacaagaaaaacaagaaagatagctactaggagaagctttaatacgctcgatacctggcatgatgagttcctcaatcaagctggcccatcggatcctcagcgctttccgttcattttggtcgggaacaagattgatttagatggcgggagcaaacggatggttctggagaagaaagtgagggaatggtgcgcctctaagggcgatattccatacttcgagacctctgcgaaggaggaccacaacatcgatactgctttcctatgcatcgctaggctcgccttggagcatgagcatgaccaagacatatacgcatttgttatttgtccgttttgtgtgcccccagttacttcaagacagttgcggaacaagtcccggacactaaacagacaagcggatgtgcttcctaggagccagccatttcctggaaggctggaactacgtggatgttactga

SEQ ID NO: 134830 - DNA, 486 bp, Zea Mays
atggcccggttcacggtccgcgagctcacctccggcgtgatcttcacatcgtactgggtgaggtccttgtccgggagctcggcgaggaagtggttggccttgacgacgcagcgcgcgcccaccgtcccgaaccctggccggcggcagaatgacagccccttgctcggcacgggcggcccaatgaccgtgcgcggcggaggcgcctgcgtctgcgcctgcgctggcgctagtagcgcggcgcgaggctcaccgggcgccttggccctgccgcggcgcctcccgccccctctgcacctcttgcctccctccggcaccggcagcacggccgccgccgccgcgggctctgccttgggctgtgtcacgctgctctgcagcggttgcttcctccgctccgcgtgcccgcccttggctgatgacccctggtggagccgcgcctgcggcggcggcggcggcggcgtcatgtccaggacgacctcgagcatgtga

SEQ ID NO: 134831 - DNA, 441 bp, Zea Mays
atgtactcggcggcggtgtcgatccgccccgccccgtcggctccggctccggcaacgaggcaggaggcgaacatgccgtggagcgcgcggagcagggccgcgtacccgtcgtgcgccgcgaggtccaccttccgcaggtacggcgcgccgtccacggccaccttcacgagcctggcctcgtcgcgcagcgcgttgcgccggtacgcgcggaccggcggccagcccacggcccgcgccctgcagcacgtgacgtcggtcagcaaaagcggtccgtgggcgtcgtgtcgtgtgtccagttgtcgtccacacgcggagaggaataaagagaagggaagggagagggagagggagactttggggatggcggcttgtcgtggtcggcgtgggcgcgcttgcgatcggcggcgggctcggcggaggagcccgggagcgcgagggtga

SEQ ID NO: 134832 - DNA, 1812 bp, Zea Mays
gtcatgctcccgcgcccacagagagcctgccgtctccttacaattctgatcgcccccgccatacgcgcgcgacgacaagaccaccacagagccatgggcatcttcacggtgaccaagctatccgagggccccgtgcggccgtccgccgacacgccgtcggagacgctgcccctggcctgggtcgaccggtacccgacgcaccgcggcctcgtcgagtccacgcacatctactgctgcgacgacgtcgcgaagacgctgctgctgcctgctgcgccggccgagggcgacgccgacgcactggcgccgacgaagaaggaggtgatcaccaagaagtccccggccgcggtggtgcgcgccgcgctggcggacgcgctggtgcactactacccgttcgcgggccggatcgtggaggacgtgccggggcgccccgccgtgctgtgctctgccgagggcgtctacttcgtggaggccgtggccaactgcaccctcgccgacgtcaacttcctggagcggccgctgctcctcgccaaggagcagctcgtgccgtgccccacgccggagctctggcccgtcttgccgcacaacagccttgccatgatacaggtcacggccttcacctgcggcggcttcgtggtgggcctgcgcaccaaccacgcggtggcggacggcacgggcgcggcgcagttcctgagcgccgtgggcgacctcgcccgcgggctgccggagccccgcgtgaggcccgtctggggccgggaccgcttccccgacccggacatcaagcccggcccgctcccggagctgccggcgctggcgctggagtacatagcgttcgacttccccaccgcgtacctcgacgagctcaagtcgcagtacgcggcgtccacgggcggcaagttctgctcgggcttcgacatcgtcatcgccaagctctggcagtgccggacgcgcgccatcgccgccgccctcggccccgacgacgtcaggctctgcttcttcgccagcgtccggcacgtgctgaagctggagccgggctactacggcaacgccatcttccccgtgaaggtgtgcgcgccggcggagaaggtggccggctcgtcggtggtcgagctcgtcggcatggtccgggacgcgaagcgccggatggccgaggagtgcctgcgctgggccgagggccgcaccggcggcgtcgacccgttccagatgaccttcaactacgagtccgtgtacgtgtcggactggagcaagctcgggttcgccgacgtggactacgggtacggcacgcccatgtccgccggcccgctggtgaactgcgacctcatcgcgtcggtcatcgtcatgagggcgcccgcgccgctcgccggcacgcggcttctggccagctgcgtcaccaaggagcacgccgacgacttcgcctgcaggatgcgggaggacctagtctgatatataggtgagtatggagatgatggaaccctgccgctgtacctgtacctacgtgtgagtgtggccagagtcagagctatacgttgtggacgttaaggtattgtatcgcaactagtagatgcactacgtacgtgtgtgtatacaaacaaaattcgcatggagttgttgagtaacttactgacgatgcagccagcgtcagggagcagcgttgactaaaaagacacagcgagccacgaatatacgactcatttttcaatgggaacatatctgaaaaaaatcatacatatccttttcattttacttaaactatatacacaatgtcaagttcaaatttattatactgtagttgtaataaaaaagataaaattaaac

SEQ ID NO: 134833 - DNA, 283 bp, Zea Mays
tacgcatatattacacccactcatgctcgtatgcaccacgcaatcaacagcaagagataagctcaactatagaaaaatggggaggacgccggccaaggggaacgcacagccacctgcgctggggagctgggaaagatggcgaccaacaaagggacaagatgctcggaggggcgcgcgttcaaggagctgctgggcgtggccgagcagcctggtcctgagatgggaggcgaggaggaagatgcaccaggaagtgggcgagctcgagcaaggagagcatgcggcg

SEQ ID NO: 134834 - DNA, 483 bp, Zea Mays
atggctgcaaagctcatggatacttcaaaagtgatgttacgtctaggagaatttgcaatttgcaagcagccgaatttgcaagcagcaaagcaagcaggcggagcagtggagcacgaccgaagcaggcggagcaggcacagcaaagcaaagcaaacatcaaagcaagcaacaaagcaggcaagcagaagcagtcgtggagcagtggaggtggagcacgaccgtgcggccgccgggcggccaacgcccaacgagccgcacacagcaggaaggcagaggcggccatgtaggaccgcagcccgcaggaagcagcaagccagagccagagccagagacggaggcgggcagcggccacggccgtggacggacgagcaggcggtcggccggccaggcgaggagcgggcgagccgtgagcggccatcttgtgcagttgtgctgcgtcggctgtgctgtgctgagacggaggtatggcgcgggctgggctga

SEQ ID NO: 134835 - DNA, 1772 bp, Zea Mays
accgagacgaaatcctcaagccccaaccccaaccccaaacccaaacctctctcggaagttcctctcgcgtggccggtttcctcaacctccgtgtcggctcaatagtttcgcgagcgggcggggcgggggtctgagctcgatggccacttctggcgagcaatcggctggcggtgggtctgcggcgagggcgtcgaagctgcgctacccgctgcggtcggcgagcaaggggaaggccgcggccgtttccccggcggcggatgcgcctcccaccaccatctctgctccgcgtcgggtaaagccatcttcagatgtcagcaagagcatgtgtttagacctttctgtgaaggataagtctgtcaagcctccacggaggcactcaatacaaactaagccaggagctagcccaaggccaataccttctggaactgtgactccggtgtctggggttcggtcaaagagatcggacggccaggggaggtttgatactccgacatcagaagtgtccatgtccatgtcaaggcgcaagttcagcacgctttcttcaatctcgtactggatgacacagatcaggcttgcagaggctgcttccaaacactcagtttctctgggcttctttaagcttgctcttgaatcagaatgtgagcctttggaccggatgagggaagaactcaagtcctatgtagtccgccattgcttagcgacagaattggaggacccagtcaaggacattcttcaggtttatgatattgtggacgattttgagaagctgaagatctctgcagagccctcagagcaacaaaaaaagtctgaaaaggctgctcgtaatgtctccaatgtgtcagccaattgtaatctgaagccaaggtcactaaactctggtgctactgaaagtaaggaagctgggaagaaagagggcattcagaaagcgaaacctgatgcaagggtcagaggctccaataacaggaatccagtaaaatgcaccaccgcaaaggaagtagttgctaagaacactggtaagaaaaccaagaaagaggccaagggtcaggaggaagttagcaatggagatagcgatgcatcctcagcccttccagatcaggaatctgttgatgttgtgaaggagatcacccatgaagataaagagaacatggacgagaatgaaatggctatggatgttgccatagcgcaagaattctagaacagccggaccagcttcagattcaatcgttttttattgctgaagatgaagtattagtgtgtggttgcttattttggttttcatcattgttaatatgatagtagagcttgtctgtgtgattgctgaaccatatacgctcctgaagagtgtgtcataagttgatgattgcctgtattcctttttcaagtttgcagctttgcatgtggtaatcgtgcatctgaatatagtcggatttatcttttctcgcgattcgaaccgacagaagatcctccctggtatttgtgttgtgttaatcgcgtcaagagttgttgtacgagatgttgagggatgccaggctggtgagctcaccgaggatcgagatgctgccgcagaggccattgctcgcgaggctgagtgactgcagctgcgtcagaccggacatctcgtcaggcagctcgccgacggacctgttcgagctcaggtccaggctgatgcccaggttcgacagcgcgccgatctccggcggtatggggccggagaagctgttgttgctcaggtccagcattgtcagcttcttcaggttccgaatcgacttggg

SEQ ID NO: 134836 - DNA, 1740 bp, Zea Mays
gccgcctcctctctccgcacaggctcaccaaacgacgaacactctccctcgacccgtgaccgtgagcaagcgggtggcgacggcgcgcggccggccatggtgagcgagagcaaccgcggcggtgcggaccggacgacggcggcgggggaggagcgcgggcagctgctgttcgacgtgccggagatcaggttcaccaagctcttcatcaacggatccttcgtcgacgccgtctcaggccggacgttcgagacgagggacccgcgcacggggggcgtcatcgccagcgtggcagaagctgacaaagaagacgtggacttggcagtgagggcagccagggccgctttcgaccacggcgagtggccacgcatgtctggatccgaacgggggcggatcatggcgaggctggccgacctggtggaggagcgcgcggacgagctggcggccctggagagcctggacgccggcaagcacccggccgtgacccgggcggtggacgtcggcaacgccgccggcagcctgcgctacttcgccggcgcggccgacaagatccacggcgagacgctcaagatgccgggccagttccagggccacaccctgcgcgagccgctcggcgtcgccggcgtcatcatcccctggaacttcccgtccaccatgttcgccgtcaaggtggcgccggcgctggccgccggctgcgccctggtcgtcaagcccgccgagcagacgccgctcagcgccctgtacctcgcgcagctcgccaagcaggcaggggtcccagacggcgtgatcaacgtcgtgccaggcttcggcccgacggcaggagccgcgctggcgtctcacatggacgttgacatggtgagtttcaccggatccacggaggtcgggcgcctcataatgaaggcctccgcggagagcaacctgaagcccgtctacctggagctgggcggcaagtccccgctcatcgtcttcgacgacgccgacctcgacatggccgtggagctcgccgtcggcgccagcttcttcaacaagggagaggcctgcgtcgccgcgagccgcgtctacgtgcaggaacgcgtctacgacaggttcgaggagaggttggcggagaggatgaggagctgggtcgtgggcgacccgttcagcgaccctagcgccgaccagggcccgcaggtggacaaggctcagtatgagagggttctgagctacattgaccatggcaagcgagaaggggccactcttctgactggaggaaggccatgcggtccggaagggaaaggctactacattgagcccacagttttcaccaacgtcaaggaggacatgatcatagcgaaggaggagatcttcggacccgtcatgtgcctgatgaagttcaagacggtggaggaggcgatcgcgagggcgaacgacacgcggtacgggctgggggcgggggtggtgacgcgggacctggacgtggcgaaccgggtggtgaggtcggtgcgcgccggggtggtgtgggtgaactgctacttcgccatgggcagcgactgccccttcggcggccgcaagatgagcggcttcggcaaggacgagggcatgcacgcgctcgacaagtacctggccgtcaagtccgtcgtcaccccgctccgcgcctcgccctggatctgattctctttaatttctggtgtcagtcacccacccacaacacatatacagcagtggtcaaaagatatttatttattgataataaagtagctagct

SEQ ID NO: 134837 - DNA, 231 bp, Zea Mays
atggagatggagggattgtcgttgcccgtctcgatcaggtgcctcgcgcttctcatcaccctcctcccggcgctcttcttcgtcctcccgaggatgccgcagcccgcgcacgaccgtcgtcgcgaggcggctgcgagggcgacgaccaggatctactggcaggccgtcgaccagatggtggcgtgcgcgctggtgctcaccgccctcctcgccacctacatataccactag

SEQ ID NO: 134838 - DNA, 614 bp, Zea Mays
gttactgcttctataacacgcgatcccgcttccactcggcgaccaccgggcaccgccgccggtacaccgcgcatcgaatcgccaccagtgccgattctgctgacccctcgccatcgctggcgggcgaatcgacgccatggccgccgcgcgccggggccgcgccgacggtgccaacggcgtcgtccgtccccgcccccgcgaccgtgtcgtcggcgtcagcggaagcatggcggggcgcgtggcggtcctcgctttctgtgtcgccgggatctggtccgcctacatctaccagggcgtcctccaggagactctatccacgaagcggttcaggccggaggcgcggcggttcgaggcttcgagcaccttgcgttcctcaacttcgcgcagaatgtcgtatgcttcgtctggtccttcctaatgattaagttgtggtcgagcgggagcgggagtagctccgacggccgtgcgccgctatcgaagtactggggcgtcagcgtaaccaataccatcgggccgaccatggggatcgaggcgctcaagtacattaactatccggctcaggtgttggcaaaatcttctaagatgatccccggtaagtttacatttacttaaac

SEQ ID NO: 134839 - DNA, 123 bp, Zea Mays
agcaattcaatatatacagtaatgctgatgggaaccctgctctatggtgtgaagtacacacttccagagtatttttgtacctttcttgttgctggcggtgtgtcctcctttgcgttgttgaag

SEQ ID NO: 134840 - DNA, 764 bp, Zea Mays
gttttctgctacttatcagacaagctccaagagaccaagacagttaagaagcttgccaaccctaatgcacctcttggctatacattgtgcttcctcaacttagcttttgatgggtatactaactcgacccaagatttaataaagtcaaggtacccaaagactaatccatgggatataatgcttggcatgaacctctgggggaccatatataatgctgtagttatgtttgttgcgccattactattcagtaactggccatatgcagatggtttcgaggcattgagattttgccaggagaacccagaggtggcctgggacatttttctgttctgcctatgtggcgccgtgggtcagaattatatcttcttaaccatcagcaggttcggcgctcttactaacacaacgatcactaccactgtatttttgttctactgtcccgaaagtaacctgttatagaattagaatcaaggtttttattcacgtatacctcttatattgtgtttggaagagcagtgatgtcttggacattttggagacgacttaaattttactaagccacaggccacaggttatttggatgagtaaaattggtctaggaatgtttatagtaaggatttaggttatgttcccaatcgtaatgaatatttgttgtcaggagatgttatgagaccattattcatgtagatatacgaatacaacgggtgctcaatgctccattacgaaatgtaaatgacagactgatactggtaaattccatattttcg

SEQ ID NO: 134841 - DNA, 1142 bp, Zea Mays
gcaaccaaccaacagagctctattctagtagaataataataataataatgatctggaagcagatcaggcaggcggcggccgatcgtcgcttacgtaccgagcacgaaggaggcggcggccatgccgccgtgccggcccctggtcgccggccggttcctccagtccacgtagccctcccaccgctccacgtgccgcgcgcctccgccgccgtcctcctcctgcaacgaccaacggcagcacgaccacgcccaagaataatccgatcagcaacggtacaagagtgatcgggcaaccggcaccgacgatggcgctagcgaacaaatgcccggcggcaacgacgcgcgtacggagggacggaagtcgtggccaagggaactcaccatgacggtgctcgcacgctccgtacgtgtgtgccctggagcgcgcacgggcagaggagaacgagggaggcagagagcaggagatcgcgtctgtgttcactcgtgcgtgcgtgcctgacgagagcgagagcgagagagagcgctgaggagccgcgggctggtgtattttaaagtgaaggtgaaggagagagaggcagaggcccgtcctgtcccctggaggcgtcaggcgtgggctgcgtgagggtcaccgcatcgcacacactcgccgccgccggcccagcacacagacacagggctgctgaggaaggacgcgaacgcggcaacgcagcaagggttgccctgggtcgggacgtcaacttcaggatgcccacagaactagggaaaacatgagtttctgtttgccggagtctgaaaaggaaaatacgtacaaaaatcttttggagcctgcacggcggcgacagtgcggtggcgtctcacgctcacgcctcatgttaacaagttgctctcttatctagagccagtcaaggacttgttcgtttattcaataatggacttagaatcgttttagataatcaaaatttatataccttagagaagaaatccagctagaaattgttctagtctttcgttccgtgaaaaccgaacggcacctaagggtatgtttagaaaagctttaggtcaacaattttatgtctatttcagcttcttctatctaaacgggtccacctccacgagatctatttttttaaaaaaaaactaaaa

SEQ ID NO: 134842 - DNA, 640 bp, Zea Mays
gttaagaagcttgtcaaccctaatgcacctcttggctatacattgtgcttcctcaacttagcttttgatgggtatataactcgacccaagatttaataaagtcaaggtacccaaagactaatccatgggatataatgcttggcatgaacctctgggggaccatatataatgctgtagttatgtttgttgcgccattactattcagtaactggccatatgcaaatggtttcgaggcattgagattttgccaggagaacccagaggtggcctgggacatttttctgttctgcctatgtggcgccgtggggcagaatttcatcttcttaaccatcagcaggttcggcgctcttactaacacaacgatcactaccacccgtaaattcatgagcatcgtcgtttcatctgtaatcagcggcaatccattatcttcaaagcaatggggtagtgttgcgatggtcttcttaggcctctctgtccaaatatatctcaaatggaagagaaagaagggcagagaccgcaatgagtaagctcgattgttgactcttgaacctgttccgatttgtaacttcaattggacagatctgttgtgcggttgacctggataatgttaatgtagtctgctgaaattatgagctaaaaa

SEQ ID NO: 134843 - DNA, 160 bp, Zea Mays
gttttttttctttttcgaatttcctttttagtgtaacaaatatatatatatactctctaagaattataataaatccaaaaataatagtttataaataaaatacataattttcgaataaattctatttaaatcaaacgtgtgtcacaataaaacaataaaa

SEQ ID NO: 134844 - DNA, 1397 bp, Zea Mays
tcaagaccaatatgacgcttagcgttgttgcaatcgatagttcgatcaaagtcaagagagtcacgtccgttaaattaatcatcagactaaaatctttggtgctgcattattcgtcgctgatatagaaagaaattataggctaatcaatgggccgtctgtgctggcatgctcgctccaatggctctgcgccacgtcacctctcttacgtgctcttcgctccttccccacggttacgctgggcttctataacacgcgatcccgcttccactcggcgaccaccgggcaccgccgccggtacaccgcgcatcgaatcgccaccagtgccgattctgctgacccctcgccatcgccggcgggcgaatcgacaccatggccgccgcacgccggggccgcgccgacggtgccaacggcgtcgtccgtccccgcccccgcgaccgtgtcgtcggcgtcagcggaagcatggcggggcgcgtggccgtcctcgccttctgtgtcgccgggatctggtccgcctacatctaccagggcgtcctccaggagactctgtaagccctttctctctccaatgccgtccgaactccgccagacgattacaagctgggggtcagtttgctgggtttgtcgtcctcagatccacgaagcggttcgggccggaggcgcggcggttcgagcacctcgcgttcctcaacttcgcgcagaatgtcgtatgcttaatgcttcgtctggtccttcctaagtgagagctcactccctccctctcgcgccgcatggctgtctgattgcgcatttcgcgcaacgtcgtggactcgtggtgatcggttccgtctcctctgcgtgggtggcgactgcatagagggttcctgacatttctgctgcttttccagtgattaagttgtggtcgggcgggagtagctccgacggccgtgcgccgttatcgaaatactggggcgtcagcgtaaccaataccatcgggccgaccatggggatcgaggcgctcaagtacattagctatccggctcaggtttggttccgcctgctattgccgtctcaccttggttgttatatgcactgtcccggacattgtgtcatgttaatgttaggttcctgtcgcgggcacatgggtaatattgtcactgacgcttatggattgagatgttccgatagagttaattgactatatagggagctctttggaagtgcttcctcaagtgaacatttaggaagaacattgcattgattggattgtatgtgatatggcgactggcgatcgtgtgcggtatcgaccatcggcaatccatctctaggtgattgtcttgtatttcagaatgtaaccttacatcttgtaaacgaatccataaagcaactaattcttagagttgggtcgtggtagctatctt

SEQ ID NO: 134845 - DNA, 453 bp, Zea Mays
atggccgccgcacgccggggccgcgccgacggtgccaacggcgtcgtccgtccccgcccccgcgaccgtgtcgtcggcgtcagcggaagcatggcggggcgcgtggccgtcctcgccttctgtgtcgccgggatctggtccgcctacatctaccagggcgtcctccaggagactctatccacgaagcggttcgggccggaggcgcggcggttcgagcacctcgcgttcctcaacttcgcgcagaatgtcgtatgcttaatgcttcgtctggtccttcctaactccgacggccgtgcgccgttatcgaaatactggggcgtcagcgtaaccaataccatcgggccgaccatggggatcgaggcgctcaagtacattagctatccggctcaggtgttggcaaaatcttctaagatgatccctgtaagtttacatttacttaaacacactgcataa

SEQ ID NO: 134846 - DNA, 1350 bp, Zea Mays
atggaggaggggttccgatggagcacaccatgctctctcgtcttgtactccgtgttcctcctgctgtccgcgaccgcgtcggaggccaacatcggcgacttcgacgactactggcagcagcgcaagctcatggccgacgccgcggcggaggccacatacaagcatgacccgctcgagcttagaacattgaagaccatgatgtacaggaggacacgagcacgatcgaggacatccatcgagaaggaggacacgagcacgaggcgggagatgatggagcagaagaagagcaagttgagcgggccgtgcacggcgacgaacccgatcgaccggtgctggcgatgccggcaggactgggcgacggaccgcaagcggctggcgcggtgcgccaaggggttcgggcgcaacaccaccggcgggctggccggcaagttctacgtggtgacggacggcaccgacgacgacgtggtgaacccgcggccgggcacgctgcggtggggcgtcatccagatcgagccgctgtggatcaccttcgccaagacgatgatcatcacgctcaaggaggagctcatcatccgcggcgacaagaccatcgacgggcgcggcgcgcaggtgcgcatcgccaacggcgcgcagctcacggtgcagttcgtgaacaacgtcatcatccacaacatccacatcaacgacatcgtctcgtccaacaagaacggcggctacgtccgcgactcggccgaccacttcggctggcgcatcgtctccgacggcgacggcgtcaccgtcttcggctccaccaacgtgtggctggaccacctctcgctctccaactgccaggacggcctcatcgacgtcatcgccaagtccaccggggtcaccatctccaactgccacctcaccaaccacaacgaccgtcatgctcttcagctccagcgacaagcaccccgaggaccaggtcatgcagggcctcgtgcagaggatgccgaggtgccgctggggcttcttccacgtggtcaacaacgagtcaacgactacacgcactggctcatgtacgccatcggcggcagcaaggcccccaccatcatcagccagggcaaccgctacatcgcgccgcccaacttcgcggccaagcaggtcaccaagcagcacgacgcgccggagtcggagtggaagaactgggcgtggcactcggagaacgacctcttcatggagggcgcctacttcaccgtcaccgccggccagatcaacaggcagttgaacaagaaggacctcatcaagcccaagcctgggtcatacgtcaccaggctcacgcgatacgccggctccctcgcctgccggcccggcgagccctgctag

SEQ ID NO: 134847 - DNA, 554 bp, Zea Mays
ccatctccttcagtttgtgcttgtgtgccgatcgagagcaaatggcaaatgataaccgcagccgggcttccgttccagtcggcaaccctcctgccactccagctgctgctacggaggttaagcctccggcggctgctccaggtagcgaccctccagctacgactccaggcagtgattgtccggctgctccaccgcaaggtccgccgggtgaacgaaagcccaagaacgatccatttccaccattccctgatccaatacctcgccagtgatagtcggaatccagtagtttccatgctataatggatagaaaaatcggttcaaacgcattggttctggaattttggtttcggagtcttaactttttagtggagttgggttcttagtaataagtaaatcgagctcctatgtgaagggtgtatgggtgttaaatcataattatattttgtgaacagtacaaaagcaagtggagaaaagtttttttttgtgtttatatatcttcattgagtacattcaaaattccctggaatagaagaagaaacacaaagtatctgcta

SEQ ID NO: 134848 - DNA, 3436 bp, Zea Mays
aacatgtataagtgaaggacagtttggatgaacagtaatggcccatcctgttcggcttctctgtctcctcgccttctttggcagcctgcatgtggccgccacatccaacgagagggaaaacgaccagcaagcactcctgtgcttcaagtcccagctttccggtacagtcggcactctctcctcatggagcagcaacacatccatggagttctgcagctggcacggggtcagctgcagcgagcattcacctcgccgtgtgatcgcgctggacctcgcatcagaaggcatcacaggtaccataccaccctgcatcgccaatctcacctctctcacaaggctgcagctggcaaacaacagcttccgcggcagcataccgccggagctcggactcctcagccagctccgcatcctgaacctgagcatgaactctctagaaggcaccatcccttccgaactctcttcgtgttcccagcttcaggcccttggactgtggaacaactcccttcgcggcgaggtaccacctgccctaggccagtgcgtccagctcgaggagatcgacctcagcaacaacgatctagaagggagcatcccctcccgtttcggggctcttccagagttgcggacactcgtcctcgctggcaacaggctcagtggcgccatacctccctcgttgggccgcagcagcctctccctcacgcacgttgaccttggggcaaacgctctcaccggcgggattccggagtccctggccggcagctcgtctctccaggtgcttaggctcatgaggaacagcctcggtggagaactgccacgggctctcttcaacacatcatcgctcatcgccatctgcctccaggaaaacaagtttgttggccctataccacctgccactgccgtcgtctctcccccggtaaaacaccttcacctgggagggaactttctctccggaacgataccggcctcgctggggaacctttcttccctgcttgaccttcgtcttactcggaacaggttgcatgggagaatcccagagagcataggctatctgccagcgctaagtttactgaacctgaatctgaacaacctgtctgggccagtgccactctccctgttcaacatgtcctccctgagagctctcgctatggggaacaactcgctcagcgggagactgccgtcaggcatcggctacacgctaccgagaattcagatcctcatcctcccgtccaacaggtttgacggtccaattccagcttctctcctccatgctcaccacatgcagtggctctacctcggacagaacagcctaaccgggcctgtgccgttcttcggaacgctgccgaatctggaagaactccaagtgtcgtataacctgctggacgcgggggactggggcttcgtctcttcgctgtcaggttgctctagactgactaggctctacctggccgggaacagtttccgaggggagctgccgagttctatcggcaatctttctagcagcctcgagatactgtggctacgggacaacaagatcagcgggcccataccgccggagctgggaaacctcaagaacctcagcacgctgtacatggatcacaaccgcttcactggtagcataccggcagcgatcgggaacctgaaaagactggtggttctgtccgctgcacggaacaggctctcaggcaccatccctgacgcgatcggcgacctcgtccagctgaccgatctgaaactggacgccaacaacttgagtggcaggatacccgcgagcataggacgctgtactcagctccagatactcaatcttgctcgtaatgcgctggacggtggtataccgagatcgatcctcgaaatatcctctctttctctagaacttgacctgtcgtacaaccgcctggctgggggcatcccggatgaaatcggcaacctcatcaacttgaacaaactcagcgtctcaaacaacatgctgtccggcagcatcccgtccgcgctcggccagtgcgtgcttctggagtaccttaagatgcagaacaatctctttacaggaagcgttccacagtcgtttgcaggactggtcgggatcagagagctggatgtctccaggaacaatctgtctgggaagatcccagggttcctcacgtccctgaactatctgaactatctcaatctatccttcaacgatttcgacggagcagttccggaaggcggcgtttttggcaacgctagtgcggtgtcaatcgaaggaaatggtcgcttgtgcgctgctgttccaacgagaggtgtcaccctttgttcagcgaggggccagagcaggcactatagcttggttctagctgcaaagatagtaacgccagttgttgttacaatcatgttgctttgcctggcggcaattttctggcggaagagaatgcaggcggcaaaaccgcatccgcagcaatccgatggcgaaatgaagaacgtcacatacgaagaaatcttgaaggcgacagatgcgttctctcctgctaacttgatcagctcaggctcatatggaaaggtttataagggtaccatgaagcttcacaaaggaccagtggccatcaagatttttaacctcggtatacatggagcgcatgggagcttcctcgcagaatgtgaggctctcagaaacgcccggcaccgaaatatcgtaaaagtaatcacagtatgctcttcagtggatcctgctggggctgacttcaaggccatagttttcccatacatgctgaacgggaacctggacatgtggctgaaccagaagacccatcaaaatagtcagagaaagactctgagcttaagccaaagaatcagtgtgtcactggatgtagcaaatgctgtggactatctccacaaccaatgcgcgtcgccattgatacactgcgacctgaagccaagcaatgttcttttggaccttgacatggtggcatatgtcggcgactttggcctagcaaggtttcaacgtgatacaccaactgcccatgaaggcagctcggcgagctttgctggcctaaaaggatccattggatatatcccaccagagtatggcatgagtgagggcatatcaaccgagggtgatgtctacagtttcggagtgctcttgttggagatgatgacaggccgccgtcccaccgatgaaaagttcagtgatggtacaaccctgcatgagtttgttggtagagcgtttcgaaataataataataatatggacgaggttgttgatccagttttgatacaaggcaacgaaaccgaagtgctgcgtgactgcataattcccttgattgaaatagggttgtcctgctcggtgacatcttccgaagaccgaccagggatggacagggtttctaccgagatccttgcaatcaagaaggttctctcaaacatacatgataaattgaaataattataaattgtacatgtagta

SEQ ID NO: 134849 - DNA, 434 bp, Zea Mays
tgatgcaggataagaacgttgtgacagtgttcagcgcgcctaactactgctaccgatgcggaaacatggctgccatcctcgaaattggcgagaacatggatcagaacttcctccaattcgacccagctccgaggcaaattgagccggacatgacgcgcaagacaccagactactttttgtagaaaaaacaggtgtggctaaaaaaaaaagagaagagacgaggggaagatgcaggaaatggacccgatgttctgttgtgtctgtattgtgatgccttgctaggtgagatttttcgtttctgttttgactcaacctggtcgttcaacctacgtcggctcatcgtcgaacgttgcccaggctgttaaagatgatttcactttttatgtgtagacatcgttgtacactaggcttttgcaatgctttcatataggaca

SEQ ID NO: 134850 - DNA, 113 bp, Zea Mays
gtataagtttgaatgacattgaagggattttctctaacttgaactcgggcccagaaaccaaatacatagaaaacatcacatttaatagaaatttcatctattcgcatcaaaac

SEQ ID NO: 134851 - DNA, 569 bp, Zea Mays
gaaacagccacgagcgcatggcagcggcagagacatctacgggttctccgcctccacaagggcggccttgtccttgtggatgaagaacgcgtagaagccaccgccgatggtggcgaacgccatcgcccacacgacgagcgccagcagcggcggcatgatggcggccaccttctgcgagaacatgacggtgagcagcgtggtcagcccccagacgcaggccttgatccacccccggcgcggcgagtcaggcggcgtccgctcgaacaggcgaaggcagaggaagagcagcagcaggtcgacgtacgagcccgacacgaacgctattgacccggggtcgcggtccgagcggtagatcgccatgcccgagttgaaggtcaggaacacgaaccccagaaatgtcagccatgggatcccgccgtctcccttttcatcctccgtactcccattatttgctgggtttctcctcgatcccagaagtgattgcttctctggggacttggaatgcataactgtacttggcagcggcaggctgtactatctgcaatgcaatgcgaccacggttcaagccg

SEQ ID NO: 134852 - DNA, 1606 bp, Zea Mays
ctctcacgtgtcaccgacacccagccaaaacaaaaaataaaccaagctcagtagtactgcctcacattcacactgacactgtcacacacttccgtcttcacactcactctttacacgaccacgctagcacgccctctccgtctctccccttccggttccggttccagtggctgcatccgctgcgccaccccccgtctgctcacccaagtcccaatcccgcagcccggcggcatggcggtgagcaacaacatcacggcatgcatcaacttcctggtgcttctctgcaccatccccatcgccgcgacggggctgtggctggcctcgaggcacggcggcgaggactgcgccaggctggcccgctggcccatcgccgtgctgggcgcgctcctcctgctggtcgcgctggcgggtttcgcgggcgcctactggaaccgcaggggcctgctcgcctgctacctcttcgcgatggccgccctcatcacgctcctcctcgccctcctcgtcttcgccttcgccgtcgcgcacgactccggcgcctacccggctcccggcagggcctaccaggactaccgcctccagggctactcctcgtggctgcgggggtacgtcgccgacgacccccgcaggtgggagggggtccgggcctgcgtcgccgcctccggcacctgcaggaagctcgccatggatagatcattcatcgtgccggagcagttctacatgtcgcacctctcgcccatcgagtccgggtgctgcaagccaccgacggtgtgcgggtacgcgtacgcgaacccgacggcgtggacgggcccggcggcgagcccggcggcggacgcggactgcgcggcgtggagcaacgaccccggccagctctgctacgcctgcgcctcctgcaaggccggcgtgctgggcggcctgcgcgagcagtggcgcagggccaccgtcccgctgctcgtcgccaccgtcgcgctcatcttcgtctacgtcgtcggctgcagcgccttccgcaacgcgcagaccgaggacctcttccgccgctacaaatggggaaattattaacgatctctcccactgatctacatctactacgtacgtacacgccgatttggatcgggtgagttgcgctttccgtttccggccgtcttttttttattattgttattttgcaaaatcgatctgtttccggtgcttttggcacagtggttagtgctgtagaatgcggacaacagctagatgttaaatctataggagcttatttatgtatctatctctatctgaagcttcggtaacataggttgttccatgagacatgcctccttttcaggccacaggattttcacatgcgcctcggagagaccgagaatggactctgcgttaccgtacattttcagcaatccggttcaccaagatttgggcccaatggcccatcacggatatcccatccgtggcgtgtgctcgccaaattggagcacgccgtccgcgctcttcgcgtccttttgtttgggatggttgccagttatattaaggtcgctcagcaattatgtgttacatgcaaaataaacataaaaataaactgtaacactgggtgtatttaaatctatagtcctct

SEQ ID NO: 134853 - DNA, 1430 bp, Zea Mays
ctctcacgtgtcaccgacacccagccaaaacaaaaaataaaccaagctcagtagtactgcctcacattcacactgacactgtcacacacttccgtcttcacactcactctttacacgaccacgctagcacgccctctccgtctctccccttccggttccggttccagtggctgcatccgctgcgccaccccccgtctgctcacccaagtcccaatcccgcagcccggcggcatggcggtgagcaacaacatcacggcatgcatcaacttcctggtgcttctctgcaccatccccatcgccgcgacggggctgtggctggcctcgaggcacggcggcgaggactgcgccaggctggcccgctggcccatcgccgtgctgggcgcgctcctcctgctggtcgcgctggcgggtttcgcgggcgcctactggaaccgcaggggcctgctcgcctgctacctcttcgcgatggccgccctcatcacgctcctcctcgccctcctcgtcttcgccttcgccgtcgcgcacgactccggcgcctacccggctcccggcagggcctaccaggactaccgcctccagggctactcctcgtggctgcgggggtacgtcgccgacgacccccgcaggtgggagggggtccgggcctgcgtcgccgcctccggcacctgcaggaagctcgccatggatagatcattcatcgtgccggagcagttctacatgtcgcacctctcgcccatcgagtccgggtgctgcaagccaccgacggtgtgcgggtacgcgtacgcgaacccgacggcgtggacgggcccggcggcgagcccggcggcggacgcggactgcgcggcgtggagcaacgaccccggccagctctgctacgcctgcgcctcctgcaaggccggcgtgctgggcggcctgcgcgagcagtggcgcagggccaccgtcccgctgctcgtcgccaccgtcgcgctcatcttcgtctacgtcgtcggctgcagcgccttccgcaacgcgcagaccgaggacctcttccgccgctacaaatggggaaattattaacgatctctcccactgatctacatctactacgtacgtacacgccgatttggatcgggccacaggattttcacatgcgcctcggagagaccgagaatggactctgcgttaccgtacattttcagcaatccggttcaccaagatttgggcccaatggcccatcacggatatcccatccgtggcgtgtgctcgccaaattggagcacgccgtccgcgctcttcgcgtccttttgtttgggatggttgccagttatattaaggtcgctcagcaattatgtgttacatgcaaaataaacataaaaataaactgtaacactgggtgtatttaaatctatagtcctctattatctatatctattaagacgatagtgtagact

SEQ ID NO: 134854 - DNA, 462 bp, Zea Mays
atgtggcctagaataattctaaaatctggaaacagaataactgcccaaaaacaagaatccaaagatgatgaattcaactatgatttggagtacgaggttctatctcatggatttgatgaccagtggaaatttgttggtgagacaagtacatccaaaagatttgagagatcagataaggatgatggtgcacagaatcacacacatcaagtcgtgaaggctagtattgactcttcaaaatccaaccctctcctgagtagcacgcccacagaaactactgaagagaatactgtaactcggagcaacaaaaactacaataacgatcatgcggacacgaccacagtatatagcattgaggatcatcaaagtgatcttctagaggctaactatctttttgaggacgagcattatggtctggaggattactatctgtgctatttttttctaccaaatgttcgagtttag

SEQ ID NO: 134855 - DNA, 1438 bp, Zea Mays
ccgaggccccacgaatccgggtcatcttgcgatcaatccagtccgtccaacccttgccatccgaaccgcaaccctagatttcgcttcctctctgtcccctccgctgcgccgccataacataaatccgccgcccctctccctcagtaaacccctctcttcttcccgcggtctgctcgttcgatctgtgcagcagatctgaggtcccgggcgaccgtgaagcagcttcaatcgtcggcatggcgctcgtattgcatagtggggctggaaacaagaatgccttcaaagcacttattgctgcagaatacagtgggatcaaggttgagttgaccaaggattttgagatgggtgtctccaacaagacccctgagtttcttaagatgaacccccttgggaaggttcctgttctggagactcctgatggccctgtttttgagagtaatgctatcgcacgctatgttgctcgcttgaaggatgacaaccctctttttgggtcttcccgtattgaacaagcccacgttgagcaatggatggattttgccgcaacagaagttgatcctggtgttgcatggtacttgtatccaaggcttgggtacctcccttatgttagcacaactgaggaaacagctatttcttcattgaagaggtcgcttggtgctctgaacacacaccttgcttcaaacacataccttgttgggcatgctgttactctagctgacattgtaatgacatgcaacctctaccatggaattgcacggatcttgaccaagaccttcacgtctgatttccctcatgtcgagaggtatttctggaccatggttaaccagcctaacttcaagaaggtcattggtgaggtcaagcaggcagagtctgcacctcctattccgaaaaaggctgctccttctaaggagccaaaggcaaaggatgtcaagaaggaggctccaaaggaggcccccaagccaaaggtggttgaggcaccagcagaagaggaagcaccaaagccaaagccaaagaatcctcttgacttgctgccaccaagcaagatggtccttgatgactggaagaggctatactcaaacacaaagactaacttccgggaggttgccatcaaagcggatggacctgtgccgcaagtacgcctttgggaagatgctcgtgataggctctgagccacccttcaagctgaagggcctttggctcttccgtggccaggatgttcccaagtttgtaatggacgaggtctatgacatggagctctacgagtggaccaaggtggacatctctgatgaggcccagaaggagcgtgtcaatgcgatgattgaggaccaggagccctttgagggcgaggccttgcttgacgcgaaatgcttcaagtgagtgtgcttgcctggagacagaactgtttagcccttgaatttgcctatggaagagtttgcccttt

SEQ ID NO: 134856 - DNA, 1531 bp, Zea Mays
ccgaggccccacgaatccgggtcatcttgcgatcaatccagtccgtccaacccttgccatccgaaccgcaaccctagatttcgcttcctctctgtcccctccgctgcgccgccataacataaatccgccgcccctctccctcagtaaacccctctcttcttcccgcggtctgctcgttcgatctgtgcagcagatctgaggtcccgggcgaccgtgaagcagcttcaatcgtcggcatggcgctcgtattgcatagtggggctggaaacaagaatgccttcaaagcacttattgctgcagaatacagtgggatcaaggttgagttgaccaaggattttgagatgggtgtctccaacaagacccctgagtttcttaagatgaacccccttgggaaggttcctgttctggagactcctgatggccctgtttttgagagtaatgctatcgcacgctatgttgctcgcttgaaggatgacaaccctctttttgggtcttcccgtattgaacaagcccacgttgagcaatggatggattttgccgcaacagaagttgatcctggtgttgcatggtacttgtatccaaaggtggttgaggcaccagcagaagaggaagcaccaaagccaaagccaaagaatcctcttgacttgctgccaccaagcaagatggtccttgatgactggaagaggctatactcaaacacaaagactaacttccgggaggttgccatcaaaggtttctgggacatgtacgacccagagggctactctttgtggttctgtgactacaagtacaatgatgagaacaccgtctcctttgtgaccctgaacaaggttggtggattcctgcagcggatggacctgtgccgcaagtacgcctttgggaagatgctcgtgataggctctgagccacccttcaagctgaagggcctttggctcttccgtggccaggatgttcccaagtttgtaatggacgaggtctatgacatggagctctacgagtggaccaaggtggacatctctgatgaggcccagaaggagcgtgtcaatgcgatgattgaggaccaggagccctttgagggcgaggccttgcttgacgcgaaatgcttcaagtgagtgtgcttgcctggagacagaactgtttagcccttgaatttgcctatggaagagtttgcccttttactagtgtcgatgttgatctggtataccttgctatgaactggttaaagtttgtgctggtttgggattttttgtgcatcttgtgatacctcaagtcttcatcatttaaatgtttagccgtaataatctggttattttttcttctcatgactgagatgttgtgattatgtttttgttttatacacgccataaatttcaagccggcagagcccatttaggaacgccaagccggcagagccatttaggaacgccttaaactatatcatggcttcagcagaattttgatccgagttgtagtttgtgctatttgtgcaaactattcggttttagcaaatttatcactttaatattttgaa

SEQ ID NO: 134857 - DNA, 1548 bp, Zea Mays
gggagtgggagggagagaggtagtcctgtagctggcgggtggcggctggtattgcatagtggggctggaaacaagaatgccttcaaagcacttattgctgcagaatacagtgggatcaaggttgagttgaccaaggattttgagatgggtgtctccaacaagacccctgagtttcttaagatgaacccccttgggaaggttcctgttctggagactcctgatggccctgtttttgagagtaatgctatcgcacgctatgttgctcgcttgaaggatgacaaccctctttttgggtcttcccgtattgaacaagcccacgttgagcaatggatggattttgccgcaacagaagttgatcctggtgttgcatggtacttgtatccaaggcttgggtacctcccttatgttagcacaactgaggaaacagctatttcttcattgaagaggtcgcttggtgctctgaacacacaccttgcttcaaacacataccttgttgggcatgctgttactctagctgacattgtaatgacatgcaacctctaccatggaattgcacggatcttgaccaagaccttcacgtctgatttccctcatgtcgagaggtatttctggaccatggttaaccagcctaacttcaagaaggtcattggtgaggtcaagcaggcagagtctgcacctcctattccgaaaaaggctgctccttctaaggagccaaaggcaaaggatgtcaagaaggaggctccaaaggaggcccccaagccaaaggtggttgaggcaccagcagaagaggaagcaccaaagccaaagccaaagaatcctcttgacttgctgccaccaagcaagatggtccttgatgactggaagaggctatactcaaacacaaagactaacttccgggaggttgccatcaaaggtttctgggacatgtacgacccagagggctactctttgtggttctgtgactacaagtacaatgatgagaacaccgtctcctttgtgaccctgaacaaggttggtggattcctgcagcggatggacctgtgccgcaagtacgcctttgggaagatgctcgtgataggctctgagccacccttcaagctgaagggcctttggctcttccgtggccaggatgttcccaagtttgtaatggacgaggtctatgacatggagctctacgagtggaccaaggtggacatctctgatgaggcccagaaggagcgtgtcaatgcgatgattgaggaccaggagccctttgagggcgaggccttgcttgacgcgaaatgcttcaagtgagtgtgcttgcctggagacagaactgtttagcccttgaatttgcctatggaagagtttgcccttttactagtgtcgatgttgatctggtataccttgctatgaactggttaaagtttgtgctggtttgggattttttgtgcatcttgtgatacctcaagtcttcatcatttaaatgtttagccgtaataatctggttattttttcttctcatgactgagatgttgtgattatgtttttgttttatacacgccataa

SEQ ID NO: 134858 - DNA, 2279 bp, Zea Mays
aaacacgcaaaacgtgcttctgtccctctcctgttataatttcgtcttcttccctctcccaccggtgtcctcgcctcgcctatccgatctgccacctcgccgtctcgcacgttcctttccccaactccccagcgcctctccgcgccgcgatccagatccaggttgttcagcatgggtctggtgaaggaaggcgtcgacatggaggagggaaccctagagatcggcatggagtacaggactgtatctggtgtggccgggcctctggttatcttggataaagtaaagggcccaaagtaccaagaaattgtaaacatccgacttggagatggcaccactcgccgtggtcaagtccttgaagttgatggagaaaaagctgttgtgcaggtttttgaaggaacttctggaatagacaacaaatacacaaccgtgcagtttacaggcgaggttttgaaaactcctgtctcactcgatatgcttgggcgcatttttaatggttctggaaaacctattgacaatggccccccgatattacctgaagcctacttggatatctctggaagttctattaatcccagtgagagaacctatccagaggagatgatccaaactgggatatccaccattgatgtgatgaactccattgctcgtgggcaaaaaatccccctattttctgctgctggactccctcacaatgaaattgctgctcagatctgtcgtcaggctggccttgtgaagacattggagaaaggaaagcatgcagagggtggtgaagatgacaactttgctattgtgtttgctgctatgggagtgaacatggaaacagctcaattcttcaaacgtgattttgaagagaacggttccatggaacgggtcaccctttttctgaatctggctaatgatcccaccattgaacgtattatcacccctcggattgctctaacaacagcagaatatttggcatatgaatgtgggaagcatgtacttgtcatcttgacagatatgagctcttatgcagacgcacttcgtgaggtttctgcagcccgagaagaggtgccaggtaggcgtggttatcctggatatatgtatactgatctggcaacaatatatgagcgtgctgggcgtattgaaggaagaacagggtccattacccaaattcctattctgacaatgcctaatgatgatatcacacacccaactccggaccttactggatacattactgagggacagatatacattgataggcagctccataacagacagatttatccacctatcaatgtcctgccatctctatctcgattgatgaaggtaagataagttttctgtatgttttcagcatttatgttgaaggttagttgtaagaaccacttaacaactcctgcagagtgctattggtgagggcatgacacgtagagaccattcggatgtgtctaatcaggtacatactatgagtccatgttatttttgataagggagtccatagtctttgctacccttcagacatgatgtgcaagatgaattgacatctgctgttttctctttcagctttatgccaactacgcaattggaaaggatgttcaggccatgaaggcagtcgttggagaggaggcactctcgtctgaggatctggtctgtttcgagtgaaataaattcctaagggcttgttcgggttgcgtgcagacgtaaccgaacaagccctaagttagttctttttcagatgtccaaaacctaatgttctgttacttcttgctcagctttacttagagttccttgacaagtttgagaggaagtttgtgacacaaggagcatacgacacacggaacatcttccagtcactagatcttgcatggacattgcttcggatcttccctcgcgaacttctccaccgtatcccggcgaagaccttggaccagtactatagcagagatgcctcccactgaatcactgatcgttgatcagtgttccaatagtttggcaagtgttgaataaattgaacagattggcttcatggccttttccctgtatttatgtgtagtcaggtccaattcttttctgttgatgagcgcaagtttttcgtagatgactcgcggtcacggcaatatttgtgatattgtgtcatctgtggactatggttaaatttcagttatttgttttctttcaccttccagaactgttagcaagagcattctggaccaggatgctcgaacacaactggctgtatgtacatttgtgaatggtgaataaagaaggggcaataaactgctgcgaaatatgtg

SEQ ID NO: 134859 - DNA, 2249 bp, Zea Mays
aaacacgcaaaacgtgcttctgtccctctcctgttataatttcgtcttcttccctctcccaccggtgtcctcgcctcgcctatccgatctgccacctcgccgtctcgcacgttcctttccccaactccccagcgcctctccgcgccgcgatccagatccaggtacgtcttcctccagccccgcgatttcacctccacccccgcttctcctgcggcaatccatcgctcgcgtcgtccctactgggtgacaagagggcgaccacgcccacctccacactcttcgacctgtccccagcctgccgctgcattttctctatcttccgtccggctatttttttgctgaatggttgttcagcatgggtctggtgaaggaaggcgtcgacatggaggagggaaccctagagatcggcatggagtacaggactgtatctggtgtggccgggcctctggttatcttggataaagtaaagggcccaaagtaccaagaaattgtaaacatccgacttggagatggcaccactcgccgtggtcaagtccttgaagttgatggagaaaaagctgttgtgcaggtttttgaaggaacttctggaatagacaacaaatacacaaccgtgcagtttacaggcgaggttttgaaaactcctgtctcactcgatatgcttgggcgcatttttaatggttctggaaaacctattgacaatggccccccgatattacctgaagcctacttggatatctctggaagttctattaatcccagtgagagaacctatccagaggagatgatccaaactgggatatccaccattgatgtgatgaactccattgctcgtgggcaaaaaatccccctattttctgctgctggactccctcacaatgaaattgctgctcagatctgtcgtcaggctggccttgtgaagacattggagaaaggaaagcatgcagagggtggtgaagatgacaactttgctattgtgtttgctgctatgggagtgaacatggaaacagctcaattcttcaaacgtgattttgaagagaacggttccatggaacgggtcaccctttttctgaatctggctaatgatcccaccattgaacgtattatcacccctcggattgctctaacaacagcagaatatttggcatatgaatgtgggaagcatgtacttgtcatcttgacagatatgagctcttatgcagacgcacttcgtgaggtttctgcagcccgagaagaggtgccaggtaggcgtggttatcctggatatatgtatactgatctggcaacaatatatgagcgtgctgggcgtattgaaggaagaacagggtccattacccaaattcctattctgacaatgcctaatgatgatatcacacacccaactccggaccttactggatacattactgagggacagatatacattgataggcagctccataacagacagatttatccacctatcaatgtcctgccatctctatctcgattgatgaagagtgctattggtgagggcatgacacgtagagaccattcggatgtgtctaatcagctttatgccaactacgcaattggaaaggatgttcaggccatgaaggcagtcgttggagaggaggcactctcgtctgaggatctgctttacttagagttccttgacaagtttgagaggaagtttgtgacacaaggagcatacgacacacggaacatcttccagtcactagatcttgcatggacattgcttcggatcttccctcgcgaacttctccaccgtatcccggcgaagaccttggaccagtactatagcagagatgcctcccactgaatcactgatcgttgatcagtgttccaatagtttggcaagtgttgaataaattgaacagattggcttcatggccttttccctgtatttatgtgtagtcaggtccaattcttttctgttgatgagcgcaagtttttcgtagatgactcgcggtcacggcaatatttgtgatattgtgtcatctgtggactatggttaaatttcagttatttgttttctttcaccttccagaactgttagcaagagcattctggaccaggatgctcgaacacaactggctgtatgtacatttgtgaatggtgaataaagaaggggcaataaactgctgcgaaatatgtgctactgcctcaccagaagttctgtctaatgtgtgcgaagttgttatctgagggctcagttttgatgagaattctttgacgtgaagagaagaaaa

SEQ ID NO: 134860 - DNA, 2065 bp, Zea Mays
aaacacgcaaaacgtgcttctgtccctctcctgttataatttcgtcttcttccctctcccaccggtgtcctcgcctcgcctatccgatctgccacctcgccgtctcgcacgttcctttccccaactccccagcgcctctccgcgccgcgatccagatccaggttgttcagcatgggtctggtgaaggaaggcgtcgacatggaggagggaaccctagagatcggcatggagtacaggactgtatctggtgtggccgggcctctggttatcttggataaagtaaagggcccaaagtaccaagaaattgtaaacatccgacttggagatggcaccactcgccgtggtcaagtccttgaagttgatggagaaaaagctgttgtgcaggtttttgaaggaacttctggaatagacaacaaatacacaaccgtgcagtttacaggcgaggttttgaaaactcctgtctcactcgatatgcttgggcgcatttttaatggttctggaaaacctattgacaatggccccccgatattacctgaagcctacttggatatctctggaagttctattaatcccagtgagagaacctatccagaggagatgatccaaactgggatatccaccattgatgtgatgaactccattgctcgtgggcaaaaaatccccctattttctgctgctggactccctcacaatgaaattgctgctcagatctgtcgtcaggctggccttgtgaagacattggagaaaggaaagcatgcagagggtggtgaagatgacaactttgctattgtgtttgctgctatgggagtgaacatggaaacagctcaattcttcaaacgtgattttgaagagaacggttccatggaacgggtcaccctttttctgaatctggctaatgatcccaccattgaacgtattatcacccctcggattgctctaacaacagcagaatatttggcatatgaatgtgggaagcatgtacttgtcatcttgacagatatgagctcttatgcagacgcacttcgtgaggtttctgcagcccgagaagaggtgccaggtaggcgtggttatcctggatatatgtatactgatctggcaacaatatatgagcgtgctgggcgtattgaaggaagaacagggtccattacccaaattcctattctgacaatgcctaatgatgatatcacacacccaactccggaccttactggatacattactgagggacagatatacattgataggcagctccataacagacagatttatccacctatcaatgtcctgccatctctatctcgattgatgaagagtgctattggtgagggcatgacacgtagagaccattcggatgtgtctaatcagctttatgccaactacgcaattggaaaggatgttcaggccatgaaggcagtcgttggagaggaggcactctcgtctgaggatctgctttacttagagttccttgacaagtttgagaggaagtttgtgacacaaggagcatacgacacacggaacatcttccagtcactagatcttgcatggacattgcttcggatcttccctcgcgaacttctccaccgtatcccggcgaagaccttggaccagtactatagcagagatgcctcccactgaatcactgatcgttgatcagtgttccaatagtttggcaagtgttgaataaattgaacagattggcttcatggccttttccctgtatttatgtgtagtcaggtccaattcttttctgttgatgagcgcaagtttttcgtagatgactcgcggtcacggcaatatttgtgatattgtgtcatctgtggactatggttaaatttcagttatttgttttctttcaccttccagaactgttagcaagagcattctggaccaggatgctcgaacacaactggctgtatgtacatttgtgaatggtgaataaagaaggggcaataaactgctgcgaaatatgtgctactgcctcaccagaagttctgtctaatgtgtgcgaagttgttatctgagggctcagttttgatgagaattctttgacgtgaagagaagaaaa

SEQ ID NO: 134861 - DNA, 1103 bp, Zea Mays
caaatggtaaattgatttcatgtttgatgtttctaataatgctacatgggcattgtgctttttgtaggtttctgcagcccgagaagaggtgccaggtaggcgtggttatcctggatatatgtatactgatctggcaacaatatatgagcgtgctgggcgtattgaaggaagaacagggtccattacccaaattcctattctgacaatgcctaatgatgatatcacacacccaactccggaccttactggatacattactgagggacagatatacattgataggcagctccataacagacagatttatccacctatcaatgtcctgccatctctatctcgattgatgaagagtgctattggtgagggcatgacacgtagagaccattcggatgtgtctaatcagctttatgccaactacgcaattggaaaggatgttcaggccatgaaggcagtcgttggagaggaggcactctcgtctgaggatctgctttacttagagttccttgacaagtttgagaggaagtttgtgacacaaggagcatacgacacacggaacatcttccagtcactagatcttgcatggacattgcttcggatcttccctcgcgaacttctccaccgtatcccggcgaagaccttggaccagtactatagcagagatgcctcccactgaatcactgatcgttgatcagtgttccaatagtttggcaagtgttgaataaattgaacagattggcttcatggccttttccctgtatttatgtgtagtcaggtccaattcttttctgttgatgagcgcaagtttttcgtagatgactcgcggtcacggcaatatttgtgatattgtgtcatctgtggactatggttaaatttcagttatttgttttctttcaccttccagaactgttagcaagagcattctggaccaggatgctcgaacacaactggctgtatgtacatttgtgaatggtgaataaagaaggggcaataaactgctgcgaaatatgtgctactgcctcaccagaagttctgtctaatgtgtgcgaagttgttatctgagggctcagttttgatgagaattctttgacgtgaagagaagaaaa

SEQ ID NO: 134862 - DNA, 462 bp, Zea Mays
atgaagaaggaggcggtgaacatgaggcctacggataccatgacgacggccagcgtcggataccactccaccggcacggggctcgagatcgccttcgccgcctgcgacacgaaccccgtgggtcagcacagcgggctcccaagcagaaccctggatctaagcaagagaaggcaatggagggctcaccatgccgtgagatctgctgccgctgtagtcgccgcccgctctgcctgcctcgtcgcctcctggtcgccgacgcgatgcacagacggatttgtgacgagcggagccagattggtactggtacgtcagagacgatcgcaatcaatcgcaactcgcaagggttttagtgggctttgcatccgaatgatgggccggcgcatggtttccgacaggagacaaacagaacggcttgttccttttatggcaaagcccaacgagcctcacggacaggcctcatga

SEQ ID NO: 134863 - DNA, 250 bp, Zea Mays
tctgaaaccgcttcgaacaggtactaccgcaacatcactgcaaacactctagcagtgctagaagccatggttgcacacaatgtgaggactctcatctactctagcaagtgtgcaacctatggagagcctgacaagatgcccatcgctgaaggaactccctaggtcagcagttcagttctgatttctgaaaccattagttcctttctaaaatcaagttgaacgcctctctagctagcattaacaaaaaatg

SEQ ID NO: 134864 - DNA, 252 bp, Zea Mays
atggcggaggacatcattctggacttctcaaagttgaagaaatcggacatgatggccatcatgattctcagtaatagagttctcagccaccaggttacatgtgcctccttcaaaaaggcttctattattagagttcagttctggtacctggagtgcaaagcaattgttgtcccaagaaccatatgctaccagaacaagaaagatgagagcggttggtggccaaggctcctgaaaaaggacctgtgttcttga

SEQ ID NO: 134865 - DNA, 1344 bp, Zea Mays
ccccgggctctccgcgccatggacctggagctcgaagccgcgggcagcggcggaaacggaacaagagcggtgtccctctccgttgactccccgacggccgaactaggccgcggggacctgggcggcagcggcggaccctctcaggaccgcaccgtctcgcgccgccacgtgtccctccgccttctcggtgtcggcgacgggatcgcattcgaggtcgtgggcaggaaccccgtcgtcgtccgctcccctgacggcggaggcggaggcggaagtggaaccagcagggtgttccgccgcggggagaagggcgagctccgcgccggggacgcgctgtcgctgtcgctcaaggctcctgcgttctgggcggtgcgggcgagggaggggaacggcgacggggacgcggatgtggacgtggaacccgccgtgcttgatgcggtggcgaggcgggagaggcgtacgcgggagcggaaggagagggagagggagaggcgtgttgcggaggagaccatggaggtcaccgaagaggaagaaggggcagccgtggactctgatgtggagggtttcgacattgatttagcagccatagatccagttcgagaatttgggttcttgtcgatgggccatgaattcgacagttacccgaagggaaggattcgtgctccaaaggattggaattggttcctagaggaagcaaagaggacctctgacgatgaagctagcggcaagaggagatctagatcgaaagttctgggatggaacaagaagaagaaagatggagaaggcgaagatgaagactggactggtgagagtgaggatgaaaaagagtccacgggaagagttaccagtgtgaagagaccaaagtatgcgacaagatctaaaagctcagaaaaatatagtagggaaaactcgaagactggaagtggcagaagtatcgacgaagatgacggcactgaggatgagcaagatgagactctgggaggttttttagttaacgacgaggatgacgagcctgcagaagagctgagcgatgaagaggaggaatttgacgatgaggaagatgatgattgataaccacgtcaaaaaagaaccttctcagtgatgaactgatactgacaagtgacaagcagtatgtttatattcctttgaacttgtgtaaaaacaatgtgtggcaactgtgttagtgttgttaattctgaaaaatgacgtttttgtatatctgcattgcttatctcagcagtgaaccgaattttcgctcagctgtgctgccatgctgcgacatgggccacgaacgagcctgcatgaaagcaatccgtttccgtttgaaatcagtctttgcactatcaa

SEQ ID NO: 134866 - DNA, 95 bp, Zea Mays
tcgaactcgcgtcagcagtcagcacacaggctacgctagccactaagtgcaaggttctggcacgagatcaatctgttgtgaaggattcttaaaac

SEQ ID NO: 134867 - DNA, 2469 bp, Zea Mays
cggtctccgacgcgctgcccgctcgcctgccaaacccccaccccctcggcggcgatgctgacacgtcgccgtagcaaccacccgggctgctccttccccctcccgttcctcgtctgcggcctgctcctcgctgcggccgtcgcattttccccagctgcggccgccgaagcagctgacggcggcgctgggcacgagggccgcgcggggaaaccggaggtagaggccgaggcggaggcgcgcggggatggggttgccgtggcggaagccggcggcgaggtggtggctcagggcaatgccacggaggccaaggagggcagccttgccgacatgatcgaccgcgcgctggagaaggagttcccggagtccgagggcgagcagggcggtggagagaccgaccctggcagcttcaacaacacggtagctgagaagcagggagttcttgaaactgtagctagaagagtaacaaagaagaatgaaaccaaagataacaagtcatttccttttaaggaggttttcttggatcgaactgagcaagaggatgttcccacgttgatagatcggaaggataatgtttttatcatctcaaacccaaagtcaaaataccctgtgctgcagctggaccttaggttgatatcagatcttgttgttgttatcgtatccgctacatgtggtggaattgcctttgcttgccttgggcaaccggtgattacaggttatctacttgcaggatctataattgggcctggaggttttagctttgtcaatgaaatggtgcaagttgaaacggtagcccagtttggtgtgatatttctcctgtttgcattgggacttgagttttctactgcaaaacttcgagttgttcgtgctgttgctgttctcggaggattgctccaaattatgttgttcatgtttctttgtggtattttggctaccctatgtggaggcaaaactaaagaaggtgtttttgttggtgttcttctctccatgtcttcaacagctgtcgttttaaagtttctgatggaaagaaatagtatcaatgctcttcatggccaggttacagtcgggatacttatattgcaggattgtgctgttggcctgctgtttgcgcttcttccaattttgagtggtacatctggccttcttcacggagttgcatcaatgatgaagtcgctggtggtattgataacattcctgaccattctctctatcctctcccgtaccggcgttccttggtttcttaaactgatgataagtctgtcatcacagacaaatgaactatatcagctggcagcagttgcattctgcttgttatttgcttggtgtagtgataagttgggcctgagtctcgagttgggttcttttgcagctggagtaatgatatcaacaacagaccttgcacaacatactcttgaacaaatcgaacccatccgcaactttttcgctgctcttttccttgccagcattgggatgctaattaatgtccatttcttgtggaaccatgtggatatactccttgcagcagtaattttggtgatcaccgtaaagacctttattgttgctattgttgtaaaagggtttgggtatagcaacaaaacatctcttcttgtcggcatgtcacttgcacaaataggagagtttgcttttgttctcttaagccgtgcttcaagtattcatctaatcgagggcaagctatacctgcttcttcttggaaccactgcacttagtttggtgacaacccctctgctattcaaaatgatccctgcaatggtccacctcggggttcttttgagatggttttctgtcgataccaatcaggtggagctgggcctgaaaaatgatgtcctccgcatcgatagcggcaagcgcataaatctgatagtccaaggctcacatgactcatgacacatttgacacactgcaagctactttttgtatggcttaagtttacaagctctgtaaagtgttttcacctgtactgaagagtttctagcagatatacgagggtggaggcaagagaactcaactcagatcttgctcctagtgcaagatcaatcctcccccgtcatgacggctgcaagggcaaagtcgggttttgccgttcttgagagcagtgtgtcttggatgattggtgcagtgagtggctgtcgaccccaaatgagggtctcgtgtaacatatgaatgtatggtgattaattaattggattagcatgataggatgtaggcctgatcctcagtaaaggttatgcccttgtgttctttcaccaaagttgtgtatcctcactacacgaaagtgtgtacgacatccatcagatcacgaattttgttgtgtagccatatatgtcagtttcttaacatgtccaagttcatgagtttttttttcctcacgggaagcttttgagtaacctttgttcagatatcactttgttggatcgagtccaggatctcaatgatgggtgtgtttcaatgaat

SEQ ID NO: 134868 - DNA, 2849 bp, Zea Mays
ccccctcggcggcgatgctgacacgtcgccgtagcaaccacccgggctgctccttccccctcccgttcctcgtctgcggcctgctcctcgctgcggccgtcgcattttccccagctgcggccgccgaagcagctgacggcggcgctgggcacgagggccgcgcggggaaaccggaggtagaggccgaggcggaggcgcgcggggatggggttgccgtggcggaagccggcggcgaggtggtggctcagggcaatgccacggaggccaaggagggcagccttgccgacatgatcgaccgcgcgctggagaaggagttcccggagtccgagggcgagcagggcggtggagttgcttgtgctaatctgagctctggttttgcagagaccgaccctggcagcttcaacaacacggtagctgagaagcagggagttcttgaaactgtagctagaagagtaacaaagaagaatgaaaccaaagataacaagtcatttccttttaaggaggttttcttggatcgaactgagcaagaggatgttcccacgttgatagatcggaaggataatgtttttatcatctcaaacccaaagtcaaaataccctgtgctgcagctggaccttaggttgatatcagatcttgttgttgttatcgtatccgctacatgtggtggaattgcctttgcttgccttgggcaaccggtgattacaggttatctacttgcaggatctataattgggcctggaggttttagctttgtcaatgaaatggtgcaagttgaaacggtagcccagtttggtgtgatatttctcctgtttgcattgggacttgagttttctactgcaaaacttcgagttgttcgtgctgttgctgttctcggaggattgctccaaattatgttgttcatgtttctttgtggtattttggctaccctatgtggaggcaaaactaaagaaggtgtttttgttggtgttcttctctccatgtcttcaacagctgtcgttttaaagtttctgatggaaagaaatagtatcaatgctcttcatggccaggttacagtcgggatacttatattgcaggattgtgctgttggcctgctgtttgcgcttcttccaattttgagtggtacatctggccttcttcacggagttgcatcaatgatgaagtcgctggtggtattgataacattcctgaccattctctctatcctctcccgtaccggcgttccttggtttcttaaactgatgataagtctgtcatcacagacaaatgaactatatcagctggcagcagttgcattctgcttgttatttgcttggtgtagtgataagttgggcctgagtctcgagttgggttcttttgcagctggagtaatgatatcaacaacagaccttgcacaacatactcttgaacaagtaactttttacatgtaccttgcatgttttttctgtcccctttccaggaaaaggggggaattactatctactaccccctctttcaaaccacaggccactttagctttgttctaagtcaaacatctttgactttggccaaatattaaaaatacatcaacaaatgcacaaggcacgtttcatggataatttaatgaaatcaatttgatgttggagcattttctgtaaaccttgtgaaagttagagaagtttgacttatgagattgctgaattgatctataatttggaacggagaaagtctttagtttgatctttattttatgcttgagcaaactcatagctagactcttgtagttagtaattcattatattgttctcttatttcaggcttgttctttctgcagatcgaacccatccgcaactttttcgctgctcttttccttgccagcattgggatgctaattaatgtccatttcttgtggaaccatgtggatatactccttgcagcagtaattttggtgatcaccgtaaagacctttattgttgctattgttgtaaaagggtttgggtatagcaacaaaacatctcttcttgtcggcatgtcacttgcacaaataggagagtttgcttttgttctcttaagccgtgcttcaagtattcatctaatcgagggcaagctatacctgcttcttcttggaaccactgcacttagtttggtgacaacccctctgctattcaaaatgatccctgcaatggtccacctcggggttcttttgagatggttttctgtcgataccaatcaggtggaggtacacgatcataccagttgagttcattgatggattgctttactctagaatgtttgccaatcaattcatcggttcttccttttcagctgggcctgaaaaatgatgtcctccgcatcgatagcggcaagcgcataaatctgatagtccaaggctcacatgactcatgacacatttgacacactgcaagctactttttgtatggcttaagtttacaagctctgtaaagtgttttcacctgtactgaagagtttctagcagatatacgagggtggaggcaagagaactcaactcagatcttgctcctagtgcaagatcaatcctcccccgtcatgacggctgcaagggcaaagtcgggttttgccgttcttgagagcagtgtgtcttggatgattggtgcagtgagtggctgtcgaccccaaatgagggtctcgtgtaacatatgaatgtatggtgattaattaattggattagcatgataggatgtaggcctgatcctcagtaaaggttatgcccttgtgttctttcaccaaagttgtgtatcctcactacacgaaagtgtgtacgacatccatcagatcacgaattttgttgtgtagccatatatgtcagtttcttaacatgtccaagttcatga

SEQ ID NO: 134869 - DNA, 5339 bp, Zea Mays
cccgctcactccgagtctcactctcactccgtcctccctcttccttacagaaacacaactcatgcagctcgtacggcaccaccaccaccaccaccaactgccgcactgacacatgcatgcgcagaaagcagctagctagcggccggtggccttgagagccgctcgctagcttttaaaattagccaccaattcaatctctagctagcttgggggagctccgttcctagctacacgtacgggcggcgcggcaaccaccagccgtgtagccgacctagtacgttggagcgaagcatatatcggcggccgcatcacatggagagcgcgatggagaaggtgtgggagtcggggcggcggatgagccggagcatcgggcggggcatgggcatggaggcgtggggcgtcgacgacgccttcgtgccgcagcacggctcccggtcccggggcggcggcggcggcggcggcgacgacgacgaggaggcgctgcgctgggcggccatcgagcgcctgcccacctacagccgcgtgcgcaccgccatcctgtccaccgagaacgccgccgtggttgacgacgacgacgacaagacgcggcggccgccgccgccgcagcagcagcacttcaaggaggtggacgtgaggaagctcggcgtcggcgagcgccaggagttcatcgagcgcgtcttccgcgtcgccgaggaggacaaccagcggttcctccagaagctccgcaaccgcatcgacagggtgggcatcgagctgccgacggtggaggtgcggttcgagcggctgacggtggaggccaggtgccacgtgggcagccgcgcgctgccgacgctgctgaacacggcgcgcaacgtcgcggaggcggcgctgggcctgtgcggcgtgcggctggggggccggcaggccaggctgaccatcctcagggacgtgtccggcgccgtccgcccgtccaggatgacgctgctgcttggcccgccgtcgtccgggaagaccacgctgctgctggccctcgcgggcaagctggacccggcgctggtcgtcgccggcggcggcgaggtctcctacaacgggttccgcctcggcgagttcgtgccgcagaagacggcggcgtacatcagccagacggacgtgcacgtcggcgagatgacggtcaaggagacgctcgacttctccgcccggtgccagggcgtcggcaccaaatacgatcttatgacggagctggccaggagggagaagggggccggcatccggccggagcctgaagtcgacctcttcatgaaggcgacttcaatggaaggagtggagaacagcctccagacggattacactctcaggatactggggctggacatctgcgccgacaccatcgtcggcgaccagatgcagcgggggatctctggcggccagaagaagcgcgtcaccacagctaacgacacagtcgagtgtcacatcctgcggttcgatcgtgcagcaaaaaaaaaaaaaagggcaccgtgcttttgtgctgtgcctctgaggtccacacacacaagggacaccgtgcctttgattgggacgcagcagttggtagcgtaccatctcgtggttcagggattccagggggagatgatcgttggcccgaccaaggtgctgttcatggacgagatatcaactgggctggacagctccacgacgttccagatcgtcaaatgtctccagcagattgtgcacctgggcgaggccaccatcctcatgtccctcctccagccagcccccgagaccttcgacctgttcgatgacatcatcctgctgtcggaaggccagatcgtttaccagggacctcgtgaatacgtcctcgagttcttcgactcctgcgggttctgctgccccgagcgcaagggcactgcggacttccttcaggaggtaacatcaaggaaggaccaggagcagtactgggcggacaagcagatgccttacagatacgtttcggtgccagaatttgcgcagcggtttaaacggttccatgtcgggctccagcttgagaaccacctctcgctgccgtttgacaagagcaggtgccatcaggctgccctcgtattctcgaagcactcggtgtcgacaaccgaactcctcaaggcatcctttgacaaggagtggctcctcatcaagcgcaattcatttgtgtacatcttcaagaccatacagcttatcattgtagccctcatcgcgtcaacggtgtttctgagaactcacatgcatacgacgaatctagatgatggctttgtttacattggagcactgctctttactctgattgtgaatatgttcaatggttttgctgagctttccttgaccataacaaggttgccggttttctacaagcaccgggacctgctcttctatcctgcttgggtcttcacagtaccgaacgtcattctcagaatcccattctccattattgaatctatagtatgggttcttgtgacatattacaccatagggtttgctccagatgctgacaggtttttcaagcacttgctgctcgtgttcttgatccagcaaatggcaggtgggcttttcagagcaacagctggactttgcaggtccatgatcattgctcaaactggtggagcactatttcttcttatcttctttgttcttggaggctttgtcctgcctaaagttttcattcctaactggtggatctggggctactggatctcacccttgatgtatggatacaatgctctagctgttaatgaattctatgcccctcggtggatgaataagtttgtcctggaccaaaatggtgttcccaaaagactggggatagctatgcttgaaggtgccaacatctttgttgacaaaaactggtactggattggagcagcagggctcttgggtttcaccatcttcttcaatgtccttttcacactgtcgcttatgtacctgaaccctctcggcaagccacaagctgttatatcagaagaaactgcaaaggaagcggaaggcaacgggcattcaaaaggggcaataagaaatggaagcacaaaaccaaaggacggtagtcataacagtttggttatttcagaggaaatgaaggagatgaggttgagtgcacgtttgagcaactgttcatcaaatggggtttcacgactcatgtccattggcagcaatgaagctgctccaacaagaggaatggttcttccattcaaccctcttgctatgtcttttgataatgtgaactactatgttgacatgcctgcggaaatgaaacatcaaggagtgcaggatgacagactccaattgttgcgtgaggttacaggatcattcaggcctggagtgctgacagcacttatgggtgtcagtggagctggaaagactactcttatggatgttttggctggaagaaagactggggggtatattgaaggagacatcagaattgcaggctatcccaagaaccaagcaacattcgcaaggatttctggatactgcgagcaaaatgatatacattctcctcaggtcacagtaagggagtctttgatatactctgcctttttgcgccttcctggaaaaattggagatcaagaaataactgatgacataaagatgcaatttgtggatgaagttatggaactagtggagctcgacaatctgagggatgccttagttgggctaccaggaatcacagggctttcgacagagcaaagaaaaaggttgacaatagccgtggagctcgttgccaatccatcaatcatatttatggatgaaccaacatcagggcttgatgcaagagctgcagcaattgtcatgagaactgtgcggaacacagttgacactggacggacagttgtttgcacaatccatcagccaagcatcgacatctttgaatcttttgatgagttgctattgttgaaaagaggaggccaggtgatctactctgggaaattgggtcgcaactcccagaaaatggtggagtattttgaggcaattcctggagtgcctaaaataaaagataagtacaatcctgcaacgtggatgctcgaggtcagttcagttgcaactgaagtgcgactaaagatggattttgctaagtactatgaaacatcagatctgtataagcaaaacaaggtactggtgaaccagctgagtcaaccagagccaggaacatcagatctttatttccctacagagtactcgcaatccacaataggacagttcaaagcctgtctctggaagcaatggctgacttattggcgcagcccggattacaaccttgttagatattccttcactctgttagttgccttgcttctcggctccattttctggaggataggcaccaacatggaagatgcaaccactctcggtatggttattggagcaatgtacactgctgttatgtttatcggcatcaacaattgttcaactgtgcagccagttgtttcaattgaaagaacggtcttctacagagagagggctgctgggatgtactctgctatgccatatgccattgctcaggttgttatagagataccatatgtatttgtgcaaacaacgtactacaccctcattgtatacgccatgatgagcttccaatggacagctgtcaagttcttctggttcttcttcatttcctacttctccttcctctacttcacctactatggcatgatggctgtctcaatctccccaaaccatgaggttgcatccatcttcgcagcagctttcttttctctcttcaatctcttctcaggcttcttcattccgagaccgagaattcctggatggtggatctggtactactggatttgcccactggcatggacagtgtatgggctcatcgtgacacaatacggagacctggaagacctcatctcagtccctggagaaagtgagcagacgataagctactatgtaacacatcattttggataccacagggattttctgccggtcattgcgccggttctggtactctttgcagtattcttcgcgttcttgtacgcagtctgcatcaagaaactgaacttccagcaacgataagaacaagatatggcagcaaaagctcttgagagtttttttggaacattgccgtgtatatagggtattttgcacatcgcgttctcctttcattttttgagtccctttaatacattgtcgtgtatatagggtattctgcacatcgccaaatgtggtgaggtcttatacagatttctagccatttattgcaagagcaaaactatgatatttttccggatacacagaagagctacatattattatattaagaagagaggtctaacgtagacctgccacaagatataatcctctattggataagaggatataacact

SEQ ID NO: 134870 - DNA, 1881 bp, Zea Mays
ctattagctagctctcggtgaagtctgactgatgttagacatataacagatatgagaacaaacagtgccaacaataacatcttttttgtttttacaagttttcaagctaacatgtaacatgtctcaatggttgcagcaatttgtggatgaagttatggaactagtggagctcgacaatctgagggatgccttagttgggctaccaggaatcacagggctttcgacagagcaaagaaaaaggttgacaatagccgtggagctcgttgccaatccatcaatcatatttatggatgaaccaacatcagggcttgatgcaagagctgcagcaattgtcatgagaactgtgcggaacacagttgacactggacggacagttgtttgcacaatccatcagccaagcatcgacatctttgaatcttttgatgagttgctattgttgaaaagaggaggccaggtgatctactctgggaaattgggtcgcaactcccagaaaatggtggagtattttgaggcaattcctggagtgcctaaaataaaagataagtacaatcctgcaacgtggatgctcgaggtcagttcagttgcaactgaagtgcgactaaagatggattttgctaagtactatgaaacatcagatctgtataagcaaaacaaggtactggtgaaccagctgagtcaaccagagccaggaacatcagatctttatttccctacagagtactcgcaatccacaataggacagttcaaagcctgtctctggaagcaatggctgacttattggcgcagcccggattacaaccttgttagatattccttcactctgttagttgccttgcttctcggctccattttctggaggataggcaccaacatggaagatgcaaccactctcggtatggttattggagcaatgtacactgctgttatgtttatcggcatcaacaattgttcaactgtgcagccagttgtttcaattgaaagaacggtcttctacagagagagggctgctgggatgtactctgctatgccatatgccattgctcaggttgttatagagataccatatgtatttgtgcaaacaacgtactacaccctcattgtatacgccatgatgagcttccaatggacagctgtcaagttcttctggttcttcttcatttcctacttctccttcctctacttcacctactatggcatgatggctgtctcaatctccccaaaccatgaggttgcatccatcttcgcagcagctttcttttctctcttcaatctcttctcaggcttcttcattccgagaccgagaattcctggatggtggatctggtactactggatttgcccactggcatggacagtgtatgggctcatcgtgacacaatacggagacctggaagacctcatctcagtccctggagaaagtgagcagacgataagctactatgtaacacatcattttggataccacagggattttctgccggtcattgcgccggttctggtactctttgcagtattcttcgcgttcttgtacgcagtctgcatcaagaaactgaacttccagcaacgataagaacaagatatggcagcaaaagctcttgagagtttttttggaacattgccgtgtatatagggtattttgcacatcgcgttctcctttcattttttgagtccctttaatacattgtcgtgtatatagggtattctgcacatcgccaaatgtggtgaggtcttatacagatttctagccatttattgcaagagcaaaactatgatatttttccggatacacagaagagctacatattattatattaagaagagaggtctaacgtagacctgccacaagatataatcctctattggataagaggatataacact

SEQ ID NO: 134871 - DNA, 101 bp, Zea Mays
ataaactctcatggttggttggagcaagttactagcttgattgatctgacaagcttggacgatgggtttgcactaatggtggcattgggtaattttcatac

SEQ ID NO: 134872 - DNA, 2080 bp, Zea Mays
agtaaaggcaaagtgaagcgaagtgccgaactactacgagcaaagagagagagagagggggttggggggtgagggagagagagaaaaaaacagcgtccccgcacgacgctaacacgtcccagatctaacaggaaaaaaaaaccaccccaccacgtcgccaccaactaacccatcatccatcaacgcaggtcctccccggtcacgcggcagtcacccccactctgctttgctctgccgccccgccccgcccgcactgcatcgcgtcctccggcgccctcgctgtcggcgccattggcgggctcgccttcaactgccccgtccgctggaaccaaccaggtctaaacatgcttcatcgttcaaatagccggaaccaaaggaacaggggatcaagaatcaaaacactactccaagctaccttgcttataggtgttattttttggctcctatatcaggtgaagcattcctatgataagaaaaatgagtacttggatgatgctgaggatcagcttgcccataatgatataagcatgttccaggggaggaaagaaaaggcaggtagttacagtgatagcaatatccaaatggttgacgacaattctgatgtaacgactaaaccagaagaacgtgatgcagatcaccattcagatacttttaattataatgagaagactggagaaactgtgttcgataaagacagtactaacttgaatgaagatgacaagagaaacactgagaggtcagaagcggaaggacaagtcaacagtgcagatggtaatacagaagttaataataataacaatgaagatgaaactaccggtcatgcagaagaaggcaagcatgatactgaatccaactctgctgctgagagtaaaagtgaagtcaattcaactggagatgatatgtcccgaaacaattatgcacaagaggaaaacactggggaggcaagtggaacgtctcatgaagtggtgcaaggtgaacaatcgaccagtgcaagtggaagcgggaatggatcggatggagatggtgagaaaaatgaggcagttgatattaaaagtggttctgaatcccttcctgatgatgccaaggctgaagcaactgatgaccgtgctactgtcagtcttcctgatgaaaccgggaatataccatcagttcatactgataattcgcaaaatgatgccagtgaaaaccaaggtgatgcaacttacactacctcggattcgtctgagcatggcattgttgaggctgtccatattgaaactggattggaagatgaaagtgcaacagcatcatctgggactggatctggtgatgacaacggtaactcatctgatagcgcctctgcagaagaaaatactgagactgtatctggtgatgatgagaagggcatgggaacaggtacaaccactgaagcgtcatattccatacaacagaactctgagaacagcagtgtctcagctgaggcagagaactcccaaggggattcttccagcggagtgaatggttcttcagaagagacatctaacaagggtgatggagctacagaaacgtataacaagggtgagcaggtggatcccaagattgaaactagcacatccaccaatgccgagcataatgaatctcaaggggctgatggcagctctggatcaaatggtaacggccctgaacaaaccggtaaatctgaaagccagtgatttccaccatcgagagttcgagacacgaatttagtatacaggtttgttttctggagattgaagaggggatagtgcacatagaaaaactgttcactgtggtttatcgagattttagtcgatactgccgaagtataattgtgcagatcgcaagattggttgtctgctatgcttattgcttatggcatgatttctcgtcaagttgtacttgagtcaatatttctgtacggttattaatctcgacatggtactctgttcattgttggatattatgacagtcttacaatattctgcagtgtggccgaaatgccctttgcccgttttgatcactgcgggtacctgtgggtttatacgctcatgtttctcatttacggtcattttttttagagcct

SEQ ID NO: 134873 - DNA, 927 bp, Zea Mays
atggctccaagcagagaggcgtgtgcggtcgccatggcggtcatggcggggccgttccttgcgatggcgagcaacgccgccgtcagcgccagcgccaacagcacgggcaacggtgaggtcaagcggcggcgccggacctcgtccaccaacgccctccagcgcaccgcgtccgacgtctccgcctacgagctccaccaccaccaccacggcgtggtgacgaacaaggacgagaaggcggaggccgagcagcagcagcccgccgtgcctgaggcgtcgccggtactgcagcacgccaagtgcgagtgctgcggcatgtcgcaggagtgcacgcccgagtacatccgcggcgtgcgcgccaggttcgcggggcgctgggtctgcggcctgtgcgcggaggcggtgacggaggaggccgataagaagaagggcgggccgctggaggaggcgctcaaggcgcacatgggcgtgtgcaagcggttcaacggcttcggacggacgcacccggtgctgttccaggccgaggccatgcgcgagatcctccggcgccgggccacggccacgctcggccccaggtccaggtccagcatcaaccccagggaggtcaacagggaagtcgccaaggccgccggcaccgggatctcacgcagctccagctgcatgaccttcatcgccgaccacgacttcaaccaccgggcgtcgtcgtcgatcaacaaaaactgattctcgatcacgacgagtttttagtagcatggcaagcttcgcacttgtttaataattaaccttcaattctttggaggctagaaagctaaggtgcattattaattagttcgcttcatgcgttattaattagctttctttttaggccggctagactagagagtgcatgcatggttctgtttacaaatgccattacgcgctgtttctttt

SEQ ID NO: 134874 - DNA, 530 bp, Zea Mays
gggactgcaacatgatcaaagaggaaaaagtggaagccgccatcatctccatcaggtcgttctcgcttccgtcggtccatccaaggccatgctatcgacacctccgcagtcttcccatcctccagtacattttttcaactgcccgcgcggtagggaaggcaaagggtgggcatgtcgtcctctcctctgcaccacgtcatccacgacgatggtggaggagactgcttcagtcgccattcgttagtctccgttgctcctccacacgcttggtcgtcgtctctacggttggcccagctttgaataaagctaatttccctgcagcttttgaaaaagagttgctgaaaaaaaatcaggtgaatcgcacattctgtaagttctattcgaaagagccaacagacttctacatctgatactgaagaacatagatccaaatgtaatgctaaagaagaaatcacaaaggaccaaacaactagcactaggcaactcaaagcaaaagataatatgccttcgtttgaatctcctccaaaaag

SEQ ID NO: 134875 - DNA, 1246 bp, Zea Mays
gggactgcaacatgatcaaagaggaaaaagtggaagccgccatcatctccatcaggtcgttctcgcttccgtcggtccatccaaggccatgctatcgacacctccgcagtcttcccatcctccagtacattttttcaactgcccgcgcggtagggaaggcaaagggtgggcatgtcgtcctctcctctgcaccacgtcatccacgacgatggtggaggagactgcttcagtcgccattcgttagtctccgttgctcctccacacgcttggtcgtcgtctctacggttggcccagagtctttcatgtgatttgaacgctgcgccaacagaaacttggcttctaaatggagctggttgttgaaatgagaggacaaatgaggaatggactgaagtggttgcaacgtaggaaatcaggttgctttatgttacacatgttgtttggtggcaaaaatcagtggtccatcagtgcttcctatggccttcgtttcaaggaccgattcttcttcagtggatgctgacagctagacatcccgaaagtcatctggagagtatagctcggcacatgtagcctcctggagtcgttgacaactcagtgccatctgaatcataggacaactgaagcaaagcgagatagtaatggaagaagaattgaaaagatcaggctgcttgccatcatatatatatacatgggaggaggaggaatagtaagtacatcactccgcttttctgttttttggtgctctgctggatgaacaagaactgagctggaacaggagaagctggctacgtgagagcactggctgcctcgtccgaatccctcgtctgttgtttttttagtcgtatacacagacagaaacagactagacttgcttgaggttacactaggcacaacagccatggtggcggcccgccatgagcaagttgcttctagtgaggctggtggatgacgcggcgcgcggcgcccctggcgtagtgcgtcggcctatccgcgtgcctctactgctgggcgcgcgacgacaacgacggcgtggcggcggcccggggggagctgaagctcagcgccctgagcatctcgaggttgtttcgttaatgatatatagttgaaattcctcgggatatcatagcattatgtttgctaggtatcggtggttttagttttgtatatccatgtatattagagtgatgtatcaagcatcttataaatgaattatgtctacaatcggccaacttttattttgattgaggta

SEQ ID NO: 134876 - DNA, 101 bp, Zea Mays
aaattgtgtatgccttttggagtaatttgctttgtttcgatgcctacatgttagctttgaataaagctaatttccctgcagcttttgaaaaagagttgctg

SEQ ID NO: 134877 - DNA, 2084 bp, Zea Mays
atggctagacctagactgccttccatgggccaccaacaggcaatgtcgttgctgctgctgaccgttctgtgggcggcgaccgctgttgccgcacggcgagagcctgtggcgtggaggcctggcatggttagagccgaggattgcgacaagaaacatggtaagggtggcagcggtgccgatgtaggaggtggtgccggaggcggaatcggcgccggtggtgccatcggtagtggtgcaggaagtgggttaggaagtggcacagggggtgggttgggcggcggcggtggctctgggcgaggaggtggtggtggtctaggtggcggcattggcggtggtgcagggtttggaggtggagcgggtgcaggatctggtggtggagttggccttggtggcggcggggggcttggaggtggaggcggggttggagctggtggcggtggcggttttggaagtggtggtggagtaggagttggtggcggcggtggttttggaggtggtggtggagtaggagctggtggtgctggtgggggtggttttggagcgggaggcggcacgggagggagaattggtggaggtgatggacttggaggaggtgtcggtggaggaggattaggcggtgggttcggtgcccgtgggggagcaggaggcggcctaggcggtggcgctggagctggcggaggcatcgggggtggagctggtggtggcttcggaagcggaggcggctttggtggtggcgcgggagctggtggcgggttcggcgctggagctggcggaggcatcgggggtggagctgggggtggcttcggaggcggaggcggctttggtggtggagccggacttggaggaggggcaggaggaggactgggcggtggcggtggtttcggcggcggcatgggcggtggattcgacggcggcgcaggaggcgggttcggcgcaggaagcggcacgggcattggcgcaggcggtggaggtggcatcggcgccggagctggcggaggcattggaggtgggcctgggattggcggtggagcgggcagtggtgtcggcgggcaccatcacgacatgagcagcgtcgtgaatgacaaacatcttgactgacgagcagttgatcttcggcttccttctgcattcggtttcgtaggacctgatttaattatatcgcgctaataaataaggagaccgcctagactctcacttagattagcttctcgatcctattctattaatttcctctttctttctttccacgtcgaccatcgtatttttatcgatttttttatcaaaattacaattgatttcattgtccaatgcaagttaaaacgagtacaaacttgctcccgagtcgacgttgttcttctggaaccatcctcggcggctgctacgatggatgttgatttttttaaataaaatctacgagaaaaatgttaagtttgcatagccgaaccataaccgttgtaaaattttctcgctagggcgggtcggcgggagctggcagttccaacttccaacggttacatttccgtcgcaggtcctctggatttctaaacggctgagtgcgcgcggccggcccatatgaggcccagagagaggacgtgcggcctgtgaaaggaaaagccgtcaggcagagcactccagcgtagccacacaggccgttgggctcctgtctccttcgtccagtcattgagcccagcttccttatatttattgtcatgtcatgaattcatgatgggtgcgtttggttccttatatttattgtcatgtcatgaattcatgatgggtgtgtttggttgcctgcatctgcgcgtgctttgtatcgtgggacgtgggtagctgctgtttggttgctgtgaaccaggctatacgcgtgcgagctctgtgtttggttgcctacatgcatatttggatccaggctcgcacgatcctcaaagcaccctggccaggctcactagatacgagccgattgatcgcatttgtggagctaggcttcagcggtcctggctcacacagccaggttgcctagagaaaccaaccaaacaggttggataagaataaaatagaatagatagatatatagacctagagca

SEQ ID NO: 134878 - DNA, 812 bp, Zea Mays
cccgtacggtcgtagccgctttctctgcctttcgttcatctcgtcgtcgggccgccgtcctagcgtccaggagatccggacgaacaccccctcgccgccgcaccaaggctccaggccaagcgtcgcgcacaacgcactagttgcagacttgcgcagtgcaggtcgcgccgcaccaaggctccagccttcaggccaagcatcgtgctcgcgcactagttgcagcttgcgcagtgcaggagcacatcaacacatcacgtcaccgctacaaggattgatcaagcattcaaggttccagttccagctccagagtccagagaagtgtgtacacgagcacaaaaaaatattccaggtttgcggccacatgctcgcctaatcgcctacaggctacagatccttgcctagctccagccactgtccattgctgtcagcaccatgacttcctcctcactgcctcaaagttcaggcgacgacgtcgacacaagaagggacacctcgaacaagaactggctaccacatgctaccagtgatgcagcagccacaacccctattgtgtcatctgctactcccaaaatagctgctggaactgctgtcatgcaatgcgctagtgtcggtaattcctcaatgtctgatgccatggctccccgtcatccaccacaaccacgtgtgaaaaagaccatcgccaagaaaagaagtcgccttgctaccgaaggatcaccttctgctccgactactcaagaacaagacgcgtcaaccgtggctggtacacagctattaaaatcattggggttcgatttcaagcacgctaacctctt

SEQ ID NO: 134879 - DNA, 280 bp, Zea Mays
gttatggcagtgcatatgtcaaatatcagaacacaatggtgacttgctctcgtgtaaaggctcctgagagcgagcgatcagcgagccggcctgctgtcgctgctcgctcgagggaaagaagatcacacagatgtaaaatgagagctcaaaaagaagccgacgtctagtagcgaaagcagcagtagccactcccaccattctccttacgttaatctgtatttctctttgtctatgatcgttcacacaaacacttactatatatatacacaattcttataac

SEQ ID NO: 134880 - DNA, 417 bp, Zea Mays
atgtacctccgcggagcgccgaacagcaacaggaacatcaccgtcatctggaaggccaagaacttcaccgtccacagcgtcgtcaggtgggtggacacgcagctcccccgccaccccaagctgaaggcgttctacaggtcgatatcgccccggcacttcttcaacggggactgggacatcggaggcagctgcgacaacaccagccctctggccaagggagggagcggcgtccacctcgaccgttcggaggacgccgacgctaaaggcgctgtgaggggcaccggggtcaggctcctggacgtcactgccctgccgcggctgagggacgaaggccatatttcgcggtacagcatcaaggccactcctggcgttcaggattgcctgcactggtgccttcccggcgtgcccgacacctga

SEQ ID NO: 134881 - DNA, 128 bp, Zea Mays
tgccaaatgataatatctacaatgttataatcttagtatttcccatcacttgccattccacaaataaacaatattgcatatgttaaatggctcttctaacaaaagaattttgaaaacaaagaggaagg

SEQ ID NO: 134882 - DNA, 1210 bp, Zea Mays
cgcgcgcccgcaggtgcagtgtcccagtgctacactcgcatgaactagcatcggccgctgctcctctctttctcctccaatcgtcggtggtctttttcgggcctgaaacatacgggagctagcagaggagagagctagcaaaggaagagatcgatcgagagaggtagtaggcaagatgagcggcaaggctctcctagttgtcgccgtcgtcctcttggtgggcgtagcctctcggtgctcgggcagcaggggcctgcatcagcagggcgatcacgttgctgaacagaagttccaaacagacggtaccggcaatgggtacggaggtggcggcggcgggtacggcggtgatggggggcggcggcggcggcggcggctacacgcccgggtactctggcaccgggacctgcgactactggaagagccacccggacgcgatcgtctcgtgcgtcgggtcgctgggcagcgtcctcggctccctgggcgacgcgtgcagcgccttcttcgggggcaagctgcagacgctgcaggacgcgctgtgcaacgcccgcgccgacggctacggcgacctcctccgcgagggcgccgcggcctacctcaactccgtcgccgccgccgccgctggcaagtacgcctacaccacgcagcaggtcaaggactgcatcgccgccgcgctctcgtccgaggccgccgccgccgcgcaggccgccatgttcaacaaggccaactacgcctgccactattactagctagctagtcctcacagtttgccttcgatcgtctatctgcgtcgtctttccatgatgatgcatgacgacgcgcgcccgtctccttgtctggagcagtagtagtgatgcttgctttcttgtcgttgtttgctgatgtgagaaataagacgatgctgggtagtaatagtaatataataacggtcgttgttcttacgaaatgcaccggtggatactcgcgcttgtttctgtctcgtcagcgctactggttgttgatatgcaatcataataattgtttggctatagacaaaaaaatgggtttttcaccaattttaaaaaccaaaaaatagcgataataattatgtaagtggatctacaagttggaaaacacagtagtacataatgacaataaataattacgtgagtggatctacaagttgaagagttgagaagagaatatgtgcatgaggttgattagaacgaaatta

SEQ ID NO: 134883 - DNA, 1428 bp, Zea Mays
tgattcctgtttataaaagagaactaaagatgcttagccctgcttagataattaaaagttgttctttttaaaaagatgacgtgttacacgggatatgggaaattgtcgtgaaaaagaaattgggatggtgaatccatatggccatgatggattcaacatccagaaaaagtacctctgtcaggtaccaaagattgggaaatggtttaaataaaatgagaccagacgttgagcaggaaaggtcgcccatctgtgtcgcttaaggaccgttccgattgttggcctgctgatctaggaccctttaactggccacatgcctcgtcatgggtaagcttagcctcggtcggaccaataccagaaaggccggcccgcaatgggagtggagagatggcgagagtatcgtgtatccacctggcaagaggctggatggtggggtactgagctctcggttggcggggacccgttctggtcttgagaaaatcgtgggcgagttgacatatgcaagggttaagtgctacatatgtcgtgtggttggagatccccagctgggtattaatcgattcggatcgccgaacttctcggatatgaagactggatcttcgaccttcagcgtagataacaagtgaaactaaagatgctaaaataaagctagtataggacaagtgaatgctctagattaggcaaatctagattcaggaaaagtacttaatttgtgaagtaaaattttggcataaggatccactactagtaagctcttctgcaaaatgagtctttgaaatttgataagctttaccttgattcccaataaaccagcatacccttgagagtcttttctttagtcgggtaagtcttgctgagtaattgcgtactcagggttttattccctgttgtttttcaggttataagtttgttctgttgtggatggtgctaagtgccggtgggctcggccttcttatataagtatatcccatctttagcttctttattgaggactgtcacttaagctagcatgtattttaaaacttataaatgttttatacattcaaattgtaatgtttttgaatcaaattctcttataatcactccgatgatatattgtaatatggttataacttgtaaatgttgtaacttgtaatcattttgtaataaagaatttatttccgctgcaagtgtttgtatgtgagttgtatttacttaatcctgcgatcttggcggtaagtcgtttatccggggtcctcgtggcactcggacagatcctgttaagttgtttggtgcacacgcatagctgtctgaggtctttgagacaaggacaattgcatgtgggcccgataacttgggaggttctgcgacagctggtatcggagctgaattaagtataatatgatcacatacatatttttaaaacaaagttttggtttcgaaaaaaaaaaa

SEQ ID NO: 134884 - DNA, 820 bp, Zea Mays
agcagatgtttcgtccgtagggaacactgcactgcacgtcgcggtcgcgtcaccaccatcgccagcagcagcagagcacctgcaagcacaaggccaggaccaggagtggcacggcccacggtgaacaaaagcagcgcatggcacgccgggagagagagagagagcgagagagcgagcggtacgcaccttcctccgcttccggcgccgccgccgtcgtgggcgccggccggcggccggggactgcgcaagcagcatggcctcggggcgcagcagcaggggcgaccagagcccgctgcggccgtagtcgaagtcgaaggcgctggtgtccgcgaacttgccgaggagcccgtccgagacgtccctcggcaccagctgcaccaacaagtcgtcgtcgtcgtcgccggcggtcatcatcgttgctgtaggcgaccacggatcctcctccagggcggagcagctcaggatgttgggcgacgacgacgacgacgacgcgggcatgcaagttccaaatacgaacttgcaccggcggcggcggcgggtgggctgttgcggtggcggtatagtatagcagcaggataatgtgtctagtgtctctctccttttccgctgggaaagcatggagaggatttgcggcagatcgcgcggtggttggaagggaaaaggaccggcaggccggctgaggctcctccattcgatcccggctgcctctgctctgcatctatgcaacgcatcacatgattgattgatcggtgtcgctcatggtgtgcggggccactcagagccgagctcttgctttctttattgctgtctcacgtttgag

SEQ ID NO: 134885 - DNA, 1262 bp, Zea Mays
attggtcaaaactcggaccagagcgctgaaccctggccacgtcagcgccgggacgcgttttccatttttttagccgtggcgtcggctatcactgccgcgaaaaaactgagacccacccgaccaaaatcccccacccgccgcagtccacgcgcccgcaccgcaccgcgcgccgcgctcgctgccgtgccagtgtccccttcctttcccgtttccccctccctctctctttccccacgcccgacgcccccaccactctctcgatccaaagccagatcggcacgacgagcagaggccccccccggagcggcgcggagcaatggcggcgggataccgggcggaggacgactacgactacctcttcaaggttgtactgatcggcgactccggcgtcggcaagtccaatctgctctcacgcttcacgcgcaacgagttcagccttgagtccaagtccaccatcggcgtcgagttcgccacccgctctctccaggtcgacggcaaggttgtcaaggcccagatttgggacactgccggccaggaacgatatcgtgctattactagtgcgtattatcgaggtgctgttggggcgttgcttgtatatgacgtcactcgtcactcaacctttgagaacgttgagcgttggctgaaggagttgagggaccacacagatcccaatatagttgttatgctggttggcaacaaatctgatctccgccatcttgtagcagttcaaactgatgaaggaaaagcattcgcagagagggagtcattgtatttcatggagacctctgcactcgagtcgactaacgttgaaaatgcattcgcagaggtgttaactcagatctaccgtattgtgagcaagagagcagttgaagcaggcgaagatgcagcatctgggcctggcaagggcgagaagattaacataaaggatgatgtttcggcggtgaagaagggtggctgctgctctagctgagctgccctgctgtattttttggagttgtggtgatgtagcttatggtacggcatttccagcgaccgagaactggtagtggcattagcagcttctatgttacctagagagtttattgtcaaactggggaaaaaaaactgaaggttagatcggtgtagatctttctggtactgtattgtgtatccggcaataggcatggtattgtttttttttttgctgtgaatccactggtaccatgtttaaacttatgaattgttcaaaatagaaaggtgcttcatgcttgccaaattctgaa

SEQ ID NO: 134886 - DNA, 631 bp, Zea Mays
gaaaaaactgagacccacccgaccaaaatcccccacccgccgcagtccacgcgcccgcaccgcaccgcgcgccgcgctcgctgccgtgccagtgtccccttcctttcccgtttccccctccctctctctttccccacgcccgacgcccccaccactctctcgatccaaagccagatcggcacgacgagcagaggccccccccggagcggcgcggagcaatggcggcgggataccgggcggaggacgactacgactacctcttcaaggttgtactgatcggcgactccggcgtcggcaagtccaatctgctctcacgcttcacgcgcaacgagttcagccttgagtccaagtccaccatcggcgtcgagttcgccacccgctctctccaggcctggcaagggcgagaagattaacataaaggatgatgtttcggcggtgaagaagggtggctgctgctctagctgagctgccctgctgtattttttggagttgtggtgatgtagcttatggtacggcatttccagcgaccgagaactggtagtggcattagcagcttctatgttacctagagagtttattgtcaaactggggaaaaaaaactgaaggttagatcggtgtagatctttctggt

SEQ ID NO: 134887 - DNA, 2052 bp, Zea Mays
gcgtcttctttttatgcgactaatgtgactatttcctgcctttttttggtgtattacaataaagataatataatgtttatcactttgaaataatggcgtttaatttgcatacggtactgtagaggataagaaggttgtggtcagtcgaaccctaaaccgttccaattaaagagctgacttcaacccaccagtcaaccgtcgccacgtacgtcgggaggcgatctagatacttgaccatttacttttcgtgcgtttcctcccccttgcgtaatgtgctagaacaccaccagcgacgagcgtaacgtttctaggaaagagagcacagcacgtgtttccatgtcgcagctcctggggtttgagatcgtatatacgtggatcgagctcgatgacacaacgccgcaagaagcaaagatggccatagccaggaccaggagctcagcgccggtgctcctcttgacattcctgtgtttctacgccattatcatcccttccaacgcatcaccggacgactttccccaatgcctgtcgggcagcatccccagccagctcgtcttcgcgcagagctcgccgtcgttcacctcggtcctggtgtcatccatcaggaacccacggttcttcacgccagcgacggtgaggccgctgtggatcgtgacgccgacgaacgcgtcccacgtgcaggccgccgtggcgtgcggccgccggcacggcgtccgcctccgcgtccgcagcggtggtcacgactacgagggcctgtcctacaggtcccagcgcccggaggcgttcgccgtggtggacctgtccagcctccgcgccgtccgcatcgacgagcggagctccaccgcgtgggtggactccggcgcgacgctcggcgagctctactacgccgtggcgcaggccagcggcggccggctcgcgttcccggccggcctgtgcccgaccatcggcgtcgggggccacctcagcggcggcggcttcggcacgctgctgcgcaagtacggcctagccagcgacaacgtcctggacgccgtgctggtggacgccaggggaaggctcctggacagggccggcatggggagcgacgtgttctgggccatccggggcggcggcggcgaaagcttcggcgtcgtgctgtcgtggcaggtgaggctcgtgcccgtcccgccgaccgtcacggcgttcaggatcccggtcgccgccggcgacggcgccgccctggacgtggtggccagatggcaggaggtcgcgccggcgctcccggaggacctcttcatcagggcgctcctccagaaccggagcgcgaccttcgagtccctgtacctcggcacgtgcgacgcgctggtgccggtgatggggcgccggttcccggagctcgggatgaaccgcacgcactgccgggagatgagctggatcgagaccgtgccctacttcttcctgggcagcggcgcgacggtggaggacatcctgaaccggaccacctccctgagcacctacgccaagatgacgtccgactacgtccggcaggccatcccgcggcgcgcgtgggacggtatcttcggcaagctcgcgcagcccagcgcggggctcatgatcctggacccctacggcgcgcaggtcggcgccgtgccggagccggcgacgccgttcccgcaccgcgccggcgtgctgtacaacatccagtacgtgagcgtctggtccgccggtggggatggggcggcgcatatcgagtgggtcagggacttgtacgcgttcatggagccgcacgtgagctccaacccgagggaggcgtacttcaactacagggacctggacctcggtgagaacgtcgtcggcgtggacaacatcagcagctacgaggccggcaaggtctggggcgaaaagtacttcgtggacaattacgagagacttgcggtggcaaaggctgagattgaccccgacgactacttcaggaatgagcagagcataccaccgctcgtgccgggtagtatcattttaccgttttcgcacgtactttgtcttgctgatatgtcgtctattgtttgttccaacttgccc

SEQ ID NO: 134888 - DNA, 1945 bp, Zea Mays
tcaactagacaactggtactcatactactcctatgtatatatacacaagtaatgcaaaacaaaaaggcatactgttgtgttgtcattgcaagaagcaaagatggcagtgttgagaggccgcttaacactagtgctcatcctcagtctcaactgctgcttctccttccccacagtactatcctcagttacttccgatggcttcctccaatgcctgtccgacaacatacctgtcgggctcatctacactcagggctcgagcaacttcaccgacgtgctggtgtcctccgtccggaacccccggctgttcaccagcgccacggtgaggccgctctgcatcgtcacgcccgtcgacgcatcccacgtgcaggctgccgtgcggtgcggtcgcgccagtggcgtgcgcctccgcgtgcgcagcggcgggcacgactacgagggcctctcgtaccggtcggagcggcccgaggtgttcggcgtcgtcgacctgtccaacctccgcgccatcaccgtgagcgccgacgacgacgagcggccggtgccccccacggcgccatcggcatgggttgactccggcgccacgctcggggagctctactacaccgtcgccaagaacaacccggagctggcgttcccggccggcatctgcccgaccataggcgtcggcgggcacttgagcggcggcggcatcggcatgatgatgcgcaggttcggcctgtccgtagacaacgtcctcgacgccaagcttgtcaacgccagcggcgacctcgtcgacagggccgccatgggggaggaccacttctgggccatacggggaggcggcggcgagagcttcggcgtcgtggtgtcgtggaaggtgggcctcgtcaaggtcccgtccacagtgacggcgttcaacatcgtcaagacggtggcggatcagggagccgtagacgccctgacaaagtggcaggacgtcgcgcctggcctcccgaccgacatcactatcagggtcatcatccagggacagcgcgcgacgttccagtccctgtacctaggcagctgcagcgacctcgtgccagtgcttaacagctccttcccggagctaggcatgacgagcgccgactgcctcgagatgacctggctggagtcggccgccttcttccagttctggaaccgccgcacgccggtggaggcgctgctggaccggaagaccagcctgagcaccttcaccaagaacaagtccgactacgtccggcgtgccatcgccaaggaagcgtgggagagcattttctcttggctcaccatggatggtgccgggatgatcatcctcgagccccacggcgggttcatcggcaccgtccccgatggggccacgccgtacccgcaccggagcggcgtgctgtacaacatccagtacatcacgttctggtcggcgggcggcgaacaagaaggcgccacggcgacggcctggatcggcagcttctacgaattcatggagcagcacgtgagcgagagcccgagggaggcgtacgtgaactaccgggacctggatatcggcgagaacgtggtggtcgacgacgtcagcacgcttgacagcggcagggtgtggggagagaagtacttcgccggaaacttccagaggctcgccgcggtgaaaggggtggtggatccgaccgactacttccggaatgagcagagcattccgccacagagcacggcgagcaggcgtcgtccagggatatcgttggattgaaacatgagtcaggccttattcgtttatgtgcaatcgttcgagctaatcaaagtttatataaattagagaagcaatccggttaggaatcgtttcgacccaccaattcggcacaaacgaacaaggtcttagtgctggattctgtggatcctccatgtgatattagggctcgtttggagctccgttccacaattctctagctccgagagtcaattt

SEQ ID NO: 134889 - DNA, 2205 bp, Zea Mays
acatcaaaaatacaaattaaatattatattaaagtattttttaatacaaatacaagtatataacatgtctacactaaaaatatatgtttttgtttaattgtcggtcaaagttttaaaaccttgtgcgtacacgccgcgtcggattgggcagtcattctgcgccgtgtatatatgtctgcatttgcaaccaaataggtggtgttttatttaagaatccgcgggtgcaatctttcctcgaaaacaggcgaccaaacacacagtttaccagcagctgtttatttccattgccatttgcttttaatatcggtgaatctgcctcgtcaacctcgctcgacccagaaaagaagatggtcatccggagctttgcaacaacatcactcatcgccgctttcttcgccatcgcgcaccttgcggcctgggttacaccaccacaagctgctgccacggctgctccgccgtcgtcgcctgataccgcgtccttcctccgctgcctcggcgcccacctccctccgcaggccgtgtacacgaacgcgtcccggtcgtacacgtccgtcctcgagtcctccatcaagaacctgctgttcgtgacgccggcgaccccgacgccagtcgccatcgtggcggccagcaacgcgtcccacgtccaggccgccgtgcgctgcggcgcccgccacggcgtcggcgtgcgcccgcgcagcggcggccacgactacgagggcctgtcctaccgctccctcagcgcgaggcggcccttcgccgtcgtcgacctggccaggctccgcgccgtcagcgtcgacgcgaggaaccggacggcgtgggtcgggtcgggcgccaccctcggcgagctctactacgccatcgcgagccgcagcgcgcgcctggggttccccggcggcgtcgggccgacggtgggcgtcggaggccacctcagcggcggcggcttcgggctgctgctgcggaagcacggcctcgccgccgaccacgtcgtggacgccgtggtggtggacgccgcggggaggctgcgggaccgggccgccatgggcgaggacctcttctgggccatacgaggcggcggcggcgggagcttcggcgtcgtgctgtcctggaagctgcgcctcgtgcgcgtgccgccggtcgtcgccgtgtccaccgtccaccggccgaggaaccagtccgccagcgctctcctcgccaggtggcaacacgtcgcgccggcgctgccccgcgacgccatcctccgcgtcgtcctgcagaaccaggacgcgcagttcgagtccctgtacctcggcacgtgcgccggcctcgtcgccaccatggcgcgtaggtttccggagctcggcatggaggcgcgggactgcatcgagatgacgtggatccagtccgtcctctacttcgcgttctacggcacgggacagccgacggagcggctcctggacagggggaccaagccggagcggtacttcaagggcaagtcggactacgtgaccgagcccatgccgagccacgtgtgggagagcgcgtggagctggctgctcaaggacggcgccgggctcctgatcctggacccctacggcggcaggatgcgcggcgtcgcgccttcggcgacgccgttcccgcaccggcgggctctctacaacctccagtactacgggttctggttccagaacgggacgcgggcgacggagaagcatgtgggctggatcagggggctgcaccgggagatggagccgtacgtgagcaagaaccccaggggcgcctacgtgaactacagggacctggacctcggcgtcaaccatgacgaccaccgtggcctggctagctacgagaaggcgagggtctggggggaggcgtacttcaaggcgaattttgagaggcttgccgcggtgaaggcgaaggtggatccccattgctagaaattactggtgcttaggatcgtttcctaagtccctagaataccaatccgtgtctaaaatacctcgatgatgagtagatctattctactgaggagtacatgtatacataccgtcgttgttgttcctagccatcattgcggcggcgtcttgcagcgaagacccgcctcctccttcttgtcgatctccctgctggtgtcgaggagattggttcccgtcgttgatcggcggtggatcagctcctccaatgttgcctgcagggggaatctcagatcccgatgggataacggggatc

SEQ ID NO: 134890 - DNA, 1544 bp, Zea Mays
tttttcttcagccgccacaaaaaaatccggccgacagagtggccgtccgcgcgccttctttgtgccggctgctagcaatggagatgcgcactgcgcgctgcatacatgcatgctactcctttttctttgcatgcgtgctgcatgctacttttctctatctttttttttaatttctctcacgccgctgttttactctccctctgtttctgttttggccggcgacgttttttttttaatagcaacacaagaaaactaagacagcagagcagaccgctggaaaaaaaaaggtcggtctcttgaccgtcttctacatttgaactcggatctgattattcgagcttttctgtgatgttattttagtcctgaggccctatggatgcgtctgcagtgctctgcgcacttgatccgatttctgtaaacgttttctgatcacagatttgagcccaaaaaaaacgatattgggcctttggacagagcgtgcggttttgggattatttcggttagagttcaaaaccctaaccctatctgtgtttcttattgactttgtttcttggccgcggatcgttggatccataagcctgtgcatcgtctctgttgacggcttaaccgattagggttaggtcataaaccctaaccctagttagttgtgagagctctctggtttgaggccgagacacactgtgtcttttagagtggccagacctaaaatcttaactctaacccgagagcatgaaactctttctatctattctaatctctattctcgggtgatgaatgatgataaaaaaatgagttcatcacatatatccgagacctttctgtgatctcataaaacgatgcggattaggagatctagggttcttaggtggcctctgataccattgctagaaattactggtgcttaggatcgtttcctaagtccctagaataccaatccgtgtctaaaatacctcgatgatgagtagatctattctactgaggggtacatgtatacataccgtcgttgttgttcctagccatcattgcggcggcgtcttgcagcgaagacccgcctcctccttcttgtcgatctccctgctggtgtcgaggagattggttcccgtcgttgatcggcggtggatcagctcctccaatgttgcctgcagggggaatctcagatcccgatgggataacggggatctgagacatagtcacagcgattccagtcactccgagcgcctaggggatcggttcctctcaaagtgtcgattagggtttgtggtcgagcgattagcgttggctaaacccgtcggcccccttaatctatttatatggcgtcgtgtgaccgggggctgcaaccaacggttaggatagcccccccgatcaggggcgcggtttgacggttaggattaaccctaccccggttactgttaaccggctagtgtagaggacacatcctaacacccatgacttcttcaggcacgagcagagcattcctccattcatgtccacccggagagacgtgtcaggcacatcctcctagtagttaaaaaagctgttcgaag

SEQ ID NO: 134891 - DNA, 1370 bp, Zea Mays
atgatcggcaatgaacatattgagcgccataatttctcttttgaggaaaccaagccagaattctgatcctccatttatgcataaaaggtatttctgaattttatgtagtgcttattttgtagcctccttttgtgttttttgttcttttaactatgttgcacacttatgaggatatgatgaccctttccccagatgatcgacatgaacatactgagcgctataatttctcatctgagaaaaccaagacagaattctgatcctctgtttgttttgctattttgctttattcgttgtgtatcttaatttctgaatttatcttaagcttgtacataaaatttgttgtcattgcttcctctttttaggtgactgtttattccaaacagttattttatgtgactgacatttgagttctgcgttgaaaactgattatcaatggatgaatttatatggccattgtgtatgagtcaacgccataataatcctctccatgttttgtgcgtatatggtacatgtgcatgatatcactggttgagcatgagtgggggatatcttctttcagatttatatttttaggtcaagatggaaatacgacattgagagaaggagaatagggctcatgatgtcagccgctatgaacttagtggcaaaatattctatggacgacatatttttatcgacacgtcactcaatgtttgttcactctatacttaatgttatcagtggaaggtcagatgatcgatagtgaacatactgggcactataatttctcatctgagaaaacaagccagaattttgatcatccatttatgagaaaatatttctgaattccatgtggtgtttttttgttgcctctttttgtgccttttctgttatcttaactgtgttgcacacttatgaggatatgatgaccctttctccagacgatcgacagtgaacatattgagcgccataatttctcttttgagaaaaccaagccagaattctgatcctccatttatgcataaaagtatttatgaattttatgtagtgcttattttgtagcctccttttgtgttttttgttcttttaactatgttgcacacttatgaggatatgatgaccctttcctagatgatcgacatgaacataatgagcgctataatttctcatctgagaaaaccaagccagaattttgatcctctgtttgttttgttgttttgctttattccttgtgtatcttaatttctgaatttatcttaagcttgtacataaaatttgttgtcattgcttgctctttttaggtgactgtttattccaaacagttattttaagtgactgacatttgagttctgcgttgaaaactgattaccaatggatgaatttatatggcc

SEQ ID NO: 134892 - DNA, 608 bp, Zea Mays
tgaacaaaccaaaataccactacatggatacccgatgccacattaccaagagcagcataaaatatgcacttcaaaccaccgagtatttccgactcattgaatccatacgcaagcaactaaggtacaggtcagaaacttacaatgcaaagaaaaccactagattgcgaaaggctgagaaggccatggaaaactttggacagaaatgtaacagctaagccaactggcacttcacatgaaagtcaaacatcaaaaccggggaaccgagaacgccgcaactagcagatccgcggcgcgtatgcagatccacgcacacgcaggagggggagcaacaagcaagcaaccatagcccctagagcgcagaagtcccctccccgccggcgagcgcagagatgaagtgaagcgcgcactcaccttctcgtcggcggaggcgcgcggagggtcgacctccatggcgtcggcggtggggttgggccccccaccgagcgcggtggccatgtggggcggtcgcgcggcgacaggcttctctctcctcggtgatgggggagggctgctgctgctagcgtgaccgtgagaaggggaccattggtgggcactgtccctgtcagctc

SEQ ID NO: 134893 - DNA, 954 bp, Zea Mays
atgccgccgcgccggagggcgccgaggagggcagcgggaagggaagcagacgctcatgatccccaagggcgactaccttgctggtcccctcaacttctccgggccgtgcacgttgacaacctcgtcatcaccggcaagggcaccctcgacggccagggcaaagaagtgtgggacaacaacaaatgtgccaaaaaatacgactgcaagatcctgcccaactcgctggtgctggacttcgtgaacaacggcaccgtctccgggatcaccctgctgaacgccaagttcttccacatgaacgtgttccagtgcaaagacatgacgatcaaggacgtgaccatcaccgcgccggaggacagccccaacaccgacggcatccacatcggcgactcctccgaggtcacaatctccggcaccaccatcggcacgggtgacgactgcatctccatcggccccggcagcagcgggatcaacatcaccggcgtcacctgcggccccggcgtcggcagcctgggcaggtacaaggacgagaaggacgtgacggacgtcaacgtcaaggactgcacgctcaagaagaccagcaacggcgtccggatcaaggcctacgaggacgccgccagcgtgctcaccgcctccaagctccactacgagaacatagccatggaggacgtggccaaccccgtcatcatcgacatgaagtactgccccaacaagatctgcaccgccaagggcgattccaaggtcaccgtcaaggacgtcaccttcaaaaacatcaccggcacctcgtccaccccctccgctgtcagcctgctctgctccgacaagatcccctgcagcgacatcaccatggacaaagtcaaggtcgagtacaagggaaccaacaacaagactatggcggtctgtaacaacgccaagggaagcgccaccagttgcctcaaggaactggcatgcctctga

SEQ ID NO: 134894 - DNA, 2123 bp, Zea Mays
tggcatcctctgtgtcacaccggcattatcttcctctgctccacgccgtcggtggcagcgtcgggcgccgatgtcgtctgaccttcagagtgcaccatgtcataggtggcgtgcacgctgaagagcacgtagtacacaagcatcgccgccgtgcagatgccaaagcgcatgtaggcgagggagccgagagagcccataaggaagaggtttgtggcgacggacatggccggcagccacggcatgagcggcgcgccgtataccctgggcgcgcgctgctgctccgcgaatagcgccagccccgccgtgccggccgcccacaaggcgccgaacgctacgtacccgggccaccgagcagcgtagcccgagttgtagtacacggacagcccgatggacgacagcacgatcagcgccaggaagccgacgaaggtgcgggcctgcgcgggggacgtggtgcccgcgacgtagtatcgtcggacgaggagcgccacggcgacgagcgcgaagatgaagagcgtgctgatggaggagacggacgccagcacgtcgaggctggagaagagcgcgacgcaggcggcgccgagcgtgacggcgatggtggcgtagatgggcgtgccggtcctggggtgcacgagcgcgaagtagggcgggatcatgtgcgtgcgcgcgatctgcgtggtgtagcgcgcctggccgagcgcgccgacgaggaggccgctcgtcatgcccttgagcgcgccgagcgccacgacgtagcgcgcccacttcatcccggccgccgcgaacgccaccgagtaggccgcgttggcgtcaatgtcgctgtagcgctgcatccccacgagcgcgagggacatggcgcagtagacgagggtgatggcggacatggacgagatgaggcccagcggcacgtcgcggccggggttcttggtctcctcggccatggtggccaccatgtcgaatcccgtgtaggaccagtacacgacggccgccgcgcggaagacgcccgcggcgccgaaggggaagaatgacggcgcgaggttggctggctcgaagtgcgagaaccccgcggccagcacgaacgcgatgatggcgatgccgaccgcggacgccaccgagttgacggtggaggtgaggcgcgcgccggacacggcgagcgcggaagtggcgcacagcacgacgacggcgatcgggtccagcagattgaagccgtcggcgagcgcggggacgtggatgcggagcgcgtcgctgtcgcggccgatgagcgccgcgaggtacgacgtccaggaccggcccaggccggccgcgcccaccacggcctcgagcaggatgttcccggcggcgatgaacgcggccaggtccccgagctcgacgcgcaggtacgagaacgagccgccagccgacgggatctcgccggcgagctccgcgtagcagaaggacgagagcagcgccgagaagcccgcggcggcgtaggccagcgggatggccgggccggcgtcgaaccgcgcctcctggccggtgagcacgaagacgcccgagccgacgacggagccgaatccgaggaaggcgagatccacccacgacaggcaccgccggaggggattctcgctctgggcgagcagcgtccccgcctcgacggcctcggaggagcgactcgtgacgcggtcgcgcagccgtggcccagtggacaagagcgcgccgccgtacgcgcgccagctctggaacgagggctccgggaaaaagtcggctttgctccaccgccagtacccgtggcccgccgccggctcgccccccatcgctgtcgacgtcatcgcggatgtgttttagctaacacgatctataatttctgctggcacaaggatttatttgttggatttttagagaaataatgggacgagttgggcgaaggcccgtggacagatctgttaggcttgatcttatttaaaatttaaactcggcccgtgttggactccactaacacgatttccacgcgaagtgtaggctcggttatttctatttcatacggatcgaatgtgattagaaaaaaaatatgtttttttaacttatttaaaatttaaacttactaaattgtactcaatctatataaaaattgagagtaaaataaataa

SEQ ID NO: 134895 - DNA, 608 bp, Zea Mays
atgtcggcagcggaggagcaccggtggcgctcgctggtcttcggcgaggccgtggccgcgcagcgcagcgcgctggtgctcgcgtcgtacccgctgctgctgctcctcgtcgtcctggccgcgttcgtcaggtacctgtggatcgcgctcgccatgtactgcgcgctcctgttcgtgctctcgtgcgccgctcgcgccctcgccgcccagcctgccggcgccgccggcgcagaggcggcgcgggtcagccgcggcgggctctcggcggcggccatcgcggcggtcgcgccggcgttccggtacgtggccgcgctcggcgagcccgcgcagtgcgccgtgtgcctcgaggggttgagagacggggaggcggcgcggcggctgcccgcgtgctcgcacgcgttccacgccggctgcgtcgacatgtggctcgactcgcacgcgacgtgcccggtgtgcaggtccctcgtagtgccgcacaagcccggcaaacaaccgcccgagccgcttgtgcttgtgcatccgtcgtcgtcgccgctgccgccggtttagtcccgcgcgcgtggattccggccaggatatgccatgtaccggctgccgagtagtttcga

SEQ ID NO: 134896 - DNA, 1893 bp, Zea Mays
tcaaccgcattcaatacctccaggccacggccgcagtcaatgcacagctcgcgtccgcgtgttccccgtctccacgcgtccatcaggccatctccagcggcagccggcagcagcaccacctccgcgcgcgcgggccgcaccgagagcaggcgtccaatcggtcgacggtcgtccacgcgcagctacgctacggcttggggtggtgggcgctagaactagaagaatccaaactctcccacccgaaccagtgaatgaactccacagtccatagcagtccggctcgtcactcgctgcactgcagcaggtcgcctgtgcctgtggctgccatgcctgcctggcctacaactacaagagcgagcggacaagcgccagcgccacgggcatgccaagccagttcacgagcccggccaagaacccaagcacggccaagccaaaccgcccttctcctcctggctcctcatgcctcgcttgactcctcgcgccaatttcgggaaacaggccatgccgggagacgggggagcagctggaagcgcgaggtgggtttgcgcggtcctttcggtgttcccgcttctagcggcggcggcccagggaaggtaccgcgcggtgttcagtttcggggactcgctggtggacgccggcaacctggtcacggagggcatcccggactacctcgccaccgcgcgcccgccctacggccagacctacttcggctaccccaccggcaggtgctccgacggccgcctcgtcgtcgatttcatcgcgcaggagttgggcctcccgctgccgccgccgtccaaggccaagaacgccagcttcgcgcagggcgccaacttcgccatcaccggcgccaccgcgctcgacaccgacttcttccggaagcgagggctcggcagcaccgtgtggaactccggctccctccgcacgcaaatccagtggctgcgagacctcaagccatcgctctgcagctccgcgcaaggcacacgatgcaaggagttcttcgccgagtgcctgttcgtcgtaggcgaattcggtgggaacgactacaacgccccgctgttcgccggcaaggacctcagggaggcatacaagctgacgtcccacgtgatccgagccatctccgatggagtcgaacaactgatcgccgagggggcaaaggatttgatcgtgcccggtgtgatgccatcagggtgctttccggtctacctgaccatgtacgctgaccccaaggaagggcatggctcgcgcaccggctgcctcaagcggttcaacactttctcttgggtgcacaatgcgatgctgaagcgcgcgctcgtgaagctccgagcgaagcaccctggcgcgaggatcatctatggcgattacttcacgccaatcatccagttcatactccagcccaagaaattcgggttttacaaacaaccaccaagggcatgttgtggcgcgcctgggaggggtccttacaatttcaacctgacagcgaagtgcggtgagcctggtgcctcggcttgcgctgatcctaagacgcactggagctgggatggtattcacttgacagaagccgcgtatctgcacattgccagaggctggcttcatggaccgttcgcagaccagcctgttgtacaagcatcttgagttgagtacagtacacccagcctctcctccctgctgttcttgcacctctagagtgagtgtgccacaatagcacacaccgtgcgtgacaccaaactggatccgataaggtaaggtagtagtagttccagtgcagtcgggtaaagagctgagataggtctattaattaaagcttgattcctttcattcaggatggtggtataagtacaatgtaatgcacaaaacaattcatatgagtaccagttagaaatcactatggtggtt

SEQ ID NO: 134897 - DNA, 985 bp, Zea Mays
aaatcgagtcgagcaagttatcgaggaaccagtatttcgtccggtcgtccagccctatctgcagtccaccgtcgggcgagcccgagaatcccgtctcctcggcgccgcggcccccggtttttttatgctttcctttcggtcggcgacgcatacattcggcgagggagaggaagaagtcagtaaagtaaattctgttgctccaattcggacgaggagatgccgcggatccctctgatcaggttccccaagcggaatctcaaagccccatctccatccgcgccagcggcgtcgcaacccgcagaccagcacgcgaccctcatgttccggttaggggctaaagcagaggcaccatcttctggagagattaaaaattaccgctttagatctgatgtgccttgcccaccttctcatactgccgtaggaggtccagcttcactccttcctaagcgcaaacccctgactgaagaagagattgaggctattatgctggggggctccatctgatatcacctcatatgaattggaaattctaggaacatcaataagattgtatgcctgagcttattgcctttgacctctgaaagagtgttattgaagccatgtcgatatggaagtgttttttttaattcagtctggaagttggctgttgagacatccatttccagtactccgcacatgtaactgagcaaaccgtgaacacatttagttccttgcagaagtgttgagcatggaatggttttgcttttgcataccaggttattttgttgcggatgttttgcattcttgcccccaccataagatcgctgagcatgctttttgaagcatgcctttcttgtgcatgtacttgcccacgaggccacaagatccgtgtgcttttggataagttgtgccgttggtgagcccgtgctgcagtttctggttcccgattccgtactggcgtcagccgtcagtgttcccggttctgtttgggtgtttcagcggttta

SEQ ID NO: 134898 - DNA, 1035 bp, Zea Mays
atttgcctatttccggtgcaggcagtctggcagagcaggcaggcaactgggccagagtcagacaggcctgcccgccacgccgtcccgacggccatggcccgacccttctcttccccacacatcccgtcttcatcctgggtgactcgccgccctcctccctggacctcctcaccgtccgtctccaccacgagaactagcgcctcgtctattaccgcgtgcagaccgcgccgcagggcagtcgcgccggcggcctccctccacctcggcccgggggagatcgccgagctcgcgcgcaacaaggttttgattgcggcgacagtggcgagcgcgatcgggcagctgtccaagcccttcacctcggtcaagaatgggggcgtcggcgccggccttgacctcagaaccgtcttccgctccggagggatgccctccacccactccgcgagcgttgttgcagttgctacttcgcttgggctagaaagggggtttgcagactccatatttggaatgtcagtggtgtttgcagcaattgtaatgtatgatgctcagggagtaagaagagaagtgggcaaccacgccaaggtcttgaacaggttttggatcctcaaagagaaggcacctctggagtattctgaagtggacatggcagctcctgagtttgtttcggtctccgaggaagcgagctccaatgcgagcccctccttgaagcgcggttgtagcaccgaatcaccaagggtgaatgggctccgtgggtctgagctgactgagctgaagcaggcttacgtagaggaggattaccggttgagtgaatctgttggccacacggagcttcaggtcacagtcggcgccctgttgggttttgctgtaagcttagcagtgtatgcaacactgtaagagcaacttttcatatcacgtcccttaattggttacacatttacacctttttttttacacagaaacaatacatgcggtttattgttcccaccgtttaaatcagaaatgcctatgctagctcgtttcacattctgtaaccaaata

SEQ ID NO: 134899 - DNA, 420 bp, Zea Mays
gaaacttgtgagcatgttggaaaggggggattttttcaggtagagggaaaaataaaaaaaaccaacctagcacaacctggggatactcgatggggttcacatcataaaaatttatgtcgtattgttctcatgtgggatgctattctagaggtactagagattgtggctgatgatggctctagtggggataagaaatatatggcttctggtttgttgaaacaaatggagagctttgaatttgtgcttattctgcatctcatgatgaggttattaggcaagactaatgatttttcacaatgtttgcaaagaaaagatcagaatattgtccttgctgttggattgattggagccacattgcggaatattagtgaagtgcgtgataatggatgggaggaattgtttgaggaagtaaagaccttt

SEQ ID NO: 134900 - DNA, 1471 bp, Zea Mays
gcaacgatgctgcatccgagtccgagagaatgcgaaggcagcggcagcagatgcgtaggaaacggcggcagtgtatatatacactacacaaacgcttgaaagccaagcgatcgatccaccatctccatccggcatccgctatatataaatggcgacgtagccacagctgctgccgcgccttgccggttgccgctgggcacctgcactgcactgcacaccggtgagacgcgcgcggcgatcgatcgtcgtacgtacgtgatggcgccgtcgtctcggcgtgcctgccatggctgggcgtgggcgctgacgatggtcgtcgtcctagcgttgtcggcttcttcggcagacgatgctgcctgcgacctgttccgggggaggtgggtggcggacaagtcgtacccactgtacgacgcgtccgcctgcccgttcgtgccggacgtcttcgactgccgccgcaacggccgccccgacgacgcgtacctcaagttccggtggagcccagccaataactgccagctgcccaggtttgacggcgccgacttcctgaggaggtggcgagggaagacggtgatgttcgtgggggactcgctgagcatgaaccagtgggtgtccctcgcctgcatgctccacgccgccgccccggctcccgtccgcgccaccttcaccagcggcgagcccgtgtcggccgtgcgcttcgaggactacgacctgtcactggtgctctaccacaccacgttcctggtggacgtcgtgcgggaggacatcggccgggtgctgaagctggactccatgcgcaacgccagcgactggctcggcgcgcacctgctcgtcttcaacacgtggcactggtggacctacaggggcgccagccaagtgtgggactacgtgcaggacgggaatagcacgtaccgggacatggacaggctgacggccttctccaaggccctctccacatgggcgcgctgggtcgacgccaacgtcgacgcctcccgaaccagggtcttctaccagggcgtctccccgagccactacgacatgtcgtcgaagcagcaggagagccaggctgggacgacgacggtgccagcagcagcggccgcgggaggcagctgcctgaggcagacgcggccgctgcaggaagctacggaggcggccggcggcggcggcggcgggacgaccctggccccggagcaggccgtggtgcggggcgtcatcggcgccatgagggcgccggtgtcgctgctcgacatcaccgcgctgtcgcagctcaggatcgacgcgcacccgtccgtgtacgccgggccggggcgggacggcatggactgcacgcactggtgcatcgcggggctcccggacgcatggaaccatatcatgtacgccatgctcctgcagcacacggcatagtttgaacatgaacaccgataattatattctttcggaaaaaaaacaagaaccaataataaacctctactgc

SEQ ID NO: 134901 - DNA, 2727 bp, Zea Mays
cccaaatcccaatcggcggccaatcccctccgccgctcaatggccgccacgcccctccctatcacctccccacctccaccacccacgccacccctaccgcagccacccaccgccgccactatccgctctctcactgccgcaggcaaccatgccgctgctctccacgcgctatcatccttgtcggcggcgtcctcctcccatgccccgctcgaccacttcgcgctcccgcccgccgccaagtccgccgccgcgcttcgctccctcatagccgtccggtccattcacggcgctgcgctgcgccgcgatctcctccatgggttcaccccggccgtcgccaacgcgctcctcaccgcctacgcgcgatgcggcgacctcaccgccgcgctcgcgctcttcaatgccatgcccagccgcgacgccgtcacctttaactccctcatcgccgcgctctgcctcttccgccgctggctcccggcactggacgcgctccgcgacatgctcctggagggccacccgctcagctcattcacgcttgtgagcgtcctgctcgcgtgctcccacctcgctgaggacctgcgcctcggccgtgaggcgcacgcgttcgctctcaagaacgggttcctggacggcgacgaacggttcgcgtttaacgcgctgctctccatgtacgcgcgcctcggccttgtcgacgacgcgcagatgctcttcggctccgtcgacaccaccgactcgccgggcggtggcgtcgttacgtggaacaccatggtcagcctgctggtgcagagcgggcgctgtggcgaggccatcgaggtgatttacgacatggtcgcgcgcggggtgcgcccggacggtatcacgttcgcgagcgcgctcccggcgtgttcccagctggagatgctctccctcggccgggagatgcacgcctacgtcctcaaggactccgacctcgccgccaactcgttcgtagcaagcgcgctcgtggacatgtacgcgagccatgagcgggtgggcgtggcgaggcgggtgttcgacatggtcccgggcggacaccgtcagctcgggctgtggaacgccatggtctgcggatatgcgcaggctggcatggacgaggaggcattggagctcttcgcccggatggaggccgaggccggcgtcgtacccagcgagaccaccattgcgggcgtgctgcccgcgtgcgctcgttcagagacctttgccggcaaggaagctgtgcacggttacgtcctgaagcgcggcatggcggataacccattcgtgcagaacgcgctcatggacttgtacgcgcgcctcggcgacatggaagctgcgcggtggatcttcgccgcgatcgagccccgcgacgtggtctcttggaacactctcatcactggctgcgtcgtgcagggccacatccacgacgcgttccagttggtccgggagatgcagcagcaagggagattcactgatgccacaacagaagacggcatcgctgggacagatgaagagccggtggtgccgaacaacgtcacactcatgaccctgctccctggctgcgcgatgctggcggcgccagcgaaggggaaggagatccatggctatgcgatgcgccacgccttggactcggacatcgccgtcgggagcgcgctggtggacatgtacgccaagtgcggctgcctggcgctgtcgagggccgtgttcgaccggctgccgaagaggaacgtcatcacctggaacgttctcatcatggcctacggcatgcatgggctcggtgatgaggccatcgctctgttcgaccgaatggtgatgagcaacgaggctaagccgaacgaggtcaccttcatcgccgcactagcagcctgcagccactccggcatggtcgaccgcggcatggagctattccatagcatgaagaggaaccatggggtccagccaacaccagatcttcacgcctgcgctgttgacattctcggtcgggctggcaggctggatgaggcctacagtatcatcacctcaatggagccaggagagcagcaggtgtccgcgtggagcagcttccttggagcatgccggctgcaccggaacgtccctcttggcgagattgctgccgagcggctgttccagctggagcccgacgaggcgagccattacgtgctcctgtgcaacatttactccgctgccggcctatgggagaaatcatcagaggtgcggaacaggatgcggcagaggggcgtcagcaaggaacccggctgcagctggatcgaactcgacggcgtcatccacaggttcatggctggcgagtctgcgcacccagagagcacgctggtgcacgcgcacatggacgcactctgggagcggatgaggaaccaggggtacacgccagacacgtcgtctgtgcttcacgacattgaggagagcgagaaggcggcgatcctccggtaccacagcgagaagctcgccattgccttcgggctgctgcggacgccacctggcgcaaccatcagggtggccaagaacctgagggtgtgcaacgactgccatgaggctgctaaattcatctccaggatggtggggagggaaattgtgctgagggacgtgagaaggtttcaccatttcgtggacggggcctgctcctgtggggattactggtagaagaaacgtcatatttatatctattatttgagaaaatatataatgaatttgaggtttaccttttatgaatctttagaa

SEQ ID NO: 134902 - DNA, 79 bp, Zea Mays
ggtccaatgtggacagatttgtgcaggacggaggtctcatcctgttcttgtaccagcatatttaataggagcttattat

SEQ ID NO: 134903 - DNA, 1437 bp, Zea Mays
atgatgatgagctggagctggtgtaagacgacggggaggcatgaggctgagggtaccaagaaagggagcagtagcgcaggaagggttgcggcgtggctcctgctgtctcctcttcttgtgctcgttgtgctcaagactgacttcctcccgacggtttcacgcactgacactggtttgggcaatgcgaaatggcagcagcaacattatccacatggcccagaagctgtaaaagcagacatgggaggctccgccagcaggctaacctgtaacctgagcaaccgccactccgacacctgcacaatggaaggcgacgtgcgcatccacggcagatccgcgacggtctacgtcgtcgcggcggcgtccaaccaccggcggccggagaactccacggtcacggtccggccgtacacgcggaagtgggagcaggagaccatggcgaggatccgggaggtcaccgtgaggtacacgccgccgcccgcaccattcggctccggcgtgatcccgcccaggtgcacggccgtgcacgacggcgcgccggcggtggtcttctccaccggtggctgcggcaccaacttcttccacgccatgagcgacctcgtcgtgccgctctacatcacggcacgcgagtacggcggccgcgtgcacctgctcgtcaccgactaccggcccgagtgggtcgccaagttcaggcccgtcctggacgcgctgtccgcgcacccggtcgtagacctggactccgacgccgccgtgcgctgcttcccggcggcgcgtgtcgggctggagagccacaacgggatgctcgcgatcgacccgaccctctcccgccacggctacaccatggtggggttccgcgacttcctccgctccgtcttctcgctgccacggccgtgggcgtggtctagtagtagacccgtaataagcaggccccctcgcctcgtcatggttctgcggcgccactcgcgggcgctgacgaacgaggccgataccgtcgccgccatggaggacctcggcttcgacgtggtccccgcgcggccggaggacgtcgccgacatgggccgcttcgcccgggtggtgaactcctgcgacgtcatggtcggcgtgcacggcgccgggctcaccaacatggtgttcctgccgcacaacgccaccgtggtgcagatcgtcccctggggcgacatgaagtgggcttgctggtacgacttcggtgagcccgtgcagggcatggggcttcgctacgtcgagtacgaggtgacggcggaggagaccacgctcaaggagaagtacgcgagggaccacccggtgttcaccgacccccagtccatacatcgccagggcaaggcctgggccaccttcctcgatggccagaacgtcactttggacatcgaccgcttcaaggcggcgatgcagcaagtgtttcagtccatcaccacagggtag

SEQ ID NO: 134904 - DNA, 649 bp, Zea Mays
atgccattcgagcagcatcgtcacccagagccaagcagctagctagtagcggccggcagcatcgcgtagtagagtgtgctagctcagagcagcgcgcagcttccaccctgcgcgcgcatatatgggacccttgggccccaccgtgagcttcagcatcatggtcatggccaagctcagcggcgccgcccagcagcagcccgaggatgagagggagaggaaggagggcgtcaggtgcggcggcgtcggcgggtgcggcttccggatgccgctgcactacccgcgctacaagaaggcggactacgaggccatgcccgagtggcgcgtcgactgcctgctccgcgagtacggcctccccgccgacggcgacctcgacagcaagcgccgcttcgccatgggcgccttcctctggcccgaccagtactgatctgatacaaccaaacaagctagctagctagcccaagcccagagcgcggcgtgccggccgtgaatagtctcgtcatgttcagagcatcagctgtagcgatcgagacctaaatcatcatcgtgcatatgccatatgctctcttgttatttataagttaccatctgcttgtagttgtatagtatagctaattattagctatggaataattaagagatgtttatggga

SEQ ID NO: 134905 - DNA, 157 bp, Zea Mays
tttattttttggaagaaggtcgctaagaaaggttgttcatgtttcttttgccaattttctttatccatgatatatttagttgttaggaaatattggtatatgtttctcttgccaatttgtgtgtcttgtgtgttttatgttacttttttacaggtga

SEQ ID NO: 134906 - DNA, 891 bp, Zea Mays
ctgacaaccgacgggaataagtaattcccgtcggtttctggccgacgggaattaagtgaattcctatagtgcatatacaaccatccttcatggttgatgcagaaacggaagtacattttgctaaccatgcttatttctggacctacacaacctggagttgatatggatgtatttttagagcccttaatggaggatatgaaaatattgtgggtaacgggtgttcaaatgttggatgagtatcgtaaagattcattcacgctgagagcaattatttttgttacgatcaacgattaccctgcactcttcacattatcaggcccagtttaagggaaaggttggctgcacagtatgcattgatgaaactgcttatgtgtcccttactgcatctaagaagatagtgtacatgaggcacagacgctttttattggaaggacacaggtaccgcatgcgaaagatggataagtactttgacaataatggtgaactacattctactgctccatcgggtaacaataaaggtcatagagtttttgaaatagtcaggaatatcaagtttgttttcgggaagaaaacaaaagacggaaaaacaaggaaggatgccaaaccagctccgggggctatattcaagaaaaagtctattttcttcgagtacttgccttactggaaagagttagatgtgcggcatgcgatcgatggtatgcacgttcagaagaacgtgtttgaaagcataattggcaccttgctagacataaagggcaaaacaaaagaagggctcaattcacgcatggacttggtaaatttaggcataaaaaggaactacatcctgttcttcaagaaaatgggaagtatcatctcccagcagcaagctacaatctcaatgtagatgagaaa

SEQ ID NO: 134907 - DNA, 195 bp, Zea Mays
gcgaaaatcatgctatgccaaggcatatctgttggaaatgctcagatgctagcttttcctggcagatcatcatgtcttaagagcacccagtttcatgttaaaacaaatcattttcctgcaagagctctacgttggtatgaagacgcaaatttatttaattttccttcggttcacttcaggtttgacgcatacagg

SEQ ID NO: 134908 - DNA, 1163 bp, Zea Mays
aaccagaatcgccgcaagccaatctgtctccgccaggcgccaagccaaccctcaccaccacccgtccaccgtgcatcaccgcccacagcctttattcgccaccgcagcaccccctgctcggccgcccgcccccgagttcccactcggccacttcccacatctctctctctctggctctctgctcgccacgcgccgtaccagcgccgcgcgccacatggctccctcgttcactagcctcctctcggccgcgaactccgccgccgccgcgaccgcctcgcggctcccctcggccgccgccggacgggcatccacttttgtgcgcttcccgcatcacccgacgggctgggctggggcctccgtcgcggcgccgcgtacggcgcgcaagcgggcacccggcgtcgcctacgccaccgcagctaccgagaagagcatctacgactacaccgttaaggacattgatggaaaagatgttcctcttaaaaagttcaagaataaggtgttgctgattgttaacgttgcttctcaatgtgggttgacaacagcaaattacactgaactatctcatatctatgagaagtacaagactcaagggtttgagatccttgcatttccttgcaatcaatttggtgcacaagaacctggatcaaatactcagattaagcagtttgcatgtacaagattcaaagctgaatttccgatttttgacaaggttgatgtcaatggacctaatacagctcccatctataaatttctgaagtccagtgcaggaggatttttgggtgatctcgtgaaatggaattttgagaagttcttagtggataagaatggcaaagtcattgagagatatccaccaacaacttcacctttccagattgagaaggacatccagaaactgctcgcggcataagtacttccaagtctttcagttgagtatctcagtatctgtatataggtcatatattttttcccctgtattgcaatcattttcgtaaaataattcactcattatctacacgtgattatagatgtaacatgagactatattagattttggactatcaactccgaagtttacctgtacatgaaactctgcccaacggagtagcttgggtgaactggctgcctgggagcatcctgattcctgaatgcttcggctcacctgt

SEQ ID NO: 134909 - DNA, 2035 bp, Zea Mays
aagccaatctgtctccgccaggcgccaagccaaccctcaccaccacccgtccaccgtgcatcaccgcccacagcctttattcgccaccgcagcaccccctgctcggccgcccgcccccgagttcccactcggccacttcccacatctctctctctctggctctctgctcgccacgcgccgtaccagcgccgcgcgccacatggctccctcgttcactagcctcctctcggccgcgaactccgccgccgccgcgaccgcctcgcggctcccctcggccgccgccggacgggcatccacttttgtgcgcttcccgcatcacccgacgggctgggctggggcctccgtcgcggcgccgcgtacggcgcgcaagcgggcacccggcgtcgcctacgccaccgcagctaccgagaagagcatctacgactacaccgttaaggacattgatggaaaagatgttcctcttaaaaagttcaagaataaggtgttgctgattgttaacgttgcttctcaatgtgggttgacaacagcaaattacactgaactatctcatatctatgagaagtacaagactcaaggtgtggcaatttacactgaacaatgttgtgtatacttatcatttttaggaaatctagactgaacattgtatttccaattaaaggagttaccaaaagttaaagttgttgtaccctttaaattgtgtgtttgatcctaattgtctcataaaaccacacaatcaagaccagcagtttaactctaatatatgctgtttttcttgtttatgccaatttatgggatcattcaattagacctcttgttattatatagtgacctttttgtttgtcgcatatatcctggcacgtatgtaacctagagagttggtgtggagagggaggacttcatgcctctccctcttgtatttgtgtttttcttctatcttaatgaaataacacgtagctctcctgcggagttcgagaaaaaaagtacgcctattctactggaccatgttgatgcatttgctgattgtcctgatttttgttgtctagtgggcgtgggtctcggaggttaaaggtttctattgctttttgcaatatttcttgagtcatctagcttaatatatctctgtgggcgaggacccacattgagcctagccagggcaggcccacactcattattctgtttaagtggacattgggccttgtttacggtaggtgtaaaagcacagtagttaccagacccttgcttgttttttgggctggtctgcccttagtgtgtacagtcattccaaatgttgtcgtcatgaagaggatcctcctggactctacagttagtttcaaaagtcaactttagagttttgatgcacattctcttagatacatgaaaaggaaatgttgatgttagcacgaaccttgacttcttgggctaatagttgccattttacattgtgttgtttaatagttaatctatttgacatgtagggtttgagatccttgcatttccttgcaatcaatttggtgcacaagaacctggatcaaatactcagattaagcagtttgcatgtacaagattcaaagctgaatttccgatttttgacaaggttgatgtcaatggacctaatacagctcccatctataaatttctgaagtccagtgcaggaggatttttgggtgatctcgtgaaatggaattttgagaagttcttagtggataagaatggcaaagtcattgagagatatccaccaacaacttcacctttccagattgagaaggacatccagaaactgctcgcggcataagtacttccaagtctttcagttgagtatctcagtatctgtatataggtcatatattttttcccctgtattgcaatcattttcgtaaaataattcactcattatctacacgtgattatagatgtaacatgagactatattagattttggactatcaactccgaagtttacctgtacatgaaactctgcccaacggagtagcttgggtgaactggctgcctgggagcatcctgattcctgaatgct

SEQ ID NO: 134910 - DNA, 1128 bp, Zea Mays
gggacttctcaacaaacattcatggtttttaacttatcatccttgattcagccgattgataacctgtcagaacttgagcatcccttttcttgtcaagagattgatcagatcatcaaatgtctaccatcaaataaatcgccaggtccggatggatttaatatagactttgtgaagaaatgttggccggtgattgctccggatttctatgaactatgtaataatttttttgaaggatcaatctgcatgcgcagcatcaatggttcatatgtgactctcatccccaaaaacagttcccttgtttcagctagtgactataggcctatcttcctccttaacacaagtgttaaagtgctgacaaaaatcctagccaaccgcttgcaacatgtgatcactaagttagttcatcagaatcaatatggttttttataaaggcaaggtcaattcaggattgtctagcctgggcttttgaatacatctctctttgccataagtccagaagagaaatggtcgttctaaagctggattttgaaaaaagcttttgacaaattggagcatgcaactattattgatgttttgaggcacaacgggtttggagacaaatggattcactgggtttctatgattctaggctccgacacttcagaagttcttttgaatggcgtccctgggaaacgatttcacagcaaacgtggaatccttgcaaatacatttcactgcaaaattggttcaatgctgttcacctacttagggcttcccttgggattacaaagacccaaccttggtgcttttcttccacttattcagaaaattgagaaaagacttgcgtcaacctctgtcttcttatcccaggctggcagattgcaaatgattaatgcagtcttctcacttccaacatattacatgagcattctcaagctcccaaaaatggtgatcaaacatattgacaaattcagacgacactgcctttggagaggagcagatttaaatgcaaagaaacatcctcaagtagcctggaaaacagtttgcaagccaaaatttcaggggggattgggtgtgataaatttagagctacaaaacaaagcccttcttatgaagaatctgcataaattctacaacagagctgacatc

SEQ ID NO: 134911 - DNA, 182 bp, Zea Mays
gatttcatgtcatattgattattggattgattacacatgttttcttattatcagccagaactagcttactatttcggatgttgcaacgaaggcattccttcacagtgtatgtgatagttctctttatacaggtaagacagtgtacaagggcaaaactttgtatgaaattactctgggcctgt

SEQ ID NO: 134912 - DNA, 2324 bp, Zea Mays
cgaactcacgcaacgcaagctgagcaaccgctgccggccgcgcacggccgcccacccaccagtccaccactaaagcctcacaccgccacagcagctgccgcggccgagccgacgacgaggatgagcggggccgcgctgtgcgcggcgctgacggagctggggttcgacggggaggacccgctggacgcggatgcgctggagtggccgttccagtatgaggaggcgcgaccgctgcttgcctggatctgctcctgcctccgcccctctaacgtcctctccccgtcccacctggcccagtatgaacaactcgtggaagagggaagactgttagagggtgaagatttggactctgcttttgatagtatttcagctttttcaagcaagaaagacaatcaagaggctgtgtttggatcggaagaaaccattcttgatatccgtgaagcaaaactagcatatagagccgaagtttttgagttacaaaagcagcttgtgcggcagcaagcacaatttgatttgcttgcaggccaggcttcaactcttattcaaggtagaagatcacgtgtatctgctatgtctgcagttagtggagagcttatatcgctagatgagatactttcttccagaaacttggagatgaattcagttcttggaagaatcactgctactacccaggaactagcccattatcattcaggggatgaggaaagtatatatttggcatattcagacttccactcctatgttgttggtgacttggcttgtacgaaagagctaaataggtggttctcaaagcaatttgagaaggggccatttcgacttgttgctgaggaggggaaatccaaatgttcctgggttagtcttgatgacatcactaattgcttgataagaggagattctgaaaaatcgcatcatcaccaacgtgtcgctgagttgcaacgacttcggtccatatttgcaacaagtgaaagacaatggattgaagcgcaggttgagaatgctaaacagcaggctatactctctatattgaaagcacaagtgtcatccgacgaggctcatatacatagggatatccattctcttaggagaaaaggttctgagcttgctggagagctctcgacactttctcaaaaggtgcaagctttggtatctgagacaataccatgcctgtgttcagaacttgctcaacttcaaggcacatatatcttgcaaggggattatgatttaaaggtcatgcgccaggagtactacattaacaggcaaaaaacgttcatcaatcacttggttaatcagcttgccagacaccagtttctgaagattgcttgccaacttgaaaggaagaatatagctagtgcgtactcattgcttagagtaatagaatctgagttacaaagctacctctcagcagtcaatacccgcttgggtcattataattcattgattcaagctgcatctgaagtacgagaacaaggagctattgatgatcgtgacactttcctccatgcagtgcgagatctcctatgtattcactcaaatgtccaagcaacagtgccaacatacatgtcagcacatgcattggttcagcagatatcagcacttcaatctgacttgctttctcttcagtctgagctggagaacacccttccagctgaccggaaaagatgtatcaatgaattatgtactctgattcaaacagtggaacagcttctatttgcgtcgtcaactactgcagaaccaatattgacgccttggccattgatgcgggcacttgatgatatggaaaatgccaacgctcaagtcgaagtttctgtggaagaagtaaccaaggctcgcacccagaagataaagatctttgaaaatcgtgcccatgaggtggggagggagaggcaaatattcgttgatttcttctgcaaccctgaacgcctcaagaatcaagtcagagagctgacctcccgtgtgaaagctctccaggactaacctgtttctgtaggctggtctcacaggtcgtgatgctttttttttctatgtaaagtttgacttcactccagcgtcaggttggggctgctgtgcagggacggtatggaacaatatacccatcatgtagctcgggggggttcaggctgtaggtccttgtgccacccggaataggatggcattgttgtgatattatttgtagcgatatgtatgttgtaaagtatctcagaaatcacgagccctttctttcgtgtatggttttgcttttgagtaggttgtggtggtacagttgttagcgtccaaaggcacaatcggtactgtagtttggataaatgggatcgatttcctcttca

SEQ ID NO: 134913 - DNA, 2933 bp, Zea Mays
aaaccctaacaccgtccactcccgtcggccaccagccacctccatttcaaatacagtttccaccttcctcctccgcctcccacccctcgctgtctccggcgagacccggaaatggatctcgtcgcctccccctccaggtcaaaatccaagcccagatcctcgccagcgaagcccgtcgccgcccccgctgagtccaggatggacctctgcaccccgtccaagcccacgcccaggcggaagtccaaaacgacggcctcgccggcgccgatgtctccggcgacgccatccaccgtccgacgctcgcgtcgccttcttgaaacccccaccaaagcctccccggaggtgcaagtgaaggctacgcccatctccagggctaagcgcaccgcgccgtcaccgaaaacccctgttcagcgcgagaccaagaggcagaggcgacacccgaggaagagggcatactaccggaaggtggtgtatgatggcggggagttcgaggtcggcgatgacgtgtacgtgaagaggcgggagacggcggagtctgacgcggaggaccccgaggaggaggagtgccgcgtatgcttccgcactggcggcggggttatggtggagtgcgacgcgtgcctcggcggattccacctgcgatgcgtgcgaccgccgcttcggagggtgcctgaaggtgattgggcgtgcccttactgcgaggccgagcgcgccggtaaggtggtcgagcggcccaggccgcctgaggggaagcgcgtcgtgaggaccgccaaggaaaaactcctttccagcgacctgtgggctgcacgcatcgagagtttatggagggagcctgatgggacgttctgggcaaaggtcaggtggtacattatccctgaagagactgcagcaggaaggcagctgcataacttgagaagagagctgtatcgtaccaatgatcttgcagacattgagatggaaacaatccttagacattgttctataatgtgccccaaagactttagggatgctaacaacggaggggatgatgtattttattgtgaatatgagtatgatatacattggcataattttaagcgtttggcagatattgatgatgagccagagacaaaggaagatctcagtgacgagccctacaatgctggtgatgattataacagtgacactgatgaagattcagactatgacgaggaggaagaatccacatcatctttctctgtcagaaggaatcaatcacatgaatctgcggcgaattcaaggaaaggtagaatatatggcctgcaaaaaattgggatacaaaaaattcctgagcatgctcggtgccaccaaaagactgagctggagaaggctaaagcaaccctgttattggcaactcttcctaagtcattgccttgcagagataaagaaatggatgagatatcaatatttgtaaaggatgcaatctgcaacaaccaatgcctaggacgctgcctttatatacatggtgtacctggcactggcaagactatgagtgtacttgctgttatgaggaggctgagatctgaatttgattctggaactctgaggccatattgttttatcgaaattaatggtcttaaattagcatctccagagaatatctacaaggttgtatatgaacagttgagtgggcatagggttgggtggaaaaaggctcttcactatttaacagaacatttttcaggtggtactaaaattggaaagcaagcaaaccagccaattgttttgctgatcgatgaacttgatcttcttatgacaagaaaccaatcggtgttgtataacattcttgactggcctaccaaaccaaattcaaatctagttgttataggtatagcaaacacaatggatcttccagaaaagttattgcctcgtatatcaagtcggatgggtatccaacgactgtgttttggtccatacaattatagacaactgcaggaaattataacaagccgtttaaagggtattgatgcctttgaggaacaggctattgaatttgcttctagaaaggtagctgctatgtcaggtgatgctaggcgagctttagagatttgtagacgggcagcagagtttgcagactaccgtgtcaaacagtctcgacagtctgcacagactactgtttctgcaaagaaaggtgatgctgttgtttccatgggtgacatagaagctgctattcaggaagtcttccaggcacctcatattcaagtgatgaagaattgcccaaagtttggaaaagttatactggttgccatggttcatgagctgtacaaaagtggactaggtgaaataatgtttgataagttagcaacaacagttttctcctggtgccatgccaacagagaactattgcctggatacgacactctcttgaaaatttgttgcaagcttggtgaaagcaagatcatcctctgtgaagagggtagtaagcacaagttgcagaaggttcagcttaactatccaagtgacgatgtgacatttgccctcaaggaatccccagatcttccttggctatccaagtacttgtgaggttcatattacattaaccattaattcctggcgttctgttgcatttctgttctctttggaagcaacgattcactttacctgcagaccttgcatacacacgtcccatggtcgatctgcaaaggaaccatcgaaggatgtcggcatggcgctgcacccaagggatcacgcatatttaatcgcacaacaggaacataaaacgttaagaaatatgtacgtctgcaatttcgtctccttcaaactatggtgttgtttgtgttgtattgaactgccgcgtgtgagctgatccaattgttttctattgccatctttcagtaactatatacgaattgttcgttaaacattgacagttttgaataagaaacattgagatatcaaatttgtactttgccggcccc

SEQ ID NO: 134914 - DNA, 2108 bp, Zea Mays
gtttgtccatttgttgtcttaggttctttgtgcttatggcctgtgcagatggaaacaatccttagacattgttctataatgtgccccaaagactttagggatgctaacaacggaggggatgatgtattttattgtgaatatgagtatgatatacattggcataattttaagcgtttggcagatattgatgatgagccagagacaaaggaagatctcagtgacgagccctacaatgctggtgatgattataacagtgacactgatgaagattcagactatgacgaggaggaagaatccacatcatctttctctgtcagaaggaatcaatcacatgaatctgcggcgaattcaaggaaaggtagaatatatggcctgcaaaaaattgggatacaaaaaattcctgagcatgctcggtgccaccaaaagactgagctggagaaggctaaagcaaccctgttattggcaactcttcctaagtcattgccttgcagagataaagaaatggatgagatatcaatatttgtaaaggatgcaatctgcaacaaccaatgcctaggacgctgcctttatatacatggtgtacctggcactggcaagactatgagtgtacttgctgttatgaggaggctgagatctgaatttgattctggaactctgaggccatattgttttatcgaaattaatggtcttaaattagcatctccagagaatatctacaaggttgtatatgaacagttgagtgggcatagggttgggtggaaaaaggctcttcactatttaacagaacatttttcaggtggtactaaaattggaaagcaagcaaaccagccaattgttttgctgatcgatgaacttgatcttcttatgacaagaaaccaatcggtgttgtataacattcttgactggcctaccaaaccaaattcaaatctagttgttataggtatagcaaacacaatggatcttccagaaaagttattgcctcgtatatcaagtcggatgggtatccaacgactgtgttttggtccatacaattatagacaactgcaggaaattataacaagccgtttaaagggtattgatgcctttgaggaacaggctattgaatttgcttctagaaaggtagctgctatgtcaggtgatgctaggcgagctttagagatttgtagacgggcagcagagtttgcagactaccgtgtcaaacagtctcgacagtctgcacagactactgtttctgcaaagaaaggtgatgctgttgtttccatgggtgacatagaagctgctattcaggaagtcttccaggcacctcatattcaagtgatgaagaattgcccaaagtttggaaaagttatactggttgccatggttcatgagctgtacaaaagtggactaggtgaaataatgtttgataagttagcaacaacagttttctcctggtgccatgccaacagagaactattgcctggatacgacactctcttgaaaatttgttgcaagcttggtgaaagcaagatcatcctctgtgaagagggtagtaagcacaagttgcagaaggttcagcttaactatccaagtgacgatgtgacatttgccctcaaggaatccccagatcttccttggctatccaagtacttgtgaggttcatattacattaaccattaattcctggcgttctgttgcatttctgttctctttggaagcaacgattcactttacctgcagtaagttctctttgcattgctgatgccctgattgcggcttcaattcttggacctgctaaggagctgagcacattacatatcttatcatatgcaggaccttgcatacacacgtcccatggtcgatctgcaaaggaaccatcgaaggatgtcggcatggcgctgcacccaagggatcacgcatatttaatcgcacaacaggaacataaaacgttaagaaatatgtacgtctgcaatttcgtctccttcaaactatggtgttgtttgtgttgtattgaactgccgcgtgtgagctgatccaattgttttctattgccatctttcagtaactatatacgaattgttcgttaaacattgacagttttgaataagaaacattgagatatcaaattt

SEQ ID NO: 134915 - DNA, 97 bp, Zea Mays
ggtgaagctcggcccgttttgggcccggctcgccaggcacggttagaaaaccgggccgggccgtctaggcacgcgggctcaattccctgtccgagcc

SEQ ID NO: 134916 - DNA, 1672 bp, Zea Mays
cgaggagactgagaggcgggtcgaggacaagctgaacgggttgtgattcatcgccgacaccgcaggaggtttctgcaccatggcacttggtgaggacgcggtcggcactagcgacgacaaagacatcggcgacgatactacttctaaggataagttgcttaggcaagctgctcgtgagaggaaagagtttagatccaagtacgagagcacacttagggaacttgagtctgctagagcttcagttgaggtgtccgacgagactgaatgtgatgagtgtgctctacacatgtcgaacatcaccactttgcagaccaagtactccaccttgctagatgagcgtgacgagttgagatctaggtctatcctgttgggtgcgtgtaccatttgtcctggcttgcagtctgagctagcagagagagacgctatgatagctttgcttgagaaggctagctcagtgagtgcccctgcacctgcgcagtgtgcactttgtgagggtttgcaatctgcccttgattcctgcagacacgacaagacaaaaatcaaggaagaaaacacataccttcgatctatcttgagttgggtgtcgtgcagtgagccccagttgggcatgatggtcagtcagttcaagaggggaacttgcggaccgaggttaggctttgctactaaggatgggagtgtcgcttgctttgggaaggtgggtgagtgcagtggtttgacaccttcagagaaaccttcatccactcccaagcttatcaaaaccacctctactaagctagtcatccctgtgagagatggtgtgattgatgaacctatgagagatcctcctcagaaacaagtgtggcttccaaaacctaaccatcttaggaacacacttgacacatttcccaacatctctagcgatccccttcctagagcccctcagtcatctgaaaagaaagtcgccttctacaaacaaaatccacccaagagagaggtgaggtaccattgtgaatattgtgagagggatgggcatctagcttctttttgctttaggaggaagagagatgagcggcgggtttataagtcgagcaggaaggacatgaaccgcctctctcatggtgttcatgctcagcctgttcagagacgtcctgggaggcctagaggtgttttgcctcttgtcgctaagtctcaggcatttgagcatatgctaccacgtgcatttattgctgcacacttagcacaacaccacttagagcattttttacactctggctggtgtggagcacaggaacggtggtcgatggctgaggtgaaggtcatgtgggctcatgctgatggaccgggagcggtgaagggcgagtgctgggtcttgactgacgaatcagagcagccaggtgaccaaccgtggtggctgacacctgggacacgcacttgtgcgaggacgtggtggagtggaccgtgttgccggcatggtcgaggactagcgggacacgcgtctgatcgtggaggacatgcacgaggtgcggtgctcacggcagggctacggatgcctggttttgctgagtttgggcctcaaaactcggcggtggcggttccggagggaaccggtggcggcatgcggtgtgatcgcggagggtgcgtcaaggcgaagcaactccgtgtgaaggacgtggccgtcggatcaaaaacctag

SEQ ID NO: 134917 - DNA, 1066 bp, Zea Mays
agccaagaacgacctcgctggaaaatggcaggcatcaccggcgtcatgaacatgaagctagcagcacggcccagcagcggacgccacagccgtggctgccgtcctgccgttgtcccctctgccggcaagcaaatgctgctggttcgacggcaccctccgggctcggcgagttggcctaccagggccactgggggtggtggtggcggcgtcccagctggtgccaccgccgcagattctagcgggcaggcaaaagaggaggaagaagaggatcgtgcgagcagaaacacctcgagttttgagccatccatctggggagatttcttccttacctactccagtcctctggctacgtcgtccgctcaaaaggcacggatggtacatcgcgcagaacaactgaagaaacaagtggcaaaactgatagcagcttcaggtgcctgtagcctgtaccataggattcacctcgttgatgccttggagcgtctgtgtctggactatcttttcgaagacgagatcaatgacatggtgacccaaattcataacgtcgatgtcagtggctgtgatcttcagacggtggctatgtggttctatcttctccgaaatcatggatacagagtctcatcagatgtcgtcttcgccaagttcagagacgaacaggggggttttgcagcgaacaatccaagggatctactgaacctttacaatgctgcctgtcttaggacacatggagagacgatacttgatgaggctgcttccttcacgtccaaatgtttgaaatcattagcaccctacacctacatggaagcatcattagccagtgaaataaagcgcgcgcttgagatcccccttcctagaagcgtaaggatttatggagccaaatcgcgtatagctgagtatgggaatcagactgaagctaatgaactggtactggaactagcgaagctcaactataatcttgtgcagctccagcatcaagaagagctgaaaatcataacaaggtgaagtgacttaccgcatccactccaaattaattataggtcacttagcaatattgttagccaaacttctc

SEQ ID NO: 134918 - DNA, 2115 bp, Zea Mays
agccaagaacgacctcgctggaaaatggcaggcatcaccggcgtcatgaacatgaagctagcagcacggcccagcagcggacgccacagccgtggctgccgtcctgccgttgtcccctctgccggcaagcaaatgctgctggttcgacggcaccctccgggctcggcgagttggcctaccagggccactgggggtggtggtggcggcgtcccagctggtgccaccgccgcagattctagcgggcaggcaaaagaggaggaagaagaggatcgtgcgagcagaaacacctcgagttttgagccatccatctggggagatttcttccttacctactccagtcctctggctacgtcgtccgctcaaaaggcacggatggtacatcgcgcagaacaactgaagaaacaagtggcaaaactgatagcagcttcaggtgcctgtagcctgtaccataggattcacctcgttgatgccttggagcgtctgtgtctggactatcttttcgaagacgagatcaatgacatggtgacccaaattcataacgtcgatgtcagtggctgtgatcttcagacggtggctatgtggttctatcttctccgaaatcatggatacagagtctcatcagatgtcgtcttcgccaagttcagagacgaacaggggggttttgcagcgaacaatccaagggatctactgaacctttacaatgctgcctgtcttaggacacatggagagacgatacttgatgaggctgcttccttcacgtccaaatgtttgaaatcattagcaccctacacctacatggaagcatcattagccagtgaaataaagcgcgcgcttgagatcccccttcctagaagcgtaaggatttatggagccaaatcgcgtatagctgagtatgggaatcagactgaagctaatgaactggtactggaactagcgaagctcaactataatcttgtgcagctccagcatcaagaagagctgaaaatcataacaaggtggtggaatgatctagaacttcagacaaggctatcatttgctcgagacagggtcgtggaatgctacttctggatggtcggagtatattttgagccgagttactcgcgagctcgagtgatactgtcaaaagttcttgccattgtgtccttactggacgacacctatgatgtctatggaacctcacaggagtgtgagctatttaccaagtgtatagaaagctgggaccctgcagccaccggaggtcgtctcccagggaacatgaagttcatttttgcgaaaattttggatacttgccaaagctttgaggatgagctagcaccggacgagaaataccgcatgcactacctaaaaacttttatcatagatctagtaagagcctacaatgaggaggtaaaatggcgtgagcaaggatatgtccctgcaaccgtcgaggaacacttacaggtctcagcaagaagtggtggctgccacctcctgtcgtgcacatcgtttgttggaatgggagatgtggcggatcaagaagctttcgaatgggtacgtggtgtgcctaaaatagtgaaggccctctgcattatcctcaggctttctgacgatctcaagtcatatgagcgagagaaaatgagctcgcatgttgcttcgacgatggaaagctgcatgaaagagcaccaagtcccactcgaagtggcacgcgtgaagatccaagaaacgatagatgaaacctggaaggatttcaacgaggaatggctgaacttgaacacaaacagtcacctgccgagggagttgctcgagaggatcttcaacctgacaagaacaatggtgtatatataccagcaagacgacgcgtacacaaattgccatgtcatcaaagacactataaactcgttgtttgtggagcctgtttcaataacataggacagatagtgagcttgcatggatcatgttattgaactcctcatgcaattagctgctattgaactttgttggtgtcttggtgactcttgtaagattcgccttgcaaggataatgttgggcgtggtaaccctatccttattaagatatgtgttataaactttctcttcctctaaataaaaaagcgtgctcagacaaagttccaaaaaa

SEQ ID NO: 134919 - DNA, 1937 bp, Zea Mays
ctctgaactcctgttgtaatattagagaaataagtgacatgctttctacatatttatatatattaaatattttaattccgaataaagcaatcatataactcagataaataccatatgaaattatagcaggaatgaacagtagcaattctaagacatgtaaacatgtaaaatagctacacaagtccatttcataattaaacatggcttgcagatgaagaatgatcgtaaacatgtaaaatagctacacaggtccatttcataactaaaaactcgaccgccctccatacatcggtaacgtagcccatgtgagaatgatcgtgaccgggtcagacgttagacctgtgctttggcgtgggaccgacgaagcacgacccatacacaacggtaccatagcctatgtgagaacgattgtgaccggggccagaccttagacctgtactttggccttggaccgacgaaaggattttttaacgcagcctgaaattcgatcccacggggagtctaatccagaacccgaggagtgctactcagaacatctaactaactaatctagagatactttcgctataacaaaactaaagtaacatataatttagaactgagggactatctcttaacaaataataattattatctgaagcacacttatatatggatgggtggcaccaatagatagttctagctcatgtagtatacccaatttttttagtttgtatttgtagaaattcaatttaatgcattgtgggtcacctgttaacaaaacagaacttgcattcctaatcacaacaaaaaaaatggagactaccatgatatatatcattattttttgtgggcactattacacatttcatatttgtagttgaggtttaactaagaatgagcaggtggtggaatgatctagaacttcagacaaggctatcatttgctcgagacagggtcgtggaatgctacttctggatggtcggagtatattttgagccgagttactcgcgagctcgagtgatactgtcaaaagttcttgccattgtgtccttactggacgacacctatgatgtctatggaacctcacaggagtgtgagctatttaccaagtgtatagaaagctgggaccctgcagccaccggaggtcgtctcccagggaacatgaagttcatttttgcgaaaattttggatacttgccaaagctttgaggatgagctagcaccggacgagaaataccgcatgcactacctaaaaacttttatcatagatctagtaagagcctacaatgaggaggtaaaatggcgtgagcaaggatatgtccctgcaaccgtcgaggaacacttacaggtctcagcaagaagtggtggctgccacctcctgtcgtgcacatcgtttgttggaatgggagatgtggcggatcaagaagctttcgaatgggtacgtggtgtgcctaaaatagtgaaggccctctgcattatcctcaggctttctgacgatctcaagtcatatgagcgagagaaaatgagctcgcatgttgcttcgacgatggaaagctgcatgaaagagcaccaagtcccactcgaagtggcacgcgtgaagatccaagaaacgatagatgaaacctggaaggatttcaacgaggaatggctgaacttgaacacaaacagtcacctgccgagggagttgctcgagaggatcttcaacctgacaagaacaatggtgtatatataccagcaagacgacgcgtacacaaattgccatgtcatcaaagacactataaactcgttgtttgtggagcctgtttcaataacataggacagatagtgagcttgcatggatcatgttattgaactcctcatgcaattagctgctattgaactttgttggtgtcttggtgactcttgtaagattcgccttgcaaggataatgttgggcgtggtaaccctatccttatt

SEQ ID NO: 134920 - DNA, 1622 bp, Zea Mays
tcctcccctccagcactccactccagcagtccgcgcgcggaggcaagcgcacgcctggcctattcctagtttcctactcggatcattcagtcggatgatgaattgctcgatacacatacgttcatatgcgcgcattgaattcctccgccaaccaccccgctgcgtcatctgcgacacccatgaattcacgacgctcgccttcaatactccgtggcgccagagtctgtagcacacaccgccgctcgctccacagcagaggacaggaggaggagcaagcgagcagaggcagcagctgctatggaggcgcggaggacgggcagagatctcctcgcgagcttcgtgctcgcggcgttggccgcgcaggcattcgtggccgtggtggagtccagggccagccccgcggagaaggctagccaaggcgacgacgtgaagaagccggactgcgtgccggggatggacccgcgctcgttcccgggaatcggcagcggcagccacggcggcggcatcactcccgtgacgccgtcgcactcgcacggaggctccaccgggtcgccgtcgcacggagggacaacactgccttccccgtcccacggcggcagcggtggggacttgccatcgccgtctcacggagggacaacgctgccttccccgtcccacggcggctccgggtccacgccgacgtcgccctccaccggcggctccccgtctcacggcggctccgggtcctcgccgacagccccgtccaccggtggcggctacggtggctccccgtcccacggcggcggcgcgtacggtgggtctccgtccactcccggcagcggtggcgcctacggaggcgggtctccctcgccggcccatggtggcggcgcctacgggagctccccgacgccggcgtacggcgacgccccctcgcacggcggcatagggacctcgtcgccgacgccgttcgacccccacagcttcggctctctcccgggctcctgcgactactggaggtcgcacccgatggagatctggtcggcgatcggcgggcggttcccgggcacgtcgtcgtcgatggggacgatgggccacttcttcggcgcggctggcagggtaggcgggacggacgtgagcatccaggacgcgctggcgaacacgcggtcggacggcgcgggcgcgctgctgcgcgagggcgccgccgcgctgctcaactccatgacccgttcgggcttcccctacacgacggagcaggtgcgcgacacgttcgccgcggcggcggcggcggcggcgggcgggtccgacggcgcggccgcggcgcaggcggccgccttcaggatggccaacgaggggaaggcgtagagatcgagcatgtgtacgtacgtgcatggtaaactggagtgtgtgctccggagcacggtacattcttggctgctgctgttgctttcatgcatggctacgacgtaatacgtgccttggttgtgtgcgtttgtgtgtgtgtgtgtgtttgagtgtttcatcggtgaagaagacaccgagctagacctagcttattctggtgtgtagtcgctcgctcttgctattttttgtcgtttggatcgatcggtttttccgcgatgaatggatgaagcaaactggtagct

SEQ ID NO: 134921 - DNA, 1699 bp, Zea Mays
tcctcccctccagcactccactccagcagtccgcgcgcggaggcaagcgcacgcctggcctattcctagtttcctactcggatcattcagtcggatgatgaattgctcgatacacatacgttcatatgcgcgcattgaattcctccgccaaccaccccgctgcgtcatctgcgacacccatgaattcacgacgctcgccttcaatactccgtggcgccagagtctgtagcacacaccgccgctcgctccacagcagaggacaggaggaggagcaagcgagcagaggcagcagctgctatggaggcgcggaggacgggcagagatctcctcgcgagcttcgtgctcgcggcgttggccgcgcaggcattcgtggccgtggtggagtccagggccagccccgcggagaaggctagccaaggcgacgacgtgaagaagccggactgcgtgccggggatggacccgcgctcgttcccgggaatcggcagcggcagccacggcggcggcatcactcccgtgacgccgtcgcactcgcacggaggctccaccgggacgccgtcccacggcggcggcggcggcggtggggacttgccgtcgccgtcgcacggagggacaacactgccttccccgtcccacggcggcagcggtggggacttgccatcgccgtctcacggagggacaacgctgccttccccgtcccacggcggctccgggtccacgccgacgtcgccctccaccggcggctccccgtctcacggcggctccgggtcctcgccgacagccccgtccaccggtggcggctacggtggctccccgtcccacggcggcggcgcgtacggtgggtctccgtccactcccggcagcggtggcgcctacggaggcgggtctccctcgccggcccatggtggcggcgcctacgggagctccccgacgccggcgtacggcgacgccccctcgcacggcggcatagggacctcgtcgccgacgccgttcgacccccacagcttcggctctctcccgggctcctgcgactactggaggtcgcacccgatggagatctggtcggcgatcggcgggcggttcccgggcacgtcgtcgtcgatggggacgatgggccacttcttcggcgcggctggcagggtaggcgggacggacgtgagcatccaggacgcgctggcgaacacgcggtcggacggcgcgggcgcgctgctgcgcgagggcgccgccgcgctgctcaactccatgacccgttcgggcttcccctacacgacggagcaggtgcgcgacacgttcgccgcggcggcggcggcggcggcgggcgggtccgacggcgcggccgcggcgcaggcggccgccttcaggatggccaacgaggggaaggcgtagagatcgagcatgtgtacgtacgtgcatggtaaactggagtgtgtgctccggagcacggtacattcttggctgctgctgttgctttcatgcatggctacgacgtaatacgtgccttggttgtgtgcgtttgtgtgtgtgtgtgtgtttgagtgtttcatcggtgaagaagacaccgagctagacctagcttattctggtgtgtagtcgctcgctcttgctattttttgtcgtttggatcgatcggtttttccgcgatgaatggatgaagcaaactggtagctcgtatcctaataactagctagctgtagttggattt

SEQ ID NO: 134922 - DNA, 1285 bp, Zea Mays
cgcgcctgctcagctcatttatctcatctcgcccctccgttccaagcagtagcacacaccgccgctcgctccacagcagaggacaggaggaggagcaagcgagcagaggcagcagctgctatggaggcgcggaggacgggcagagatctcctcgcgagcttcgtgctcgcggcgttggccgcgcaggcattcgtggccgtggtggagtccagggccagccccgcggagaaggctagccaaggcgacgacgtgaagaagccggactgcgtgccggggatggacccgcgctcgttcccgggaatcggcagcggcagccacggcggcggcatcactcccgtgacgccgtcgcactcgcacggaggctccaccgggacgccgtcccacggcggcggcggcggcggtggggacttgccgtcgccgtcgcacggagggacaacactgccttccccgtcccacggcggcagcggtggggacttgccatcgccgtctcacggagggacaacgctgccttccccgtcccacggcggctccgggtccacgccgacgtcgccctccaccggcggctccccgtctcacggcggctccgggtcctcgccgacagccccgtccaccggtggcggctacggtggctccccgtcccacggcggcggcgcgtacggtgggtctccgtccactcccggcagcggtggcgcctacggaggcgggtctccctcgccggcccatggtggcggcgcctacgggagctccccgacgccggcgtacggcgacgccccctcgcacggcggcatagggacctcgtcgccgacgccgttcgacccccacagcttcggctctctcccgggctcctgcgagtaagccactgctcatagtcatacatcatgattcatgacgcgtacgtcggtgtggccaactcgccatgcatgcagccactgaccaaaagttgctctgtcgtctactcttcatcgtgacgtgaccaccgagcagctactggaggtcgcacccgatggagatctggtcggcgatcggcgggcggttcccgggcacgtcgtcgtcgatggggacgatgggccacttcttcggcgcggctggcagggtaggcgggacggacgtgagcatccaggacgcgctggcgaacacgcggtcggacggcgcgggcgcgctgctgcgcgagggcgccgccgcgctgctcaactccatgacccgttcgggcttcccctacacgacggagcaggtgcgcgacacgttcgccgcggcggcggcggcggcggcgggcgggtccgacggc

SEQ ID NO: 134923 - DNA, 1377 bp, Zea Mays
cgtcgctcctcccttctcgtgtcccgtcgtccccttctcccatcagcgggagggcggcggcgtcagccggcaaaaaagcaaagcgtcacgagaagctcgttccttgacaggcagccatgattccaaggacgtcctcggtctcttcgtcggcggcggcggcggcgcccaccgcgggcgcgccgccggcgtggccgagcggcagcgacgcggcggcgttccaggcctcgggcagctcgggacatcagcaggtggtcatcagcaacggggtgctcctcgcggcggtcatcttcctcttcatggtcgtcgtgttcgtcttcctcctctacctctacgccaagcggtacctgggcgccgggaacccgctcgtggcgtcgccgtcctcgcggttcctcttcgtggccgcgtccccgctcccgcagcgcggcctgcccgcctccgccctgcgctccctccccgtcgcggtctacggcggcggcggcccgggcaccaagagcagcaaggaggcgctggagtgcgccgtgtgcctgtccgaggtggccgacggcgagaaggtgcggacgctgcccaagtgcgggcacgcgttccacgtggagtgcatcgacatgtggttccactcccacgacacctgcccgctctgccgcgcccccgtcggcggcgacctcgacgcgctgccgcgggaggagcccttcggcgcgtcgctcgagttccccaccaacgtcctgttctggggcacccacgacgaggtcgccaacgccggcctcgccacgcccccgcccccgccgccgcccgtcgccagcgccgtctccgcgagctcctcggcctccgggcgcaggaaggagaacctggtcatcgacatcccgacgcggcccgtggccctgaccaccacgccgcccttcaactccccgctgccggcgagccgggtgcctgggagcgccgacgagacgcggtccccggtctccgccaggctgcggtcgctgcgccggctgctgagcagaggcaagcaggccgtggtcggcacctcctacagcccgcgcggcgccggtgacgtcgagcaggggctcgcaggagccgaggccgcccgcccgcccaagacgcctccggcgtcggactgattcagatcccccccgagctccgggtcgcatttggctcgactcgccgatcaccggagcgcgcgtaagcgttcatttttgttccccgcttttctttctttctttacatcttgattcgaaaaaggaactttcggtcaaaaggttcctgtgtaaacagaggaaaagaccgatgctggttggttgttgttgggggaaaaaatggtggatttgttcatatgtttaccaagaaacttttcttgaaattttgactttgttggcttcctggtca

SEQ ID NO: 134924 - DNA, 1000 bp, Zea Mays
atttcggaaacagaaagcaaaaacgaaggaccttctggcgctgctactcaagagtgagaactgagaacaaaagttcttcagatataccatcacaggttcatcaatacgactccgaggtggtaggtagtctaggggaccaactgagtcactcagacaaaccaatggaaaactatacaaaattacggccctggcatcacacgttcttattgtctttattattgtcaaagttgcattaggggcaacgccatcacggccccgaaaactgaaaacatgaccagcaccatccagaagggcaccgccttcttctggttcttgtcacggcgcgcctccgccagtggttgtgccctattggccacggtcggggcttgctggacagcaggggatggagcaggtgcaggattctcctgaggcaccggctctgcagcagtgttctccaattgtagctgttgattgtacttctcaacatactctgggaaaagtttcctgaagtgcggacagtttttgctctcacaattgtagacaagggaagcttttgctaaacgcctcttttctgcatctgatgtcttgatgcttccagttgtcagtgcatcgtccatctgcaactagttattggtatatgtgtaccttgcaacagaccacatcggattccaagattcaggatgaacttcactcattgacaagcatattcttttgtgtggcgcaaatctgccgctcggggttgtcatgctgaacaattaaatatgttagaaacagaaacaaagaattagcattttcatctgcatctaatagaaatcctctagttccagttttcaatcttcacactataataagaagcaacatgccattaaaacgcaaacatttctcatgtattacaacatttaaggtttccgcacctgatacttggaggcttaaaaggataatccggtggaaatttgagtttcccatagtaatatccacctgcaggtgggaaattgaaacgtgaaaaactttgttagagatt

SEQ ID NO: 134925 - DNA, 183 bp, Zea Mays
atgtctcctgggaccagaatagtggaatcgaacccctgttctgcacaacagagcttatttgccatggtccaagcatgtcttcataaacaatttgctcagtctcaacatcatttgctactctgccctcctcattcacacccctctttagatacctggtgccagcataatgcctcgagcgtctag

SEQ ID NO: 134926 - DNA, 396 bp, Zea Mays
gaaaagatagctgtagacatccccggaagaaatggtcccgtgcgtgcgctcactcctttgctgtttttcttctctccgttcaccttgcgtgcgcgacatctagggcgaccgccgccgccgccgccgccctacgcccagcagcccaggtcttcgtcgcgccctttgccggctacgagcacccaccacaccagatcactgtaatccaggctgaattgtggctggtattggcgatataagcattcgttagctgtttaaattgtgtcttttgtctttgattaagcgtcattggaaaggctgtcatgagaaaactcttttgttcaaacgtttctctcctgtaatatgaatgtactgtgacaatccttcatcctatgctagaatcacatattttagcttcta

SEQ ID NO: 134927 - DNA, 294 bp, Zea Mays
atgcaatcaatggagagcctagcgcaattagaggtgttgtgtgaaaagctttataattctagagactcggctgagcgagcgcatgcagaaagcaccctcaagtgcttctcagagaacagcgagtacatttcgcagtgccaatacatattggacaatgcctcaactccatatgccctgatgctggcgagttcaagcttgctgaagcaagtttctgaccgcagtctttctttgatgctccgtctcgatatacgtaatgtttctttctgtacacttattgcatggcatcatctatag

SEQ ID NO: 134928 - DNA, 702 bp, Zea Mays
gtctactaccttctaagtctttggtcaaggctggtgacatccgtgccttacttgaaaggtgaaacaccaagtcttcttgatgaaactgttcccaagatcacagaaggttttatcacttccagaattaattctgttcaggccatccttgctgacaactcactggaaaatcctttggatagtgtggaagttctccaggaccagctggagtttcttcctttcctttgcagattccagtaccaaagtagtagtctgtacatcataaacatcatggaacctcttctgcaagcttatacggaaaggtccagattacccgctcctggtgatgctgatgagctgtctgtcattgaaggccaaattgcatggatggttcacataattgcggccattgtcaaagttaggcaggtaacaggtgttagtcaagaaacacaagagttgattgacgcagaactctctgcccgtgtactacagttgataagtgtgactgatacaggagcgcacacacagatggaaccaagcagctccaaaagtggaatattcctcgaatatactgcatctctagcctccccaaaaacgatcgtacctgggcgctcgcaagtccagtgctcctttccatgttgctgtcagtagcctcctcttctgttctgcttcactctggaaccaaacacagaatggagctgctctgttctgcttcactctggaacc

SEQ ID NO: 134929 - DNA, 687 bp, Zea Mays
gtctactaccttctaagtctttggtcaaggctggtgacatccgtgccttacttgaaaggtgaaacaccaagtcttcttgatgaaactgttcccaagatcacagaaggttttatcacttccagaattaattctgttcaggccatccttgctgacaactcactggaaaatcctttggatagtgtggaagttctccaggaccagctggagtttcttcctttcctttgcagattccagtaccaaagtagtagtctgtacatcataaacatcatggaacctcttctgcaagcttatacggaaaggtccagattacccgctcctggtgatgctgatgagctgtctgtcattgaaggccaaattgcatggatggttcacataattgcggccattgtcaaagttaggcagtcaagaaacacaagagttgattgacgcagaactctctgcccgtgtactacagttgataagtgtgactgatacaggagcgcacacacagagatatcaagaattaagtaagcaaaggcttgaccgagctattctcatttttgtacaaagtttcagaaggtcatatgtaggagaccaagctatgcattcttcaaagcagttgtatggaagattgtctgagcttctaggacttaatgaccatttaattctactcaatgtgattgttggcaaaattgctacaaatatgaa

SEQ ID NO: 134930 - DNA, 696 bp, Zea Mays
gtctactaccttctaagtctttggtcaaggctggtgacatccgtgccttacttgaaaggtgaaacaccaagtcttcttgatgaaactgttcccaagatcacagaaggttttatcacttccagaattaattctgttcaggccatccttgctgacaactcactggaaaatcctttggatagtgtggaagttctccaggaccagctggagtttcttcctttcctttgcagattccagtaccaaagtagtagtctgtacatcataaacatcatggaacctcttctgcaagcttatacggtccagattacccgctcctggtgatgctgatgagctgtctgtcattgaaggccaaattgcatggatggttcacataattgcggccattgtcaaagttaggcaggtaacaggtgttagtcaagaaacacaagagttgattgacgcagaactctctgcccgtgtactacagttgataagtgtgactgatacaggagcgcacacacagagatatcaagaattaagtaagcaaaggcttgaccgagctattctcatttttgtacaaagtttcagaaggtcatatgtaggagaccaagctatgcattcttcaaagcagttgtatggaagattgtctgagcttctaggacttaatgaccatttaattctactcaatgtgattgttggcaaaattgctacaaatatgaa

SEQ ID NO: 134931 - DNA, 1145 bp, Zea Mays
gatctcactgactgttctttcaagggctttgtgtgggaattatgtcaattttggcgtatttgagctctatggtgacagagcacttgctgatgcccttgatatatctctgaagatgaccctctcagttccattatctgatatattggcattcaaaaagctgtcgaaagcgtactttgggtatatggaagttctgttcaacaaccatatcaagtttgttctcaatttggacacaaacacattcatacatattgtcagctcactcgaatctggcttaaaaggtctagatgcagggatatcatcacagtgcgcttctgccatcgacaacctggcagccttttactttaataacattacatctggtgactcacctccatcaccagcttcagtaaatctcgcacgacatattggagagtgtcccaatttgtttcctcagatactgaagactctttttgagatcatgctctttgaggatgctggtaatcagtggagtctgagtcgaccaatactgagcctgataatgaccagtgaacagatgttcagtgaactcagagcgcacatattagcatcacagcaacaacgcctttcacagtgcttcgataagctgatgacggatgtcaataggaacttggaacctaagaatcgtgacagattcactcaaaacctgacagcatttagacgtgattttcgactgaagtaacagctccttggtaccagctatcagtttgaaggtgttcctgcatgatgtaaatactccagttaccttcttttttggaaccacctttctgtgggttgagaaaagaagagcttgtccttaggtttgccttggattggctgaagatggtcttgttgatgcatgtggtagtgaaagcagctgtaaatttcatagcatgtcattttaatcagaatggtgaaaggtggagattgtttcttttgttttttattttatattgcatccctttagcatgtacagcaaaattggtgctagaacaggggtggctgtttgcccaatttgttaagtgggaggcagtcatctcagatataattcatttgttaagaagtcaacgaggtaaaggatgtaaatgattccgttggctttgctgaatatgaaagttgaacagtaagaaggatggctcagttgcatccgc

SEQ ID NO: 134932 - DNA, 1157 bp, Zea Mays
gatctcactgactgttctttcaagggctttgtgtgggaattatgtcaattttggcgtatttgagctctatggtgacagagcacttgctgatgcccttgatatatctctgaagatgaccctctcagttccattatctgatatattggcattcaaaaagctgtcgaaagcgtactttgggtatatggaagttctgttcaacaaccatatcaagtttgttctcaatttggacacaaacacattcatacatattgtcagctcactcgaatctggcttaaaaggtctagatgcagggatatcatcacagtgcgcttctgccatcgacaacctggcagccttttactttaataacattacatctggtgactcacctccatcaccagcttcagtaaatctcgcacgacatattggagagtgtcccaatttgtttcctcagatactgaagactctttttgagatcatgctctttgaggatgctggtaatcagtggagtctgagtcgaccaatactgagcctgataatgaccagtgaacagatgttcagtgaactcagagcgcacatattagcatcacagactgtggaccagcaacaacgcctttcacagtgcttcgataagctgatgacggatgtcaataggaacttggaacctaagaatcgtgacagattcactcaaaacctgacagcatttagacgtgattttcgactgaagtaacagctccttggtaccagctatcagtttgaaggtgttcctgcatgatgtaaatactccagttaccttcttttttggaaccacctttctgtgggttgagaaaagaagagcttgtccttaggtttgccttggattggctgaagatggtcttgttgatgcatgtggtagtgaaagcagctgtaaatttcatagcatgtcattttaatcagaatggtgaaaggtggagattgtttcttttgttttttattttatattgcatccctttagcatgtacagcaaaattggtgctagaacaggggtggctgtttgcccaatttgttaagtgggaggcagtcatctcagatataattcatttgttaagaagtcaacgaggtaaaggatgtaaatgattccgttggctttgctgaatatgaaagttgaacagtaagaaggatggctcagttgcatccgc

SEQ ID NO: 134933 - DNA, 1186 bp, Zea Mays
catctcatcctgaattcctggcactatcccctaccagccaaccatcgcaagatgtttgtttccattccatcggtggcacgagacaggagacgccaaggccatagctagagcctagagcagcagcagaggcttgacctgaagctccacccgccatggcattcacgcccgctacggcctgctgcaaggcttccctggcgctggcaccgcgggcgtcgccccgcggcccggcggcctgcgcgcaggcggcgctcctctgcacgccctccacctccgtgttccgcggcctccgggcgcccgcatccgccgcgccggccccgcgccggcgccgctcggcggcgtccacgggcatagtctgcggcaaggtacgtggcctcgggaatggcgtgcgtgcgtgcgggaatccgtgttccacacatggcggtgattggtttggtagccgtggtcgtctcctcgttgcaggtcgccaagggcagcgtgccgccgaacttcaccctcaaggaccagaacggcaagcccgtgtcgctgaacaagttcaagggcaagcccgtcgtggtttacttctaccccgccgacgagacgcccggatgcacaaagcaggcgtgcgcgttcagggactcgtacgagaagttcaagaaggccggggcggaggtgatcggcatcagcggcgacgacgcggcgtcgcacaaggcgttcgcgcagaagtaccggctgccgttcacgctgctgagcgacgaggggaaccgcgtgcgcaaggagtggggcgtcccctcggacctgttcgggacgctgccggggcgccagacgtacgtgctggacaagcagggcgtcgtgcagtacgtctacaacaaccagttccagcccgagaagcacatcggcgagacgctcaagatcctgcagaccctctgatccgatcaacctcctcactgttctgggccatgctctgcattcgtcgctgtaaaagtaccggactatgtagtagtgtagtgtatgtaaccaagagctgatgacctgatgttttgttccatccttcagtgagtctatctatcacacgattctggctcgtttgatcgaccagcatcttcctgtttgtcatggtcagtttcacttgtattacaactgtacttttggtcgacagtctcagatgttgtagctcgttcaacccaaaccggtcaggattgtgatcgat

SEQ ID NO: 134934 - DNA, 1046 bp, Zea Mays
atcgcaagatgtttgtttccattccatcggtggcacgagacaggagacgccaaggccatagctagagcctagagcagcagcagaggcttgacctgaagctccacccgccatggcattcacgcccgctacggcctgctgcaaggcttccctggcgctggcaccgcgggcgtcgccccgcggcccggcggcctgcgcgcaggcggcgctcctctgcacgccctccacctccgtgttccgcggcctccgggcgcccgcatccgccgcgccggccccgcgccggcgccgctcggcggcgtccacgggcatagtctgcggcaaggtcgccaagggcagcgtgccgccgaacttcaccctcaaggaccagaacggcaagcccgtgtcgctgaacaagttcaagggcaagcccgtcgtggtttacttctaccccgccgacgagacgcccggatgcacaaagcaggcgtgcgcgttcagggactcgtacgagaagttcaagaaggccggggcggaggtgatcggcatcagcggcgacgacgcggcgtcgcacaaggcgttcgcgcagaagtaccggctgccgttcacgctgctgagcgacgaggggaaccgcgtgcgcaaggagtggggcgtcccctcggacctgttcgggacgctgccggggcgccagacgtacgtgctggacaagcagggcgtcgtgcagtacgtctacaacaaccagttccagcccgagaagcacatcggcgagacgctcaagatcctgcagaccctctgatccgatcaacctcctcactgttctgggccatgctctgcattcgtcgctgtaaaagtaccggactatgtagtagtgtagtgtatgtaaccaagagctgatgacctgatgttttgttccatccttcagtgagtctatctatcacacgattctggctcgtttgatcgaccagcatcttcctgtttgtcatggtcagtttcacttgtattacaactgtacttttggtcgacagtctcagatgttgtagctcgttcaacccaaaccggtcaggattgtgatcgat

SEQ ID NO: 134935 - DNA, 902 bp, Zea Mays
tcggcttatatgcatagtacttctttaaatgggccatgcggcccatttcctgcggtggcggcggcttgtgtgtgcaaactcctgtacggcgtctcacgcctcaccccaactcgctcccttccccgtgcttcccgccgtcgtggagaggtcacgcggctggttcccgccgcttccggacggttcggccttccagcttccccttgagttcaccacgttttgtgacgcaagctagctgaaccctactgattgctctcccagcgcacggtggttgttgcgctgattcgttgtcttgtgagctgttctagggttccgagggaggaggatcagctgccgcgatgttcctcaggatctctcgtctcggggcgcggcttctgcgcgagtctggagcggagacgagagctggaaatttgctaagcagtccaggcattttgtatcaagctcatcttaaccagcattcgaccagagtggtgacttctactgtattatcgttgttaagaactaaagattggtagtgaataatctatttagatgaacatgttcccaattaccattcattcttgctaatagtaaatgtatcactagttattgattcacttaatgatctacattgatttggactatatctattattttcatgatttggtttctattcgatgaatctatctatacattccccattctgaaacggctgttgcaaaagaagatcggcattatttttcctcagcaagttagcttttttagagaactacaagcaaagcctttgtacttttgtactgcaggagtgatggtttctatctcaagtttatttgtattaattttttgtttatatattttcagcggaatgtccttttctcaactgcaacaagtggtgatcaggatgaaagcagtcaggcaaaggataa

SEQ ID NO: 134936 - DNA, 406 bp, Zea Mays
tcggcttatatgcatagtacttctttaaatgggccatgcggcccatttcctgcggtggcggcggcttgtgtgtgcaaactcctgtacggcgtctcacgcctcaccccaactcgctcccttccccgtgcttcccgccgtcgtggagaggtcacgcggctggttcccgccgcttccggacgggttccgagggaggaggatcagctgccgcgatgttcctcaggatctctcgtctcggggcgcggcttctgcgcgagtctggagcggagacgagagctggaaatttgctaagcagtccaggcattttgtatcaagctcatcttaaccagcattcgaccagagtgcggaatgtccttttctcaactgcaacaagtggtgatcaggatgaaagcagtcaggcaaaggataa

SEQ ID NO: 134937 - DNA, 453 bp, Zea Mays
tcggcttatatgcatagtacttctttaaatgggccatgcggcccatttcctgcggtggcggcggcttgtgtgtgcaaactcctgtacggcgtctcacgcctcaccccaactcgctcccttccccgtgcttcccgccgtcgtggagaggtcacgcggctggttcccgccgcttccggacgcgcacggtggttgttgcgctgattcgttgtcttgtgagctgttctagggttccgagggaggaggatcagctgccgcgatgttcctcaggatctctcgtctcggggcgcggcttctgcgcgagtctggagcggagacgagagctggaaatttgctaagcagtccaggcattttgtatcaagctcatcttaaccagcattcgaccagagtgcggaatgtccttttctcaactgcaacaagtggtgatcaggatgaaagcagtcaggcaaaggataa

SEQ ID NO: 134938 - DNA, 776 bp, Zea Mays
tcggcttatatgcatagtacttctttaaatgggccatgcggcccatttcctgcggtggcggcggcttgtgtgtgcaaactcctgtacggcgtctcacgcctcaccccaactcgctcccttccccgtgcttcccgccgtcgtggagaggtcacgcggctggttcccgccgcttccggacgggttccgagggaggaggatcagctgccgcgatgttcctcaggatctctcgtctcggggcgcggcttctgcgcgagtctggagcggagacgagagctggaaatttgctaagcagtccaggcattttgtatcaagctcatcttaaccagcattcgaccagagtggtgacttctactgtattatcgttgttaagaactaaagattggtagtgaataatctatttagatgaacatgttcccaattaccattcattcttgctaatagtaaatgtatcactagttattgattcacttaatgatctacattgatttggactatatctattattttcatgatttggtttctattcgatgaatctatctatacattccccattctgaaacggctgttgcaaaagaagatcggcattatttttcctcagcaagttagcttttttagagaactacaagcaaagcctttgtacttttgtactgcaggagtgatggtttctatctcaagtttatttgtattaattttttgtttatatattttcagcggaatgtccttttctcaactgcaacaagtggtgatcaggatgaaagcagtcaggcaaaggataa

SEQ ID NO: 134939 - DNA, 1255 bp, Zea Mays
aggaaagcccagataattacacactagcttcacggtgaaggcagtcggggtcacaattcacaactcccaacccaatccagcccagcaatcaacaattcccccggtcgttttcacttgacatcccccgtcccatagatcgccggcgatggctccggccgttgccgcggcggcgtcggcggcgatgaggcaggcactgcgggaccggcagatcctcgatgccgtgggcactggcgctgcggcgctctcgctggcaggctcctccttcatcgtgatctgctacctcctcttccgcgagctccgcaagttctccttcaagctcgtcttctacctagccgtctcggatatgttttgcagcttattcactatattgggggggccatcgaatgcattttactgctttgcacatgactacagtgctcatttcttctgtgtggcttcttttctatggacaaccaccatatcattcactctgcatcgcacagttgtaaaacacaaaactgatgttgaagaatttggatctattttccacttatatgtgtggggaacttcactatctaccactgtattacgttcgataggaagtgactacggaagaccaggcacctggtgctggattcagcagggaagcatggcaaaggtcctacatttaataaccttttatcttccactttggggtgccattttgtacaatgggtttacatactatgaagtaaaccgcatgctgaataatgcaacgcagatggctgctggcataagtgatcaatcaaatcagtctgacattagggcaggcaggaaggcatttaaccgatggggttattaccctctaattctaatcggttcatgggcgtttgcaactatcaatcgtctttatgactttgccaatccagggcacaggatagtctggctctcgtttcttgatgttgggttcgctggacttatgggcctattcaattccattgcttatgggctaaactcttctgtgcgccgagctattgcagagagaatcgacacgttcctacctgagagaataaaaaggagcctccctgctttgtcaaggctgaggagtcaacaggaaaatgaactcacttctcttatcgttgagggtaactgatatgtaatggaatttccatgcacacgaagccttttttttgtttatctgttcgttcttcaatctccaacaagggaatgcaacatcactgtaagagcagtgggttagtaacacgtcgaattggtccgacgaatctctagaaacgtc

SEQ ID NO: 134940 - DNA, 1249 bp, Zea Mays
ttttaaaacatacaactcacaacaggttaaactataagactatctccattaactaaaacggtgttttataaggtgaccgtaaaaatgaaccactatgataaacgctttttacaatgcaatttgtcctcctgcaacacacggcaccttattttttttcttcttctcaaatcgagcgccacgatgtcgcggcgggacccatcgctatccacgcggccacgccgtccatctggattctggaagcatttctgtagagaatgcgccgtccttctgtgtcttatttatcttatataaaaaaggtcccgcgcccgcctttgttctctcctcctggctcctgggtctcatctcctcccttcgcttcgcaaggccaacaaggaactccaccacgcacggccgcacccgcacccgcacccgcacccgctctctgctgccatggcgtcgtcctccatcgcgctcaccgttatgttcggcttcaccgcagccctgtgctgcctccagctcctcggcgcggacaccacgaccacgaccacgacccagagcggcctcgcgcgcctggccgcggcctccctggtcccggcggtcctggccgccctgacgctgaccccgctgctcgcgttcgcgcgcgtgcacgcccgtgccggggcggagggggcgctcgtgtcgggccttgccaaggcgaccctcctcgcggggacggtggctctcgtcgcggcggccgtggtgcagctcggcgccgacgggcacctcgaccgcggccgcgacgacgtcgcgcgcctgaacgtgaagtgatgcaacaagcaatccccccctccttctcctgactataaaaataacctgcgccaagcgtcggcgtgtcgtcgctgcaggcgtctggacgaccggaccactgctaggtcctcgttctgctcgatccgttcggagctcagcgcgtctgggctttctgatggcggcggcgtctgaaggagaagggggtgattaatgtttggcgtgcccccgtggcccgtgccggtaaaaaggaggatacttttattttgttttcctccgtatatgttggcctagtgcttgcgcttctggatttgtggtaagctcactgtctatgtaatcccactgggactgggatttcagtttgctctttcatctcctggacggtcttgtaaatatatatatatatatatatatatactgtgtttcagttacgttcttgtatcatcgtatgataatgaattaatgatggtgatacttgtggtttaaa

SEQ ID NO: 134941 - DNA, 1048 bp, Zea Mays
gaaaccctagttccaactcggccgcctctactataagtagctccactctctgtcctccgcggaaaccttgcccctgctcctcacgccgccgccgccgccgccgtcgccgccaccacatccgtagcgcccagccgccggagaagaggagggagccagcaccagccaccatgggtcgcgtccgcaccaagaccgtgaagaagacctccaggcaggtgatcgagaagtactactcccgcatgaccctcgacttccacaccaacaagaaggtgctggaagaggtctcgatcctcccctcgaagcgcctccgcaacaaggttgccggcttcaccacccacctgatgcgccgcatccagcggggccccgtccgtggcatctcgctcaagctgcaggaggaggagcgggagcgccgcatggacttcgtcccggagaagtcagcgctcgaggtcgaagagatccgcgtcgacaaggagaccatggagatgctcgcggcacttggcatggccgatctcccgggcgtagagcgccaggctgaggtctccagcgtccccgcctacggccgcccgcagtatggaggtccccgccgtgaccgcgtctaggttcaccgccgatcgcagtggttgcgtcgtggtcgcaccgttactcacagttgttatgctactatgttaaacttgttttagatctgtggtttcttctggcgattaagttttgaacttgtctgttatgctttaaactctatagttggatctgcgtgtgatggacattagagttatgttcttgcgccaatgaagtctcaagagattataagttactatgaggttttttgtttgatgctactgcttgttaccttaatgttagcatgcttttagatgtatagttagtttggtgttggttgttaggttcattgtgtactatgcagattaaattttgatttttattccttgctatccatttcagtgctgtctaggcgtgtggctgttagctaagggccattgtgttttgtgctcagatggaatcctaccaatatttcgctacacattctcattctcaa

SEQ ID NO: 134942 - DNA, 155 bp, Zea Mays
aaaccttgcccctgctcctcacgccgccgccgccgccgatcgcagtggttgcgtcgtggtcgcaccgttactcacagttgttatgctactatgttaaacttgttttagatctgtggtttcttctggcgattaagttttgaacttgtctgttatgc

SEQ ID NO: 134943 - DNA, 192 bp, Zea Mays
aaaccttgcccctgctcctcacgccgccgccgccgccgccgtcgcagtggttgcgtcgtggtcgcaccgttactcacagttgttatgctactatgttaaacttgttttagatctgtggtttcttctggcgattaagttttgaacttgtctgttatgctttaaactctatagttggatctgcgtgtgatggac

SEQ ID NO: 134944 - DNA, 348 bp, Zea Mays
gtaaacaataaagcaatgaaaaatatgcgagatgcattggggattaagatgtttttcggtggtgtacacctccatgtgagatgttcttctcatgcgctgaatatcatggttcaaactggactgaaggtcagtccaaatacagttgaaagaatggggacattatcaaggtctgtgacatctacaccatctcgtttacaaatctataattctattgttcaaacattgggtcctagaagtaaatcggggctgattcttgatgttccacatcgttggaatgcaacctataatatgctaaatgaagcactaaattataaggttgctctcaataggcatgcagtagagcaacac

SEQ ID NO: 134945 - DNA, 1104 bp, Zea Mays
tagaattgaaacgccccagtttcattgaacatggacggaatgactcttgctgctttcatcgggtggcagctgttgatcgacgaaatacagcatatatgttagtgctctcgtgctctgtccttggaccacctcaatgcctcatttctaggtcaaagcggatgttgccatacatgttgcctcaaactttcagtatacaaacacctcacgacttttgaggtgtcctcagcagtatactataataacacaagaaaaaaaatgaaacaaaaacctctcccttgaaattgttgagagaacgaaccaatagcatcactaaggaacagaaaaaaaaaacaaaagaatccatgaacaatctgtcagctagctagctatgtacaccttttgtaaaatttgcaatgcactcatgccctgctcatcagggtcggcgggctctcaggcctcttgacggcgctggcgtaccggctccgcagcgggctctccgcgtgcacggcggacatgacgtgcatcttgctgccctgccggccgcccgcctccgcgtccacctggtcgtcgacgtcgtcggcgacagcgacgccgtccgcctccgccccggcggcgcctccgaccgtgaacacgaacgggccgatgggcacgtcgtcgtcgagcgccagcagcggctggagcgcgtcgacgacgtcgcgcatggtggggcgcgccttggggacgctctgcaggcactggtgcgccacctttgcggccgcctccgcggcgcgcggcgagtactgcgcctccaggccggggtccatgaagcggtgcagccggtcggcgcggcggaggtaggggcgcgcccagtccacgaggctctgctcgcgcccgcgccggctcttgtccacggagcggcggcccgtgagcagctccagcagcaccacgccgaagctgtacacgtcgctccgcgccgtcaggtggcccgtcaggatgtactccggcgccgcgtacccgtgcgtgcccatcacccgcgtcgtcacgtgcgtcgcgtccccctgcggcccctccttcgccagcccgaagtcggacagcttcgcagtgtagtcctggaacgaacttgaggtcagtcgatcaggcacgatt

SEQ ID NO: 134946 - DNA, 1169 bp, Zea Mays
ctccaatctcccatttcagtttcaggaggaaggatgtcctacacgtcattgcagccaaacgccaaagccggtgcagaccaacgactgggcacaagtcagaactcagaagcgagcgcgcggcacgctgcacgcgcggcaggggcagagcccccagcgacccaccacttctccccgtgcgcgcgcgcgtgaggcgctgctctctttctttgcatgtgaaggagtgagaatgagagagtggggacagcgtgggagaaggggagcaatgccgttcgtgtccgagtgcgggcggcggggcggcggcagtggcagctccagcgggtcgtcgttgtcagcgcggcggggaagtgatagcagggctggggtgctgcaatgggatgaggtggaggagatcgatggagaggtgcagagctcgtacaggggacccttcgacacaatggacgcgctccaggacgcgctaccaaacaaaaggaaaggagcatccaaattctacaatggcaaaacgaattctgtggcagatgctgctcaaccggcaaaaggcactgctgatcctgtgaacccatcccctaagaagcgcaagggcttcctttcattcggcttcagctggaccaagtcttggagcagacgtggtgcaaccagcagctcagagaacttcgggaagacgctgtctgcagcccttacaggcagtgctcaaggcaacagcaggggcggtgtccatgagcaccagggctgtcaagaccctgctgcccactgcctgcatctgcacaggaggtccaacatgcctggcgtctctgcttccccgcctggacctggtgcccttcggcctcagctgatctcagtgcagatgcagtcggtgtctgtggctggtgtggaggacgtggcggagtccaccgcctcagtttctcccagagagaagcgcaggaggagcttgcagtagtgacagtttcgtctgtccagttcagttagttgctccacccactggtgcccgttttaagaacgcggaatccagttgccggtgctcccaaattctcagtgcaatggatgctttataatgcaaggttgaagctgcaattgtgtatagtggtgctatagctgctaagtttcttacccttattatacatatataaaataatggactaatgatagatatgctgaacttggaaaagtgatgc

SEQ ID NO: 134947 - DNA, 1650 bp, Zea Mays
tgaaactttcgtacatgccgtatcgagctgatgctccacgtcttcccgttcccgagtcctgacaccggcacaaacctgtagaactactagtatcggagacccctccatttcagtcccatctctcatttcccttgtaactggaagcgaggtctcggcgccgccgccctctgcctcgtacgtcctcggcgctgcgggagcgtgcattgttgagcgagtgcggccaagcaacgcgggctcgaggagatgatgctgagcgggcacggcggcgggaggcgcctgttcacggcgtcgcagtggcaggagctcgagcaccaggcgctcatcttcaagtacatggcctcgggcgcgcccgtgccgcacgacctcgtcctaccgctccgcctcgccaccggcgtcgacaccgcgccctccctcgccttcccgccgcagccttcgccgtcgctggcgtactggggctgctacggcgcgggggcgccgttcggccgcaaggcggcggaggacacggagccggggcggtgccggcggacggacggcaagaagtggcggtgctccagggaggcccacggcgactccaagtactgcgagaagcacattcaccgcgggaagagccgttcaagaaagcctgtggaagtgacctcctcccccgccgccggccccgctgcggcgtaccgaccgtccgcgatctccaccatctcgccgccccgcgcggccgacgcgccgccgccgagcctcgcctacccgcagcagcatctcctccacggcgcctcctccgcagcaggagcagcagcccgcgtccccgctggcgctctccagctccacctcgacgcgagcctgcacgcggcggcggcggcggcgtcgccatcgccgccgccgtcctaccacaggtacgcccactacacaccgccagcgtcgtcgctcttcccgggcggcggctacggctacgactacgactacgggcagtccaaggagctcaggcgacggcacttccacgcgctcggggccgacctgagcctcgacaagccgctgcccgagcccgacaccggctccgacgagaagcagcccctgcggcgtttcttcgacgagtggccgcgggagagcggcgacatggccgcggacgacgcgacgcagctttccatctccatccccgcggcttcgccctccgacctcgctgctacctccgcctccgccgccgccgcgcgattccacaacggggagtgatcggtccatctcctagctgcagccctgcaacagcgtggattgaccgctgcatttcctggctgcaatgcaagcctgcaacagcgagcagtaagccagtgacgtggatgcatctcgtagcggcaaaccctgcttctgcctctgcggtctgcgctgctttgcgcgggacggctcaggggctgaggctcaaaaaagtctgaaccgagtcaagcagtactagggactctatgacttggtcttttgttcttttgtagcagtacgttactcgtaccaaatgttgtttattttttgtgtgacattttcatttcttccagttccagtctgtgatgcaagctttgtcgcttttgtcagctctttttcggtgacccacgccggccttcgtgatcgattcccttatacttatacctgattcctctgccatattgatcgtttgtc

SEQ ID NO: 134948 - DNA, 1782 bp, Zea Mays
tgaaactttcgtacatgccgtatcgagctgatgctccacgtcttcccgttcccgagtcctgacaccggcacaaacctgtagaactactagtatcggagacccctccatttcagtcccatctctcatttcccttgtaactggaagcgaggtctcggcgccgccgccctctgcctcgtacgtcctcggcgctgcgggagcgtgcattgttgagcgagtgcggccaagcaacgcgggctcgaggagatgatgctgagcgggcacggcggcgggaggcgcctgttcacggcgtcgcagtggcaggagctcgagcaccaggcgctcatcttcaagtacatggcctcgggcgcgcccgtgccgcacgacctcgtcctaccgctccgcctcgccaccggcgtcgacaccgcgccctccctcgccttcccgccgcagccttcgccgtcgcgtacgacctgcgcgcttctctcctcccgacccgacctcccccgtcctcgcctcatgtttcactctgatcatcgacagccatcagcccatcacatcatcgctgatgactttgtacgtgtgaccgtgcatgcagtggcgtactggggctgctacggcgcgggggcgccgttcggccgcaaggcggcggaggacacggagccggggcggtgccggcggacggacggcaagaagtggcggtgctccagggaggcccacggcgactccaagtactgcgagaagcacattcaccgcgggaagagccgttcaagaaagcctgtggaagtgacctcctcccccgccgccggccccgctgcggcgtaccgaccgtccgcgatctccaccatctcgccgccccgcgcggccgacgcgccgccgccgagcctcgcctacccgcagcagcatctcctccacggcgcctcctccgcagcaggagcagcagcccgcgtccccgctggcgctctccagctccacctcgacgcgagcctgcacgcggcggcggcggcggcgtcgccatcgccgccgccgtcctaccacaggtacgcccactacacaccgccagcgtcgtcgctcttcccgggcggcggctacggctacgactacgactacgggcagtccaaggagctcaggcgacggcacttccacgcgctcggggccgacctgagcctcgacaagccgctgcccgagcccgacaccggctccgacgagaagcagcccctgcggcgtttcttcgacgagtggccgcgggagagcggcgacatggccgcggacgacgcgacgcagctttccatctccatccccgcggcttcgccctccgacctcgctgctacctccgcctccgccgccgccgcgcgattccacaacggggagtgatcggtccatctcctagctgcagccctgcaacagcgtggattgaccgctgcatttcctggctgcaatgcaagcctgcaacagcgagcagtaagccagtgacgtggatgcatctcgtagcggcaaaccctgcttctgcctctgcggtctgcgctgctttgcgcgggacggctcaggggctgaggctcaaaaaagtctgaaccgagtcaagcagtactagggactctatgacttggtcttttgttcttttgtagcagtacgttactcgtaccaaatgttgtttattttttgtgtgacattttcatttcttccagttccagtctgtgatgcaagctttgtcgcttttgtcagctctttttcggtgacccacgccggccttcgtgatcgattcccttatacttatacctgattcctctgccatattgatcgtttgtc

SEQ ID NO: 134949 - DNA, 822 bp, Zea Mays
atgggcaggagggcgtgctgcgccaaggaaggggtgaagagaggggcgtggacggccaaggaagacgataccttggccgcctacgtcaaggcccacggcgaaggcaaatggagggaggtgccccagaaagccggtttgcgtcggtgcggcaagagctgccggctgcggtggctgaactacctccggcccaacatcaagcgcggcaacatctcctacgacgaggaggatctcatcgtccggctccacaagctcctcggcaacaggtggtcgctgattgcaggcaggctgccgggccgaacagacaatgaaatcaagaactactggaacagcacgctgggccggagggccggcgccggcgccggtgccggcggcagcagggtcgtcttcgcgccggacaccggctcgcacgccaccccggcggcggcggggagccgcgagatgaccggcggccagaagggcgccgctcctcgcgcggacctcggctcgccgggctccgcagcagtagtgtgggcgcccaaggcggcgcggtgcacgggcgggctcttcttccaccggcgggacacgcacacgccgcacgcgggcgggacggagacgccgacgccaatgatggccggtggtgcaggaggagaagcacggtcgtcggacgactgcagctcggcggcgtcggtatctgtatctcccctcgtaggaagcagccagcacgacccgtgcttctccggcgacggcaacggcgactggatggacgacgtgagggccctggcgtcgtttctcgagtccgacgaggagtggctccgctgtcacacggccgagcagcttgtgtag

SEQ ID NO: 134950 - DNA, 3147 bp, Zea Mays
gtgcacaagcacaacacaacggccaccaccggaccaccggccctcgcaggtcgcgcaaccatttcccttggaaaacaacgcgcccacccgagcccggccggccccaaccactccaaccaaaccaaagcccaaacccgctttcccccgaaacccaggccctcgcgtcgtttgatgcgattccggcggcgatcgtcagcgcctccaacaccacccgctcccccgtcctagcgtgcgttcgggcgatctcccctctcgcggcgggcatggctggcgttggcggcggggcgcgcagctcagacagggcgggggcggcgcgctcgcccaccaccaccaccaccaccaccaccacggcgatccagtccaccatccagtcgatcaaggaggtcgtcgtcggccactccgacgccgacatcttggacaccctccgcgagtctaacatggaccccaacgagacggcgcagaagctgctgaatcaagatccatttcacgaagtgaaaagaaaaagggacaagaagaaagagagtgctggccagaagagctttgctgatagtactggacaagttgaccagaaccctcaatggatgaggccacatacccacaggatggaaaatgatcaaagaagacttcccaatcagggtcagatgtcaggcccaagtcatgaatttcgggttgtgagggacaacagatttcaacatggtgtggtggagaacagaccagagcccggacacaaaggttcagcagatgtacaaatgtctgataggagcactgttgttcagtccgctcgaaacctctcacctgctacaacctcagacggccagatcacacatcaaaatgctatgcagaactcacaatctgacataactcaagggaagagggatggtcaaggtactacacagaagcacgcgaagccatatctgaagaactctcagaatgagcagcactttccaggttctgacccagctcatgggtcagccacagttagaattgctggtggaactgttggacctactcgacgtcatgttggagttattaattctagtaggcaatttgttggccgttcaggttctcagatgcatgcaccaggtggttcttcctatgcaaatattcagagggggagttttacctcagtaggggcatctgggcgttactcagcttttatgtcaagaaacattcaacaaaacctgagggctgatacaacatttcgtggaaggcccactggtagatcttttattgcacaaaatgtcaacaggtatcaccagggccctactaccaaccaaaaagcagtacaccctattaaggagtggaagccaaaattgacaaagaagtcacccaccatcgatgcagaaaacagtatagctgatgctgcatctccttcagcaagcaactgtgaaaatgccaacacaacagatgtaaatgggttgcctgaaaaactttcacaagctaacttgcatgaggtggagcatgttattattccggaacatcttcgtgtaccagaatatgagcagacaaagttaaggtttggcagtttcacacctgatttggatttggaacaagtacctgatttgaccccacaagacactgagcaaccagaacatgtacaagaaccagttcaacaggtcagtgaaggcgatagtttggatgatggacatgatgacatggatgagcaagctagatcttcacaacacctgtcctcatcaacagctgagatttccttgtccccatctgaggatagtgatcaaatgagtgggcaagtagagaatgatgatgggctgggcttagttcagagtgacactccagttggagcagcagatggtgacagtacccagatcacctcgactttgactgctttttcggcttatggtcataaagatcctaatattcatacaaccaatgaggcccagctatatggactggtggagcctaatgtacatccacaagcattagcttcctcttctcagggatacccttcagaaaatccagaagcagataatgctgtgcaagtcttcaggatgccagattctaatgttcactcacaagttctcccgtccacatctgaggccctaaatccacagatcgtgagcaacagccctgttccgatctcttcacagcagcagcatatctctcagcaacaagctgcaacacagatgtaccctcaaatgcatgtgcaacattttccaaattttatgccatatcgccaactctattcaccagtttatcccatgcctatgccaaactattcgccaaatgtcccttatccatcaaatggaaatagttatcttcaaatgcccagtggaggttcgcatttaactgcaggaagcgtaaaatatggagtttcacagtataaaccagtcccatctggtaacccttctggctacggaaattacactcatccagctggttttacaatgggttctcctggtgttattggagctgcagttggtgttgatgatgtcaataggatgaagtacaaggacaacatttatgcctcaactccacaggtcgagacatctgacatctggattcagacagctagagagatgccaccattgcaggttccttcatattacaacataccaggtcaagcaacacctggtgcttttgtgccaaatccagcaaatgcatctttcaatgctacatctcaatcccctcatgcgcagttcccaggcttgtaccatcctcagcaacctccctctattgtaagtccgcaccccatggtgcatcaacaggtgccatcggccattggtcccaatgttggggtcggggtggcagctccaggcccacaagttggggcatatcagcaacgacaaattggtcatatgaattggagacccagcttttgaagaaggtttcttaattatctgtaattaggggggtcacaagagcctttatgtaacatcagtaggctccttttgacgggaagcacctttgtttttagtgcagctctttctgatctatttaagctataacaaggtttttgttagcttttccttcccccaggtgaattcaatgtcccatctgaactggtatgtagattgtgatttaaacattgggcaagatctcgcacgagcaccaaggttgagtgccttccattttgttctattgttttgttttttaatctaagttgtgtaggttgcgtgccttccattt

SEQ ID NO: 134951 - DNA, 856 bp, Zea Mays
cctaacaagtagagccggctcatatgcagccctacctcaagcctcagtccaatccgcggcccaaaaactccccccgacaaccgaacaggagcggcggcggcggcggcactaccctctccagcaatcggcatgggcacgcgggaggtgtacgaggagaagctccgcagcggtgcgcacctccaccgcgatcccaccatcaacccaggcctcggctcgccccggtgcccgcgatgcctctccctcctcaaccccaccgcgggaaagagggactgggccatcacctccgtcctgcacgacgccactgccgtggctggttccggtgccggcgctttgctcagtgctgtgcacgggtttaacacagggatcccttttgtccagaagcatgtcaaggggccgaagtggctgcagttgctcgttggggtgccaccactgctgatattctcaggtgccagtgctgtatttggtgcatatgcacttccaaggtttgttcagctgacagtgacgtcttactacgcggcatcaactggctcgcagtatgctgtttcacatatcacacggcagatcgaaagagctcattttccagaatcagcccaggaatctgagtgagttggttggcattcagtctgttctattgggggtgcaatgtacatggtatagaaggacgtttagtgctgcttttgccgtgttgcagtacagtattagttttactgtgtttcagacagcacgcagtgaataaaattatattgtctttggtctaattgtctgtattcaggtcttcggttgaaaatgtttttttttcacttagccccgtttgaatctttgagatggaattcattttgataactatagtttagat

SEQ ID NO: 134952 - DNA, 102 bp, Zea Mays
cttgattgttgcatagcatgtcgaggcatgtttttttcctttgtgatggtgcatttattcaaacttagaaagtatgtttgaatttgaattcaaaactaaaac

SEQ ID NO: 134953 - DNA, 634 bp, Zea Mays
agcaccgtgcccagccgccgcggcgcctcgcccaccactctctctctccctctcccccctattcccccacgacgtcgtgactacctccactacgatccttcccctgcttatggagatgacagttccaagcatactccaacatctctctccctacacgcacaactagccatggccgcgcggccactgcaacccgtgcgagcacaccctgcgatgcacgagtgttgctctgcacaaccgctcgacggtcgtcccccagagcttccccatgatgcgcgtcgtgaagcccctcgacgaagaccctaggaacacctgcaggggtcggccatcgtgcacagagcacttagaagaagaagttgaagtggaagtggaagaggagtcagctcctcaatctgaggtttctccaactgaacgtgctccggaaggtctttcagaaggtgccctagcagggtttactgcaattgcaatatcctagtagaagagtctggctctcctcctcatcaaggcaagccccagtgcatttgccacctccttattgttttaaatcttttatcacttatatgttgcattaggtagtaggagttgaatggttaaacccttgctgcataacttccttgaattattgattatcgtcctt

SEQ ID NO: 134954 - DNA, 1008 bp, Zea Mays
atccttacaaaatgccacacgatgtgtgccttgtgctattgctatttgttgttcttgcaaatcttgaaactacaatatcaatccatcatagtcatccaagtatgagagttttatcccgaaatatgagctcttcattcaccagtgctgatccagtaagaattgaggcatcaactgaatcaaaccttgtacaaaattatgcaagatatagagcagacagcccccctactggtggatatacaggtggcatggcaactatagatgtttacagtcaccaatatataaagagcggagaagtaactgctgcaataatgtgggtgtcaaatggcaagactgaccagctgagtgacttaaatgatatacaagctggatgggcggctgatggatacaaatccactggatgctttaacctggactgtaatggttttgaaccagtgaatgatgctcctatcacaccaggagatattttagaaccagaaaatggccactctaaaatatcattcaagatatttaagaataaagatgatggagattggtggctacactttggatatgacataaacaacctgaaacccgttggattttggaagaaaagtatattcaccaacttgcaggatcacgctggattcataacctggggtggttatactaggagtcccaatggaaatgcaagtcctcccatgggcaatgggcaatggcctggaaaaaactcagcaagtgttcaaaatgttcaatttgttgattctactggccagggatatgcactaccggcttgggctcttcatgtctctataagcaacaagaaatgctaccaacttagcaccttttttgatagcatgttctactacgggggtccaggcggttgcactgattagcaaccttcaacatttgaagcacccatatagcttctctaatgaaataaagagcttctttgccaaggctatatagcttatcaccagtttttttcccgataaccttgtcaccagtcttgtatcatcctctattcaaatc

SEQ ID NO: 134955 - DNA, 1062 bp, Zea Mays
atccttacaaaatgccacacgatgtgtgccttgtgctattgctatttgttgttcttgcaaatcttgaaactacaatatcaatccatcatagtcatccaagtatgagagttttatcccgaaatatgagctcttcattcaccagtgctgatccagtaagaattgaggcatcaactgaatcaaaccttgtacaaaattatgcaagatatagagcagacagcccccctactggtggatatacaggtggcatggcaactatagatgtttacagtcaccaatatataaagagcggagaagtaactgctgcaataatgtgggtgtcaaatggcaagactgaccagctgagtgacttaaatgatatacaagctggatgggcggttgatccatccagctatggagacaacaagacacacttttttgtatattggacggctgatggatacaaatccactggatgctttaacctggactgtaatggttttgaaccagtgaatgatgctcctatcacaccaggagatattttagaaccagaaaatggccactctaaaatatcattcaagatatttaagaataaagatgatggagattggtggctacactttggatatgacataaacaacctgaaacccgttggattttggaagaaaagtatattcaccaacttgcaggatcacgctggattcataacctggggtggttatactaggagtcccaatggaaatgcaagtcctcccatgggcaatgggcaatggcctggaaaaaactcagcaagtgttcaaaatgttcaatttgttgattctactggccagggatatgcactaccggcttgggctcttcatgtctctataagcaacaagaaatgctaccaacttagcaccttttttgatagcatgttctactacgggggtccaggcggttgcactgattagcaaccttcaacatttgaagcacccatatagcttctctaatgaaataaagagcttctttgccaaggctatatagcttatcaccagtttttttcccgataaccttgtcaccagtcttgtatcatcctctattcaaatc

SEQ ID NO: 134956 - DNA, 813 bp, Zea Mays
gtcatggccgcaccgcatgacatgcacggcgtcgactcgttcgcgcagctgcccttcatccgcggcgcggcgcgtgccgcggcaacgaagacgaagacgcccgcggcgagcagggacgacgccgccaccagcatccgcctcttcggccgggacttccccaacaacgaccagcaggcggcccagctgctgctgctcaaggtcaaggaggacgccggggccgcagcggccgccgagggcggcggcgagacggcggccggggagaggaagttcgagtgccactactgctgccgcaacttcccaacgtcccaggcgctgggcgggcaccagaacgcgcacaagcgggagcggcagcacgcgcggagggcgcacctcgaggcttccttcgccgcgcactgcggcgcctacctccccgggccgcacctctacggcctcttcggctacggcggcggccacacgccgcactatccgccggccgccgtgtggccaggcgccgtgccgccggggatgtacggcggcgtggggcccgtggcgcggcctcccgtgtacggcggcgtggccgtgccggggatgtggaggtcgtcgccacctgggagtggcgcttttgtcgtggctggtcgacccgacgggtccgatcccgcggggtacggagagatggttggtatagacgacaaggtggcgatgagcgtggtgacgtcagtgcccgcgttgccgtcatcgtgtttgtcgggccagcctgcggagatgatagggagacctgagttgggacacaaggatggagtcataagcttggacctctgcttgtaattcatatct

SEQ ID NO: 134957 - DNA, 634 bp, Zea Mays
ctaaagcttatcctcgacctttcgttctcacccacagcctagcaccatcttgtcttgcccacgagagaagcaaactcaagatccacatcgcctaatcgccttgcgtcagtgcttctgcttgctgtctgccgcggctgcacggatgagagaagttgcatccttctgactctgttgctcgccttcagacacccgtccgtcgcctctaacaccggtgcgttgtttggtcttccctgtgagttcgcagccaccgctagctgcgaggaggcgcacaaaaaagacgtcgaggctgccgctgtcccacatgtatttgtatattttcttcatggtcgagatttgcagtgcttggttttgctagaacattgacatcagattaacccagggtgggggcactgatgcaccttcaacaacattctctgttgtatgcatgtggtttcggttgttggggatctccaagtggccttgaaattgttgtaccatctctgatgcttgtggatgtggtggtggtgcttgcgccatagtattagtgtcttttttatccttttcctgtttcgtgatgatttctctaagccaccaataggtcttgctgatccacgaatttcctttgccttgaccttgacaccccttggcttcctag

SEQ ID NO: 134958 - DNA, 890 bp, Zea Mays
acccatccctcgtacgaggtcggcccctttctccttctgccgcccgcaccaaccctccgccaacactgccctgcttgcaccaaccctccgccctaggtccccgcccagcctgcgccaaccctgcgccctcgagctccctgcctcgcccagctcgtggaggtgagcagatgcttcaacatttaatccaccctccttcaactccctggccacggcgatggcggcgcgccggtgcatggccggctcgaggcgggattggatgaattgaggaccggataggtacacgatggagtgggatgcacggacgttgaggtgagatggccaaagcagaaggcgtcgtcacacccgcagtcggagcacaacagacaatgggagtggtggcacgccggagattggagacactcatcgtccatggaatggggcacacagtagcggacgagggagggccatagtagaaggtgtctgcgctgaagatctttggctcccatctcgccggctgcagcgaggcgccatgctttgagggttgctccgccatgcagatgctctccgacatccacttccagcgcgcctgggtccagggtgtgatcctgcctgtcagcaaactacaacaaagctggcgaacgacccttgaggaaatgataggtcctgtgtcgtcgaccttttcgtcgtgccaaaataagcagagagacgattctggcggccagagttcagagacacttatctagctatcaaggtgccatattcctcacatctcatgtctgcctctgtcttcttgtatgcctcttttcaattgtgtaccgagtatttgtggtcctctgtttgttgtcatttgctaaaaattgaaaattctctttctgttatctttgttctttaatattattgccatttactta

SEQ ID NO: 134959 - DNA, 848 bp, Zea Mays
ctcatattgaaatgaatcgagattgataaggagttagttaatgatgtttgagcatgtactttttttgagtgtctatttattttcgattggtatctatggattgatcacaagccgaaacatggttagagctctaatatgtcttgaacttatactgaattcaattaatctaaatctcgtaacattttctgatctatttgatagtcgccaattaaaaggagacattttcgcaatttttgttatagcccttgcggctgctgaagcagctattggactatccattctttcttccatccatcgtaacaggaaatcaactcgtatcaatcaatccaattttttgaataattagacatagaatcccctaaacaaaggggcatatataataataagaaacattaagatgaatagaaatctaatcttattttcttattagtgtttaataatatcctttttcgagtaggttatttcagagtattgttttttacttattgaatattgcatttttgcaattcattgatattgcaatttgaatattgcaataatttatattgaaaagatgatagccaatttattggctaattcgaattagtatgtagaattcgtataattataactgttgaagccttaaattcaagtctcttggctcttttcacgctttctcacaaacagattacgaaatatattgcattatttgttaaagtttggataaaccattgcttcgtctggtgtctacaatacatctaatttatatagtactaatttcatttttaccagatcgaaaatttttatgttgaaaaggaaaatttagagatccaatgtcacattctgtaaaaatttatgatacatgtatt

SEQ ID NO: 134960 - DNA, 599 bp, Zea Mays
tcacgcagctcttactccgatcctccatcctcatctaaacaaatacttctcatcttactttttttcgtcttcttccctataaataactggccttcccaaatcgcccacaactctcacacaacagagaccacccacctgcgctgcgcctcggttttacggcccttccctcaccgccccgcgcgagcgaagccatgaagcttgaggtcatgcccaagcagcgggtgctggaggcggagcagagggaggaggccatggagatgagtggcctggacctgtggaagcacgagaagcccccaaggatctgctccttgcccccgccgctcccggcgccgccagcgtgcgacgaggcggcgctcgtgccgccgctcaacttcgccatggtcgacgacggcatattccgctccggcttcccggagaccgccaatttccggttcctcaagtccctcaacctccgctccatcgtgtacctgtgcccggagccgtacccagagacgaacacggagttcctcgagaagaacgggatcaggctccaccagttcggaatcgaggggcgaaaggtaagaaaaacttggtttcaacgaaatcctctgctgcttcgt

SEQ ID NO: 134961 - DNA, 1307 bp, Zea Mays
tcacgcagctcttactccgatcctccatcctcatctaaacaaatacttctcatcttactttttttcgtcttcttccctataaataactggccttcccaaatcgcccacaactctcacacaacagagaccacccacctgcgctgcgcctcggttttacggcccttccctcaccgccccgcgcgagcgaagccatgaagcttgaggtcatgcccaagcagcgggtgctggaggcggagcagagggaggaggccatggagatgagtggcctggacctgtggaagcacgagaagcccccaaggatctgctccttgcccccgccgctcccggcgccgccagcgtgcgacgaggcggcgctcgtgccgccgctcaacttcgccatggtcgacgacggcatattccgctccggcttcccggagaccgccaatttccggttcctcaagtccctcaacctccgctccatcgtgtacctgtgcccggagccgtacccagagacgaacacggagttcctcgagaagaacgggatcaggctccaccagttcggaatcgaggggcgaaaggaaccatttgtcaatatacccgatgacaaaataagggaggcgctcaaagttgtcttagacccaagaaaccaacctctgcttattcattgtaagagaggcaagcaccgaactggttgtttggtcgggtgcttgaggaagctgcagaaatggtgcttgtcttcagtcttcgacgagtaccatcgctttgccgctgcgaaagcgcgaatcactgaccagagattcatggagctgttcgacgtctcaagcttgaagcacctgacaccctcacattgttaaccccaaggcgcgtgatcgcttgatcccccccaacttctagtacatctccaaggctatcttcctgcagctactgaaccgattcagccgtgaataattttggaaccccctagagtccatgaggtagtgatgaaaccattgcagaacattcgtgcttgagaggtttagtttcccccctgcttagcgcactggagagcctgagaaccagactgctgcggtcgatttgcgaggggttctcttttttggtagctctcgcgaggaattcgccattgtttttgggtactgaagcagcatgtactcgagcagcttctgaggaggaatgaactactctctaagtgcaaaaaaggcgtgtctcttcttgcacgagtgtggttagggatactgcatattaacaagaggttgaaatagcatgataattgcctatttaagcctcaattagcccccaaaaaaataagaaatatttatcttgcatttctc

SEQ ID NO: 134962 - DNA, 1731 bp, Zea Mays
acacatttcacctactctccacacagttcacacccaacacttgagctcacacaatcacgctacagagcgcagagctgcacgctccaccggcgaactcacctcggccgccctcctctgccagatagcctccctctactattcaagcccaaaccctaaatcctcggttcccaaatggcgacgccgccgactgcgctgctgttgctcctcgcggcggcagcggcattccacggcgcgacggcgaagacgacgatcgagccgtgctctggcgcggacgcgtgcccggctcttctgggctacaagctctacgcggacatgaaggtgtccgaggtggcggcgctcttcggcgccgacccggcagcggtactggctgccaacgcgctggacttcgcctctccaggcgccgccaaccgcatcctccccgcgggaacacccctccgcgtgcccacccgctgcgcctgcgccgacggcgtccgcaagtccgtcgccatccgctacgccgcccggccttccgacacgctcggctccatctccgaggtcgtcttcgccggcctcccctcggccgaccagatccgcaccgccaacgggctcgccgccgaggaccccgacgcgccgctcaacccgggccaggagctcgtcatcccgctcccctgcgtctgcttcaactccaccgacaacaacctccccgctgtgtacctctcctatgtcgtgcaggtcggggacaccgtggaatccatcgccgccagccacacaaccaccgtcactgatatcagcaatgtgaacgccatggggagccccattgtcgcaccaggcgacatccttgccataccattgtctgcttgcgcctcagcatttcctaactctgcttcggactatggattgcttgtggcaaatggaacctatgcactgactgctggtaactgtgtggagtgcagttgtgggccagcgaatctcaatttgtattgcacaccgtcttcactatcagcatcatgttcaagtatgcaatgctctaatagcagcttaattcttggtaatgtgactgcacaacccaccactggtggctgcagtgtctcatcttgcaactatgatggctatgtcaatggaaccattgcaacatcgctatcctcaggtcttcaacccatgtgtccaggaccgcatcaatttcccccactcacggcggtgccaactgcggcaaaccatgggtcttattctccatcacctgcaccaggacctggagatgctggtggtgccaccccaggaggttccagcctttctccatcaaatgagcctgctgggaacagctcacaagcggctgcgataaatcaaccatgccgtttcctcctcattttcattctttctgtgacattgtccttgcgggtgtggattcctgtgtagagtattgttttttttaaaaaaataactatgtagagtatttgttggctgtatttgtattgagcgtggaaggccttattggggccaggtggaacctgaatgaagaatgcagtagcctgtcttcgttagtgtccggtgaaactttggtatgattttggtttctccagaatttgtatatgaataagcctatctccagaatctatccatcaaggcagtagcacgagatagagatggtaaggttcatggtccccatgggggcaccaagcttattgcctagagcttattgcctagtgcggctgctagtatgcatctcccattagtcctgcaaaaacgaaaaaaaaa

SEQ ID NO: 134963 - DNA, 924 bp, Zea Mays
cttgagctcacacaatcacgctacagagcgcagagctgcacgctccaccggcgaactcacctcggccgccctcctctgccagatagcctccctctactattcaagcccaaaccctaaatcctcggttcccaaatggcgacgccgccgactgcgctgctgttgctcctcgcggcggcagcggcattccacggcgcgacggcgaagacgacgatcgagccgtgctctggcgcggacgcgtgcccggctcttctgggctacaagctctacgcggacatgaaggtgtccgaggtggcggcgctcttcggcgccgacccggcagcggtactggctgccaacgcgctggacttcgcctctccaggcgccgccaaccgcatcctccccgcgggaacacccctccgcgtgcccacccgctgcgcctgcgccgacggcgtccgcaagtccgtcgccatccgctacgccgcccggccttccgacacgctcggctccatctccgaggtcgtcttcgccggcctcccctcggccgaccagatccgcaccgccaacgggctcgccgccgaggaccccgacgcgccgctcaacccgggccaggagctcgtcatcccgctcccctgcgtctgcttcaactccaccgacaacaacctccccgctgtgtacctctcctatgtcgtgcaggtcggggacaccgtggaatccatcgccgccagccacacaaccaccgtcactgatatcagcaatgtgaacgccatggggagccccattgtcgcaccaggcgacatccttgccataccattgtctggtaaacagtcactcattggactgcacaagattggaataaactgccgtggcaattgcagagaattttataagccataactttggcaaacattccatcacttttctgtcaaattaactataaattgattg

SEQ ID NO: 134964 - DNA, 1029 bp, Zea Mays
atggaggcgtcggcggcctccgacgaaaccctagccgacgtgctcgaccacctcaagccccacactatcgctctcctccaccttctctacaaccgctgcccacctctagctccgcctccctacgcgaaatgggtgggcatcgcgcgggcacagctccatctccgggcacgcagggtggcggcgtgtcgcggatctggaggtggtcgatcatcgcgcgtcgtcggcagccaggtaaatctgactgattcttctccttacctgcttctcccggtgtggatctcggttctcgacgagtttcagggatccgtagcggcggcggcggccatggacaagagccctggtgctgcttctcacttacgtccttcctcgctggtgaaccgcggaatatatgaggccttggagttgagggatggaggatctgattatcttggcaagggtgttcttaaggagatggcggtcacgatcacgtgggtgaaggcgaggcagatcttcatcagccgcggcaaccccaccgtcgaggtggacgtgggcctcagcgatggcagctacgcgaggggggccgtacccagcggcgtatccactggactaggaaaaagagggatgaaactcattcttggtgtttcgtataatgccttgaacaagtatcttcctccagaatgctttgacctcagcaaaacaccatttatttcatctaagcttgccaccggtacaggtattgctccgttctgcttgttcctgtggaacatgttctttgagaaacatgaccactacaaggatagttcttgtgcaagagaattacacaaagatgagacttcatattcaggttttgatttggaacttgactccttaagttggatgagggtgacagagctattgattccaactcatctgcatttggaagcatcagatgaacctgatcaatgtgagatgtatgaagatgacagtaaatcatcctcaacgcctcagatgcatacaaactcaaaggcaagctctcagcgttacaagtcaagtagaacagatgacgagtga

SEQ ID NO: 134965 - DNA, 541 bp, Zea Mays
aggtaccgcatgcgaaagatggataagtacttcgacaataatggtgaacttctgtgtactagtggaacatcggggacggctggtcgaagcagacatggcagggcgtgcactgtgtccagacaaggtcgctgccggtgtccatcgtcagcgccactcgctgcggccgcggcgtgccgatgttcaagtggatgaggtactcggcgggcatgcgtaccacagtcgccgtcactgggtcgccgtagtggccgccacgatggtaaaggctggccgcacgggctctcgaacgagcggccatccggctgacaagctcccatctggtgaagccccgacctttgtcaacgtgggtcaggtcggcacgcatggtgaggccagcggtcgaggttgccggcgcggtgaacaagagcgtgaagaagagcgcataggccacaaggccaggcatcgaacaattcatggtgcactccactcgatcgtgcgagtgcaagggaggttgggagtgcaaagttctcccagctgcaggtttcactcggctttactccactga

SEQ ID NO: 134966 - DNA, 1715 bp, Zea Mays
caaaagagtgcatgccaaaacggccttatacaattttcttttagaaaacaagcaggcatcacctaattacctgtcctcactcctctgaactactatatccagtccttaatccgatgccaattcctactggtcactgatcgccatgatccgcgtgtttttgggagcataaatgtgcagcgcggtccctgtggcaagctcctgtaacctcaatacaagctatgcagcagctcgtggcgttgctggtactgatctccctccccgtgcgcgcggcgcctgtctccggcgccggcgtcgtggtggcgctgctcacgcactccgacgccggccgcggcttcgcgaggcccgagctcgtgcggcgaatggcgcaccgagccagggcgcgccgccggctcctgtcctcgcacgaacgccccgtgcgcgcgcgggtgcgcgcagggctcgtcgccgccgccggcgggattgcgacgaacgagtatctggtgcacctggcggtcggcacgccgccgcggcccgtggcgctcacgctcgacaccggcagcgacctcgtctggacgcagtgcgcgccctgccgcgactgcttcgaccagggcatcccgctcctggaccccgcggcgtcctccacgtacgccgcgctcccctgcggcgcgccgcggtgccgcgcgctcccgttcacgtcgtgcggcggccggagctgcgtctacgtctaccactacggcgataagtcggtcaccgtcggcaagatcgccaccgaccgcttcaccttcggggacaacggccgtcgtaatggcgacggcagcctccccgccacgcggcgcctgaccttcggctgcggccacttcaacaagggcgtgttccagtcgaacgagaccggtatcgccggctttggcagggggaggtggtcactcccctcccagctcaacgccacgagcttctcctactgcttcacatccatgttcgactccaagagcagcatcgtcactcttggcggcgcgccggccgcgctctacagccacgcgcacagcggcgaggtccgcaccaccccactcttcaagaacccctcgcagccctcgctctacttcctctcgcttaagggcatatccgtcggcaagacacggctgccggttccggagacgaagttccggtcgacgatcatcgactcgggcgcgtccatcacgacgcttcccgaggaagtgtacgaggccgtgaaggcggagttcgcggcgcaggtcgggctgccgccgagcggcgtggaggggtcggcgctcgacgtctgcttcgcgctgcccgtgtcggcgctgtggcgccgccccgccgtcccgtcgctgacgcgctgcacctggagggcgccgactgggagctcccacgcggcaactacgtgttcgaggacctcggcgcacgcgtgttgtgcgtcgtgctggacgccgcgccaggggagcagaccgtcatcggcaacttccagcagcagaacacgcacgtcgtgtacgacctcgagaacgaccgcttgtccttcgctccggcacggtgcgacagcctcagctcgtagcttcactctagtcactagtagtgtttgtacaaaaaaaaatacgtagatctttttagtactaactaaaaatgctaggtgaaaataaaatagtttttccattgtgattgtaaaagttggaaagcaagaaaatttcgcgtgcaatttgtcacgccacctttccatataacacaca

SEQ ID NO: 134967 - DNA, 1635 bp, Zea Mays
cgcgctgctcgcgcatgctataaagccggcagaacagcgagctgccttcctcgccgtggagtagaggagcacaagtgagctagctagctctagctaggccacgcactgctgcctccttcatcatcaggtcgtgctagctagctagctatagctgggccgggggacgtacgacatcagcgcgcggccatgggcgtggggaagctgatgaacgacgtgaagccatacctggcgatggtgctgctgcaggtggggttctccgggatgtacatcgtctccgtcgcctccctcaagcgcggcatgaaccacttcgtcctcgtcgtctaccgcaacctcgtcgccaccgtcgtcatggcccccttcgccctcctcttcgagaggcgagtgaggcccaagatgacgccgctcatcttcctcaagatcatggggctcgccgtgctcgagcctgtgctcgaccagaacatgtactacctcggcgcgaagctgacgtccgcgaccttcgcctcggcgctggtcaacatcctccccgccatcacgttcctgctggccctcgccctgaggatggagaggctgaggctccggagcctccgcagccaggccaaggtggtcggcacggtctgcaccgtcgccggcgccgtgctgatgatcctctaccacggcccggtggtgccgttcccgtggtccgcgggtcgtcttcaccaccacgtccccgcggcggcggtggagagccagagcagcgcctcctggctcaacggcatctgcatgatcatcggcagctgcctgtgctggtccggcttcttcatcctccagtcgaacacgctgcagagctaccctgcggagctgacgctgacgactctgatctgcttcctgggctcggtgctgaccggcggcgtggcgctcgtggcggagcgccgcgacatgagcgcctgggtcattggcttcgacacccgcctcttcaccgccgtctactccgggatcgtgtgctccggcgtggccttctacgtgcaggggatcgtgacgcaggcgcgcgggccggtgttcgtgacggcgttccagcccctgtgcatgatcatcaccacggttcttggctccaccatactgaaagaggagaccaccctgggaagcgtgattggcgcggcgatcatagtggtggggctctactgcctcatctggggcaagagcaaggaccacctcggcagcaacggcggcaagcccggcgccgcggccgtcgccgagctgcccctgacctcgtcggctcctgcttggtccaacggcaagcaagctctggccgtcgtcgagacgacaccgccttcgtctttgcccaacaagtgcgttcactgacgcgcggatcggagctccatgcatgatgcggaccgtacaccaccgcacactactagtagtgcattgccagtgactgtaagccgccggccgtgtatgatcatgcatgcataccgatgtcccatactcccatcgttgcgtttaacactctcgagtttttgataacgtacttgcgtgtgctctgctgtgtgccactgccagtgccaccacaaccaatagtctaatactactacgacaattaagctttgtttagtttgtgcaaggaaagaagagaattaattactactattcgagtcgatc

SEQ ID NO: 134968 - DNA, 1096 bp, Zea Mays
ggctggacagtctaaggtgcgaaccttcgcgttcccaacctacccctgcaagccattgccctcgcctatcgcctcgtgcaagtccaagctcccacgactccaccgcgaccgggagagagtcagagagagacgcccgcctccagatcgtccggcggggatggcggcgtcggtctttccagcgctgctgctggccgtagcggcggtgcttctcctaccggtggcagaggccgtgtggctcgagctcccgccgtcggggaccaagtgcgtctccgaggagatccagcccaacgtcgtagtgctcgccgactacgctatcatgtacgagtcccaccccagctcgcatcccaccgtcgccgtcaaggttacatcaccctatggcaatactgtgcatcataatgaaaatgctacaacgggccagtttgcattcaccacttcagaagctggaaactaccttgcatgtttctggatagacagcgtggagaaaggatcaggaacatctctaaatcttgattggaagatagggattgctgcaaaggactgggatactattgctaagaaagagaaaattgagggcgtagaactagagcttaggaaacttgaagctgcagtcgagtccatccatcataacttgctgtatctcaaagcaagggaagctgacatgcgaacagtgagcgagagaacgaattctagagttgcctggttcagcatcctgtcattgggagtctgcgttgccgtctctgtgctgcagctgtggcaccttcaagggttcttccggaagaagaagctcatttaaattcacgttttatcagtgtgtacttcccgtgttaaataccttaggaggacaattgtcaaatttatttcaaaaggaaactcgtatgatggacaaaacatgtctttgatacatgacttgaaactagcaacctatattccgtggaattgaggtcgaccttccatcttgattgccttgcagctgccggtaaataatgagtgctacgttcaatttttctcattatctgccatacttcaaatcgagatttttactctttatccttgtatctgattgttattaataattaaataataattactgtagaaa

SEQ ID NO: 134969 - DNA, 1653 bp, Zea Mays
caggagatctgcaagtcaaccgaacagacattcgctggaagctctgctcggagtgaggtcgctgcgcatctaccacacgatgccgccgcctctccgctgtctccttctcgccttcgtcgtcgtcctctccggcttcccccgtctcgcccaccccttcacggctctcgagtctgaccagatcgcccgcttccaggaatacctccgcatccgaactgcgcacccatcccccgactacgccggcgccagcgccttcctcctacactacgccgcttcgctcggtctccacaccaccacgctccacttcaccccgtgcaagaccaagcccctgctcctcctcacctggcgaggctccgatccctccctcccctccgtgctcctcaactcccacatggactccgtccccgcggagcccgagcactgggcgcaccctccattcgccgcgcaccgcgacccgaccacgggccgcatctacgcgcgcggcgcacaggacgacaagtgcctccccgtccagtacctcgaggcgatccggggcctgcaggccgcggggttcgctcccgcccgcaccatccacatctcgcttgtccccgacgaggagatcggcggcgcggatgggttcgacaagttcgcccgatcggaggagttccgcgccctcaacatcgggtttatgctcgacgaggggcaggcgtcgccgacggacgtgttcagagtcttttacgcggacaggctggtgtggaggctcgtcgtgaaggcggcgggggcgccagggcatgggtcgaggatgttggacggcgccgccgttgacaatttgatggattgcgtggagaccatcgctgcgttcagggatgcgcagttcaggatggtgaagtccggggagaagggtcctggggaggtggtctcagtcaaccctgtgtacatgaaggccggcataccaagccccacgggtttcgtgatgaacatgcaaccttcagaagcggaggtcggctttgacctccgccttcctccaaccgaagacatcgagcagatcaagcggagggtcgaagaggaatgggcaccatctcacaaaaacctgacctacgagctggtgcagaaaggtccggcgacggatgtgtccggacgtcccgtatccacagcgacgaacgcgtcgaacccgtggtggctgacgttcgagagggccatcgcctccgcgggtggggagctgtctaagcctgagatcctgtcttcgaccacggactcacgctttgcgcggcagctgggcatccctgccctcgggttttctccgatgaccaggacgcccatactgctacatgaccataacgagtttctggaagacagagtgttcctgaggggcatccaagtgtacgaacatgtcatcagagcactaagctcgttccaaggctgattcgtaaaaaaaaaagaaaagaagaaggaaaagtggcagtgctgttgcgtggagtgtaacatagcaggttttgtaataattggttcagtcacaaacacgccaaaggaaacattccgaaactattgggatctgtgaaactgttgttgtgggaagaagactagcagctgggtcgtgtgatgagctgattgatgttcgggcttgttgcttgatatatctccaataatgcgtatatcccagacgttcaacacttgaaa

SEQ ID NO: 134970 - DNA, 705 bp, Zea Mays
ggttaccaaaagtcttatttgaaatcaagttgcttcaagtagattggcttggcacgcacttatcacagtactttatgatgattccttctatcatgaaaagcacaataggaacttatgtaaccttctatgaattccaggtgaacaatgcacttatggatttgataaaggccaccagatccacaagatccacaatgagacccgaagagtggtcagtccagcttgagaacacattgggtaagcttaagaagactaaacacctctcatttctcttcaaggctaattgttccagaggaaatctcttacgctacatcctcgtcagaaaccagggcactcatcacgatgcgaacagatgaagttgcaaatgttgccgcagcagtctataacttggttggcaagctgcaactaagctttgtttatctcacaggggtgatagtcatgaggtttgagcacatgaggaacactgtaaggtaatgaaaccagcaaggattgtaggaattgagcgacaaggtaaaggatatccatcctgctccctcgcttgcaataccagcgaaacaatttatctgtcttgtggcttcatacttactgaatttcctctgatactgcagaaacactggcctacaacgtgtaattattcttttagaccctgtgggagtcgagttgatactttccacttctcatctccccatgcctagaaatgataatttt

SEQ ID NO: 134971 - DNA, 86 bp, Zea Mays
caggggcagggggcggccgagccgggtagggggaaggggaggggagatgggggagggaggagagggggagggggacctcaccgggg

SEQ ID NO: 134972 - DNA, 1202 bp, Zea Mays
caggaagcacacacatcactgatcgagaacttactacatagtacaccaagaaagcaagcgacgacgacgtctgggaacgacgaagccgaagccggagagctatactatacctgtcatccaaccagccagccagccaagccatcatatcatggtgaagacggcggcgagcagcagcagcgacgacgccgccgccgccaagaggaggacgtacaagggcgtgcggatgcggagctggggctcgtgggtgtcggaggtgcgagcgcccggccagaagacgcggatatggctcggctcccacgccaccgccgaggccgcggcgcgcgcgcacgacgccgcgctgctctgcctccggggctcggcggccgacctcaacttcccgctccgcctcccgttcgacctgccccccgcggccaccatgtcgcccaaagccatccagcgcgtggccgccgccgccgccagcgcctcctcctcctcctcctgcggcggtggcggcggcttgcgcgcgccgccgcccttcgcgccacgcgccgagaacaacggcaccagtgcctgcagcgacggcgacggcgacgccaccccggcgtcgagcaccaccagctcgcccaccagccacgccgacgacgtctcctccccggactccaccgtcagcagcgccggcgacgtcgactactacacctcgctcgcggacatcgacgccttcttccagtcgcccaagtgcgtggtggactacgccctcatggacccctgcagcgccttcttcgcgccggactcgacggcggccgacgacgacggcggctgctgctgggcctgggaggaggacggcggcggcattgcgctctggagcttctccgctacactggactgctgaagtgtgggcgtcaggggaagcggaagcgattcgagtcagtcactgactatagtcgccgatcgatcaagtgacagaattccatatatatatatacacgtgataattaattcaattccgtgtttgtaaaacattcgtaataagctaatttaattaagcatcgtaggaggagctctcgtacgtggagctacatgttttaaggtggcttccatggagttaacctctttactgttgcttgattatgagtacaaaaaaatcaactttattgccattataattgcagaaagaaactattctattccctttttgttaggacaaaaaaaaaacataatagaag

SEQ ID NO: 134973 - DNA, 98 bp, Zea Mays
ttttttttctaaatctggacataataatattgtttttgttagtacaaacggtactgactaaaatccgtaagagcatctccaacaatgcctcaaactag

SEQ ID NO: 134974 - DNA, 1241 bp, Zea Mays
cttgttccccaccgacgcgctcccgacgcccccgctaagctcgcctcctccccaccgtcgtctgctcggggctcggcgcgcctcctccccacgtcgatactgctcggcgcgtctcccgatccaaatcggccagcctcatcttctcccgatccaaatcgccattctcccgatccaaatctgccagccccatcttcctccccgaatcgccgagaaggacgctcctgtaggccgcatccctgctcccccacggatccacggagcggtagcctctccggacgggcttcttctccgacaccgcagcagccctggaggagcgtcttcaccgtggaggagcgccgcagcaggcctggagggcttcttcgccgtgggcctcctctgcgcctgcgccgccctgctccacaccccgtctccctgcaccctacgcgtcatcttcccaggctccggcgtcctcctccctgctccctgctctctacgcccagccccgtccgcccgacagctggcagcacatcggacctgtgcagtgtgaaggtcttgacgagtagtcaagccgcggcacgctactcgccccttcggagacgaacgagatttggggagcacgagcaccaactccacccacgaccatggattcacgcatgtcgcgggcaagcggctcctccaatggaggacaaggatggcccagttatggtctggtgtcgctgatccgctgccccaaatgcgaaaggtcagagttgctcgtgagactaagatcgaaaaggtgggagaacggcaactttggtcgagagttcgtgaagtgtgaaagcaagccatatcgagataataaggttgttaaaatatgtatttttttcatgtggatggacgattatgtcaagatgcttgaaggggcaggggtggtgggtggctctggggagatgatggcgtctaatatctgggatgaacgagcagtagcaaatagagcagatgtgactacaaactgggacaaatttgctgccgaactgaagaagatgaatgacaacatggtcgagttgaagaagataaaggacaacatagttgagttgaagaagatgtttggagccttttatgcttctatgatttttattctattccttttctttgtgatgaactataattgtaagcgttaaatataggattcatggtgaacctatgctgaatatttgtgatgttgaatctgtgatggacatttgtggtggtaaatgtgtcgattcagtcagggtcttgttgtg

SEQ ID NO: 134975 - DNA, 474 bp, Zea Mays
atgaccaagatgtacatccacaaaaggcaagacatcatctgtgacgtgttcagactgcaggctaagaaggacctaacggaggttacccacaaggtctacttcgatgtcgagattgacagcaagcccgcaggtcggattgtcatggggctttttgggaagactgttcctaagacagcagggtttctggattgtttttacttgagtctggaacgacaggaatggaagcatacgagttactgttggcccagcatacgacaggaatggaagcaacaacaggaatggaagcaagaaggcacagagaggcagaggctgtacctagaatcagcaatgccagaagccaagtcatggccatcaccagttttatcagctgagcctcctaatatcttcctcgcaacctgtctggtagctgaggacccaccttttgagagtggcgttggcgaccttgcacgctacatcgaagtgcatagtctgtaa

SEQ ID NO: 134976 - DNA, 1020 bp, Zea Mays
ttatgtacaaatgtgttttttattgttatagtatcttattattatagtactatgtccgtgctttgcacacagtcatatttgatacccataaaaaatatatattctatatatttggatcttccatacacatttagatctcgagatgtctcattccctccaacgaaataagtccaagaaattatgtttgaggcctaaatgacctcggaacaaatgtttacattctgacaaatctttttaagatgctagaacattttcgatctttaaaaagaaccatagattccaatctgaaaaatcagcttgccgacattgtcttagctccacggtgtcgttgtcactgccacacaggaacatcggtccctcgtagccgctacaatgcgccctccctacaaccgcgtgcacaacagcgcaacaaaacgaccttgccaaagtatgaagaagcaaaagatgacagaaatgatcaaagctaccagattcgcaatggaagatgctgatttggaatgttaggatacaacccctcctactatctagaaatgaaggagctacaataaaatgttaagatataagttaatccatataaaatgctagtcaagtaaaaaatcatatgcaatgatcatcagataagatcataaaacacagtatgcattcgcaatgatcatcagataagacatttccttgtacattttttctcatcattgttgtaaataataagatgcaattacctttccaatcctctgtctttcattagtttcatggggctcatggtcagcaatgagtttcttaggaaagcacatctttcacacacaacagctcaagagtcacctacatttgctatccacatgtccttaccataaactacaatagcagaactgtcgatgaaccacctggtccaagttgtttggtattttctagaatatacttgtttgtagagcagtatgcattctttattgcttcttgagggctagaccagaagagaggttgcagtaaccaaaatagggaaaccgtgaggaaggtatgcaaatg

SEQ ID NO: 134977 - DNA, 921 bp, Zea Mays
atggaggaacagggagcagggacactggtgctggagacgcggcatcaagcggcggagtttgcgaacaatccagggcggccgacatctacatccatggttgaagacaggaggcgagctgaacgagctcgaccaccagagagcaagacgcgacggtggattcgcgcgcgcagaaagctgaagaccaaatcgagctggagccgatcagaagaactccggcgatggcgagggagccagggcgcacagcgtgcggctgacagagagcagggcaggggcttgcggggaaagggacttggcagaggaagaggctcggcaggtcgcgcagggaagcttcagtccgagcgcggcatggaaggagcgacagggagaaatgccggacgctatgggagagaagagagctcgctccaggaagaagaccgagcagacggagaggagctgggcatgcgctggcacatgggcacgcggcaccacggtggccaggacagggaccacgccggcgagcccacggcggccatggaggagagcgagcagagagagagcgacgcgacagggagagaagaggtcgggggcgagctggagatagtcgacgttggggcaggcggcaggaccgagcgccgtccgagctccggccatgaagggagttccggccacatagggacgcagggagcgcaggaagctccaagcggaggagacgcgcagggaagaatcgagcacggagcgaagccacacgcagagaaccgaagtgcaggctgggagctcgaccgtagagggagagatgagaaggagcggctggggaagaagccagcccacggcacggcagtggaaaaatcccagcgttggatgaggatgacaactgaagtggataagaaagaaagagagatttcgaacggtgaaaagatgaggatgggctgggattttatttag

SEQ ID NO: 134978 - DNA, 105 bp, Zea Mays
gcagacaccgtgattctaataaagcctcctctatcctaaatatagaggatcaaacggtactctgcactcttcagcaacgttctctaaacagtcgtctaaatttag

SEQ ID NO: 134979 - DNA, 668 bp, Zea Mays
cgagacagcagaagccaaggaagctgagagagcagagaatgctctatagttcagactagaaagaaaagcagtgcagggccacaggggaagagggagccccgcccaagatcgcaaaggcaaagtggcagacaaccatggaggtggagccaccaccagctgccgcggtcgctgtagcagcagcgcttctgaaatgccgcggcaacggtggcggcggggagccaactctcgaggccttcggtaaggcgcggtcgaggagcccgagcagcgcggccgccgcggggcctccacaagaaccggacggcacccccggccctagtcgccgccgcggggaggaggaggagtcgctgcggcgcgggctcgcggctgctcaggcgcgggcacgggcgcggcggaaggcggggcacgccacgccgtcgccgtcctggaagctggagccgtcgccgccgcggccggaggatgaggcgctggcggaggcggattcgggagcggggaggaggggcgcgccggccgcgtcggcgcggcagctgggcgccaccttgtgggagatccaagacgtcatccgggccaccggcgcgggccgacggatccgacgccgcgggcggagggcgcccaccgcggatgcggatcgggtatgaactttgccatccgcgtcgcttttttccggtcaa

SEQ ID NO: 134980 - DNA, 1858 bp, Zea Mays
ttagttccaagttctgcatctcgagacacttttgcattaatacatgtttcttaaaaacatctaatcatttgacaggcaaccacaataaaccttatcagcccaactcggtctttggattgcaatgccagatttaggcaggcaggtactgatattaaaacgtcaacagagctattgaaagttctcaatcgaatatggagcttggaagaacagcatgcagctgatgtgtcagcaatgaagggactgaaacgagagttgcatcatgcccaggcatgcattcaagaacttatgcaagagaggcagcagtatcatcaggaaattgattcactagccaggcaagccaccgaagacaaaatggctcgaaggagcaaggaccaagagaagatgagagcagcccttcgttccctgcaagaggagcttgaagatgagagacgtctaaggaaacattctgagactctccataggaagctaggcaaagagctatccgagatgaaatcagcattttgcaaggctgtgaaggctctggagaaagagaagaagacaacctgcctgttggaagacctttgtgatgagtttgcgagaggaatcagaaactacgaggaggaagtcaggttgttaaagcaaaaacacgtaaaggagtatgaacttaagtttgacaagtctgtagttcatatttcagaagcatggcttgacgagcgaatgcagatgcaaaagactaatatgagggaatattcgtccgggaaaacctcaatcacagagcggctgagcagtgagattgagggttttctccatcatgctaaaaggccaggtaattccaagaatgataacttagacaatggtaacgaaaagcgtgatgcgagtctgtgccggcagtcccttgagtcagtccatctgaatggagccactagtgtccctcggctagctgaagacgacgacgatggcagttctattgccagtgacctgcattgctttgaactgaacacgcatggaggcaccattaggaatcatgagcttgcaggagctcgaaggagggttacaggctgcatgcattcaccaatgcgaaggctggaatattccaacggcgtatctgtagaaggttcgccgatgtcaaatgtgccaccttgcccgaagaaagaaaagacgaggtctggcgtcagcagacagcacttcatcacatcagcaccagaaactagctcacgcaatgacgctagccttgctcctgctgcagatgagcagaacgagactgtcatgacccaggtctctaggcgactacgtgatgacctgctgaagatcaaatcagaggctcctcagcatgcatatctaggacagaaatcaaaccagccccggacaaatgagtttcatgaatacagtccagcaccagcaccagcacgtcgtcatctgaataacccagcccagtccttggactgcgagatctctgaacccccagctcatcagctcacaggcacaaaggagaacagtcttaaggtgaaactgctgcaagcaaggctagaggggcagcacgctcggctgagcgcgtcagtgttccccctgatcagcacaagaaggaagtgatgccactcgtgagcttccatgatttcgatccgcaacacagagttgcaattgtaagatagctgaatattgttagctcgaggcaattggactcggtgtgaatcctagatccagccgcgtatgttgtagatttgatctgctaactgccagactagaatccaatcaagatggacacggcaatcagatcttgtaacttctgtacagtaatgatttgctgttggtagtttccaatctgtctgtaatgatgcctgactgactttctaatcggctattatgacagttctttgtgatc

SEQ ID NO: 134981 - DNA, 2424 bp, Zea Mays
gtctgacatgttttaaaccatatttgtactaatgatttctttaattacactcctaaaatttaagactaaactttagtctatagaaatcctatttaaaagatctattttagtcttcccgtttagtattttcaaaacaaaaaatgactcactaaaacttagaggttggaaccaaacaccacggagggtacgaatttctacttcgagggtacgaatttctacttcgtgaagtgcgtgaagtgtatttatctacctgtccccaccggagggtacgaatttactctgtcttgttcagctgtcctttttcttcccgtttaaacacccccagatttctctatatcacgacgctacccctccacgtctccgcttctcgtgttcttgttcgtctccgcctcaggcaaactccacacggacacggtcacacctcgctcgctctcgctcccgtatcgcggtttccttttcgaagccttgctaggtttagctggggcctccgtctatcctgtcaatggccccttaggcggctgtacttcagacttcagaggtgacgtgaggcgtggggacgcgcgtagctgattggttcgaggaggcggggatggacccggacttctcgccggcgagtgggggcccgagctttgagttcgccttcaactcggtcaacttctctgaccgggtgttgcggatcgagatcgtcgctggggatgacgccctcggggccaagggcgccaccggcgaggggtgctcatctcttgccgactgggcgtgccaccgcaagcgacgacgggaggagctccgacgcgacaaagaatctagaaaatacatgccagatccagcaaactgcaaagttgaagctgaagaatgtgatgcctacgaggaaggcaatgagcctgtagctatgatagaagaatctccgcctgatattgaggcagatggtgaggatggaaaaagcagcgactcatactgtagtatggagtgtactcaggttttgagagttaagtctatgtacatcagctctgcaattctagctgcaaagagccctttcttttacaagcttttctcaaatggaatgaaagaatccgaccagaggcatgcaactcttaggataactgcttcagaggaaaatgcgcttatggagcttctaagctttatgtatagcggcaagttgacgacaaaccagccaactgtcctgctggatatattgatgatcgctgacaaatttgaggttggttcctgtatgcggcactgcagtcaattgcttagaaatttgcctatgaccacagagtctgcactgctctatctggatctaccttcaagcatttcaatggctgctgcagttcagccattgacggacaccgccaaggaattccttgccaacaaatacaaggatttgactaagttccaagatgaagcaatgaacattcctcttgctggaattgaagccatcctatggagcaatgaccttcaggtcgcgtcggaggatgctatctacgacttcatgataaagtgggcacgtgctcaatacccaaaattggaggaaagacgtgagatcttgggcacacgcttgctgccccttgttcggttctgccatatgacctgcaggaagttgcggaaggttattgcctgcagtgatctggatcacgagcaggcgacgaaatgtgtcacagaggcacttctctacaaagctgatgcaccacataggcagcgtgcccttgcagcagacgtgatgacatgtaggaagtatgctgagcgagcttacaaatatcgcccgcttaaggttgtagagtttgataggccgtaccggcagtgcatagcatacttggacctgaagcgagaggagtgcagccgacttttcccatctgggcggatatactcgcaagctttccatctagctggacagggcttcttcctctcagcacactgtaacgtggaccagcaaagtgcgttctattgttttggtctcttcctagggatgcaagagaaagggtcgacaagtgttaccgtggattatgagttcgctgcaaggacaaggccgtcaggcgagtttgtcagcaaatataagggctactatactttcactggcggtaaggctgttgggtaccggaatctctttgcgatcccgtggccgttattcatggctgatgacagtctcttctttatcgacggggtattgcatctcagagctgagctgaccataaaacaaccctagatgaggccgtgtttgtgccgcgcgcgtgtccaaatccatgcaatggtgttctgcagtgtagaatatggaaatcttgtgtgctgttttgttttgaaaacgacaactcaattctctcttgttcagttgtttgtacacctgaggaggatcatgtcatgttttgtactctcactaaactgtgataagtgatttagctaatcaaactttaagttcaccagcaacaaact

SEQ ID NO: 134982 - DNA, 1284 bp, Zea Mays
ctgtttcgcgctcccttccggtccaaaccaaaccgtgcgtccgtgtgcgactgcgacgagaagcttccagaacccaccagctaactacgtccgtcctccaccaatcccatcttcggacgccacgacaactcccctccctcttccccgtccgtatttatttatacacccccagtccctacccacttgttccttcttgcttctccatcgagttggattgggttcaaagttgggcttttggacagctgtggtgtgcacggcagctctgtgacttgtgaggaggaagggaggaagaaagcggatccatggcgtcgaagcggatcctcaaggagctcaaggacctgcagaaggatcctcccacctcttgcagcgcaggccctgttgccgaagatatgttctactggcaggcgacgattatggggccatcagatagcccatacgctggtggcgtatttttggtcactattcactttccaccggactacccattcaaaccaccgaaggttgcattcaagacgaaggtttaccacccgaatatcaacagcaacgggagcatctgtcttgatatcttgaaggagcaatggagccctgcactgacagtttctaaggtcctcctctcaatttgttcccttctgacggacccaaaccctgacgatccgttggtcccagagattgctcacttgtacaagactgatcgcgtgaagtacgaatctactgctaggagctggactcagaaatatgcaatgggctgacaagctattggtctctcatagacccttctgtaactgaaaccagatgtctaaattaatttgtccattcgtgcatcgaacttttgatatataatggaaggagaaacattgatagtacctcggtgttgtctgtggtccaatttaatttaatttaattttggtcttgtgggctgcttgcatggtcgatagttaggttcttcggctgttcctttgcggtcggtgttatctctgacatggagtcaatggtggtgcatgtcttggatgtgtcatcatagtgttaaacttgtcatcttgacaaggtagatatgttttgtcacactgatagttatcgttgattacgttgtcatgtataatatagttgttaaacagtgtagttgtttatactttataatgcttgcatgcacgttagtatgttcatgagtagctacaaggacgatggcatgcattgcatagcgacctcagttatggctactactcattgtgtagctactcggacacaggctacataattgcctcaagtacatctgctacctccagc

SEQ ID NO: 134983 - DNA, 1844 bp, Zea Mays
accgtgcgtccgtgtgcgactgcgacgagaagcttccagaacccaccagctaactacgtccgtcctccaccaatcccatcttcggacgccacgacaactcccctccctcttccccgtccgtatttatttatacacccccagtccctacccacttgttccttcttgcttctccatcgagttggattgggttcaaagttgggcttttggacagctgtggtgtgcacggcagctctgtgacttgtgaggaggaagggaggaagaaagcggatccatggcgtcgaagcggatcctcaaggagctcaaggacctgcagaaggatcctcccacctcttgcagcgcaggtgattcagattccgcccgcactgctacttcttttaattttccatgatgggatacgactttctcccgtgcgctcggctattagcggtgcgatgcgattcttagtgcgtagttgctagatctgtgcgtatatatacatgtacaggggacgcttgtaattggacttcaatatacggtgtaggttgttggtgccatggtgggataaagagcatgtgtcatgtaaatttgggaaaaaggatcgtagctttcctatatggttgtacatagcgggttttcattctttgtcatgttcggttattagatccgcagaggggcctgcctccagctaatcattctttgtcatgtttaggctcatagatagatagatagatcagagtcgcacacagcagttaacattgccctcccactaagacatacatttacctgttctgttcatgcgggccgagtaattttttttattatcaagcaaggagataaggatagtgctcatgcaccatggtagactagtcatgtacttgagcatacaagcctgctgagtgctttcagggccatcaggccttacagtgggacactagcaaatctagtatgctcgtgccctgttgccgaagatatgttctactggcaggcgacgattatggggccatcagatagcccatacgctggtggcgtatttttggtcactattcactttccaccggactacccattcaaaccaccgaaggttgcattcaagacgaaggtttaccacccgaatatcaacagcaacgggagcatctgtcttgatatcttgaaggagcaatggagccctgcactgacagtttctaaggtcctcctctcaatttgttcccttctgacggacccaaaccctgacgatccgttggtcccagagattgctcacttgtacaagactgatcgcgtgaagtacgaatctactgctaggagctggactcagaaatatgcaatgggctgacaagctattggtctctcatagacccttctgtaactgaaaccagatgtctaaattaatttgtccattcgtgcatcgaacttttgatatataatggaaggagaaacattgatagtacctcggtgttgtctgtggtccaatttaatttaatttaattttggtcttgtgggctgcttgcatggtcgatagttaggttcttcggctgttcctttgcggtcggtgttatctctgacatggagtcaatggtggtgcatgtcttggatgtgtcatcatagtgttaaacttgtcatcttgacaaggtagatatgttttgtcacactgatagttatcgttgattacgttgtcatgtataatatagttgttaaacagtgtagttgtttatactttataatgcttgcatgcacgttagtatgttcatgagtagctacaaggacgatggcatgcattgcatagcgacctcagttatggctactactcattgtgtagctactcggacacaggctacataattgcctcaagtacatctgctacctccagc

SEQ ID NO: 134984 - DNA, 1965 bp, Zea Mays
agaacagaggttattcgttttagctacccgttttgaagagaagccgattttggaggagacgatgatgagtccggcgtcggagcgcagcctcatcatccagagcgacgacgacgacgacgcccgatccggccacgacgtggaggagccggagcaggactccgactcctcctcgtcgtcctcatcctgcgccaccccacgccgcggcccaagctcacccccctacatccagcaatggccgcagagttacaggcaatcgatcgacattctcagcagcgtgcagtcacccaacctgagctttctggggactccaactctgagcaggctgtcgaactctttcctcgccatcaccgattctttccggagcaaggcccccgaaacgatctctagctttatcaagccactccttggccccacgccaagtgacgagcagcagcggcagcatgaaggcacccgaaagagttccgagtaccttgtgccctcgagaagatcatctctgcagcagatcccagaggatcaaaagccacctgtaggtggccatggggcgtctcatgaccagaactgctcttacacccagggagtgatgaatggaataaatgttctatgtggtgtggggatcctatcaacaccttatgccatcaaacaggggggctggattgggctggcgatactctgtacatttgctcttctcgcatggtacacaggtgtgctcctgcgccattgcctggacagcaaggagggcctcaagacatacccagatattggccatgcagcctttggcagcacaggccgcatagttatctcgataatactgtacgtggagttgtatgcatgttgcatcgagtatttgatattggagggtgacaatttgtcaaaattattccccaatgctcacctgaccattgggagcatgacactgaactcacatgtattttttgcaatcttgactaccatcatagtcatgccaaccacctggctccgtgacctgagctggctgagctacatttcagctgggggtgtcattgcatcaatccttgtggtcatctgcctgttcttggttggggttgtcaatgatttcggctttgagaatgaagggactgcactgaacgccccaggaattcctattgcaattggattatatggttactgctactcagggcatggggtttttccaaatatctattcctccctgaagaatcgcaaccagtttccttcaattctttttacttgtattgggctgtctacctttttgtatgctggtgctgcagtgatgggatacaaaatgtttggtgaagccacagagtcccaattcacactcaacttaccagataattctgtcatttctaagattgctgtttggacaacggtggcaaatccaataaccaaatatgcattaactattattccattggctatgagtttggaagagctgctgccaccaaaccaacaaaagtattctacaataatcatgcttagatcatctctggtgatatcaaccctcctgattgctctatctgtgcctttctttggacttgtgatggccttggttggttctttgtttgccatgcttgtgacctacattttgccttgcgcttgttttttggcgatcctcaagacaaaagtggggtggcatcagatagcagcttgctcgttcatcatagttgtcggggtttgctgtgcctacgtgggaacatactcgtccctgtcgaagataatccagaactacgcatagcacagctgttcctgtgatcctgtatatgcatctgcccgacaaaatcatgtgtgtgctatatgggccgaacatatgtacaagatgaaagtttaccattcaattcactcgatgtataataaattattggtgccttatcatagggctcaatgatttctactacgattttaaggttgtatggtgcgtgagtaacattgttccttatggtgagaaaaaagttgatttggtcttcttctagc

SEQ ID NO: 134985 - DNA, 538 bp, Zea Mays
ttcagactaccacacacagttttattcttgccagggaaaaaactggttctgccgtacaaagaatcacaaagttccatagaaactaaaaaaatgttaaacccaaagcaacattgcacaacctttgatcgcttactgatgttcgtctatgttgacagcaattcaactcccatgtagataaataccatgatatggtcttagtttggacatggcacgcatggtccgtacgtctacgtctttcttcgtcacgaaaactgtatgctgaaacccttctcagttttggtggcatccatactaccaaactcatcaaagtcaacccgagagacaccatccctgtaattaccccattcttcagttgagctgtcatcatcctcgtcctttgatgccgggacatgtaatccttctataggtgccggcaagggctcttcggtaaagtaccgatcattcagcagatcaacagcactggtcctctttgctgtgtcatagcaaattagctgctttatgatgctaacctcagtaggagatctgttaggcagacatg

SEQ ID NO: 134986 - DNA, 4688 bp, Zea Mays
atgtccggattcagtgccgcggccaacgcagcggcggctgagcggtgcgcgctcgcgttccgcgcacggcccgcggcctcctcgccagcgaagcggcagcagcagccgcagccagcgtccctccgacgcagcgggggccagcgccgccccacgacgctctccgcctctagccgcggccccgtcgtgccgcgcgccgtcgccacgtccgcggaccgcgcgtcccccgaccttatcggaaagttcacgctggattccaactccgagctccaggtcgcagtgaacccagcgccgcagggtttggtgtcagagattagcctggaggtgaccaacacaagcggttccctgattttgcattggggagcccttcgcccggacaagagagattggatcctcccgtccagaaaacctgatggaacgacagtgtacaagaacagggctctcaggacaccttttgtaaagtcaggtgataactccactctaaggattgagatagatgatcctggggtgcacgccattgagttcctcatctttgacgagacacagaacaaatggtttaaaaacaatggccagaattttcaggttcagttccagtcgagccgccatcagggtactggtgcatctggtgcctcctcttctgctacttctaccttggtgccagaggatcttgtgcagatccaagcttaccttcggtgggaaagaaggggaaagcagtcatacacaccagagcaagaaaaggaggagtatgaagctgcacgagctgagttaatagaggaagtaaacagaggtgtttctttagagaagcttcgagctaaattgacaaaagcacctgaagcacctgagtcggatgaaagtaaatcttctgcatctcgaatgcccatcggtaaacttccagaggatcttgtacaggtgcaggcttatataaggtgggagcaagcgggcaagccaaactatcctcctgagaagcaactggtagaatttgaggaagcaaggaaggaactgcaggctgaggtggacaagggaatctctattgatcagttgaggcagaaaattttgaaaggaaacattgagagtaaagtttccaagcagctgaagaacaagaagtacttctctgtagaaaggattcagcgcaaaaagagagatatcacacaacttctcagtaaacataagcatacacttgtggaagataaagtagaggttgtaccaaaacaaccaactgttcttgatctcttcaccaagtctttacatgagaaggatggctgtgaagttctaagcagaaagctcttcaagttcggcgataaagagatactggcaatttctaccaaggttcaaaataaaacagaagttcacttggcaacaaaccataccgacccacttattcttcactggtctttggcaaaaaatgctggagaatggaaggcaccttctccaaatatattgccatctggttccacattgctggacaaggcgtgtgaaactgaatttactaaatctgaattggatggtttgcattaccaggttgttgagatagagcttgatgatggaggatacaaaggaatgccatttgttcttcggtctggtgaaacatggataaaaaataatggttctgattttttcctagatttcagcacccatgatgtcagaaatattaagttaaagggcaatggtgatgctggtaaaggtactgctaaggcattgctggagagaatagcagatctggaggaagatgcccagcgatctcttatgcacagattcaatattgcagcagatctagctgaccaagccagagatgctggacttttgggtattgttgggctttttgtttggattagattcatggctaccaggcaactaacatggaataagaactataatgtgaagccacgtgagataagcaaagcacaggataggtttacagatgatcttgagaatatgtacaaagcttatccacagtacagagagatattaagaatgataatggctgctgttggtcgcggaggtgaaggtgatgttggtcaacgcattcgtgatgagatattagtaatacagagaaataatgactgcaaaggtggaatgatggaagaatggcaccagaaattgcacaacaatacaagcccagatgatgtagtgatatgccaggccttaattgattatatcaagagtgactttgatataagcgtttactgggacaccttgaacaaaaatggcataaccaaagagcgtctcttgagctatgatcgtgctattcattcagaaccaaatttcagaagtgaacagaaggcgggtttactccgtgacctgggaaattacatgagaagcctaaaggctgtgcattctggtgctgatcttgaatctgctatagcaagttgtatgggatacaaatcagagggtgaaggtttcatggttggtgttcagatcaatccagtgaagggtttaccatctggatttccggagttgcttgaatttgtgcttgaacatgttgaggataaatcagcggaaccacttcttgaggggctattggaagctcgagttgaactgcgccctttgcttcttgattcgcgtgaacgcatgaaagatcttatatttttggacattgctcttgattctaccttcaggacagcaattgaaaggtcatatgaggagctgaatgatgcagccccagagaaaataatgtacttcatcagtcttgtccttgaaaatcttgcgctttcaattgacgacaatgaagacatcctgtattgtttaaagggatggaaccaagccttggaaatggctaagcaaaaagacgaccaatgggcgctctatgctaaagcatttcttgacagaaacagacttgcccttgcgagcaagggagaacaataccataatatgatgcagccctctgctgagtatcttggctcgttactcagcatagaccaatgggcagtcaatatcttcacagaagaaattatacgcggtggatcagctgctactctgtctgctcttctgaaccgatttgatcctgttttaaggaatgttgctcacctcggaagttggcaggttataagcccggttgaagtatcaggttatgtggttgtggttgatgagttacttgctgtccagaacaaatcttatgataaaccaaccatccttgtggcaaagagtgtcaagggagaggaagaaataccagatggagtagttggtgtaattacacctgatatgccagatgttctgtctcatgtgtcagtccgagcaaggaatagcaaggtactgtttgcgacctgttttgaccacaccactctatctgaacttgaaggatatgatcagaaactgttttccttcaagcctacttctgcagatataacctatagggagatcacagagagtgaacttcagcaatcaagttctccaaatgcagaagttggccatgcagtaccatctatttcattggccaagaagaaatttcttggaaaatatgcaatatcagccgaagaattctctgaggaaatggttggggccaagtctcggaatatagcatacctcaaaggaaaagtaccttcatgggtcggtgtcccaacgtcagttgcgataccatttggcacttttgagaaggttttgtcagatgggcttaataaggaagtagcacagagcatagagaagcttaagatcagacttgcccaagaagattttagtgctctaggtgaaataagaaaagtcgtccttaatcttactgctcctatgcaattggttaatgagctgaaggagaggatgctaggctctggaatgccctggcctggtgatgaaggagacaagcgttgggagcaagcatggatggctattaaaaaggtttgggcatcaaaatggaacgaaagagcatattttagcacacgcaaggtgaaacttgatcatgagtacctttcgatggctgttctcgtgcaagaagttgtgaatgcagattatgcttttgtcattcataccacaaacccatcgtctggagattcttctgagatatatgctgaagtggtgaaagggcttggcgagaccctcgtgggagcctatcctggtcgtgctatgagctttgtttgcaaaaaagatgaccttgactctcccaagttacttggttacccaagcaagccaattggtctcttcataaggcaatcaatcatcttccgttccgactccaacggtgaggacctggaaggttatgctggagcaggattatatgatagtgtaccgatggatgaggaggatgaggttgtacttgattatacaactgaccctcttatagtagaccgtggattccgaagctcaatcctctcaagcatagcacgggctggccatgccatcgaggagctatatggttctcctcaggacgtcgagggagtagtgaaggatggaaaaatctatgtagtccagacaagaccacagatgtagtatgtatgcatctattagacagctcaataagcactgttgtacgcttgtatggttgggacatatgggcgttatggcatgtatagttgtatgcctagatgtacaacacgtgtactcgtatatatatatataaatgctgaaacaagcattggtcctgtactgtagtttctacatttcattgtcaccaataattaagtgtactcctatggctgggagtctatgaaaatggacgtgttgacttattgggtaataaataatttatatatatacttgtgcaagaa

SEQ ID NO: 134987 - DNA, 804 bp, Zea Mays
aaaccaaagacagaaggaaccaccacaatccatacagaaatggtagggttcttcggcgcctctgctgcatctgatcactgtcgtttgctgacaacaaatggatcagttcaccatgaactgattagacgacaccatggcagaccaagaagtgcgatcaggtgctgcagcagcacggcaaggggaaggaccagggactattactaccaggtgctgggcatcgcaattcaatccacacctcagcagatcaaggaggcttacaggaaactccagaagcaacaccatccagacatcgccggctacaagggccacgactacacgctgctgctgaacgaggcgtacaaggttctgatgcgggatgtttccagttccaggcacgccgatggaaggggcaggagtagggtggggtcaggagccggttacaccggggacggatacagttcttgggaagggcccgtgagaagccaagctctcttcgtggacgagaacaagtgcataggatgccgggagtgcgtgcaccatgccgctaggacgttcgccatggacgacgttctcggcagcgcgcacgtggaggtccagttcggcgacctggagcagcagattcaggtcgttttcgtttcctgacccgactctacagcgtagaaaaaaaaatcacctagttctctgctgattagttgaactgctgtatgttgtttgtgcaagggcagctggctgtggagtcctgccccgtggactgcatccactgggtcgagagccacgacctgcccgtgctggagttcctgtcccggccgcagccgaaggaaggcc

SEQ ID NO: 134988 - DNA, 1232 bp, Zea Mays
aaaccaaagacagaaggaaccaccacaatccatacagaaatggtagggttcttcggcgcctctgctgcatctgatcactgtcgtttgctgacaacaaatggatcagttcaccatgaactgattagacgacaccatggcagaccaagaagtgcgatcaggtgctgcagcagcacggcaaggggaaggaccagggactattactaccaggtgctgggcatcgcaattcaatccacacctcagcagatcaaggaggcttacaggaaactccagaagcaacaccatccagacatcgccggctacaagggccacgactacacgctgctgctgaacgaggcgtacaaggttctgatgcgggatgtttccagttccaggcacgccgatggaaggggcaggagtagggtggggtcaggagccggttacaccggggacggatacagttcttgggaagggcccgtgagaagccaagctctcttcgtggacgagaacaagtgcataggatgccgggagtgcgtgcaccatgccgctaggacgttcgccatggacgacgttctcggcagcgcgcacgtggaggtccagttcggcgacctggagcagcagattcagctggctgtggagtcctgccccgtggactgcatccactgggtcgagagccacgacctgcccgtgctggagttcctgtcccggccgcagccgaaggaaggccacggcgtattcggcggcgggtgggagcgccccgggaacgtgtttgcggcggcgaagaacttcgccaggagactggagagggagaagcagcgggaggagctggaacgggatcagccctccgggggcctcgacggggacgcaggccgcgaggcggagacggaggcgcaggccgaggcgaggcgcagcgcgtgggaggagctcaggtggaagcccctgcttgatgcttggaatgggctgataggtggtcgttgacgctgcaggaggttgaagagaagctcagcgctggaagctgaacccgtaacatctgcagctgcagaaatagtggatgtgccaaggacaaaatagcacctttgtggccgtgggttatcaaacagtaggtgtcgtcgtaactcgtaaatgatcatgtgtaattacagattacaaaaaatgtgtaggaatagtagtcaaatatatgtgtgtagatgttggcatattgcacaggattatgtcccctttatatatatggtggttaatggaaatggcagggtggt

SEQ ID NO: 134989 - DNA, 1511 bp, Zea Mays
cacgcagtcaactcgttgctgggggtgggatcccggccgagcaccatgcgaggaaataacatgccgcggcacacgtcgccgttcctttttgccttgttggcgtcggcggcgaccctgctcagcgtcggcgacgcgttggtcgtcgacggcctgcaggtggggttctatggcaagacgtgcccggcggccgaaggcgtcatcagcgacatcgtcaacaacgaaatcgctatggaccggggcatctcccctggcctcattcgcctcttctttcacgactgcttcatcacggtaactagctagctagttagcactcacatttgctcatgcctatgctgcaatgcaaccgcaccgtgagctggttctcgtgcagggttgcgacgcttccattctcctggacgagtcgcccgccggcgacgtcccagagaaggagtcgtccgccaacggcttcaccctggtcgggctcagaaccatcgacatcgccaagtccaccgtagagggcatgtgccccggcaaggtctcgtgcgcagacatcctggccttcgcggcgcgcgacgccgccgtggccgcgggcctcccgagatacgaggtcgcggcggggcgccgcgacggcatgcgctcgaacatggacgacctcccgggcaacttccccgtgccgggccaccacgtgccgcgcctcaccgagctcttcagccagcgggggctctcccaggaggacctcgtcctgctctccggcgcgcactccatcggcggcgcgcactgcttcatgttctccaaccgcatctacaacttctcccaggacgccgacgtcgaccccacgctggacccggagtacgccaagtggctgcgccagatgtgcccgccgcggcagcccggcgacgaccccgagcaagcgcccaaggtgaagttcgacgcgcagacgggggagcggctcgacgtcgcgtactactccgagctgctcgcccgccgcggcctgctcacctcggacaacgccctcatcgaggacccgcagacgagggcgatggtggagaacttcgcccggaacgagccactgtggcagcagaagttttcccaggcgatgcagaaggtcgggatgcttgacgtgctcatcggcgagggcaagggccaggtaaggaagcagtgccgcctggtgaacgggcaggagaaggaggagaagcagcagcagccgcaggaggagcaggaggagcagcagccaccggagctggaggaggaggagcagcagcagccgcatcagccacagcttccatggttcctgcagaggcagcgcccgcccgttcttcttccatggctccggccccatccacggccgcgtcgaccgttccggaaacatccggtggccgacctggttaacggatttttccgtggttttcactgaaggcgagcactatgctcgggacgtagacctccaaaatatgcaatgctacggtacatatcaatggacgtaaaccggtgtatccatgagcttaattaacatgaacaatcctgctttgctt

SEQ ID NO: 134990 - DNA, 1603 bp, Zea Mays
cacgcagtcaactcgttgctgggggtgggatcccggccgagcaccatgcgaggaaataacatgccgcggcacacgtcgccgttcctttttgccttgttggcgtcggcggcgaccctgctcagcgtcggcgacgcgttggtcgtcgacggcctgcaggtggggttctatggcaagacgtgcccggcggccgaaggcgtcatcagcgacatcgtcaacaacgaaatcgctatggaccggggcatctcccctggcctcattcgcctcttctttcacgactgcttcatcacgggttgcgacgcttccattctcctggacgagtcgcccgccggcgacgtcccagagaaggagtcgtccgccaacggcttcaccctggtcgggctcagaaccatcgacatcgccaagtccaccgtagagggcatgtgccccggcaaggtctcgtgcgcagacatcctggccttcgcggcgcgcgacgccgccgtggccgcgggcctcccgagatacgaggtcgcggcggggcgccgcgacggcatgcgctcgaacatggacgacctcccgggcaacttccccgtgccgggccaccacgtgccgcgcctcaccgagctcttcagccagcgggggctctcccaggaggacctcgtcctgctctccggcgcgcactccatcggcggcgcgcactgcttcatgttctccaaccgcatctacaacttctcccaggacgccgacgtcgaccccacgctggacccggagtacgccaagtggctgcgccagatgtgcccgccgcggcagcccggcgacgaccccgagcaagcgcccaaggtgaagttcgacgcgcagacgggggagcggctcgacgtcgcgtactactccgagctgctcgcccgccgcggcctgctcacctcggacaacgccctcatcgaggacccgcagacgagggcgatggtggagaacttcgcccggaacgagccactgtggcagcagaagttttcccaggcgatgcagaaggtcgggatgcttgacgtgctcatcggcgagggcaagggccaggtaaggaagcagtgccgcctggtgaacgggcaggagaaggaggagaagcagcagcagccgcaggaggagcaggaggagcagcagccaccggagctggaggaggaggagcagcagcagccgcatcagccacagcttccatggttcctgcagaggcagcgcccgcccgttcttcttccatggctccggccccatccacggccgcgtcgaccgttccggaaacatccggtggccgacctggttaacggatttttccgtggttttcactgaaggcgagcactatgctcgggacgtagacctccaaaatatgcaatgctacggtacatatcaatggacgtaaaccggtgtatccatgagcttaattaacatgaacaatcctgctttgcttactcctttgttttagaaaaaaaatgttggtgccatcgtatgacaacatatgctacgacatgtcatacatgcctgtttttattttctttggcaaggtacagtatcgtttcgattgctgaaatcaatgaacatgtggaaagtagcaaatctgcacatccggttgccatccgaacat

SEQ ID NO: 134991 - DNA, 1967 bp, Zea Mays
ggagtgccgccaaaggaaacgaacgaggctgaagggaccaaccaatcggagcacgagcatgcaatccgctcgctgctgctgttcatccgttatataaaacctcgtgccccctcctttgccggctcacccactcgctccatcccttcctgtccagtccagtcccgtcccgtcccgtccgactgctcaccaccctccggcgcgccagtcccgtccccgtcccactcattccattccattgcacaaagccctgacccctgatcggcagcggcggcggcggcggcggagatcgacagaggcggcgcgcgcaggatgccgtaggcggcggtgccggtgaccatcgtgcggtgcggctgcccgtgctagctctctcccaccacgtcatatcccgtgcgtgacctcgcgccgctccggctgcggggcgatcccgcgcgacgaggtcgacgcccgcttggcaccccggcgatccccaccggtctctgagggggctgaggaccgcatgcgttttgggtctccgacgcaccaacaattcaggccgaacacttccgccagcagcttctaaagcccgcgacttagattctgccttcatcacccaaacccaaactaaccgaaacaattttgttttcgaccacaaaaaatagcaatctctcgaatttctccatttctttccgacgaccaagaggcgggaaacctcacaaaggccagaaaccaagcaacacttcacgatgcagggagatcccgggtacggctacggtagctacgggtacgggtacggctacggttacggagccggcgccgccggctacgactacgacatggccggctacggcagcggcggagccgcctactactcggcgaccgaccggtatcccgccgcgacggcagctgcctatgaggacccgctcgtcgctggtcagaggcagcacgacgtgcccgcgccgctcacggggctggagttccaggcgtccgacacgtgccccaagaactacgtcatcttcgaccatacgtacgaccggagccgggtcatgttccacccgtccctggccaacaacttcgcctcctcccccgccgccggcggcggcggcgggtacgactacgaccgccagtgctacggcggctacgaccagaactacgccggcaagagcgcctactacgtctgcgccgccgccgccgccgacgacgacggcggcggggcctcgatacggcagaaggaggacaccgacgagatcgacgccctcatgagcacggaggacggcgaggacgacgacgacgacgacgtcctcagcacaggccgcacgcccgggtgccgtgccgccggctcccccgactctacgtgctcgtccgggtacgctgccgccggcgccggtggcggcgagaagaagaaggaacggatgaaaaagatggtgcggacgctcaaggggatcatccccggtgtcgaccggatggacacgccggccgtccttgacgaggccgtgaggtacctcaagtctctcaaggtggaggtcaagaagctcggcgcgcgcgggtcaagcagctagctaagcgcgctggcctcgtcggtatgcggcggcgaccatgataatgtaatggcagtcgaaatccctctcttctttctcggcatcggcagctacgacaagccagtcggtgaacaatacatgcggtgatgacgacaagggacagcttctcatcttggcctcagatgcacgtgctctgtttgcaccgacaggatcaggacatggcttcggagagagctcggttgcagggcgctcggcaatcttttgtggtggctctgccacctctagcgttcgtgcgtgcatggattgttacatttcttccttcgtatctctttcgtatctcttgatacctcgtggctggtgttgtaactatcatgctgatgatatatatatacacacaccgtgttcttttgttatattgggctctgcagtttggagccatcttcttaattcttt

SEQ ID NO: 134992 - DNA, 1963 bp, Zea Mays
ggagtgccgccaaaggaaacgaacgaggctgaagggaccaaccaatcggagcacgagcatgcaatccgctcgctgctgctgttcatccgttatataaaacctcgtgccccctcctttgccggctcacccactcgctccatcccttcctgtccagtccagtcccgtcccgtcccgtccgactgctcaccaccctccggcgcgccagtcccgtccccgtcccactcattccattccattgcacaaagccctgacccctgatcgcggcggcggcggcggcggagatcgacagaggcggcgcgcgcaggatgccgtaggcggcggtgccggtgaccatcgtgcggtgcggctgcccgtgctagctctctcccaccacgtcatatcccgtgcgtgacctcgcgccgctccggctgcggggcgatcccgcgcgacgaggtcgacgcccgcttggcaccccggcgatccccaccggtctctgagggggctgaggaccgcatgcgttttgggtctccgacgcaccaacaattcaggccgaacacttccgccagcagcttctaaagcccgcgacttagattctgccttcatcacccaaacccaaactaaccgaaacaattttgttttcgaccacaaaaaatagcaatctctcgaatttctccatttctttccgacgaccaagaggcgggaaacctcacaaaggccagaaaccaagcaacacttcacgatgcagggagatcccgggtacggctacggtagctacgggtacgggtacggctacggttacggagccggcgccgccggctacgactacgacatggccggctacggcagcggcggagccgcctactactcggcgaccgaccggtatcccgccgcgacggcagctgcctatgaggacccgctcgtcgctggtcagaggcagcacgacgtgcccgcgccgctcacggggctggagttccaggcgtccgacacgtgccccaagaactacgtcatcttcgaccatacgtacgaccggagccgggtcatgttccacccgtccctggccaacaacttcgcctcctcccccgccgccggcggcggcggcgggtacgactacgaccgccagtgctacggcggctacgaccagaactacgccggcaagagcgcctactacgtctgcgccgccgccgccgccgacgacgacggcggcggggcctcgatacggcagaaggaggacaccgacgagatcgacgccctcatgagcacggaggacggcgaggacgacgacgacgacgacgtcctcagcacaggccgcacgcccgggtgccgtgccgccggctcccccgactctacgtgctcgtccgggtacgctgccgccggcgccggtggcggcgagaagaagaaggaacggatgaaaaagatggtgcggacgctcaaggggatcatccccggtgtcgaccggatggacacgccggccgtccttgacgaggccgtgaggtacctcaagtctctcaaggtggaggtcaagaagctcggcgcgcgcgggtcaagcagctagctaagcgcgctggcctcgtcggtatgcggcggcgaccatgataatgtaatggcagtcgaaatccctctcttctttctcggcatcggcagctacgacaagccagtcggtgaacaatacatgcggtgatgacgacaagggacagcttctcatcttggcctcagatgcacgtgctctgtttgcaccgacaggatcaggacatggcttcggagagagctcggttgcagggcgctcggcaatcttttgtggtggctctgccacctctagcgttcgtgcgtgcatggattgttacatttcttccttcgtatctctttcgtatctcttgatacctcgtggctggtgttgtaactatcatgctgatgatatatatatacacacaccgtgttcttttgttatattgggctctgcagtttggagccatcttcttaattcttt

SEQ ID NO: 134993 - DNA, 156 bp, Zea Mays
atggaggttggaggaggaagtgcccagtaccccacgcttacccgcatcaactatggtgaccagtcggtgttcatgaaggtgatactccaagatgaccgcccaaccgcaccaaggttgtggcacatggtgaacactggcaaaataaggacacaataa

SEQ ID NO: 134994 - DNA, 3279 bp, Zea Mays
ttcgatgacaagaacgcatcttccgtgcctcttgacgagttgcaatttctttcattacattttcttacttgatgatcaacaaaatcgcttctgtggagttttcaggctgccaagtaaaaccttgagtctcactgtgacgatcggcaaatataatctcccattctcccaacaagagcagatgcttcgcattcaagatgctagacggcgacctgctgtgctagaggagaatggggagaaagaagcttggtgattgcagttcacatgcacgtcgaggagcaaaggaatcaaggaaagatcccaacaagttgatcgggacaagcttctttatgtttctggcggcagagctacgtagtaccaacttattggatcgtgaaccaataaaagaggcagcatatctacgaaaaagagcatgtccgacatagcgccgtcgccgagctcgtcaccgtcgagcggaggaaatggaggtggcaacaattccacggcgcctgcaccccgcggttcatcaagctcaagctcaccccctaaaccgaggaatggctggcctagtagcagcccacctccaactccaagctcagactcagagggctcaagatcaacgccaccatcagattggcaagatccgtcgtcctcctcctctagccctccgccatcacgatcgtcacctccaccgccgtcctcgcagccgccaccaagcccaccaccttcgccatcttcttggagcggtggcggcaactcgacgtcctcgtcaccgccaactccaccttctcaaccctcaccaccaccctcgggcagatcgtcgtcgcctccgcaacggtcgtcagaaggctcctcaccttcgcctcagtcttcgtcctctaaccaggcccctcccgcaccgtcaggctggtcgccttcgccgtcgagagaatctcctcctcagtcgtcatctcaatctccgccacctcagagcgatgttgaccagccaaactcccagccttcgaatactccacaaagtccaccaccaccaccatctcctccgtcgtcgtcgccgcccgcgccgccgacgaaccaatcggtagtcataatccccgtccccgtgccgtctaataatagcccgccgggagcgctgccgccgcccgggctcgtgcccaccgcgcctggcgccaccgtgatgtcgagtaccagcgtcccgggttctgctgcgtcgtcgtcatcccaagaagccagtaccggcgcgtccaacggcggtggtgggagcacatcaacaagagtagtaggcagtagccatgttgccgcggccattgccggtgcggcgatcacgggcttgatgtttgctctgctggctgttttcctggtgtctaagaggaggaagaagaaaactgatggcagcaactataacatggcgtcaggtcagttcatgggctcgaacaacccgtcgtacacgcagccggcggcgggcgagtcggcggacatgggcgggggaggagggtactaccactaccagaaccagtcaggcagcatggatgcggcggcggcgccggggtccatggcgtcgttcagctacgaggagctgacgagcatcaccagcaacttctcccgcgacaacgtgatcggcgagggcgggttcgggtgcgtgtacaaggggtggctgggcgacggcaagtgcgtggccgtgaagcagctgaaggccggcagcgggcagggcgagcgcgagttccaggcggaggtggagatcatcagccgcgtgcaccaccgccacctcgtctccctcgtcggctactgcgtggcgcagcaccaccgcatgctcatctacgagttcgtgcccaacggcaccctggagcaccatctccacggtcgtggcatgccggtgatggactggccgacgaggctcaagatcgccatcggcgccgcgaagggactggcgtacctgcatgaagactgtatgcatgctgctatcttgcttgcaacgacgagtcacccgaggatcatccacagggatataaagtccgccaacatcctgcttgactattcgttccaagcacaggttgcagatttcggcctggccaagctcaccaacgacacgaacacgcatgtctccactcgcatcatggggacgtttgggtaccttgcgcccgagtacgcgtcgagcgggaagctgacggaccggtccgacgtgttctccttcggcgtcgtgctgctggagctcatcacgggacggaagccggtggaccaagcgcgccaaggggaggagagcctcgtcgagtgggcgcggcccgtcctcgtggacgccatcgagacgggcgacctcggcgcggtggtcgacccccggctggtggacggcggcgccgcctacgacaggggccagatgatggtgatggtggaggccgcgtccgcctgcgtccgccactcggctcccaagcgcccgcggatggtgcaggtgatgagggcactggacgacgaaggaggcatgtccgacctaagcaatggggtgaaggtggggcagagccggaatttcgactccggccaccagcaagcggccgccatccagcagctccgtgccaccgccttcgcctccgaggagtacaccggggagttcgagcagtcgtccggcatggattaccttaaatcaggagtaccttaaatcaggagtgaaaccatggtgattagttctgcatgctttggctacccaagctggtgagatatagacgattattgaaagcagttgggcatgctttggctacacaagctggtgacacagacgattacacatggtgattataaccgcggcagttctgcatgttttggctacacaagctggagacagacgtttactttgaaaggaaaaaaacagctttaacattttatcgcatgcgatgcaaagagagaatatttttatatttttttcttttgccaagataagatagcaacatttgatattttttcgtttcatttaaaggataaaattgtggattctgcaatttttctgtacatgccattttgatcagcttggctaacgtctgaaacaaaaactcaccaaagcaactcgaataaccagtagcaaagctccaggccccaacgtgaggcctgtaaacagctgcaatggcctgaatatggatcacttacacaggatttgaaaattcactgtgacatgtatccccgaagccccatttccagcttcatggtacatctagtcatctataaagagaaggaaaaatggatgggatgctgactggtgttataggagattgacaagattgtaaggcaaattcaaaagatgggtaaaatgtgcttttactagac

SEQ ID NO: 134995 - DNA, 2199 bp, Zea Mays
gcgccgtcgccgagctcgtcaccgtcgagcggaggaaatggaggtggcaacaattccacggcgcctgcaccccgcggttcatcaagctcaagctcaccccctaaaccgaggaatggctggcctagtagcagcccacctccaactccaagctcagactcagagggctcaagatcaacgccaccatcagattggcaagatccgtcgtcctcctcctctagccctccgccatcacgatcgtcacctccaccgccgtcctcgcagccgccaccaagcccaccaccttcgccatcttcttggagcggtggcggcaactcgacgtcctcgtcaccgccaactccaccttctcaaccctcaccaccaccctcgggcagatcgtcgtcgcctccgcaacggtcgtcagaaggctcctcaccttcgcctcagtcttcgtcctctaaccaggcccctcccgcaccgtcaggctggtcgccttcgccgtcgagagaatctcctcctcagtcgtcatctcaatctccgccacctcagagcgatgttgaccagccaaactcccagccttcgaatactccacaaagtccaccaccaccaccatctcctccgtcgtcgtcgccgcccgcgccgccgacgaaccaatcggtagtcataatccccgtccccgtgccgtctaataatagcccgccgggagcgctgccgccgcccgggctcgtgcccaccgcgcctggcgccaccgtgatgtcgagtaccagcgtcccgggttctgctgcgtcgtcgtcatcccaagaagccagtaccggcgcgtccaacggcggtggtgggagcacatcaacaagagtagtaggcagtagccatgttgccgcggccattgccggtgcggcgatcacgggcttgatgtttgctctgctggctgttttcctggtgtctaagaggaggaagaagaaaactgatggcagcaactataacatggcgtcaggtcagttcatgggctcgaacaacccgtcgtacacgcagccggcggcgggcgagtcggcggacatgggcgggggaggagggtactaccactaccagaaccagtcaggcagcatggatgcggcggcggcgccggggtccatggcgtcgttcagctacgaggagctgacgagcatcaccagcaacttctcccgcgacaacgtgatcggcgagggcgggttcgggtgcgtgtacaaggggtggctgggcgacggcaagtgcgtggccgtgaagcagctgaaggccggcagcgggcagggcgagcgcgagttccaggcggaggtggagatcatcagccgcgtgcaccaccgccacctcgtctccctcgtcggctactgcgtggcgcagcaccaccgcatgctcatctacgagttcgtgcccaacggcaccctggagcaccatctccacggtcgtggcatgccggtgatggactggccgacgaggctcaagatcgccatcggcgccgcgaagggactggcgtacctgcatgaagactgtatgcatgctgctatcttgcttgcaacgacgagtcacccgaggatcatccacagggatataaagtccgccaacatcctgcttgactattcgttccaagcacaggttgcagatttcggcctggccaagctcaccaacgacacgaacacgcatgtctccactcgcatcatggggacgtttgggtaccttgcgcccgagtacgcgtcgagcgggaagctgacggaccggtccgacgtgttctccttcggcgtcgtgctgctggagctcatcacgggacggaagccggtggaccaagcgcgccaaggggaggagagcctcgtcgagtgggcgcggcccgtcctcgtggacgccatcgagacgggcgacctcggcgcggtggtcgacccccggctggtggacggcggcgccgcctacgacaggggccagatgatggtgatggtggaggccgcgtccgcctgcgtccgccactcggctcccaagcgcccgcggatggtgcaggtgatgagggcactggacgacgaaggaggcatgtccgacctaagcaatggggtgaaggtggggcagagccggaatttcgactccggccaccagcaagcggccgccatccagcagctccgtgccaccgccttcgcctccgaggagtacaccggggagttcgagcagtcgtccggcatggattaccttaaatcaggagtaccttaa

SEQ ID NO: 134996 - DNA, 1997 bp, Zea Mays
atgagctcgaagctgctcgaagtccaaacggagacaccagagaaactcatggaggcaaagaacatcgttgtgccccctgtcggaggacacaccagggataggaggaacaccatcgacactgaccatgggttcaataggacgctccgggacaggaggagacaaaccagtaaggtgaccccatatgcgctagctgttgagacacacgcggagcatggtggaccactcccagaagttggtgccatcgaagttgctcttacattaattggtggagtgcagcgtgttgatgcttctggaacaaaggttcgtggagaatcccatatgcttcttgttggtgatccaggtattggtaaatcccaatttttgaagtttgctgctaaattgagcaaccgatctgtgatcacaactggtctcggaagcaccagtgctggtttaactgtcacagctgtaaaggatggtggggagtggatgcttgaggctggtgctcttgttttggctgatggtggcttatgctgcatagatgaattcgacagcatgcgagagcatgacagaacaacaatacatgaagccatggagcaacagacaattagcattgcgaaggctggattagttacaacactcagtacaaggactactgtctttggtgccacgaatccaaaagggcaatatgaccctaatgaaagtttgtctgtgaatacaacactttcaggaccactgttgagtagatttgatatagttcttgttcttctggatacacaaaatactggttgggatgaaatagtttcatctcatatactgaaggagaattctgatgaaaagaaagacaaggcagatgcttctgatataaagtggatgctcccccagttgagaaggtacatcaattatgtaaggaggaagtttaaaccagtgctgacaaaggaggctgaaagagttatctcaagctattatcatctacagagaaaatcaggaacacataatgcagcaaggacaacagtgcgcatgcttgaaagtttgataaggctagcacaagcacatgcacgattaatgttcagaaatgaggttagacaacttgatgccattgctgccatattatgcatggaatcctccatgacaacatctcctatagtggacatcgttggaaatgctttgcactcaaattttacagttgaccctgatgaagaatgtatccttacatgtgattttgtagcctacttattcaagaatatcaatgatttgaatcatttcttcagtaaaaactataactcaatttgcttctatgttttccttttgtttttctgtgtccatgaaaatacttgtctatttctttggcatgcccgcagaatcaatgataacaggatgtacattagatgtctattctcagtgttaattttatgcggtaaaacatattcctggttgctctttgctaactgcctcgttgccatttgagatgcatccatcaggaaatgtatcattgtacagccggattatgtaaaccagcaagcagctttcctgtatgtttgtttttcttgacatgccatagataaaacacaggagaagaagattctcaagaaactcggaataactcaaggatccccataattcaatacaaacatcagttgctgcatcctgtagatttattaacgcatggacttacatgctattctgcatattgaatcagtgatacatgaagtctcttggtggaacaaggcctgcctttgcagttcatggtgtatatacttcttttgggcatgtaatttgtccaaatttgcaatatgtatcagattggtcttttttgtgagctctttgatgatgggaatgttgtctactgctgaaagtacaacgtcattaaatcctgtaatattcgctcccattggagtcgagtccaggacctaagatgctactaaggcttttataacccctaggctatagttccttttgctgtatcagattggctttgtaatgtgtaacaatttcttgtcacttagtttattacttatgac

SEQ ID NO: 134997 - DNA, 1627 bp, Zea Mays
atgagctcgaagctgctcgaagtccaaacggagacaccagagaaactcatggaggcaaagaacatcgttgtgccccctgtcggaggacacaccagggataggaggaacaccatcgacactgaccatgggttcaataggacgctccgggacaggaggagacaaaccagtaaggtgaccccatatgcgctagctgttgagacacacgcggagcatggtggaccactcccagaagttggtgccatcgaagttgctcttacattaattggtggagtgcagcgtgttgatgcttctggaacaaaggttcgtggagaatcccatatgcttcttgttggtgatccaggtattggtaaatcccaatttttgaagtttgctgctaaattgagcaaccgatctgtgatcacaactggtctcggaagcaccagtgctggtttaactgtcacagctgtaaaggatggtggggagtggatgcttgaggctggtgctcttgttttggctgatggtggcttatgctgcatagatgaattcgacagcatgcgagagcatgacagaacaacaatacatgaagccatggagcaacagacaattagcattgcgaaggtttgtctgtgaatacaacactttcaggaccactgttgagtagatttgatatagttcttgttcttctggatacacaaaatactggttgggatgaaatagtttcatctcatatactgaaggagaattctgatgaaaagaaagacaaggcagatgcttctgatataaagtggatgctcccccagttgagaaggtacatcaattatgtaaggaggaagtttaaaccagtgctgacaaaggaggctgaaagagttatctcaagctattatcatctacagagaaaatcaggaacacataatgcagcaaggacaacagtgcgcatgcttgaaagtttgataaggctagcacaagcacatgcacgattaatgttcagaaatgaggttagacaacttgatgccattgctgccatattatgcatggaatcctccatgacaacatctcctatagtggacatcgttggaaatgctttgcactcaaattttacagttgaccctgatgaagaatataaaacacaggagaagaagattctcaagaaactcggaataactcaaggatccccataattcaatacaaacatcagttgctgcatcctgtagatttattaacgcatggacttacatgctattctgcatattgaatcagtgatacatgaagtctcttggtggaacaaggcctgcctttgcagttcatggtgtatatacttcttttgggcatgtaatttgtccaaatttgcaatatgtatcagattggtcttttttgtgagctctttgatgatgggaatgttgtctactgctgaaagtacaacgtcattaaatcctgtaatattcgctcccattggagtcgagtccaggacctaagatgctactaaggcttttataacccctaggctatagttccttttgctgtatcagattggctttgtaatgtgtaacaatttcttgtcacttagtttattacttatgacatctatctgttcacttagtttatatcttatggtatctatctgttcaaattgaaagaaattaagttattg

SEQ ID NO: 134998 - DNA, 838 bp, Zea Mays
tttaagcgatcgtcctatctcattccgtcctgtcattataaccaaacacatcctacctaagattgacaatcatcgtttcctcaaatgaactactgcataaaacactgtagatacatagttgcataagattgatggttacaatgttaatttctgttcttgtggcttgtggttcatcttaaagacttggttagaaaaactgcttttggaatgctaggaagcaaaaatgctaatgcatgatacatgcctagttgacgtttcatcatttactgtgacattcatttatttgctattgagttaatgtctgatcgacttcatgtggcagtctcttggtggaacaaggcctgcctttgcagttcatggtgtatatacttcttttgggcatgtaatttgtccaaatttgcaatatgtatcagattggtcttttttgtgagctctttgatgatgggaatgttgtctactgctgaaagtacaacgtcattaaatcctgtaatattcgctcccattggagtcgagtccaggacctaagatgctactaaggcttttataacccctaggctatagttccttttgctgtatcagattggctttgtaatgtgtaacaatttcttgtcacttagtttattacttatgacatctatctgttcacttagtttatatcttatggtatctatctgttcaaattgaaagaaattaagttattgaatgagtgtcgtctgtcatttgttgtgctattgttcagtaaaacattttgatgatgtgaagaggggactaaggaggatctggagtttcagttttgtggagtgaatataaatgataaatacaccagtgtttctatgaa

SEQ ID NO: 134999 - DNA, 542 bp, Zea Mays
ccgaccttgccctagggcttcagtcgcttcctctccacgttccggggggggggcggggccaaccagcagaagtaagctacctgatttcgccagatactgtacgctgcagaattgcttccacttcggtaactaccggacgcgaagccacatagtcatgagcggttacgcgaccttcacgcttcgcttcttcgcccagtcgtcacaaatcagcgcgttttcgcagtgcaccagcaccggctgacccagttcgcccagcttctgcgcacctttgaagaactgccagtcgtttacatcacggaagtcgttgtcgataccgcgatcgccacaggtcgcaacgaagcatttgaagcgactacgctacttcatccagctcatgcagacggtcgacgtgtaagacaccagccaccgagttgagccgcatcaatagtcagctgcctttacgcatcggacttcatgtcaatcgatcgcggtcaacgtgcagcagctgttgacgggattgcagatcttggtggtgtatacactttgccgcgtgcgctataccg

SEQ ID NO: 135000 - DNA, 1334 bp, Zea Mays
agcccgcccacccaccaccgccagatgacgacgcctcgccacaatgcgtcgccgccgccgctccccgtgctcacgctcctctggctactgctgctcgacgctcccgccgccgcgcagcagagcccgtcgcgcgacaaggataacgggggcggtggcggtggagggggcatgccagcccagacgcccagcttcagcgctcccatggtcgtgctgctggtggcgctcatcgcggccttcttcttcatcggtttcttctccgtgtacatgcgccggtgcgggcggggcgcctcggccggtcccgtgatcccggccgccgcgctgctcgctctgtcgcggcaggaggagcgcaaccagcagcgcgggctcgaccccgccgtggtcgcgtcgttcccgacgatgaggtacgcggacgcgagagagcttcgggtcggcggcaaggacgccgcgctcgagtgcgccgtctgcctcagcgagttcgaggacgacgaggagctccggctgctgcccagctgcagccacgccttccacccggactgcatcggcgagtggctcgccggccacgtgacgtgccccgtctgccggtgcaacctcgatcccgaggagccggccggtgaggcgacgggggaggggcggcagcaggaccatgtggcgatcgacgcgagccacgatggcgccggagaggagggggaggaggacaggaggcgggatgaggcgatggagctggagcggatcgggagccagcgccgcgcggtgcggtcccggtcggggcggccggcaccgctcgtcccgcggtcgcattcgacgggccactccctcgccaccacgcgcctcgacggcgacgtggagcggttcacgctccggctgccggaactcgtgcgcagggagatggtcgccgcggccggcgaggagagcctgcgccgcacgggcctgcgcgagcgcggcggcgcccggagcgcgcggctcgggaggtcggaccggtggccgtcgttcatcacccggacgttgtcgtcgcgggtcccgttctggtccgcgtcgaggagggcgcccgacctggaggcgtcgtccatgaccacgggaggggcggccgcgaggaccaggcgtgagaagatgggcggcgcgtcagacggctcggtgacccctgctaaaggcagcgtgcgcttcgactgcctcggcgtcgcccccgccgtgacgggcgcgagagtcggcgccgcgtcctgcgacaacgagatggaggaggaggacgacgaggaggacgaggagaaggcgatcgcccggcaccggcaggcttgaacgtgggcggaaagcggggattccgcgccccgcatgtgctgctc

SEQ ID NO: 135001 - DNA, 2223 bp, Zea Mays
ctaggtcccaacctgccccaccccagccccaacctcagctcttcgccgcgaatgccgagacggcggaaaccgaccgcgcttccgtccgccaccgccgattgacaatgaagctcccggccgcactcccctggatctccccgctgcagtaccgaagacccggccgcggcgcgtcgccctccccaccgcctccaccccctcccacccggcggccgcggtacctccaccacccggaactcgcgcgcctcatcgagtcctccccctccgcgcagcgcgcgctcgacctcttcaacgcggcctcctcccagcacgccttctcccacacgccggccactttctcggcgctcctcgtccgcctcgcgcgcgcgcggctcccgcgcgccgccgccgccgtgctccgccgcaccgcctccgagccctgccggttccaggagccgcagttcctgcccctcgtccgcctcctcccgcccgaccacgcgctcgtgctcctccgcttcctgcccgcgctgctccgcacgagccgcgtctcacacaaggcgctggccgtctgcctcgaccgccttgtctcctcccgcggctgccacggcgtcctcaacgagctcctagccgatctgcgcgaccctcggaacaagtaccttccaaggcctaacacatgcgtctacaacatcctcgtcaagcactacgtcaaaaacggcgaattggagaccgccttcaaagtgctcgacgaaatgcgcgagtacacctgcgcggacgtgaagccgaacctggtcacctattcaacattgatcggtggactctgccgtgggggtaagatgaaggaagcgtttgagctattcgaggagatgatcgagaaggaccgcattgtcccagatcagctgctgtacaatgtgatcatcgatgggttctgtagacaggggcaggtggataaggctcgtgcaatctttggatttatgaggaagaacgagtgtgagcccaacaccttcaattatgccacgctgattaatgggcactgtaagaaagcggacattgaggcagcgagatcggtgttcgaggagatgaggaattctggtgtggagccagatgctgtgagctacactgcactgatcggctgcctttgcagacatggaagtgtggatgagggcatcggtcttgttttggagatgaaggagaaggggtgtagggccgatgtcgtcacatacaatctggtgattgaggggttgtgcaaagatggccggactgtggaagcaatgggcctgctggagagcgtgccgctggaaggagtaaagttgaacgtcgcgagctaccggatcttgatgaactgcttgtgctcccgtggggagatggacagggcagttggcttgctgggattgatgcttggacgagggtttctacctcactatgcggcgtcaaacaacctgttgatcggtctatgcgatgctgggcgcatagcagatgctacgatggcattgtatgggttagctgatgcaggctttatgccagagcctagatgctgggagaggcttgtggagagtgtgtgccgggagagaaagcaaaggagatccactgatctactagaggtcttggttggtgtaggttgaggtcttgaggaaaggaactggagatcgcggcagtgtatctttctgcccccatttgcactacagggctgaattgatgtttagcaacaacgaagagaaggctgctgggccctactggtactggagacagcaaccaacaggtcctgacacaaacttttcttccagaacaagctgctatatccagaaggtatcaaaccatgaaggcacaatggccgcattattcaccattctcgtcattggagacgtagtccaggatgaggtgccgcagttggctctggcaaacagacttccgctggggcctgtggtcttcagcagaacctttttttttttttttgctacaaaaaactttcatcagggccggcgatcggagccggtttggactgaaaccacagccatcaaaagggtcctatcttgcttgataggaagcgggcatgacttctattgacagttaaaatattccctccattttttttactgctgctacaactgtatggacctaatgctaatagtaattggctccttttttgaggtaacactggcatggtccatgatcgcttcgtagtttaaatgggggggacaagctttggttcaccagttgttaatttctgatggaatttgtcacgaaaggctg

SEQ ID NO: 135002 - DNA, 2052 bp, Zea Mays
atgaagctcccggccgcactcccctggatctccccgctgcagtaccgaagacccggccgcggcgcgtcgccctccccaccgcctccaccccctcccacccggcggccgcggtacctccaccacccggaactcgcgcgcctcatcgagtcctccccctccgcgcagcgcgcgctcgacctcttcaacgcggcctcctcccagcacgccttctcccacacgccggccactttctcggcgctcctcgtccgcctcgcgcgcgcgcggctcccgcgcgccgccgccgccgtgctccgccgcaccgcctccgagccctgccggttccaggagccgcagttcctgcccctcgtccgcctcctcccgcccgaccacgcgctcgtgctcctccgcttcctgcccgcgctgctccgcacgagccgcgtctcacacaaggcgctggccgtctgcctcgaccgccttgtctcctcccgcggctgccacggcgtcctcaacgagctcctagccgatctgcgcgaccctcggaacaagtaccttccaaggcctaacacatgcgtctacaacatcctcgtcaagcactacgtcaaaaacggcgaattggagaccgccttcaaagtgctcgacgaaatgcgcgagtacacctgcgcggacgtgaagccgaacctggtcacctattcaacattgatcggtggactctgccgtgggggtaagatgaaggaagcgtttgagctattcgaggagatgatcgagaaggaccgcattgtcccagatcagctgctgtacaatgtgatcatcgatgggttctgtagacaggggcaggtggataaggctcgtgcaatctttggatttatgaggaagaacgagtgtgagcccaacaccttcaattatgccacgctgattaatgggcactgtaagaaagcggacattgaggcagcgagatcggtgttcgaggagatgaggaattctggtgtggagccagatgctgtgagctacactgcactgatcggctgcctttgcagacatggaagtgtggatgagggcatcggtcttgttttggagatgaaggagaaggggtgtagggccgatgtcgtcacatacaatctggtgattgaggggttgtgcaaagatggccggactgtggaagcaatgggcctgctggagagcgtgccgctggaaggagtaaagttgaacgtcgcgagctaccggatcttgatgaactgcttgtgctcccgtggggagatggacagggcagttggcttgctgggattgatgcttggacgagggtttctacctcactatgcggcgtcaaacaacctgttgatcggtctatgcgatgctgggcgcatagcagatgctacgatggcattgtatgggttagctgatgcaggctttatgccagagcctagatgctgggagaggcttgtggagagtgtgtgccgggagagaaagcaaaggagatccactgatctactagaggtcttggttggtgtaggttgaggtcttgaggaaaggaactggagatcgcggcagtgtatctttctgcccccatttgcactacagggctgaattgatgtttagcaacaacgaagagaaggctgctgggccctactggtactggagacagcaaccaacaggtcctgacacaaacttttcttccagaacaagctgctatatccagaaggtatcaaaccatgaaggcacaatggccgcattattcaccattctcgtcattggagacgtagtccaggatgaggtgccgcagttggctctggcaaacagacttccgctggggcctgtggtcttcagcagaacctttttttttttttttgctacaaaaaactttcatcagggccggcgatcggagccggtttggactgaaaccacagccatcaaaagggtcctatcttgcttgataggaagcgggcatgacttctattgacagttaaaatattccctccattttttttactgctgctacaactgtatggacctaatgctaatagtaattggctccttttttgaggtaacactggcatggtccatgatcgcttcgtagtt

SEQ ID NO: 135003 - DNA, 1565 bp, Zea Mays
acgttttaggattcacagattccgcgggggcatgctctgctctgccccggccgggcgcggtagcaactcgcagcttggtcaccgtcgccacgggcggcgatgtgcaagcccagggcaagctccgacgcgttggcatcgcagcccgcggctagcccttcttcccgccgctcctcctcgtccgcctccgccaagcgccgccccgccgcgaccggggcctcctcctcctccccctccacgtcctactctgggacagggccttccggcgccgccacgggcacgggcacgggcacggccacggccagcgcgcagcggcgcggcgccacctcgtcgtcctccacctcctccgcgtcctccggccgcgcctcgctcgccgcggcgcgcgcctcgctcccggacccgccggtcctctaccctttccaggagctggccgccgctaccaacagcttcctcgccaagcgcgcaggtggggccgcctccgcctccgccgccgcctactggcgctgctccctccggggccgcgacgccgcccttttccagctcccgcgccgcccgggcgccgcggccgtggacgccgccgcgcttgccagggtcggcaggtaccaccacaccagcctcgcgcggctgctgggcgcgtgccccgcgggcgcccacctctacctcgcgtacgagctcccgccgggcgccgccacgctggcggcgtgcctccgtggcccgcgcaaccccagcttcacggcgctccgctcctgggtctcccgcctccaggtcgccgccgacgtcgcgcaggggctcgagtacgtccaccaccacgcgagcgccgtccacggccgcgtctccgccttcgccgtgatcgtgtccgacccgggcctccgcgcgcggctcacccacttcggcgcggccgaactcgctgcccccgccgacgcccgtgaggtcgcccactccccctacgcggccccgggctccagcggcagcgagccgtcgcgtgaggcggacgtgtacgccttcggggtgctgctgctggagttgctctccggggaggagccggagaagtaccgcttcgacaggggcaccaaggagttccagcgggtgtcggtcgtcgagacggccgctgctgcggcggcggaaggcggcgtgaggaattgggtggacaggaggctgggggactcgttcccggtgtcggccgcggaaaggctggtggaggtggcgctccggtgcgcagcgttggacttagaggatcggccggacatgatgtgggtcgcggggaaggtgtccaaggtgtatctggagtctcgggtgtgggagcagaagcttcaagtgcccaccgaattctccgtgtcggtggcgccacggtgaaccgaaggcaggcccgcaccgacatcgccggcggtgcgaattgcaattttttaggtggtagtggtagattcgttgtagtgagctagtggcctagacgcctagtgcggctggggaaggtaggcaaaccaaaattcgctggaaaaatattaaaaaacttgtgacatttcaatctttccaacaaaatgataaaatgtctacgttttgttgtagaacaa

SEQ ID NO: 135004 - DNA, 1480 bp, Zea Mays
ctccttgaggctcacgaatgcgcacgacgtctctccccagaaatcgtccggccatgccaccatcgcggcctcgttcaccgccgggtggctgtacagcacggactccacctccacgctgctgatgttctccccgccgttgatgatcacgtccttggaccggtcgcagatctccatgtaccgtcaggatgcatcacgccgacgtcccccgtgtagaaccacccgttgtcgcgtatcgccgccttggtggccttgtcgtcgtccaggtagccgagcatgacgcagccgccgcggagcatgatctcgcccatcgtggacccgtcgcgggggaagctgcgcccggtctcgccgtcgacgatgtccacctcggccatgccaggcgtgcgcacgccttgcctcgccttgagccgcgcgccgcctgatgtggatgtggatactgatatatctgatgaagacgaaggtgacgacgatgaactgaaagaaagcataaatggttcagaggatgaagctttagaccagaatgaagacagcgaagaggaagacaagtcaaaaggcagtggctctaaagcgcagaagaggaagttaaatgattatattggacagctaagttctgctgatgcaagccttcgagttctgaagaggttagcaactgccaagaaggctgaagttccatctgatgaaactggtaaaattctatccgatgaagatttcaaacgcatcaaagaactcaaggcaaagaaagaggcgaagctggctttggctcagcatggactaatcaagggtggcgacacaaggtctgtaacctttaagatgccatcatctgaccagctcagcaggaagcgtgtcgatccacttgagcttgaggctcacgtcaggagaaagatgtccaaggaagaaaggttagcgatggtgaaagctggaagagaggatagaggtccttacatggcaagggcggccgtgaaacagaaaaaggacgacgacagcaacatgcgggggctccccaacatcgcgcagaacgagcccgtgctcggcatggtctgggacaacatcgcgcgcctccacaccggcggcctcgtcgcgcgggacgactcggccgccaccctcgcctccctcgccgtgggcaactcctacttcgctaagtacatcgtctaggaggacggcgtcgctgtcctcgtcaagctgatcaaggaaggcgccgacgacgggcagctgctccactccggggtgtgctccgtgttcgccgctgcgctcaaggagccgccaatgcgcgtgcaggccgcggtcgcgggcgccatcgcgtcgctggcgcgccacagccacaagtgccaggacctgttcgcgcagagcaacgccgttcggcatctcgtcacccacctcgcttctcaacctgaaacccactcgagagcaaacaacgtgcgtcagatccacgacgacacacgattcaatcaacagcaatgcatcgaacaagcacaaattcgtttca

SEQ ID NO: 135005 - DNA, 1589 bp, Zea Mays
ggagcactatcttcgaatcaaaacgtataaatccccattggaaggccaggcctgggtagagcataaccgaatagaaatagctttggcacgcgcaaacaagcaagcagcagagcagatcaagtaaaggtagcaatttgagtagtgtgcaagctaagatggggcaccaagaacaagaacaggaagtgatcccgctgatgaccccgtacaagatggggcagctggagctctcccaccgcgtggtgctggcgccgatgacgcggtgccgcgccatcggggacgtgccgcagccgcacgccgccgtgtactactcgcagcgcgccagcaggggcggcgtgctcatcaccgagggcacgggggtgtccgccaccgcgcagggcttcccggggtcccccggcatctggacgcaggagcaggtggcggcgtggaagcccatcgtcgacgccgtccaccgcaagggtgcgctcttcttctgccagatcgcacacgtcggaagggcatccaccaacgatttccagccggacggccaggcgccggtctcgagcacggacgcgcagctcccacccgacgccgagtccggcacggtgttctccaggccacgccggctgcgcgccgacgaggtcccggggatcgtcgacgacttcaggcgcgccgcgcgcaacgcgatcgaggccgggttcgacggcgtggagatccacggagcgcacgggttcctcctggagcagttcatgaaggacggcgccaacgaccgcgccgacgagtacggcggcagcgtcgagaaccggtgccgcttcgtggtcaaggtcgtggacgctctcgtccgtgaaatcggcgcgagccgggttggcatcaggctctccccgttcgcggactacttgaactgtgcggattccaaccccttggcgctaggtcactacatggtggaacagctcaacaggcacgaggggtttctgtactgccacatggtggagccgcgaatggccatcgtcgacgaccgtaggcagattccgcatggactcctgccgttcaaggcggccttcaatggcaccttcatcgccgcgggcgggtacgacagggaaaaagggaacaaggtggtcgccgaaggctacgcggacctcgtcgcatacggaaggctgttcttggccaacccagacctgcctaaaaggttcgaggtagacgagatcctgaacaagtatgatcgttccaccttttatacacaagaccctgttgttggctatacagactaccctttccttagggacgacagcgaagacttagctgctcaagtttaattgtgtggatgatcgatttaatcacggttactgcacgatcgagatcgatactacatccatttgaatatatatatctaagatgcattgtttttgttttaagttagtttttttatatttgaccaaatttatgtaaaagatatatgtgctaaactagttgagtataccggtgtgttgcaacgacaaacgctagtctgtgatcaaatgattttattaaactttactatagccagacttacaacaccgtatcatgtacatgtgtgtatttgttcaagtaaaaatatataatggtggacttggagg

SEQ ID NO: 135006 - DNA, 98 bp, Zea Mays
catttcgtggaacaagagctcatcagaagcattattgacaagtttattcagacgtctttaaacaaagtcagtttactcagacgaatacagatgcaggc

SEQ ID NO: 135007 - DNA, 1429 bp, Zea Mays
gaagtgccgttgtatacaagtcaactctcaccaaccctcacctgcagagtgcagactgcagtgcagcctttgtatatcttggtgagaaaggcctccggctgatctcgtccgcctcgctgtgcctgtgttgtactactgctactgctaggtagccaactcatttcctcccccaacccaaatgggcgactccaccgccaccaacccctcctcgccgaccgcagccatggatcccgactccgaggtcgtcttcgacttccagccctacctctgccagtacaagagcggccgcattcaccggcccggcggcgcccccaccgtccccgccggcacggacccggccaccggcgtcgtctccaaggacatccgctccggccccgcctccgcgcgcgtctacctccctcccggcgccaccggcaagatcccggtgatcgtctacttccacggcggcggcttcgtggtcggctcgccggcgcggccgggcacgcacggctacctcaacgacctcgtcgcccgctcgggcgccatcggcgtgtccgtctactaccgcctcgcgccggagcacaagctgcccgccgcgtacgacgacgcgtgggcggcgctgcggtgggcggtgacgctcggcggcgaggacccgtggctgctggagcacgccgacctgtcccgcgtgttcctggcgggctgcagcgccggcgccaacatcgcgcacgacacggccgtgcgagcctccgccgccggcgtggccatccgcgggctcgccctagtgcacccgtacttcactggcagggaggccgtgggcggcgagacggcggcgttcggccccgagatccggccgtccatggaccggacttggcggttcgtggtctcggacacggtggggctggacgacccgcgcgtgaacccgttcgtggacgacgcggcgcgcaaggcctccgccgggatcccgtgccagcgcgtgctggtgtgtgtggccgagaacgacttcctgctcaaggagcgcgcgctgtggtaccaccgggagatcaaggccagtggctacgccggcgaggtcgagctgttcgagtctaagggcgtcggccacgcgttccacttcgacatgctggactcggagcagggcgtcgcactacaggagcggatcgtggctttcataaataaatgaaaaccgagacgataaataagagttttcttttttttgtccactatcgattcacggagtaaatcgattgtttggtttggtccattttatccgctgtcggtccacggagtaattcgttgtctcgttttttgttagaacaatttgtatcgattcacagagctatcagtgcggtgattgatcaccagcggtatgtaactccattcctgttaccatttagaatgctgaaccaaacaacaccataaccaatattagagcatttcaaaaaaaaaaaacaca

SEQ ID NO: 135008 - DNA, 116 bp, Zea Mays
tttcatcagctacaatataaccttgtgtattagtgttcccctacatactacgtttcaaacgttaatcgacacgcgtgtaataacctttacctatagtaatggtgtttgagatgttt

SEQ ID NO: 135009 - DNA, 393 bp, Zea Mays
atggaacaagatggacacaaggttgataggcatgttgttcatgaaagaaaatcaaaagctatgcctgaaggctatgaacagaagcaggaaatgaacgtaaaacccaaagatattcatgtcgttcctgatggcattggccagactggatggattggtggcctccttgggaagatttgtgacaagcaagggataccatatgagtatgggaaaggacgcttggaggagcgctctgagctgttggaggagatcagaaagtgtgatgccaagcaccaagaagggtctggtattggctttaaagaggaagacacacccaactttacgggttccttttattccaaaataaaggcaatggtggaagagctgttgaaggagtattttaacagaaattactga

SEQ ID NO: 135010 - DNA, 2166 bp, Zea Mays
cacgacaactcatgtttatccagcccggcaggttagcgttgaccacttgtccacttaattctggaacaaaaatttcatctcacacgacgcacaagcaaacttactcctatacaaacctcagaaaaaaaaaggaggaaaccatcgaaagagaaaataaaaatccgcgacgaaccaaacgccgaagccagccactcaccccgtccctgtctcctgcacccgtcacctccatctccaccagaccaccagaaatccagaatcaaacaagtgaaagcgcaaacccttgctccgattcccctctcctcggcctcctcgacggaagtagcagagcaggggccgcggagcccatgtggcccggctgcggtggccggttttactgggcgccggaatcggcgccgccggggcaggccaggggcgtcgcggtcctgttcgcgtgggtgtggagcgacgagacgcagttgcggccgttcgttgagctgtactcctcgctcgggtggcgctgcctcgtctgccaccccgatctcgtcgcactatatctctctgagaaagcaatatcgctggcaactggtgttataaatgagctggttaaggaactgaaaataaaaattgtgccaattgttcttgcttccttttctggcggctcaaagggatgcatgtataaggttattcagttactagatggaatatgtgaaggagatgcaatcatgaaggactatcggttagtgaggaactgtatctgcgggcaaatttatgactctagccctgtagattttgtcagtgatgtgggcgcccagtttgtccaaaagcctgctgatggaaattcatctcagccaactatattgcattcatggatggcaaaggctctagcttctgtcatggatactctcttcccaagcaggattgaagctcagcgtgcagagtactggcacacactgtactcggcagcaggattgggcccagttcttctattttgctcagaagctgataaccttgctccatgctatattatctgtggttttgcacggcgtttgattgaactaggcacagaggttaaacttatgaaatggaacagctcccaacatgtcggtcattacaattcacatgaaactgaatacaggacagctgtagatgatatgttgaagaaggctctccttaccttctgccaccgaagccaactatatgactcaaatatggctggtgaccgggagtacaagatagcgcactcggtctgcagtctacacaatgctgcagccaattcaaacgagagtttaagaggggttcctaacagtcctagcgatcacttcttcttgccaagttcgaaggatcacgatgagtctcaggaacccgggtcccacatgtcccatccaccctgcatggagcctaaaggagtccttggccaaatcctgtttgatgtttgtgttccgagaaatgttgaaggatgggacatcaagccgacagtgtccccgaatggacggccaacatttgcttctgcccgtcaacttggtccattcaatcccatcaggtacttccgacgttcaagactatagttttctgtaggagttgagattattattttttgtatatataacggaggcaaggtgtctaatgggcactctgagcaagattttacctatgtaagctccctgtaattgtttctgttttttacttttgcgctgcttggcgagagaatgtacatatgctttgtataccatattagggcttgttcggttagctctcaatccatgtggattgagtgagattggatgagtttgaatcccaaacaagtcaaacttcttctcaattttttccaatctcatccaatccatatgtattgggaataaccgaacaagcccttagtgtgtactagaaggtggatcgtggacatagtttctaggcgggttgtaaggtgcacgctaacattgaatagccaagggaatgcattattatgctcctgtagtctcctctatatttcatgttcgtcaaatctaactatcggaaaaatcttctcttcctttttactggtcatagctgatgttagtattttaatgttggtctttctttttttttcccgcttggtgtctttcgtttcttcgagtaccgttttgtgtttagtgctgtcactgactgtatttctggttcacctcaaagtcaaaacattcagtattcaga

SEQ ID NO: 135011 - DNA, 848 bp, Zea Mays
acggatcggagctgtgtgcgtcactacttgcctgccactcgatcagcagtaggcccacagctcactcgcaaccactcaccaagctagcggaagcaaagcagagcagcggtcgccggccgggcacgataccagcgtcgcgagagagagagaggatggcgttcatgcggtaccgcgcgctgccgcggggggagctaacagcggaggagttccgggcgtggctggcgcagttcgacgcggacagcgacgggcggatcagcagggaggagctgcggcacgcgctgcggagcctcaacgtgcggttcgcgtggtggaaggcgaggggcggcgtgcgcgccgccgacgccgaccgcgacggcggcgtgcagctgggggaggacgaggtggcccgcctcttcgccttcgcgcagagccacctccgcgtcaagatcgcccagctcgggtactactagtactgctgatccgtcgtcggccgatcgatcggccaatatggaggcatggagcatatggcatcgatcgatgggtttgtcactactcgatcgtcacttgtttgtcacagctgggtgggttggatgtgttgttgctactttttttttttctctcacgtccgggtggatgtgtgttgttacttattgttacgtactgctgtttggtcaaaacacattgaacgcaaacgcaaacgggaagagaaagcagcgagcgctaatgattaacccatcagttgcgtgtacaaagcaacaaaacaaaaacactttcttagtaggcgctgtacgtacgagtgctgctgcttcttgaatgtcttgtggtaacttcaatttgtggatggtttgaagagtgtatgctgcgtataa

SEQ ID NO: 135012 - DNA, 223 bp, Zea Mays
atgttacatttgcagatatggacctcggtggttttctccacattaggaaagctggaagagccttttgaactcatttttttttgctaacagtggtgttatggtgaaacagagttttgtgtgtatgtaccaacagctaaaatgtaaacacgacattattatagttgagtacaagaataattatctcttatatcttattgcaaaatctgaaacagttctcctgtag

SEQ ID NO: 135013 - DNA, 1356 bp, Zea Mays
gagcactggcatatgcctataaaaggtcagctcctggccactctagaccgcacccacacagccagtagtgctccacttgctagtccactcctctctcagtcgaggcaatggcctccgcttccagtagcttccgcctcgctctgttcttggttctgctggcgtttgtcagcttggcacggcacgccacgggggaggccagcccgagcaggaggctcatggagctgtacaagccgccgcccagcgatctcctaaggtaccacgacggcgccgtgctgagcggcgacatccccgtctccgtcctctggtacggccgcttcacgcccgcgcagaaggccatcgtcaccgacttcctcctctccctctccgccgcgccgacgtcccctgcgccttccgtctcccagtggtggggcaccatcgaccggctctacctatcgaaggcggcggacgcggccgccgtcgggaagagcggcgcgcacggcggcggtggtggcaggaaaggcgctcgggtggtcctggccggccaggtctccgacgaagggtgctcgctggggaagagcctgacgctcgcccagctcccggcgctggcggccgcggcgcgccccgcgaagggcggcctcgcgctgctgctcacggcgcaggacgtgctggtggagggcttctgcatgagccggtgcggccaccacgggtcgtacggcgcgcggccccgcgtggcggcggcggcgtacgcgtgggtcgggaacccgggcacgcagtgccccggccagtgcgcgtggccgttccaccagccgccgtacgggccgcaggcgccgccgctggtgccgccgaacggggacgcgggcatggacggcgccatgatcagcgtggccagcatggtggccggcgcggtcaccaaccccttcggagacgggttctaccagggcgaccgcgccgcgccgcttgaggccgccacggcgtgcgcgggcgtctacggcaacggcgcgtaccccggctacgccggccagctgctcgtggacgcggccacgggtgccagctacaacgccaacggggcgcgcgggaggaagtacctgctccccgcgctgtacgatcccgacacggctgcctgcaccaccttggtttgagcaaacgcgcggcgccgtgttttggcatctgtcaccgtaggtgggcggggatacagtgaagtgataatgcgcttgtgttaggcgcatgtatatatataataattagatggatacccgtgcgttacaatataaacatataataccatgatatcatatatatgttcatatgttgtgccgctaatcaaaatttagcaatctctagaacttgtggtagtcatactacaacaacaaaattaag

SEQ ID NO: 135014 - DNA, 552 bp, Zea Mays
ttcagagcaaagcacacaggatacatgcaccctgagcatcatagcaatccaattgtggttcctacttttttatgcaccatacctagaaatagaagacatgcaccttatcagcaaccaatggcagtatatattataataaaagaactctaaaagtctcatcagctgaaatactttatgaactatatgtaaactgggagatggagggaatgatgggagtgacaaatactttgatccaacttaaaaattgcagcagtaataaatatgctcaaaaccttcttaaatactccagcataaaaaatatcacttggtgctccaccatttcaagcaataaggctctctccaacaaggtcatgtaaaaggtcatgttcgatatatttaactcaccgagctcgcccctacacctccagcaaagtcttctatcacatcctttaaaatttggcggcctcttctcatcctctaaatgtagcggctccttctacaattgtaaaattaattgtcttgcaatttggcaatggttttgtctgttcaatattcaatgccatttcaatggta

SEQ ID NO: 135015 - DNA, 1804 bp, Zea Mays
gtcagactcgcagaagccagcccatctcagtcagccgcagcagcagctagcagcagcacacgtgcggctgcagccacgccagcagccatggagaggagggcgcacgcgatgctgttcccgttcccgtgcccgggccacatcaaccccacgctcaagcttgccgatctgctgcacgcgcgcggggtgcacgtcaccttcgtcaacacggagcacaaccacgagcggctgcggcgggagcggcggcgcgggttccgcttcgaggcggtgcccgacgggctggcggacgaggaccgcgtcgctcccgacaggaccgtccggctgtacctgtcgctgcggaggagctgcggcccgccgctggcggagctggcgcgccggctcgtgccgcccgtcacctgcgtcgtgctcagcggcctcgtcagcttcgcgctctccgccgccgaggaggtcggcgtgccggcgttcgtgctctggggcaccagcgcctgcggcttcgtcggcacgctccgcctgcgggagctccggcagcggggctacacgccgctcaatgacgagagctacctgacgaacgggtacctggacacgcccatcgactggatcgcggggatgccgacgctgcggctcggcgacatctccagcttcgtccggacgctggacccgcagtgcttcgcgctgcgcgtggaggaggacgaggcgaacagctgcgccagggcgcggggcgtcatcctcaacacgttcgaggacctcgagcacgacgtcctcgccgcgctgagggacgagttcccgcgggtgtacaccatcggtcccctggccgccgccgccgcgggggcgctgagcctgtgggaggaggactccgagtgcgtggcgtggctggacgcgcaggcggacgggtcggtcctgtacgtcagcttcgggtccctggccgtgctgtcgctggagcaggtcgcggagctcgcgtggggcctggcggccagcgaccggccgttcctctgggcggtgcgcccggggctcgtggccggggaccgcggcgccgacgcgctgcccgagggcttcctggccgcgaccgggggccggtgcttcatcgccgagtggtgcgcgcaggagcaggtcctgcggcaccgcgccgtgggcgggttcctgacgcacagcggctggaactccacggcggagagcatctgggcgggcgtgccgatggtctgctggcccgggttcgccgaccagtacatcaactgccggtacgcgtgcgaggagtggggcatcgggctgcgcctggacgaggcgctgcgccgggagcaggtcgcggcccacgtcgaggagctgatggccggcggtaccgacagggccagggaaatgcggcgctgcgccgccaagtggaaggccgcggcctggaaggccacggcgcccggtgggtcgtcgtgcgagagcctcgacaggctggtggatgatctgcggctgtgggaggaggacgccgagctcgccaccgccacgccgttgatcaggtgatgccgtgagaccgtagcacgcccacacgcggacttcacgtcggacgtctccttccgtctccatgtcgtcactcgtcaggctacaggagttggagttgctgaataagggttcagtgacctggtttcgtacttgcagtgtctcgctccgaccacgcaaaaatacagtagtaatgtgtaccagtagctgttggttgctttcgcgtcaacgtagacatcgtgaccggacgaactatgccaatttgactgataatacagcgcggtgcagtcgttccaaaaccatgtgccgactcgcctaatttcatgct

SEQ ID NO: 135016 - DNA, 242 bp, Zea Mays
atggctgtggaagcggagacggtgcttcggccgctgcagttcttggcagcgggcgccgccggcgacggggaggtgtcggtggtgttccttgccacggagaaggaccggccggtggatccgatgatttggggcgacgagaagcgcatgaagcgagagctcctggtgtgggccaaggccgtggcgtccatggtggccagtaagagaacacctcctcagagcacgcacaccgtcgtcgtggtcca

SEQ ID NO: 135017 - DNA, 219 bp, Zea Mays
atggctgtggaagcggagacggtgcttcggccgctgcagttcttggcagcgggcgccgccggcgacggggaggtgtcggtggtgttccttgccacggagaaggaccggccggtggatccgatgatttggggcgacgagaagcgcatgaagcgagagctcctggtgtgggccaaggccgtggcgtccatggtggccagttgtagtattcgagctttgtag

SEQ ID NO: 135018 - DNA, 1345 bp, Zea Mays
ccttctcttccccatcatctccgcgcattttatatgcaggcttgcgcctgtcacttctcccctgtccttgctccccctcgatcccgcatcagtgcgtcacattcaccgggaatggcaacgctcaaggtcccagccactgttcctcccgtcgccgatgactgcgaccagctgcgcaaagcattccaagggtggggcacgaacgaggcgctcatcatctccatcctcggccaccgcgacgccgcgcagcgccgcgccatccgccgcgcttacgccgaggcctacggcgaggagctcctccgctccatcacggacgagatctccggcgacttcgagagggccgtgatcctgtggacgctggacccagcggagcgcgacgcggtgctggccaacgaggcggcgcggaagtggaagcccgggaaccgtgtgctcgtcgagatcgcctgcacgcgcacctccgcgcagatcttcgcgaccaggcaggcttatcacgagcggttcaagcgctcgcttgaggaagacatcgctgcgcacgtcactggggacttccgcaagctattggtgccacttgtaagtacttaccgctatgatggaccagaggtcaacacaaggttggcacactcagaagccaaactacttcatgagaagatccatcacaaggcttacagtgatgatgagatcatcagaatcctcaccactaggagcaaacctcagctgattgctacattcaatcattacaatgatgcatttggccaccgaatcaacaaggatctgaaggctgacccccaggacgagtacctcagaacgctgcgggcgatcatccggtgcttcagttgccctgacaggtactttgagaaggtggctaggcaggccatagcggggctaggcacagatgagaactccctgaccagggtcatcaccacccgcgctgaggtggacctcaaactgattaaggaggcgtaccagaagaggaacagcgtgccgctggagcgggccgtcgcgggggacacctccggcgactacgagagcatgctcctcgcgctcctggggcaggagtgatgagccgtactggtgcgctggtgcctttctgaccggcgccgtggtgtttgttcgtgatcgtaataaacctgattgcctagctgtacgtgaggctgtttcttcggtcctggtactgtcgctgcagcatgcatagcagtggaccagtggtgataaataagttactgtgctttcgacgaatgaaccctttttttgtgtctaagttgtggaacctcgagaaagtttttgtgtctaaggctgtctttagtagattgcataagtttaaaataagagataagataagagatgtgct

SEQ ID NO: 135019 - DNA, 1430 bp, Zea Mays
atgtcgatctgcatccccggatctcctcttcaattcgcctgcaatcttgggggtgatcgattacacagcattatgggtcgcgtgaagctacagatcaagaggatagagaacaacaccaatcggcaggtgaccttctccaagcgtcggaatggcctcatcaagaaggcctatgagctctccgttctatgcgacatcgacatcgcgctcatcatgttctcgccctccaatcgcctcagccacttctccggcaggcgcaggatcgaggacgtgatcacgaggtacatcaatctcccggagcacgacagaggaggagttgttcggaatagagagtatctgatgaagatgcttgctaaactcaaatgtgagggtaacatagccgaacaactcacacctaataaagagccaataaattccaacgtagaggagcttcagcaggagattaagacgtaccaacaccagatggaagtcttaaaggagcaacttaggatgttcgaaccagatctgacaacattgatgtcgatgaacgatttcgagacgtgtgagaaattcctcatggacaccctcacttgcgtggaggagcgaaagaaatatttgctgtgcaaccacgtggccccgttcgatccgtcggcctccgacatgcaacaacacgtagacatgttcgccctgccgccggcgccgcctcaccaacaggagcaacaaggggacgacctaggaggcgccgccagcgcgttcggtggcgatgtctcgtggttcgccgatgggatgccgacgtcgtcgatctttgccgcgtcggacccaatcttgtactttagggatcaggtgatgttcgactcgacgtcgacgatgcggcgtgactcgatggtggcaggggtggacccaggaatgacctcggtgtgccagatggagcagcaagcccccagcgtggactggcagcaggcgtacacgtcggcggagttcttctccacgctgatcccgtccacgccctacccccttgatgatcagatgcagaacgacatggctcaagtgcttacatctccgatggtgccaccgcacgagcacgataaggtggaggtgccgatgagctcgtccaacgtgccgacggacggggattgcggcaccacccttgccgccgctcaagaggacggcctgcccggggtggtcaacattggctagctagctgcatctgcatgcatgtccggctcggctctctgccttcctcacttctttaccaactgcagccatgatttgatcttgtttcacatggacagatgatacttgttattcgtttataggttttattgagcactatttgtggcactggtctagatggtccgacctgcggacggttcatttatagacgtagacagttcacgatagtattagatcagacgaattaacttcctttctccatgcatgtttatctctctaaa

SEQ ID NO: 135020 - DNA, 1551 bp, Zea Mays
atgtcgatctgcatccccggatctcctcttcaattcgcctgcaatcttgggggtgatcgattacacagcattatgggtcgcgtgaagctacagatcaagaggatagagaacaacaccaatcggcaggtgaccttctccaagcgtcggaatggcctcatcaagaaggcctatgagctctccgttctatgcgacatcgacatcgcgctcatcatgttctcgccctccaatcgcctcagccacttctccggcaggcgcaggatcgaggacgtgatcacgaggtacatcaatctcccggagcacgacagaggaggagttgttcggaatagagagtatctgatgaagatgcttgctaaactcaaatgtgagggtaacatagccgaacaactcacacctaataaagagccaataaattccaacgtagaggagcttcagcaggagattaagacgtaccaacaccagatggaagtcttaaaggagcaacttagatctgacaacattgatgtcgatgaacgatttcgagacgtgtgagaaattcctcatggacaccctcacttgcgtggaggagcgaaagaaatatttgctgtgcaaccacgtggccccgttcgatccgtcggcctccgacatgcaacaacacgtagacgtaggtgtatggtgtctttaataattatggttggaacacgtaattacttccgttgattcggttcagcgagtacgtaaccgtaattagtagagtacgtaattaacaattcaacgtggaggatgatcatgggtccagatgttcgccctgccgccggcgccgcctcaccaacaggagcaacaaggggacgacctaggaggcgccgccagcgcgttcggtggcgatgtctcgtggttcgccgatgggatgccgacgtcgtcgatctttgccgcgtcggacccaatcttgtactttagggatcaggtgatgttcgactcgacgtcgacgatgcggcgtgactcgatggtggcaggggtggacccaggaatgacctcggtgtgccagatggagcagcaagcccccagcgtggactggcagcaggcgtacacgtcggcggagttcttctccacgctgatcccgtccacgccctacccccttgatgatcagatgcagaacgacatggctcaagtgcttacatctccgatggtgccaccgcacgagcacgataaggtggaggtgccgatgagctcgtccaacgtgccgacggacggggattgcggcaccacccttgccgccgctcaagaggacggcctgcccggggtggtcaacattggctagctagctgcatctgcatgcatgtccggctcggctctctgccttcctcacttctttaccaactgcagccatgatttgatcttgtttcacatggacagatgatacttgttattcgtttataggttttattgagcactatttgtggcactggtctagatggtccgacctgcggacggttcatttatagacgtagacagttcacgatagtattagatcagacgaattaacttcctttctccatgcatgtttatctctctaaa

SEQ ID NO: 135021 - DNA, 1194 bp, Zea Mays
cgtgaatgtgccagattcatcataaacattgctcgttatgtactaattgatttattgttatgatcttattaaacgtacgtacgtctggatgtagtatctgatgaagatgcttgctaaactcaaatgtgagggtaacatagccgaacaactcacacctaataaagagccaataaattccaacgtagaggagcttcagcaggagattaagacgtaccaacaccagatggaagtcttaaaggagcaacttaggatgttcgaaccagatctgacaacattgatgtcgatgaacgatttcgagacgtgtgagaaattcctcatggacaccctcacttgcgtggaggagcgaaagaaatatttgctgtgcaaccacgtggccccgttcgatccgtcggcctccgacatgcaacaacacgtagacatgttcgccctgccgccggcgccgcctcaccaacaggagcaacaaggggacgacctaggaggcgccgccagcgcgttcggtggcgatgtctcgtggttcgccgatgggatgccgacgtcgtcgatctttgccgcgtcggacccaatcttgtactttagggatcaggtgatgttcgactcgacgtcgacgatgcggcgtgactcgatggtggcaggggtggacccaggaatgacctcggtgtgccagatggagcagcaagcccccagcgtggactggcagcaggcgtacacgtcggcggagttcttctccacgctgatcccgtccacgccctacccccttgatgatcagatgcagaacgacatggctcaagtgcttacatctccgatggtgccaccgcacgagcacgataaggtggaggtgccgatgagctcgtccaacgtgccgacggacggggattgcggcaccacccttgccgccgctcaagaggacggcctgcccggggtggtcaacattggctagctagctgcatctgcatgcatgtccggctcggctctctgccttcctcacttctttaccaactgcagccatgatttgatcttgtttcacatggacagatgatacttgttattcgtttataggttttattgagcactatttgtggcactggtctagatggtccgacctgcggacggttcatttatagacgtagacagttcacgatagtattagatcagacgaattaacttcctttctccatgcatgtttatctctctaaa

SEQ ID NO: 135022 - DNA, 1374 bp, Zea Mays
ctaggcggattaccgcgccgtcaataatggcattgttgaagcttcctggttgcgtcagcttctccagaaactgcactgtgcgttgtcctgatgcacctttgtctaccgcgacaacatcaacaccatctacctctccaccaaacctattcaacatcaacgcacgaagcacgtagagatcaacctgcttctattgaaaaggatatatggtcttctggaagtgctaacgaagaatatctcaaagcacttaatgctttgcttagtaacttccctcgtttgagggtcactgaacctgccacattgtgcattcctcatcttgtaacatcccttaaaactggttctgaggcaactcaagaagcagcgctagattcactatatcttctcaggcaagcttggtcagcttgcccagctgaagtatttaaagcacaatcagtggctgcatcagaggctattcctctacttcaatacttgatacagtctggcccaccgcggtttcaagaaaaggcagaattgcttcttcagtgcttgcctgggactcttactgttacaataaaacgtggcaacaatctaaggcaatcagttggaaatcctagtgccttctgcaagcttactcttggaaataatccaccacggctgacaaagattgtctcgactggcgcgacacctgaatgggatgaagcctttgcatgggcatttgacagtcctcccaagggccagaagcttcatatctcctgcaaaaacaacagcaaatttggaaagaaagcattcggtaaagtgacaatccagatcgacagggttgtcatgttggggtcagtcgcaggtgagtacaccctgctacccgagagcaaaagcggccccaatagaaacctggaaattgagttccagtggtcaaacaaataactgcatacctacataatttaggcgccctctgtaagttgaagatcgatgagtttgagtgttttcttgttttgtactctgctaaaggttaccctgtttgtgcatcattgtaaatagcgggcagagaaagatgtcgtttgctgtaccttctgtgagatataaacagatgagttctcagacgttttgtactggttgtgtcaggcttcattcgtttatttttttaccctgggattttgtctttgtaaaggggtgtaaacagaagtatatgatatggttaggttctcatacggaatggacgtttgcgactttgcagtctcttaccagtatacatgtttatttgccatgtttgttttgttctcatttttgaggtttgtgagggtgctgattaaaaattactgaatatttgattcatagtatgctttgtggttgattcggtttgtgtatgttattggcattgggtgtttgttcttttaagtggca

SEQ ID NO: 135023 - DNA, 1597 bp, Zea Mays
cgaccgaaccgattgcccctccacgcgctccgcttcgcacccaagtcctctagccgtttgatcccagacggcgcgacgagagcgggaggttctagccgtttcctcctcctacagtcccactccgcagtggcacggcggcgccgccgggttctcgatcgggctgctcccttcacttcacttcccttcccttcccttccttacccgccgccgcggcacacggtgcacgtggatgggctgcaaggggtccaagcacgcgctgcacgggggctgtggattggcggcgcgagcgccggagccgcagagccgctcgggacgactggcgccgcggcactccgtcgtcgcgctgcggtcgtccacgctcggaacgctcagcctcgaccgcgccgtggcggccgtcgcggcagcgggcctctctttcgacgctgcagcagcagcaggaggaggaggaggaggaggcgtggacgaggcgacgacgaaggccggagacgacgacgtcgacggcgcagggacgaagctgctggggccgtcgcggtcgttcggcgggtggcgcccgacgacgccgcctcccgtggcggcgccgccgaagcggcagaggagggcggtggtggcggcgtcgaaggccgtcgcgccgccgcggacgccgaacgagacgccggcgcgcaaccccgaccccgatcccgaggagatcgacgtgtgggagctcatgaacgggctcgaagacgaggacgaagaggcggacgacggcgctgagcggaaggcgcggtcggcgcccgcgtccccggcgttggtgccggagatcctggacgcgttccggaaggcgctcgacgacctgacgcctgatgactcgccttcgccccttcctcgtttcgtcaaacccagcggaaccggtggcgccgagaagcgcgagatccagacgttcccgggcatcgtgcgggcgcgggtcgacgtgttccaggaaaagatcaacaccaagacgacgaagcttgcagccaaggcggtctcgctctcgccgccggagagcgcgggccgagtcgtcgtgtacctcaccagcctccgcgggatccggcagacgtacgaggactgccggtccacgagcgcggtcctgcaaggctacggcgtgcgcgtcgacgagcgcgacctgtccatgcatgcgggcttcaagcacgagctccgcgccgcgctcggcgtcggcgacggcgacggcgacgaagcccgccggccgccgctcccgcaggtgttcgcggacggccgccacctgggcggcgccgaggaggtccgccgcatgcacgaggccggggacctggcgtcggccctaggtgcctgcgacgcggcgccgtgcgccgccggcgcgcaggacgcctgcgccggctgcggcggggtgcggttcgtgccgtgcggcgggtgctccggcagctgcaaggtgttcgtggacgacgaggatggctccggtgccggagcgttcaggcggtgcccggagtgcaacgagaacgggctagtgaaatgcgccgtttgctagattagttttgccatctttttttttttgagagagagtttgtgtggaattttttataaccccatctccatccttgtttgacga

SEQ ID NO: 135024 - DNA, 759 bp, Zea Mays
tcccatacaaataatgcatggaccgacaatacgagcacgtgcatgacagctaaatctccaggttcgttctaacctaatcaattatgttttagagcttacgcttggtgccatggatgttttgatgattaggaaccttggagaggaccaacaaggacttgggagaggccaacatgtcaaggaggagaagctaggacgttcacaacaagagaaagccaagtccgactcaactacgtctccacctcgaagtccaggaccagtctgcactaaaatgaacgcccaggatgcatccaaactccgattaggttgggctttatatggatggaaagataaggagataagctttccaacccaactggaaccaccttaaaattcatccggagtcaacggaaatcgtcgaaacaagtcagagttcagattctgttttggtgctgcgacaccgtttgttgggctgttgggccgtgtatcgtgttggagcccattaggggtgcgaccaggggttgtgcacgcccctaacctctattttaccagcagccaccaccacattagggtttgggttttgcttagatcatatctgtcatcgaacagtatcgccgttcatcggtttgtgagaccacacctcgtgatcaatgcagttttgattgcgttcttcctgttcttgcttgtgttcttgattgcgcttgcagggataagccttcgtggcgaggtcactcgtgtgtcacgggtgataaccaacggagcagtggtgtagtgattgcgagg

SEQ ID NO: 135025 - DNA, 2004 bp, Zea Mays
tcttctccttcctccggccatcgtcctcgctgcaacgcactagatttgtcgacaaacccaaccagaactccataaaatagtgtcgatcaccgcagacacacctccttccctccctctctctctcaaattttttttgcctccgacggcaagcaccacaagcgcaagccctcgcttccttgacctcactctttcgctctcactagctctaacgccgccgtcgactcgacggcgctgccgaacctctactgcgtactgccccacgtcatcacaccaaatcaggttagcagacccacaagaacagttcgtgggtcagcaaatccattcctaggaccgatattcctccagctccctgaacaggaaaaaaacacatctttgtgtgtatttataccatggtctaatcggctatggacgccaccggagatgccggcggaggtcgccgccccaacttccctttgcagcttctggagaagaaggaggaacagccttgctccacgtccccagcagctgctgtgggtgctggggctaatgggtcgggagagatgcagatgaagaaggtggcgccgccgaaacgcacatcgagcaaggaccggcacacgaaggtggacgggcgcgggcggcgcatccggatgccggcaatctgcgcagctcgggtgttccagctgacgagggagctggggcacaggacggacggcgagacaatcgagtggctgctgcagcaggcggagcccgcggtgatcgcggccacgggcaccggcaccatcccggccaacttcacctcgctcaacatttctctccgctcctcgggctcctacttctccatcccagcgcacctccgtgctgccggtttgcccggcccacgcttcagcggcgcgcggggagacccgtgggagcgcgtcgtgggcctcgggttcggcggcgccgagggtcctccatctgctacttcgtctccgctgctgctaagcttccactccggcagcgtcggccttgacgtgtcatcaccgtcgtcgtcgtctgctgccgccaactccgacctgtcgaagaaacggcggtgggagcaagaaatgcagcagcagcagcagcaataccagcagcagatggccgggtacacgcagagccaaatgccaggaaccgtgtggatggtgccgagcagcaacgctcaggccgcagcagcggctggcggaggcggcagcagcaacaacgagtcgatctggacgttcccgccgcaaccaggaagcggcgacggcggcgcggcgcccgtgtaccgcggcgtgccgagtgggctacatttcatgaatttccccgccccgatggcgctgatacccggtgggcagcagctcgggatcggccacgaaaatggcggcagcagcagcggaggcgagggccacatgggggtcctcgccgcgctcaacgcgtaccgggcgcatgccgtcacggtggctgcgccggcggcgcagaacggagcggaaggcggctctagtcagcagcagcagcgtggcggcggcgagcgacaagacagcatgagccccagcgacgacgactcgtaggtcttctcggaggcttgtgctgtgcatgcactggtccgctaaggcgtcgctcctgtttttaatctgcgcttctcttgacttatcgtttgcgttttcttcggtttgcgttattatagccttctctggctccttcacattctatatattgcaagcacagagttcgatttcatggcatctgaaacaaattcactctccaaagttcgttttggtgtgaccaatcgcatcaacagagacgacgacgatggcggggaatccatggaagagaggctttggattttgttagggttcgacgcggccacggcaaaagatggaagagagatcgacatggacacagcagccattgcccaatgttcagccatgcatatgatgatccttcttccgggactagttaggggcccgtgcgttgcaacggtttctatatatcacattgataaaccttgctttaatgagataactgttg

SEQ ID NO: 135026 - DNA, 2600 bp, Zea Mays
aactgccccgctccgatcctgtcgacggcggcggccacctgttcgaaccgcgcgctcctgctgccgtcgcccctcgctgcggcggcgaccttggcatcggccgcggggcgcggcggcggcgggtacacgtccggagcgccgacgacgccgaggtggaagcgaaacagaccccacgctgccgcggcgggctgcgcggacccggtgctgcggcgcgggcgcgccgagcgcagccgcgacgacgggctcggatgcgcgtagaacaggctgctcgacagcgagcgccgcggcggaggcgccccggcgccgtggtcggaggaggcgctcttggacgactggctccggctcacgcacccgctgctgctgctgctcgagctcgagctcgcgctgcggctgccggaccgtgacaccaggcccacggtggaggccactgactccgacctcggtagcgtggcgacgttggcatcgtcggcggccgcaaccgaggaggcgcggagcgggaggagcttgccctagcagaagacctcgtcggccgcgcacatgtccgtccccgcgctctctccggctggtacgatgtcgccggacgacaggatgcagaactcgaagtcgtcggccgagtccgaggcgcgacactctcagatcccgtgctcatcaccatcctgcccctcgctcgccgcccccacctcaccaagagccttagccgtccctagagaagacacggaggtgcagtgccagtgctttcctcaagtgcacctcggattttcggtaccggccagattgggacgaattcaacattcatcggctccaccaaaacactgccactatgatgtgtatgcttgcgtcaggacaggagacccaaaagtacttcacagatgaatgtgacattttccacaagaacgagatacgaaatggccaaggactgctgacgatgatgacgacatggccaccatcgctgccctcaggtaggccatcctccaagagctcaacccccacgcctctgttctaaaggtcctttcctccccacctatatgttttctattgaatccacaatgactagattaggcaaagcttcaccgatgagcttagcatcctactataacatgatgaatgtacacacagatcagtttagaaaactactgaaacttatctgttctattttcaataaagataaatcaacttccccacatcactcatgttcttcttgcagctttgctgcttgctattgtcttagattaattaagccatatttgagcagaccactatgcttttcctgttgcattacttgatccttgcaagttacaatccttttctgcattgatattatgttttttgtggaattttcatgtgctcaatcagaagccaaaatataactttatggctgtaactgcaacagacttatctatactacttattaaggctgtaagggtagccagcctttttgcgttctgcctccaggagatctggatcgtcagttagcctgtgtgaatctgcaccgtccgttcgtgactccctgtccacccacgccgcccccagtccacccacgccgcccccagccttccgcgccgcgcgagcaaccctccctctcagttctccctctgctgcgccgcctcccgcacccccactggcccctcaccgcggtcctccctccgttgccccgcctccccggtagttccttcatccagtccctctcacatctcctgcgatccccacccacaggagccgagcttcctgcccgcttgcttatccgccataggcttcaacacatttgaatccacgctgtgttggcgtgtatcgatgattcggtgacggtgggtgatggaggtgtgtgacctgcgcaaggtgcccgacgcggccgccccgggcgaccctcgaccatgtcgccaatcaggctgctaaccgtttcactgaccatggagcttcaccatcgagagctgggagtttggagaacagaattattggtagtgaagaggttcctaggaggtatgccgtgcctaccaactactctgatttggttcccccacctgcagtagacctgagacgtttgatgccagaaccatttaattggagttctgatgtccgaggcactgcaatatcaggaagtattcctcctgtatcaagaactaataacagttcaacagttaatccaccagcaggattcaatcaccaaaacctcaccagacgccacttgaaatgtccctttttcattttgtttgtgcacttggtaatccctaattcggtctatcatgcttcttaatgcccctacaactcttgaaatgctgaaatgttttttatcatttatttctacatatttttgcactgctaaatcctgcgctatgttatcccttttcttccctagccttgcttgttcttgcaagcattgactactgtgataatcatgtaaggtccgtggttcaatgtcttgtggcaatccatagggttctaacttgtttacttgtcaatagattcggatatgaggccttggaattgaggaatggtggatctgattattttggcaaaggtgttcttaaggttagttaaccaaccaatgtttatatttcagtctgagggtattatactagctttatttgccatgcactcgcatt

SEQ ID NO: 135027 - DNA, 385 bp, Zea Mays
tcccatctccatctcggagcaaaggcaatccagcaagagtcgctcctttcccttttcgggatacagccagcagaagcaatccggctaacaagtttcttcttcttcttctttcctggtaaggctcaccgaagtgacgatggcgtttgcggtctccgacgagctgctgggcaccttcgtgccgattgcggtgtactggctctactcggggctctacgtcgtcctggacgggctggggatggacgactacaggctccaccccaagggggaggaggccaggaacatcgtttccaggtggacggtcgtcaggggcgtccttgttcagcaggcgtttcaaatcgctgtctcccttcttctcttcacggtaattcctctttccagcatctaa

SEQ ID NO: 135028 - DNA, 577 bp, Zea Mays
tttatttattttattatgtagacaaaaaaaaacccatatatatatttgtgttccgagttccaacacatgcatgcatcttttgcaaaccagcaaagccagacacatcagctgcatatcaattaacttttgcaacactgacgaagatacataaacatcacgctagctgctctcacccgctaggtagggtacaccaagcacgtacacacacacacatacatacacgcagctctatctctctagctcccacctgatatgatgaggtctttgaacagagcgagcgagcgagcacacagtagtacagtactctctctctctctcactcactctctcagccagcgtccagcgtacgtacgcgcgaagagttgacctgcaggctgacagtgttgtggatgcgcgtgtgggcgttttaatttagacggtgtcgaactcgtcggcggcgagctggctctgcatgcggcggagcttgaaggaggagagcctctgcgtgtccttggcggcgggggcctcctcgaagcggatgtaggtgtagacccacgccccggagagcgtgccgatgacggggccgaggaagtagatc

SEQ ID NO: 135029 - DNA, 416 bp, Zea Mays
gcaagcgaaggcggtggcggcgacgcgagattctcctctccggcgtcaatctcttccggcggccaccttctccccgattatccctgcaccagttcgagttggagaagacgaacttccaccgtcttgggaccctataccctctcctttagttagcaatggatgttgcactaagagatcaccttagacgtaggagagatgaggaggatgatgatatgatgctgtttttttcctatgctacatatattgggttctagttcaaacatagtaagggagaagaagcgaaggcatacatcaaagttaagtggcgaagaacatgttcatgagttgcttcaaggtcatttgaagaactgtcgggtagcgttcaggatggagcctgaaattttcaaatcgttggcaagttatcttagaagggaggg

SEQ ID NO: 135030 - DNA, 417 bp, Zea Mays
ggactatcctatcatatgtcaatagttcttttccttccaatgtttgcaaaatcacatgtagttttttctatgcagaattgcattggcgcaattgatggcactcatgtgcctatatcgatatcaccagataaagccgctccatttaggaataggaagggaacccttactcaaaatgtaatggtagcgtgtgattttgatctcaatgtaactttcatatccactaggtgggaggggtccgcgacggatgctagagttctcagagctgcaatgaacagtggctttcaagtgcccccggggaagttttatttagtagatggcggttatgccaacacaccatctttccttgccccatatcgcggagtcaggtatcatttgaaggagtatggggcaggtcgccgaagaccacaaaactacaag

SEQ ID NO: 135031 - DNA, 1600 bp, Zea Mays
tctttttctcttttgggggaaattgacatccactcattgttatatggcactatcacagtggtgatatgcagtgggtccgctgtcctaaccacatgcaccatacctctttaaaaccccagcctaatgtgcatcctccagtccaaggccactaggagtttgtaatggagaacaatacccctccaaagactgggacgggcttcttaaaaacttgcttcaatggagttaatgctctctcaggcgttggaatattatctattccatatgcattgtctcaaggaggatggctgagcttacttatcttcttaaccatagcaatcatctgtttctacactggtattctcctacagagatgtatagactcgagttcgcttgttaagacctatcctgatatcggtgagctagcttttgggcggaaaggaaaaatcatagtagcaatattcttgtacctagagctgtatcttgtggctattgatttcttgatattagaaggtgacaacttggagaaattatttccaaatgctaacttccatgctgccgggctgaaggttggaagcaagcaagggtttgtgttgatgttcagtctacttgttttaccaacaacatggcttcagagcttgaacatgcttgcatatgtcgcccttggtggagtcatggcttctgtcattttaatcgcctctgttctgtgggttgggacatttgatggggttggttttcataagaaaggtgtgcctgtggactggtctggtatgccaactgccatgagcttatatgcgttctgcttcagtggccatgctgtttttccgatgatatacactggcatgaggaacagaaaaacgttccccacagtgttactcatctgcttcattatctgcactcttagctatggcctgacaggtgtcattggatacttgatgtttgggaaatcattaagctcccaggtgactctgaaccttccagctaaccattttgcctccaacattgcgatctacacgacgttgatcaatccgtttaccaagttcgcgctgctgatcactccaatagcagaggctatcgaagataaacttcatgtggacaagaataagaccgtcagtatcttaatccggactgcgctggttgtcagcacaaccattgtggcccttgccgtgcccttctttgcctatgttgtcgctcttactggttcgtttctcagcagcacggtcacaattttgctaccatgtgtttgctacctgaagatcagctcacggacctccaggaatctgaggttggagctggtagtttgcttgggtattatcatgattggggtgggattagttttggtcggcacgtatagctcactgaaaaagattgttcatagcttttgatttctgaatgatatatgcaccttgaggccttagttcgtttcatcctttattaaaccatgaagactgaaggggatgattgatgaacaaggcctgagtgggtgtaatgtaaggcagaagaaaccctaggcagatactgtagcaaatgaatcgtagacaagccgatcttgcgatctagaataagtcgcttactgagaagtcaaactcgtgtaaatttaatcaaatatatgtaaaaaattact

SEQ ID NO: 135032 - DNA, 97 bp, Zea Mays
gggctcgctggcttcctcagtccttgctgctcgctagctccgttgttcaggcggtgcctgcgccggcgaggttaggcaggactcaggcgaagtgggc

SEQ ID NO: 135033 - DNA, 2751 bp, Zea Mays
ccaacatctctagtgcagtgcgaaaaaacattaatgagcggccaccttcttccttttacaggataaaatttattcttgtctgcttttttcttctggtaggtaggacactcctacctgcatcaagtttcgttggtacgcttccttgtggttatgaagctttctggatacacctgggaatgtttggttacgttgaagagttgttgaatacaccacatcagggtgacagcacagcaggaatttgttcaactttctgattggattgtggttctaaattgctgttctgaatttatgccatgctttagattgaagatatagtgaatgcaaactccagacacaacttgtcgtaaggttttgaatgatgaagaaatggcatggcggctttgccattgtatctttgttcatcatcttgatgttaagatatgtgatattggataacccacttgtagaaaactcgcttcagtatgttttccagcaaaacaggacggcagaattacattggttggatgttccaaacccacctgcaatccagaatctacagatttcttctgaagtaatatcaactggactcttggcttccaacctttccattaccagaaatctctctgatagagaacttcaatctttacattcttggaatcatttgaaacagctattatctcatgttcatatcctaccagatggagtagaggcaatcaaggaagctggagttgcatggagggaactcaatacagcccttgcatatgatgatgcagtttctgttaatggcagcattcagcagaaggacaaaggaaagcaatgcccttattctatcagaaggatgaatgccacaagattaggggataggtttgctttaaaacttccctgtggactgattcagggctcttcaataactattattggtacacctggtggtcttcttggtaattttaagatagagttaactggggctgcagttcctggtgaaccagaccctccaattgtccttcattataatgtccgccttcttggtgataaactcacagaagatcctgtaatagtccaaaatacatggacaatatctgatgattggggttctgaaaaccgttgcccatctcctgattcagatgctaaggacactacaaaagtggatgatctagaaaaatgtagtagcatggtaggtgaggaccagaaagaaatccttccctctaagtttcattcaaatgtttcggccatgccacctgcaagtaagaagaaagcagaacctagaaagtattttccattcagacagggatatcttgccgtagcaattcttcggatcggagcacatgggatccatatgactgtagatggcaaacatatcacttcttttgcattccgagaggatttggaaccagggtttgtaggtgaagtaagaattgcaggagacattaaattgttatctgtgatagcaagtggcctgcctacaacagaggacttcgagcatgtcactgacttagaaatattgaaggctccacctgtgcccatggataaaccggttgatcttttcattggggtcttctctacagcaaataatttcaaacgccgaatggcagttcgcagaacttggatgcagtatgattctgttcgatcaggaaaagttacagttcgattctttgttggcctgcacaaaaatgagttggtcaatgaggaactctggaatgaagcacgaacatatggagacatccagttgatgccatttgtggattactatagcctgattctttggaagaccatagcgatctgcatctatgggacaaatgtcctgtcagccaactatgtgatgaaaactgatgacgatgcttttgttcgagtagatgaagtactttcttcccttgaccgaactaatgtcaaccatggactgctgtatggtcgtgtcaattctgattcccagccacatcgagatccatatagcaagtggtacataacccctgaggaatggcctgaggagagttatcctccctgggcgcatggaccaggatatattgtttcaaaggacatagctaaagaagtttacaggaaacacaagagtggggagttaaagatgttcaagctggaggatgtcgcaatgggaatatggatcaatgagatgaagaaggatggcttggatgtcaagtatgagaatgatgggaggattttggttgaaggatgcgaggatggctatgtgattgctcattaccaagaaccaagggatatgatgtgcctctgggatcagtttcagaaaacaaaacgaggaacatgttgcaaagaataacagaaatcatgcgaatggtgttttatgttacggtggctgctgttggccgttgcttgaatagacaccttcacgctaaaacgttcttgatgtatacagccctgcctaagaggattctaaaagagctggaactggaaggcaagcaaacaattttttggatatcttcaagtttgtttcgtctgcagtttgaagagtttcaagtcaaactacggcatgggatatgcattgtacacagaatgtagggttacatttgtttttggcataggtaggagggtactgctttgcttactgtgcggcgtgtaaaatagtatcttgctagaatgtaggatacagcgacggcagtttacgttaggatagactgagacagtcttaccagttaccattttttttgaaaggaatgcattttgcatcttgtgtaaagctgtttggtgtccattctcttgtataatcgattcaatgttcatcccacccctgaacttgttttg

SEQ ID NO: 135034 - DNA, 2864 bp, Zea Mays
caatctgttgaaaccgagctcacgggctaggccaactggactcccgacaccgccgacgcaacccaaggatcacccaaaacttccacctcagaccccaaccccctccatggccccataactagagaaacaacaacactacgtccctacgaaacgcaagcaagccatagaaaggatggaacttgcttttctctttttttgaaacatgggattcctgcagtctgctctttaccgtgtccacggcaccatcctccgccgtcgggtgtagccgtctagcctatgcttacctttcagctgagtgaccaaacactgcaccctttcgatcatgcttccttccaaggcacagcccgactgtcagctgtccgctgcccaccgcgtgcgctgcgctcccgtgcggcactgccggcggcgcgaccccgcgcccattggacgagcttccgccccgccccgatcgatcccgccgccatgtcgtcggcggccgtgtcgtcctcttcctccaccttcttcctcgcgctcgcctccgcctcccccgggggccgcaggcgggctagggtcggctcctcgccgttccacaccggcgccagcctgagtttcgcgttctgggcgccaccgtcgccgccgcgcgcgccccgggacgcagcgctggtgcgcgctgaggctgaggccgggggcaaggacgcgccgccggagaggagcggcgacgccgccaggttgccccgcgctcggcgcaatgcggtctccaaacggagggatcctcttcagccggtcggccggtacggctccgcgacgggaaacacggccaggaccggcgccgcgtcctgccagaacgccgcattggcggacgttgagatcaagtccatcgtcgccgcgccgccgacgagcatagtgaagttcccagcgccgggctacaggatgatccttccctctggggacatagcgccggagactgtcctcccagccccgaagccactgcatgaatcgcctgcggtaaactccgtgccgccggtttccattcccaatcctgacaccgatggtattgctgcgcttgctgaaaagaaatatgcacaggttgacggagattcaaatggaattgcacctcctacagttgagccattagtacaggaggccacttgggatttcaagaaatacatcggttttgacgagcctgacgaagcgaaggatgattccagggttggtgcagatgatgctggttcttttgaacattatggggacaatgattctgggcctttggccggggagaatgttatgaacgtgatcgtggtggctgctgaatgttctccatggtgcaaaacaggcaagaacattactcttagcggattctttcagaactgcttttcgtttgagtttgatggagttactgatgttgtggtaccaaggtatggggactatgtggaagcctttgatatgggaatccggaaatactacaaagctgcaggacaggacctagaagtgaactatttccatgcatttattgatggagtcgactttgtgttcattgatgcccctcttttccggcaccgtcaagatgacatatatgggggaagtaggcaggaaatcatgaagcgcatgattttgttttgcaaggttgctgttgagggccgtggtcctgtagatgaattcccgtacatggacttgcctgaacactaccttcaacatttcgagctgtacgatcccgtcggtggcgagcacgccaacatctttgccgcgggtctgaagatggcagaccgggtggtgactgtcagccgcggctacctgtgggagctgaagacagtggaaggcggctggggcctccacgacatcatccgttctaacgactggaagatcaatggcatcgtgaacggcatcgaccaccaggagtggaaccccaaggtggacgtgcacctgcggtcggacggctacaccaactactccctcgagacactcgacgctggaaagcggcagtgcaaggcggccctgcagcgggagctgggcctggaagtgcgcgacgacgtgccgctgctcggcttcatcgggcgtctggatggacagaagggcgtggacatcatcggggacgcgatgccgtggatcgcggggcaggacgtgcagctggtgatgctgggcaccgggcgcgccgacctggaacgaatgctgcagcacttggagcgggagcatcccaacaaggtgcgcgggtgggtcgggttctcggtgcctatggcgcatcgcatcacggcgggcgccgacgtgctggtgatgccctcccgcttcgagccctgcgggctgaaccagctctacgcgatggcatacggcaccgtccctgtggtgcacgccgtgggcgggctcagggacaccgtggcgccgttcgacccgttcagcgacgccgggctcgggtggacttttgaccgcgccgaggccaacaagctgatcgaggcgctcaggcactgcctcgacacgtaccggaactacgaggagagctggaagagtctccaggcgcgcggcatgtcgcaggacctcagctgggaccacgcggctgagctctacgaggacgtccttgtcaaggccaagtaccagtggtgaaccctccgccctccgcatcaatatcttcggtttgatcccattgtacatcgcgcgtttgacggtctcggtgaagaacttcatatgcagtgacgcgccgctggggtcggtagcagtactatgggattgcattgagctgtgtcactatgtgctttcgacaggacagtagtgaaggttgtatgcaagtttattttttttttcattactgatatttggaatgtcaacacaataaatgaagctactatgtgtttcgtaagtataatgttacttatttaggtgatacttcattcaagttc

SEQ ID NO: 135035 - DNA, 2241 bp, Zea Mays
atctcatcagtcatcactcacctcccgcaccgagccaccgacgcgacccaggaaaagcaacgacaacgtctccaaaagctgcaggctgcagctcctgagggccgcaggccgcaccggagaggccgagagggcaggcggacgcggacgcgcgtgcgggaaggcgtgagcaatggccggtacggcggcaatagcctccttagccgcggtggcgggagcatggctcgaccttgacgggtcgacgaccctgcttccgcgccggttgcttccgtcgtcaggcggcgaggcgctgcgggccgcgtgggacgcggcgcgcgcggcggcagtggcgccggcgctggccgccgcgtcgtgggtctgcctggccctgtcggccatgctcctcgccgacgccgtgttcctggccgccgccagccttctgccccggcgggcgccgtgccccattgccggccccaccgccgaggtggacggggacgaggaggaggccggctgcagcgtcggctaccccatggtgctcgtccaaatccccatgtacaacgaacgggaggtgtacaagctatccattgaagcagcatgcgggatgtggtggccgtcggatagggtgatcgtacaggttctcgacgattccacggatccgacggttaaggatttggtggagcttgaatgcaagttttgggctaacaatggaaagaacgtaaaatatgaggtgaggaacaatcggacaggctacaaggcgggtgcgctgaaacaagggatgctctacgagtatgttcaacagtgtgattttgtcgctgtgtttgatgctgatttccaaccagaacctgacttcctcgtgaggaccgtcccatatcttgttcataatccacgaattgctcttgttcaagcacggtgggaatttggaacttgctgactggcatttcgggacggttttgcagttaatcccaaagaattcctgatgacaaggatacaaaagatgacattagattatcacttcaaagtagagcaggaagcaggttcatccacctttggcttctttggttttaacggaactgctggtgtctggagaacttcttctatcaaggaagctgggggctgggaggatcgaaccactgtggaagacatggatttagcagtcagagcaggtctgaaaggatggaaattcatctatgttggggatgttaaggtaaaaagtgaactgccaagcaatctgaaggcatatcgccgccaacaacatcggtggacatgtggggcagcaaatttattccggaagatgggagcggaaattattctgactaaggaggtgtcgctgtggaggaagctgtatctgatctacagcttctttttcattaggaaggttgtcgcccatgtggtacctttcatgctctactgcgtaataattcctttgtctgtgctgattcctgaggtcactgtccctgtatggggggtggtttacatcccaacaacaataacacttctttacgccatcagaaatccaagttctatccacttcataccattctggatcctttttgagaacgtgatgtcttttcaccgaacgaaggcgacattcatcggcttgctcgagctcgggaatgtaaacgagtgggttgtcacggagaagcttggtagaaccaagcctgtgccacaaatgcttgaaaagcctcgctgcaggttttgggacaggtgcaccatatcagagattttagttgccatcttcctcttcttctgtgccacatacaacttggttttaggagacgacttctatttcgtttacatatatttacaggaaatagcatttcttattgttggcaccggtttctgcggtacataacagctaggagtaggactggtccgacagaaaaaattgctcaagttaggtcatgaacttcgatcacctcctaggttgcttctacagctgagaggttctcaatgcggggtcacgtagctcaccattcacagtaaaggatgcgtagcgagctgtttattaggagctagcttggtcgtcattttcatgtttaagttattgtaatctttgtgctgttgagtatgagatctggcacctggacggtccgcacccccaaacggtctgcgagcaggttaattcgagctaaagtcttgatctcttgcagggttatcctaatatctcatgagattttgttggattccatttatgaacgggttaaaacctccctctctatataaagaggtatggccgattaactttgtttattcttaatctttcta

SEQ ID NO: 135036 - DNA, 2193 bp, Zea Mays
atctcatcagtcatcactcacctcccgcaccgagccaccgacgcgacccaggaaaagcaacgacaacgtctccaaaagctgcaggctgcagctcctgagggccgcaggccgcaccggagaggccgagagggcaggcggacgcggacgcgcgtgcgggaaggcgtgagcaatggccggtacggcggcaatagcctccttagccgcggtggcgggagcatggctcgaccttgacgggtcgacgaccctgcttccgcgccggttgcttccgtcgtcaggcggcgaggcgctgcgggccgcgtgggacgcggcgcgcgcggcggcagtggcgccggcgctggccgccgcgtcgtgggtctgcctggccctgtcggccatgctcctcgccgacgccgtgttcctggccgccgccagccttctgccccggcgggcgccgtgccccattgccggccccaccgccgaggtggacggggacgaggaggaggccggctgcagcgtcggctaccccatggtgctcgtccaaatccccatgtacaacgaacgggaggtgtacaagctatccattgaagcagcatgcgggatgtggtggccgtcggatagggtgatcgtacaggttctcgacgattccacggatccgacggttaaggatttggtggagcttgaatgcaagttttgggctaacaatggaaagaacgtaaaatatgaggtgaggaacaatcggacaggctacaaggcgggtgcgctgaaacaagggatgctctacgagtatgttcaacagtgtgattttgtcgctgtgtttgatgctgatttccaaccagaacctgacttcctcgtgaggaccgtcccatatcttgttcataatccacgaattgctcttgttcaagcacggtgggaatttgttaatcccaaagaattcctgatgacaaggatacaaaagatgacattagattatcacttcaaagtagagcaggaagcaggttcatccacctttggcttctttggttttaacggaactgctggtgtctggagaacttcttctatcaaggaagctgggggctgggaggatcgaaccactgtggaagacatggatttagcagtcagagcaggtctgaaaggatggaaattcatctatgttggggatgttaaggtaaaaagtgaactgccaagcaatctgaaggcatatcgccgccaacaacatcggtggacatgtggggcagcaaatttattccggaagatgggagcggaaattattctgactaaggaggtgtcgctgtggaggaagctgtatctgatctacagcttctttttcattaggaaggttgtcgcccatgtggtacctttcatgctctactgcgtaataattcctttgtctgtgctgattcctgaggtcactgtccctgtatggggggtggtttacatcccaacaacaataacacttctttacgccatcagaaatccaagttctatccacttcataccattctggatcctttttgagaacgtgatgtcttttcaccgaacgaaggcgacattcatcggcttgctcgagctcgggaatgtaaacgagtgggttgtcacggagaagcttggtagaaccaagcctgtgccacaaatgcttgaaaagcctcgctgcaggtgcaccatatcagagattttagttgccatcttcctcttcttctgtgccacatacaacttggttttaggagacgacttctatttcgtttacatatatttacaggaaatagcatttcttattgttggcaccggtttctgcggtacataacagctaggagtaggactggtccgacagaaaaaattgctcaagttaggtcatgaacttcgatcacctcctaggttgcttctacagctgagaggttctcaatgcggggtcacgtagctcaccattcacagtaaaggatgcgtagcgagctgtttattaggagctagcttggtcgtcattttcatgtttaagttattgtaatctttgtgctgttgagtatgagatctggcacctggacggtccgcacccccaaacggtctgcgagcaggttaattcgagctaaagtcttgatctcttgcagggttatcctaatatctcatgagattttgttggattccatttatgaacgggttaaaacctccctctctatataaagaggtatggccgattaactttgtttattcttaatctttcta

SEQ ID NO: 135037 - DNA, 3467 bp, Zea Mays
atctcatcagtcatcactcacctcccgcaccgagccaccgacgcgacccaggaaaagcaacgacaacgtctccaaaagctgcaggctgcagctcctgagggccgcaggccgcaccggagaggccgagagggcaggcggacgcggacgcgcgtgcgggaaggcgtgagcaatggccggtacggcggcaatagcctccttagccgcggtggcgggagcatggctcgaccttgacgggtcgacgaccctgcttccgcgccggttgcttccgtcgtcaggcggcgaggcgctgcgggccgcgtgggacgcggcgcgcgcggcggcagtggcgccggcgctggccgccgcgtcgtgggtctgcctggccctgtcggccatgctcctcgccgacgccgtgttcctggccgccgccagccttctgccccggcgggcgccgtgccccattgccggccccaccgccgaggtggacggggacgaggaggaggccggctgcagcgtcggctaccccatggtgctcgtccaaatccccatgtacaacgaacgggaggtgtacaagctatccattgaagcagcatgcgggatgtggtggccgtcggatagggtgatcgtacaggttctcgacgattccacggatccgacggttaaggatttggtggagcttgaatgcaagttttgggctaacaatggaaagaacgtaaaatatgaggtgaggaacaatcggacaggctacaaggcgggtgcgctgaaacaagggatgctctacgagtatgttcaacagtgtgattttgtcgctgtgtttgatgctgatttccaaccagaacctgacttcctcgtgaggaccgtcccatatcttgttcataatccacgaattgctcttgttcaagcacggtgggaatttggaacttgctgactggcatttcgggacggttttgcagttaatcccaaagaattcctgatgacaaggatacaaaagatgacattagattatcacttcaaagtagagcaggaagcaggttcatccacctttggcttctttggttttaacggaactgctggtgtctggagaacttcttctatcaaggaagctgggggctgggaggatcgaaccactgtggaagacatggatttagcagtcagagcaggtctgaaaggatggaaattcatctatgttggggatgttaaggtaaaaagtgaactgccaagcaatctgaaggcatatcgccgccaacaacatcggtggacatgtggggcagcaaatttattccggaagatgggagcggaaattattctgactaaggaggtgtcgctgtggaggaagctgtatctgatctacagcttctttttcattaggaaggttgtcgcccatgtggtacctttcatgctctactgcgtaataattcctttgtctgtgctgattcctgaggtcactgtccctgtatggggggtggtttacatcccaacaacaataacacttctttacgccatcagaaatccaagttctatccacttcataccattctggatcctttttgagaacgtgatgtcttttcaccgaacgaaggcgacattcatcggcttgctcgagctcgggaatgtaaacgagtgggttgtcacggagaagcttggtagaaccaagcctgtgccacaaatgcttgaaaagcctcgctgcaggttttgggacaggtgcaccatatcagagattttagttgccatcttcctcttcttctgtgccacatacaacttggttttaggagacgacttctatttcgtttacatatatttacaggaaatagcatttcttattgttggcaccggtttctgcggtacataacagctaggagtaggactggtccgacagaaaaaattgctcaagttaggtcatgaacttcgatcacctcctaggttgcttctacagctgagaggttctcaatgcggggtcacgtagctcaccattcacagtaaaggatgcgtagcgagctgtttattaggagctagcttggtcgtcattttcatgtttaagttattgtaatctttgtgctgttgagtatgagatctggcacctggacggtccgcacccccaaacggtctgcgagcaggttaattcgagctaaagtcttgatctcttgcagggttatcctaatatctcatgagattttgttggattccatttatgaacgggttaaaacctccctctctatataaagaggtatggccgattaactttgtttattcttaatctttctattctgaattcaattaacgacgagatttagtatcctttcttgtactttcataactcgtgaaatgccgagtaggcacgaattcccccaatttgcgacctaccataggatttgttatgtaaataggtatatgttcttttccattatgaatcgcgattgtatggccaaccattgcgggtagaatgctagatgcccgggaccacgttactattatttctttctcctccttcatattgaccttttcgatttttgccaataaatgacgagctacaaaaggattcgttttttatcgatcttccaaatcagttttactctatttccttatgcattagatctagtagtagttttatccacagtttagccttatagccctaatcttcacctctctttggctctgcatcgtctaaagacactttcggtggcctatcgatcctgaagcaactctacaatttctcctcccaaatagggtcccttccgaaaggtgagatctaggttctacacgaagccctctacacgcataacggacagtccaccgcgcgcctacacgtaacacgtggacggtccgtgctgctgcagagaggactccaagtaggggcggacccaagagggctctaggtggaccatggcacaccctaagccaggcccaccaaaaccacacctcggccacatttgcttgagaatccatactcacccacaacgtcgacacgacgccaaactcccatggaggcaccatgaccaaacgagctcccgcccacgagtgtgcctcagtgaaagggaaatgtgcccttgggccatttctataaatgttttggtgattagatgcccaacacatattgttttagttcatatgtgctaagtggttgagaagtgcaaatcaagaatcaaggtatgtttctagccctagtaaattgtttttgatactaacatatctctctaagtgctagggacactgccaagaaaagtggaaatgaattggagaagttttggctgagttcggccaaaccagcaccagcctgtggtgcaccggacagtgtccggtgcccagactggcccaggaacgaactcgtcgctctcgggaaaaagcgaaggcgccacggctaaaaatcaccggactgtccggtgtgcaccggactgtccggtgagtcaacggcgcccgcggccaacggtcggcagcgcaatcagcgggcgacgcgtggcccgcgccaacggtcagatggtcacaccggactg

SEQ ID NO: 135038 - DNA, 1570 bp, Zea Mays
cctaaaaaaaggtcgctccgctgaactgccctctgcgcctcataatcgaaaaggaccaaagccacgtttcctcctcaacaaaaaccctcgcaaaaatctgggatctatctagaagcatcactcaacaaaccctaggttgcctgatcggttgatcgctccatggcgatcatctccgacttcaaggacgacgaggcaccggagcagcagctggcggccggccacggcgtcgaggtggccctcgtggcggcgttggagaggagcggcggcgcgctccccttcctacaggcggctatggatgtcgcccaccgcaggtccggcctgttccgcgacccttcggcggtgagcaaggtcaccgcgatggcggcggccgtcagggcgcagatcgaagccgaggagagggtgaccagggaggcggaggccaagaggaaggcggaggaggacgagaggaaggcggaggccgaggcgcagagggctgccaaggaggcggtaatggcgacggcagaggagaagccagagagcacggtggagaaggacagcatggaggtggataagaaggaggaagccaacgtgagacaaccaaatgctggcaatggtcttgacttggagaagtactcgtggactcaacagttgccagaggttaacatcaccattcctgttcctcaaggaacaaaatcaagatttgtggtatttgatttaaagaagaaccatctgaaggttggtctgaagggccagccacctatcattgatggcgagctctataagccagttaaggttgatgactgcttctggagcatagaggatgggagaaccctgtccatattgcttacaaagcatgaccaaatggaatggtggaagtctgttataaagggtgatcctgaagttgatacccaaaaggtggaacctgagaacagtaaactctctgatttggatcctgagactagacaaaccgtggaaaagatgatgtttgaccagcgccagaagcagatgggccttccaacaagtgatgaaatgcaaaagcaagaaattctcaagaagttcatgtctgagcacccggagatggacttctctagagcgaaattagattgaggatgtgtttggccgtttgtctgaatgcgttattagtatgaaacattttttgatcagtttgcatgtaatgcgtcagaaatatctggagatagacttctctagagcgaaaatagcttgaggatgtgttcggccagttatttctaccagtgtgcattggttgtctgagtgcgttattagtatgaaacaaaaattttgatcagttcgcgtgtaatcgtcagaaatatccggagatggacttctctagagcgaaaatagcttgaggatgtgttgggccagctatttctacagtgtgcgttaggttgtctgagtacgttatcagtatgaaacgaattttgaacagtctcttgtaatgcgtcagaaatatttttttagaactgtggcatgtcttgaaccaatacgatggctggattatgtcgattttttttgtgcaatctgtgctgcttattatgcttgttaagtgaaattccactgtttgtgtgctcac

SEQ ID NO: 135039 - DNA, 567 bp, Zea Mays
atggacgctgctggcggaggcaccgtggtagtgggtggcctcgatgatgcggacatcggcttcttctcccgccgcaagcaccgctgctgcggctgtttctggacctcatcgtccccgcacgcgcggcgcgcgagcggaggcgccgacgaggggtggtggcacgacgtcagggaagggggaagcggagcagtgtcaggcaggcgtcggtggtggcggcgcggggtggacgcgctcatgaaggtgcgggagtggtcagagctgatggccggcccacggtggaagaccttcatccgccggttccgccgtggcagctcgcgccacggggccaacggcgggggcaaactcaactacgacccgctcagctacgcactcaatttcgacgagggacacggagccgccaaccccgaggacggcgactaccagggctacgaccgcgacatctctacgcgcttcgtagcgccgctgcctgggtcggccaagtcgtcgtccatggacctcggcggccgcgacgcgccgccgctgttcctccaccacccgcagtccccacgcgcgcctaccgggggctga

SEQ ID NO: 135040 - DNA, 2129 bp, Zea Mays
gcgctctcttcgggttcggacccgaccgcacgcggttcaacgagttgtgccgaggcaaaaccctagctcacctccatggatagccacggccacgtctctggcggcaagcgcaagggcaagcgcgcccgcaagccggagccgccggtactcgcctctcccgacaacagccacgaccacaagcaccacgacaccgcaccatcctcctcgcccctctccaccgccgccgtcgcggcgtcagactccccggaccccgagccggcgtcatcctccccagctccccgccgccggggccgcaagtcccgccgcatccgcaacgggacccactccgaggtcgatgccgccccctcaccctcgcctccgccgcgtcggggcgggcctaagggggcgccgaacggtgcggtggacgttgcggagccgtctcggcgggagctggcggttaagatggtggaggttcccgcggcggtggagcccctgcgttgggaccaggtggtgaaggtggtgccgtcgatggacgccgtggtgaaggtgttctgcgtccacacggagcccaacttctccctgccgtggcagcggaagaggcagtacagctcgagcagcagcgggttcatcattgggggccgtagggtgctcactaacgcccactcggttgagcattacacccaggtcaagctcaagaagcgtggctcggacaccaagtaccttgcgactgtccttgccataggcaccgagtgtgacattgcaatgttgaccgttgaggatgatgaattctggaaaggcgtttcacctgtagagtttgggtcgctgccagcacttcaggatgccgtcactgttgttggttacccaattggaggcgatactatctcggtgactagtggtgtagtttctaggatagaaatactttcatatgttcatggttctacagagcttcttgggttacagatagatgcagctataaattcaggaaattcaggggggcctgctttcaatgataagggaaaatgtgttggtatagctttccaatctcttaaacatgaagatgcagagaacataggctatgttatacccaccccagttattaaccacttcattgaagattacaaaaaatctggagaatacacaggtttccctatacttggaatagaatggcaaaaaatggaaaatcctgatctccgcaaggcaatgggaatgaaagctaaccaaaagggtgttcggatacgaagggttgagccaactgctcctgaatctggatgtctcgaaccttctgatatcatccttagctttgatggtattgatattgccaatgatggtacagttccttttaggcatggtgaacgcattggatttacctaccttgtttctcaaaagtacactggtgagaaggcacgcgtgaaagtacttcgcaactcaaaaatccatgaatttaacataaagctagcaacccacaaaagactcattccagctcatatcaagggaaggccgccgtcatattacattgttgctggctttgtttttatggctgtgtctgttccatatcttcgatctgagtatggaaaagaatatgaatacgatgcccccgtgaagttgttggacaagcatttgcatgcaatggcacaatcatctgatgagcagcttgtggtggtgtcacaggtgcttgtggctgatataaacattggttacgaagatatagtcaacattcaggttcttgccttcaatggcacaccggttaaaaatttgaagcacctagcgaccatggtggaagagtgcaatgaagcattcttgaagtttgatctggacttcgatcaggtggttgtcctggagacgaaaactgcaaaggctgcaactcaagatattctgacaacacattgtataccttcggctgcctcagaagagctgaagagctgaggaaagctaggtgttgtctgtcggctggtgagattctgcatgtcgaagagtggaagctggaatgtaacctagttgtaccaaagagtgcctagcaagtatcacatacacacaaaatgcatactgatgactgaatgtcgcattgagccacccgggtcagttgtaggataggtaaaaaaacaaaacaaagttttgcccatattccattaatctagttgacatcaacgaaa

SEQ ID NO: 135041 - DNA, 1827 bp, Zea Mays
gggttcggacccgaccgcacgcggttcaacgagttggtttctggtttctctccttctagcaccactgccgagtgccgaggcaaaaccctagctcacctccatggatagccacggccacgtctctggcggcaagcgcaagggcaagcgcgcccgcaagccggagccgccggtactcgcctctcccgacaacagccacgaccacaagcaccacgacaccgcaccatcctcctcgcccctctccaccgccgccgtcgcggcgtcagactccccggaccccgagccggcgtcatcctccccagctccccgccgccggggccgcaagtcccgccgcatccgcaacgggacccactccgaggtcgatgccgccccctcaccctcgcctccgccgcgtcggggcgggcctaagggggcgccgaacggtgcggtggacgttgcggagccgtctcggcgggagctggcggttaagatggtggaggttcccgcggcggtggagcccctgcgttgggaccaggtggtgaaggtggtgccgtcgatggacgccgtggtgaaggtgttctgcgtccacacggagcccaacttctccctgccgtggcagcggaagaggcagtacagctcgagcagcagcgggttcatcattgggggccgtagggtgctcactaacgcccactcggttgagcattacacccaggtcaagctcaagaagcgtggctcggacaccaagtaccttgcgactgtccttgccataggcaccgagtgtgacattgcaatgttgaccgttgaggatgatgaattctggaaaggcgtttcacctgtagagtttgggtcgctgccagcacttcaggatgccgtcactgttgttggttacccaattggaggcgatactatctcggtgactagtggtgtagtttctaggatagaaatactttcatatgttcatggttctacagagcttcttgggttacagatagatgcagctataaattcaggaaattcaggggggcctgctttcaatgataagggaaaatgtgttggtatagctttccaatctcttaaacatgaagatgcagagaacataggctatgttatacccaccccagttattaaccacttcattgaagattacaaaaaatctggagaatacacaggtttccctatacttggaatagaatggcaaaaaatggaaaatcctgatctccgcaaggcaatgggaatgaaagctaaccaaaagggtgttcggatacgaagggttgagccaactgctcctgaatctggatgtctcgaaccttctgatatcatccttagctttgatggtattgatattgccaatgatggtacagttccttttaggcatggtgaacgcattggatttacctaccttgtttctcaaaagtacactggtgagaaggcacgcgtgaaagtacttcgcaactcaaaaatccatgaatttaacataaagctagcaacccacaaaagactcattccagctcatatcaagggaaggccgccgtcatattacattgttgctggctttgtttttatggctgtgtctgttccatatcttcgatctgagtatggaaaagaatatgaatacgatgcccccgtgaagttgttggacaagcatttgcatgcaatggcacaatcatctgatgagcagcttgtggtggtgtcacaggtgcttgtggctgatataaacattggttacgaagatatagtcaacattcagaatcacataccatgcaagggatattgctaccaaagtgcaattacttagcggtagtacttacatgagaaaatttactccaattacgcttgcatccagatgcagcg

SEQ ID NO: 135042 - DNA, 2205 bp, Zea Mays
caccactgccgagtgccgaggcaaaaccctagctcacctccatggatagccacggccacgtctctggcggcaagcgcaagggcaagcgcgcccgcaagccggagccgccggtactcgcctctcccgacaacagccacgaccacaagcaccacgacaccgcaccatcctcctcgcccctctccaccgccgccgtcgcggcgtcagactccccggaccccgagccggcgtcatcctccccagctccccgccgccggggccgcaagtcccgccgcatccgcaacgggacccactccgaggtcgatgccgccccctcaccctcgcctccgccgcgtcggggcgggcctaagggggcgccgaacggtgcggtggacatggtggaggttcccgcggcggtggagcccctgcgttgggaccaggtggtgaaggtggtgccgtcgatggacgccgtggtgaaggtgttctgcgtccacacggagcccaacttctccctgccgtggcagcggaagaggcagtacagctcgagcagcagcgggttcatcattgggggccgtagggtgctcactaacgcccactcggttgagcattacacccaggtcaagctcaagaagcgtggctcggacaccaagtaccttgcgactgtccttgccataggcaccgagtgtgacattgcaatgttgaccgttgaggatgatgaattctggaaaggcgtttcacctgtagagtttgggtcgctgccagcacttcaggatgccgtcactgttgttggttacccaattggaggcgatactatctcggtgactagtggtgtagtttctaggatagaaatactttcatatgttcatggttctacagagcttcttgggttacagatagatgcagctataaattcaggaaattcaggggggcctgctttcaatgataagggaaaatgtgttggtatagctttccaatctcttaaacatgaagatgcagagaacataggctatgttatacccaccccagttattaaccacttcattgaagattacaaaaaatctggagaatacacaggtttccctatacttggaatagaatggcaaaaaatggaaaatcctgatctccgcaaggcaatgggaatgaaagctaaccaaaagggtgttcggatacgaagggttgagccaactgctcctgaatctggatgtctcgaaccttctgatatcatccttagctttgatggtattgatattgccaatgatggtacagttccttttaggcatggtgaacgcattggatttacctaccttgtttctcaaaagtacactggtgagaaggcacgcgtgaaagtacttcgcaactcaaaaatccatgaatttaacataaagctagcaacccacaaaagactcattccagctcatatcaagggaaggccgccgtcatattacattgttgctggctttgtttttatggctgtgtctgttccatatcttcgatctgagtatggaaaagaatatgaatacgatgcccccgtgaagttgttggacaagcatttgcatgcaatggcacaatcatctgatgagcagcttgtggtggtgtcacaggtgcttgtggctgatataaacattggttacgaagatatagtcaacattcaggttcttgccttcaatggcacaccggttaaaaatttgaagcacctagcgaccatggtggaagagtgcaatgaagcattcttgaagtttgatctggacttcgatcaggtggttgtcctggagacgaaaactgcaaaggctgcaactcaagatattctgacaacacattgtataccttcggctgcctcagaagagctgaagagctgaggaaagctaggtgttgtctgtcggctggtactgccaaaagatcctactgcccttctggaactaggacggttaatacatctccccttccgcgagaagtgctgaaagagttccattgcaggtgagattctgcatgtcgaagagtggaagctggaatgtaacctagttgtaccaaagagtgcctagcaagtatcacatacacacaaaatgcatactgatgactgaatgtcgcattgagccacccgggtcagttgtaggataggtaaaaaaacaaaacaaagttttgcccatattccattaatctagttgacatcaacgaaatcatcatgagtaactttgcgtatccctatttgccatgattggtctgatgacactt

SEQ ID NO: 135043 - DNA, 1621 bp, Zea Mays
agataaacatgttttatcttgattaaatcaatccacagggggattgggattttatgttttagctgagtagtgtgcccacctcccatgcagttttctttacaatttgttgactttgacactgagggtcaccgtagtcataactatttgaatccaatcacaacatttcttgttaaggcattcaaacaaaaaaaaatctcaattatcttgtcataggccttcttgaagtttacctttaggactagaccatctctcttcttaattctagtatcatggagtatttcgtgcaaagccattaccctatgatttgtttcaattattttaaaagcttctaagtacgtttttaggtgcttttcacatttctctcgaggtggtttgcattgaatattttcctgggacaagggaacttcacttaacaatgttggaatttgtaaatttgatactttctcatccagttgaaacttaccttttcatgctactcagttatatccagtgaggaaaattgatttgatctcttgctctctcactgcttggtcatccagttccttttaggcatggtgaacgcattggatttacctaccttgtttctcaaaagtacactggtgagaaggcacgcgtgaaagtacttcgcaactcaaaaatccatgaatttaacataaagctagcaacccacaaaagactcattccagctcatatcaagggaaggccgccgtcatattacattgttgctggctttgtttttatggctgtgtctgttccatatcttcgatctgagtatggaaaagaatatgaatacgatgcccccgtgaagttgttggacaagcatttgcatgcaatggcacaatcatctgatgagcagcttgtggtggtgtcacaggtgcttgtggctgatataaacattggttacgaagatatagtcaacattcaggttcttgccttcaatggcacaccggttaaaaatttgaagcacctagcgaccatggtggaagagtgcaatgaagcattcttgaagtttgatctggacttcgatcaggtggttgtcctggagacgaaaactgcaaaggctgcaactcaagatattctgacaacacattgtataccttcggctgcctcagaagagctgaagagctgaggaaagctaggtgttgtctgtcggctggtactgccaaaagatcctactgcccttctggaactaggacggttaatacatctccccttccgcgagaagtgctgaaagagttccattgcaggtgagattctgcatgtcgaagagtggaagctggaatgtaacctagttgtaccaaagagtgcctagcaagtatcacatacacacaaaatgcatactgatgactgaatgtcgcattgagccacccgggtcagttgtaggataggtaaaaaaacaaaacaaagttttgcccatattccattaatctagttgacatcaacgaaatcatcatgagtaactttgcgtatccctatttgccatgattggtctgatgacacttctgctttagacatctgtggtccggttgccaagagcatgccactactttgttgtggagtactctagttcatcgaagaaaacaatcgtatctggatggcttttgcatcagttttctgtgtc

SEQ ID NO: 135044 - DNA, 1921 bp, Zea Mays
gacctcaaccatccaaagcagtttcggtgtctccgcactgcagtaggtgcagactgcagactttcatcactcgatcgccaggtgatgagctcataaggaaaaagcaaaagcatcaagcaagcaagtgttaaccacgaacgatgtataaacgcaggcatgtcagtttggtgagctgctagcgcgattgccacacccaccttgtcagaattcggcttaccagaagtggccagaaacaaactaataataatatagtcgaagccaaaacgcccacgaatcacatcacatccttcaaaatctaagctggtatgcttcgacgacagtctgccgagccgtgatcgaagtcgaacagcagaccaacgtgttagacataatggtgccacttcccacctctccgtcctcaagcagcgcgtccagctcgagcccgagacagctgcacagcagcagcagcggcgagtggcacgccgtggtgcggcggaacgtcaagtcctcgctgctgctgctcctggtgctctccaccgtcttcgtcttctccgtcctgcactcgtcgcacggcttcggcgcaacgacgcctgaccagcaagcgctgacgcagacgcagacgcagacgcagacgcagagcacggaccatggagccgtcgatcgttttgtgccgggagaggaggaaggcgtccctgccgagaacaatgaggcgtcggaacagagctcagacatctcgttgccatcagccaacacgtcggctgttcctgctcctgcgtcgagcagagcagagcagacaggttattcggtaggagcggcggcgcatgcggaggagaaatgcgacatgtctgtggggaaatgggtgagggagccgcggggccctgtgtacacgaacctgacgtgcccgacgctgccggacttcaagaactgccacaagtacggcaaggaccccgggcacctcttctggcggtggcagcccgacggctgcgacctgccgcggttcgagccggagcgcttcctggacgtcgcccgcgggaagaggatggcgttcatcggcgactcgctcgcgcgcaaccagatggactccctgctctgcctcctctcgcaggccgaggcgcccacggacgtgtaccgcgacgccttcgacaagttccggacgtggcacttcccggcgcacgacttcacgctcatggcgatgtggacggagttctacgcgcgcggcgagccggtgctcgacgccggcggcaagcccaccgcctccttcgacatccacctcgacaggctcaacgccaactggaccagccgcctgccggggctggactacgcggtcatctccggcggcaactggttcttccgcgtcaactacctgtgggaggacggccgccggatcggctgcgtcaactgccgcaagcccggcctcgcggacctgggcatcgcctacgccgtccgccgcgtcgtccgcgcggcgctcgaggccgtcgcccggtgccgggactgcaaggacagcctcgtcaccttcgtgcgcacctacacgcccgaccacttcgagcacggttcctggttcagtggcggctactgcaacaggacgcggccgctggaggaaggcgacctcgatccgaggagcatcgggtgggagctgaggagggtgcagagccaagaggtggcgagggtgagggagaccagcggcagcaccaagtttgagctgctggacgtcaccaaggcgatgatgctgcgcgccgacggccacccgggctggcactacgacaaacgctgggtcaggaacgccagcgactgcctgcactggtgcctgcccggccctgtcgacacgtggaacgacatgctgctccggaggctcacacaaatctcgcctcagccgctgctgcgttgacgacagtggcatggcaggttttattcgagcttgcatactgaatatttttcttaaaaa

SEQ ID NO: 135045 - DNA, 1849 bp, Zea Mays
gacctcaaccatccaaagcagtttcggtgtctccgcactgcagtaggtgcagactgcagactttcatcactcgatcgccaggtgatgagctcataaggaaaaagcaaaagcatcaagcaagcaagtgttaaccacgaacgatgtataaacgcaggcatgtcagtttggtgagctgctagcgcgattgccacacccaccttgtcagaattcggcttaccagaagtggccagaaacaaactaataataatatagtcgaagccaaaacgcccacgaatcacatcacatccttcaaaatctaagctggtatgcttcgacgacagtctgccgagccgtgatcgaagtcgaacagcagaccaacgtgttagacataatggtgccacttcccacctctccgtcctcaagcagcgcgtccagctcgagcccgagacagctgcacagcagcagcagcggcgagtggcacgccgtggtgcggcggaacgtcaagtcctcgctgctgctgctcctggtgctctccaccgtcttcgtcttctccgtcctgcactcgtcgcacggcttcggcgcaacgacgcctgaccagcaagcgctgacgcagacgcagacgcagacgcagacgcagagcacggaccatggagccgtcgatcgttttgtgccgggagaggaggaaggcgtccctgccgagaacaatgaggcgtcggaacagagctcagacatctcgttgccatcagccaacacgtcggctgttcctgctcctgcgtcgagcagagcagagcagacaggttattcggtaggagcggcggcgcatgcggaggagaaatgcgacatgtctgtggggaaatgggtgagggagccgcggggccctgtgtacacgaacctgacgtgcccgacgctgccggacttcaagaactgccacaagtacggcaaggaccccgggcacctcttctggcggtggcagcccgacggctgcgacctgccgcggttcgagccggagcgcttcctggacgtcgcccgcgggaagaggatggcgttcatcggcgactcgctcgccttcgacaagttccggacgtggcacttcccggcgcacgacttcacgctcatggcgatgtggacggagttctacgcgcgcggcgagccggtgctcgacgccggcggcaagcccaccgcctccttcgacatccacctcgacaggctcaacgccaactggaccagccgcctgccggggctggactacgcggtcatctccggcggcaactggttcttccgcgtcaactacctgtgggaggacggccgccggatcggctgcgtcaactgccgcaagcccggcctcgcggacctgggcatcgcctacgccgtccgccgcgtcgtccgcgcggcgctcgaggccgtcgcccggtgccgggactgcaaggacagcctcgtcaccttcgtgcgcacctacacgcccgaccacttcgagcacggttcctggttcagtggcggctactgcaacaggacgcggccgctggaggaaggcgacctcgatccgaggagcatcgggtgggagctgaggagggtgcagagccaagaggtggcgagggtgagggagaccagcggcagcaccaagtttgagctgctggacgtcaccaaggcgatgatgctgcgcgccgacggccacccgggctggcactacgacaaacgctgggtcaggaacgccagcgactgcctgcactggtgcctgcccggccctgtcgacacgtggaacgacatgctgctccggaggctcacacaaatctcgcctcagccgctgctgcgttgacgacagtggcatggcaggttttattcgagcttgcatactgaatatttttcttaaaaa

SEQ ID NO: 135046 - DNA, 308 bp, Zea Mays
gtcggttgcccgtacgttgcgacggcttacaacaatatccacgtaaactatctaccaaaaattttcaagattttttattgattgtctccgctctccgtataatattttttgatttggctaactgatgttattgtttactccatgcaatatgtcatggtacaacacgaacaataaagtgagctattagaagagagttcacaacgactgactgaacgaacagagattataaaatgacataattccaccataaagagaccaatggaaagtttgtgagctcaagtttctaaaataagtaacatgaactcaaa

SEQ ID NO: 135047 - DNA, 1451 bp, Zea Mays
gcttgtgccagttacttgtgagagaagagatgggaggagcgtacctgcagccaccggatccacacagccacagccacaaggcgtcgagcaaaaaacctggctgtttcctgtccaaaactacctgcgcttggctcgcctgtggtttcctctccttggctctgctccacctcctctgctgctcccccgccggcagtcaacgagcggcgctctctcctctgctccagtacatcaacaacacgtactccttcgtttcaacagttccaggtcctggtcctccggtggaagtggaagaggaagagaggagcagctgcaactacgcggtagggaagtgggtgtgggcgccgggccacgcgcggcggtacaacgcgaccgagtgcaacgtgaaggagagccacgactgcatccgcaacgggcgtcccgacacggggtacctcgactggcggtggcagcctgccgacgggtgcccgctgccggcgttcgacgcggcggcgttcctctcggccgtgcgcggcaagcacgtggccttcgtcggcgactccatggcgcggaaccaggcgcagtccctcatctgcctcctcagcgccgcgttcccgtaccgcctgctgtaccgggactccggcccgggcccgcgcaagcacaacttctggcggtacgcgttcccggcgtacgacgtcaaggtgtccttctactggacgccgttcctgctcagggccacgggcaagtcggaggacgagagcgtcagggacaaccacgtgcacctcgacgcgctcggcgaccggtgggcggccgacgccgacacgatcgacgtggcggtgctcgccgccgcgcactggctgctcaacggggccatctactacaacggcagccggatggtgggcgcccacgggtacccggagctcaacgtcaccggcgtcggctacgcgtggccgctgcgcgtggcgtaccgggcggcggtggaccggctgagcgccgccggcggccgcccgcggaccgtggtgctggccacgttctcgccgtcccacttcgagggcaaaccgaccaacgaccccacggcgtgcgccaagacggagccgtacaaggacggggagagcgacatggagtggatgtacagggaggtgcgggacgtcgtctacgacgaggcgaacgccgcgagggcgagggcgacgagcggtaacggcagcagcgccagcgcgacgagggtcgaggtgctcgacgtgtcgaagctggcgtccatgcggccggacggtcaccctggcctgtacatgcacgaccacccgttcgccaacggtgcgccgccggaggggatgtactccgactgcctccacttctgtctgcccggcccggtcgacaccttcaacgagatactgttgcagatcctgaggaagaggcggtgaaaatacagacagtgaatctgtctggactgtcagcttgcttgtttttttttatcgtgg

SEQ ID NO: 135048 - DNA, 647 bp, Zea Mays
gggtcagtgtctcccacgaattgccaaaacaccagagaacgctcccccgagtcgcgaccccgggcaggtttccccacggacagggcatccgaccgcgacgaatctctggcctctcaccgccgccgtgacgaatctctggcctcccactgccgccgcaacgtccagctctgctctgctccgacgtccagctctggcttgtcgtcctccgcgcgtactccgcgctactggatctctggcttgctcgtacgggatctctagcgcgtacaggatcgcatgacatccactgctcgtcctccgcgctattggatctatggcttgccgtcctcagcgcgtcgtccccatctctggcttgagtgtgttaagtggaagcaacacatgaagcggatatggagaaggaagctggcatgaaactaaaacgcattaagttgacatgtggcgtgcatgttttagatgtcttattctactgccaaacttcctaatactccatttttatattataatgtctatctgtacgtgtgaatggagataatgatattatgtgatgtgatgatggatggattagcttcgttgaatattacatgatattatgtgatggtgatattaagtggacattgcagtgttgatacatgcttcatatttctggattt

SEQ ID NO: 135049 - DNA, 1173 bp, Zea Mays
agccccagccatagatgcaccaccgctcgtgcacgctacccgccacgctccatggttttagggcagagggaacggtgagccaaaaaaaaaactgatgcgcgcaagggctcggtcgggccaatcgacaccgctggacctcgcgatccatccgtgcagcgccgtctcggtcagtggctagtgccgcaccccacccacgcccaccgccgcttcataaatcataacccgctcgcggccgccgccacctgcctccttctcctccctgggctgggctggactgcacacccacaggcggcagaggaccaaaggagggccgccggtcgatcgaggatgggcaactgccaggcggcggaggcggcgacggtggtgatggtgcagcacccgggcggccgcgtcgagcgcctctactgggccaccagcgccgccgaggtcatgcgcgccaacccgggccactacgtagcgctcgtcacgcaccgcgcggatgccgacgacgagaagcggtcccagcagcagcagcacaggcgcgccacgcgggtgaagctgctcaagccccgggacacgctggtgctcggccaggcgtaccgcctcatcaccgtcgccgaggtcaccaaggcgctgcaggccaagaaggaggaaaagacgcggagggcgcagcagcagctgcagcacgtggtggtagttcagcggaagcacgccggcgggaggacgggctccggagacgacgacgacgactgccttgaccaggagaaggacggcgccggccaaccacggagcggcagcggcagcggctcgagctcggcagcggcgcactctggcgcgaggcagcatcgccattggcgcccttctctccacagcatcgccgaagtcagcagctgatgtgacgagtccttggccggtgggtgaatatatgggctggctgctgcatctgtccctagagtcggatgatgagacgatcggccggtctgggcgcctcagactctcagtacaaaacagacgattaagtagtcccacagggcccctagttagaatcagcccatgtaatataagaagtgacagatcggttgggagctgggacacactaaggtaatgatgtttggttcacgtgttgttatgggaaacggtaacgagatctcttacgagtggtaatgtttataaggcaaccgttgagcatcaaaa

SEQ ID NO: 135050 - DNA, 249 bp, Zea Mays
atgccgctgccatggaactcactgctcggccgcgccctggccatgctccctgcgcttgccagccgtgcacatctccctctatgcgcgcgcgcctgcgtcctgcgccgcgaacctcgccgtggagttcccgacgctctgcccagccccagcacttggcttccatcccagccgcgccctgctcggcttctctggtgccggccgccgttccaagtcgctgttccagccgatctcattactcgttgctcctga

SEQ ID NO: 135051 - DNA, 2663 bp, Zea Mays
cccatagttgtggctttgtgtgaaatacaagctggaacggccacccaagcgaggtcaccgaatctcgttccctcaagtttcaagtcctgccgtcctggctccatcgctgccgccggatgatccgcagccgcagcctcctcccaaccttctcacaaatcaatggtctgctcagccgtaacctggctgccaacgaggcgctgcagtggctggacgacgaactcgcgtcgctcgcgctccccaagctcgactcctacgcgtgcgcaaggttccttcagcgctgcatcgctcgtggtgacgcccgcgccggtcgcgccgtgcacgcgcgcgtcgtgcagcgcggaggggtggcgcagctggacaccttctgcgccaacgtcctgctcaacttctacgcgaagctcggtccactagccaccgcgcgtaggttgttcgacggaatgccagagcggaatagggtgtccttcgtcacgctcatgcagggctacgctctgcgtggggagtttgaggaggcgctggagctgttccgaaggctgcagagggaaggccacgaggtgaaccatttcgtgctcaccacgatcctgaaggtgctggtcaccatggatgctcctgggcttgcctgcggcatccacgcctgtgcgtgcaagttgggccacgacaggaacgcctttgtggggacagcactgattgatgcctactcgctttgtggggccgtctgtcatgcgaggtgcgtgttcgacgggatcgtcgggaaggatgctgtcacttggacagctatggtttcttgctactctgagaatgacattccagagtatgcacttaatactttctccaaaatgaggatgacaggttttaagcctaatccttttgtgcttaccagtgcgctcaaggccgcagtttgcctgtcatctgccttgctaggcaagggcatccatggttgctcagtcaaaacactctatgatactgaacctcatgttggtggtgccttgcttgacatgtatgccaaatgtggagacattgaggatgcccacgccatttttgagatgattccccatgatgatgtcatactctggagctttctgatctcccgttatgctcagagctgtcagaatgaacaggcatttgagatgttcctcagaatgatgcggtctttcgttgtgcctaacgagtttagtttgtccggtgttctccaggcttgtgctaatattgcctttttggagctgggcgagcaaattcataaccttgctataaagttaggctatgagtctgaattatttgttggcaatgcactcatggatatgtatgcgaaatgcagaaatatggaaaattcgcttgagatcttctcgtcattacaggatgccaatgaggtgagctggaacacaattattgttggctactgtcagtctggttttgcagaagatgctttgagtgtgttccatgaaatgcgtgctgcacatatgctctcaactcaagttacattctctagtgtgctccgggcttgtgcaaatacatcatccatcaaacatgctgtccaaattcacagcttgattgaaaaatccacattcaataatgacacaatcgtttgcaattcactgattgatacatatgccaagtgtggattcattagggacgctttgaaggtatttgaatctatagtggaatgcgatgtggtttcatggaattccataatctcagcatatgctctccatggacgagccacaaatgctttggaacttttcgacaggatgaataaaagtgatattaaagcaaatgatgtcacctttgtgtctctcctgtctgtctgcggtagcacaggcttagtcaatcaaggactctggctgtttaactctatgatgatggatcatagaatcaaaccatctatggagcattacacgtgcattgttaggcttctgggacgtgctggccgtctaactgacgctctaaagtttattggggatattccttcaacaccatctcctatggtttggcgagccttacttagctcatgtgtagtccataagaatgtagctctgggaagatatgctgcagagaaggtgcttgacattgaaccacatgatgagaccacctatgtcttactgtcaaatatgtatgctgcagctggaattttggatgaagttgctctttggaggaaatcaatgagaaacgtcggtgtaaagaaagaggctggccttagttgggttgagatcaagggggaagttcatgccttttcagtgggatcagcagaccatccagatatgcggataataaatgcaatgctggaatggttaaacctgaaggctagtagagaaggttatgttccagacataaacgtagtgttgcatgacgtggatgaggaagaaaaagctcgcatgctatgggtgcatagtgagaggctggctttagcatatggcctttctatgacacctcctggccatccaatacggataatgaagaatttgcgttcctgcttggactgccataccatgtttaaagttatatctaaaatagttcaacgggaaatcattgttagagatatcaatcgctttcatcattttgaggaaggaatatgctcctgtggtgattattggtgattttctattgtccatttatttatttgaacatatgatagcatatcctatatagtgctatcagtacagttttgtagg

SEQ ID NO: 135052 - DNA, 82 bp, Zea Mays
cagcattaaggacgacgaggctgagttaacaatgctgcttgatacttgcagtggggagctgaataagcagttaataaatcat

SEQ ID NO: 135053 - DNA, 470 bp, Zea Mays
agttagggcctggaatatagttggcttttaaggatagtgagattgaagtcgttgggggtgatggatcaactaaaagcttgactcttcccttcttcatgagaccatgagtcctatcctcgtgcgctaggattgagggtggcgccggtgctcgcgcatgtcaccagcatcaattgcagggtggcggacctcacctcctggcaacccatctccagcaatccctctccgcatgtcgcgacaattggctgtctcttgctcgagcgagcatcacagcttgctggctgaccacacggctgtgccctgctggccagaggccacccccagggctagcactggatcatgtgcaaggcgtacgtggtggcatcacggagccggatggtacctcgctgttgccgtgattgctcgtcggagcgaaccctccgccgtaatatcgccgtgtgccatggtcagagcttaaagcggtatgaatcgca

SEQ ID NO: 135054 - DNA, 2548 bp, Zea Mays
atgcccccaggtgatatgtttgtcattcctctagtgacaggaccttcacctgtagaagtagaaggtgaagctgccatgcttcttgttattggacctgtcgaaggaggagttgatgcagttgtttgtgccgtgttggacctttttgccgcatcgccgtggccggccggcagccgccgcaaccttctttctacgatgcctcgcaagcccaaacggaaggctccggcctcaccggcgaggcacgacccttcgccggagccctacccttcccatgcctccccctgctcggcacaatgcctggtagtccgcgacgccctcctcgcgttccacgggttccccgaagagttcgcggccttccgcgtcctccgcctcggtggcctctcgcctaaccgtgaccctcggccttcgtcccccacagtgcttgacggcctcgtcaccacgctcctctcccagaacactaccgacgccatctcccgccgcgccttcgcctcgctcaaggccgctttcccctcctgggaccaggtggtggatgaggagggaaagaggttggaggacgccatccggtgcggcggcctggcggcgacgaaggcggccaggatacggtccatgctgagggacgtgagggagcggaggggcaagatttgcctcgagtacctgcgggaactgtcggtggatgaggtgaagaaggagctctcgcggttcaaagggattggaccaaagaccgtgagttccatctccttgtcctctttcagtgataagtgattttctggtctggttgttggaattctgcaacggtcgatgcatgccatggatggaccaccatggtgaagtaaaggcattgcttttgatttgatgtcaaaaaaggaggactggtgggaggttgttcagccttgaactttgaatgaaccacagcttgatgagagacagtgagacaccatatggcaatttaagggcaaagcgggttttttttatgagcttctctgtgcagtttccttaactagattttttgaggactgcaaatgtgcataggagttctgatgccatgtttaacaagttcccttttttgtatatgattgaaatgtgtgcaaatgtgcttaatggaagaagtctttcataaaaaaaaagctgtgctccttcatggaagcggtttatgtttagactggtttcagtctaatatttatgtggctggtggtggtcaccgacaaccaatctcgtcttgcaatgaatgcccaacagaaacaggtgagaggtgaccaaaagcttgttgctgattgtgtagcttgtcctaggtccctaacttggagtgcgtttttttttgaactgtttgttcttaattaacgttgtttacaacaattgctgaagttgtcagtgtcatcctttggaggtattgttccatcagtccattggtaacaagaggttgttttagttgcacgacaattgttagctggtgagtcatgcgaggcatgtgatagtgatgaaaaggcaagggacatgcaggatgttccatcggacgctagtcacaaccttgatatcattattcaaagcaatgaaaatggtctactcacaaacgtgtatcatctacaatatgcttatgttgtttgattagtcatttaacgcttcgtttttagttggatgacttgctgtcttgtaggctctggagtaaacaagcacatattaatgccttattttatatatgaatcaacaggtggcatgtgtgctgatgttctatctacagaaggatgattttccagtggatactcatgtacacaaatattttctgttgttgtcaaatagaatctaaacactagttcaatgtgcataatgtatttgtaacagcaaattttgggccaataggtactccgcattacgaaggctatgggctgggttcctgctacagctagcagggagaaggcctacattcatctaaataataagattcctgatgatctgaagtttgatttgaattgtctttttgtaactcatggaaagctttgtcagtcatgtaccaaaaaggtgggaagtgataaaagaaagagttccaattctgcctgtcctctagcaggttactgttgtattggagaaaagcttcagcaactgtgaagagcaggcagtagctgggggcgttcaaaaggctctgctgtgtttgattcggcaaatgctttatcacaatcggtgcaaacttagctgaatgctaccgccccacttgtttgaaaaggacgtctgcacttgagttcaactgtgtaaacctgggagctttggatggaggacttgtggatccttgatgcgcatttgttgcaaatgctttggattgaagcagagcaatgtaccataccatgctggcatgcgatctaagtggccggcggcttgcttcatgctcacatgaagtttaactaccatcaccatcggttgcagcttcaagtttggttcggttgtaatgaaacggattctcatatgttaaacctgagagccttctgttaagccttgtttgagtactctagtattcacctcaatccacgtttattaaagttgattgaggtgtaaattaaactaa

SEQ ID NO: 135055 - DNA, 1554 bp, Zea Mays
atgcccccaggtgatatgtttgtcattcctctagtgacaggaccttcacctgtagaagtagaaggtgaagctgccatgcttcttgttattggacctgtcgaaggaggagttgatgcagttgtttgtgccgtgttggacctttttgccgcatcgccgtggccggccggcagccgccgcaaccttctttctacgatgcctcgcaagcccaaacggaaggctccggcctcaccggcgaggcacgacccttcgccggagccctacccttcccatgcctccccctgctcggcacaatgcctggtagtccgcgacgccctcctcgcgttccacgggttccccgaagagttcgcggccttccgcgtcctccgcctcggtggcctctcgcctaaccgtgaccctcggccttcgtcccccacagtgcttgacggcctcgtcaccacgctcctctcccagaacactaccgacgccatctcccgccgcgccttcgcctcgctcaaggccgctttcccctcctgggaccaggtggtggatgaggagggaaagaggttggaggacgccatccggtgcggcggcctggcggcgacgaaggcggccaggatacggtccatgctgagggacgtgagggagcggaggggcaagatttgcctcgagtacctgcgggaactgtcggtggatgaggtgaagaaggagctctcgcggttcaaagggattggaccaaagaccgtggcatgtgtgctgatgttctatctacagaaggatgattttccagtggatactcatcaaattttgggccaataggtactccgcattacgaaggctatgggctgggttcctgctacagctagcagggagaaggcctacattcatctaaataataagattcctgatgatctgaagtttgatttgaattgtctttttgtaactcatggaaagctttgtcagtcatgtaccaaaaaggtgggaagtgataaaagaaagagttccaattctgcctgtcctctagcaggttactgttgtattggagaaaagcttcagcaactgtgaagagcaggcagtagctgggggcgttcaaaaggctctgctgtgtttgattcggcaaatgctttatcacaatcggtgcaaacttagctgaatgctaccgccccacttgtttgaaaaggacgtctgcacttgagttcaactgtgtaaacctgggagctttggatggaggacttgtggatccttgatgcgcatttgttgcaaatgctttggattgaagcagagcaatgtaccataccatgctggcatgcgatctaagtggccggcggcttgcttcatgctcacatgaagtttaactaccatcaccatcggttgcagcttcaagtttggttcggttgtaatgaaacggattctcatatgttaaacctgagagccttctgttaagccttgtttgagtactctagtattcacctcaatccacgtttattaaagttgattgaggtgtaaattaaactaatttacatcatagtccaactcaatacatgtggaatgagatgaatactagcgtgaaactctacc

SEQ ID NO: 135056 - DNA, 1733 bp, Zea Mays
atgcccccaggtgatatgtttgtcattcctctagtgacaggaccttcacctgtagaagtagaaggtgaagctgccatgcttcttgttattggacctgtcgaaggaggagttgatgcagttgtttgtgccgtgttggacctttttgccgcatcgccgtggccggccggcagccgccgcaaccttctttctacgatgcctcgcaagcccaaacggaaggctccggcctcaccggcgaggcacgacccttcgccggagccctacccttcccatgcctccccctgctcggcacaatgcctggtagtccgcgacgccctcctcgcgttccacgggttccccgaagagttcgcggccttccgcgtcctccgcctcggtggcctctcgcctaaccgtgaccctcggccttcgtcccccacagtgcttgacggcctcgtcaccacgctcctctcccagaacactaccgacgccatctcccgccgcgccttcgcctcgctcaaggccgctttcccctcctgggaccaggtggtggatgaggagggaaagaggttggaggacgccatccggtgcggcggcctggcggcgacgaaggcggccaggatacggtccatgctgagggacgtgagggagcggaggggcaagatttgcctcgagtacctgcgggaactgtcggtggatgaggtgaagaaggagctctcgcggttcaaagggattggaccaaagaccgtggcatgtgtgctgatgttctatctacagaaggatgattttccagtggatactcatgtactccgcattacgaaggctatgggctgggttcctgctacagctagcagggagaaggcctacattcatctaaataataagattcctgatgatctgaagtttgatttgaattgtctttttgtaactcatggaaagctttgtcagtcatgtaccaaaaaggtgggaagtgataaaagaaagagttccaattctgcctgtcctctagcaggttactgttgtattggagaaaagcttcagcaactgtgaagagcaggcagtagctgggggcgttcaaaaggctctgctgtgtttgattcggcaaatgctttatcacaatcggtgcaaacttagctgaatgctaccgccccacttgtttgaaaaggacgtctgcacttgagttcaactgtgtaaacctgggagctttggatggaggacttgtggatccttgatgcgcatttgttgcaaatgctttggattgaagcagagcaatgtaccataccatgctggcatgcgatctaagtggccggcggcttgcttcatgctcacatgaagtttaactaccatcaccatcggttgcagcttcaagtttggttcggttgtaatgaaacggattctcatatgttaaacctgagagccttctgttaagccttgtttgagtactctagtattcacctcaatccacgtttattaaagttgattgaggtgtaaattaaactaatttacatcatagtccaactcaatacatgtggaatgagatgaatactagcgtgaaactctaccattttgacctttctctgggtagtagtaaccgattttagggtgcatcttcagacactcatgaatcatgatcaagtgctaccatctttgcttcgagtgttgaacattagcatcaacagaacaaaaagagaaaaggacagaagaaagtgctgttaggccctgattggttgagtttgcagggttgtttatgcccaagcaaa

SEQ ID NO: 135057 - DNA, 1201 bp, Zea Mays
caacctccggctccgagcccgcagccccgcactgctcgagaggcccgggccgcccagcacgccggtgcctgccaccaacgcccactgcgcccgggccccgccacgaggtacacctaatctgtcacctcccccaccgcacctccgtagcctcttcaatctcgccggccacctcacgtcctcacctcgcgtggcctcccgttctgacttcggagtccctcggtctcaacgactagttgagagctcgcggctccgttcgggcgaggggaggaggttcatgaggctgctgtaggctccgttgcagccgccgcgggcgggagtccgtgattttggacgccccaccgcggcaagatccggaagcgcgttggctgttgtgccgtgagtttcagtttcggtggtcgattgcttcagcctgctgagaagtaggaggggcggccatggcggggtcgaggttcgggtcgttcaagtcggagaagggcgactccgcctccgcagcggcggcagcgggtggagcggcgcagaggagggacccgtacgaggtgctcggggtgggccgcaccgccaccgaccaggagatcaagagtgcgttccgacgcatggcgctcaagtaccatccggacaagaatggcgatgaccctgttgcatcagacaggttccaggaagtcacattctcctataacatcctgtcagatcccgataagaggcggcagtacgatacatcaggatttgatgcaatcgaatctgatagtcaggaactggagctggacttgtcgagtctcaacactgtaaacacggtgtttgcagctctttttagtaagcttggtgtgccaattaaaacaactgtttcagctacagttttagaggaggcattgaatggttcggttatggtttctcaactccagctaggaaactcagtgcagagaaaggtggaaaagcaatcggcccatttctattctgtggatataactgaaaaacaagctaaaatggggctagtttgtcgtgttcactcaaacgataaaagcaaattcaagtacatttcttgtggtcttggtgttttggtatttttatctaccttttctagtattctttttattgattctgtgccttgtatttttgttgtcctctgtttggttagctttgaatgtttcatatttgtgaactgtgatactaacaatctagcttccagttccacacaggttcccag

SEQ ID NO: 135058 - DNA, 1053 bp, Zea Mays
tagcctcttcaatctcgccggccacctcacgtcctcacctcgcgtggcctcccgttctgacttcggagtccctcggtctcaacgactagttgagagctcgcggctccgttcgggcgaggggaggaggttcatgaggctgctgtaggctccgttgcagccgccgcgggcgggagtccgtgattttggacgccccaccgcggcaagatccggaagcgcgttggctgttgtgccgtgagtttcagtttcggtggtcgattgcttcagcctgctgagaagtaggaggggcggccatggcggggtcgaggttcgggtcgttcaagtcggagaagggcgactccgcctccgcagcggcggcagcgggtggagcggcgcagaggagggacccgtacgaggtgctcggggtgggccgcaccgccaccgaccaggagatcaagagtgcgttccgacgcatggcgctcaagtaccatccggacaagaatggcgatgaccctgttgcatcagacaggttccaggaagtcacattctcctataacatcctgtcagatcccgataagaggcggcagtacgatacatcaggatttgatgcaatcgaatctgatagtcaggaactggagctggacttgtcgagtctcaacactgtaaacacggtgtttgcagctctttttagcttggtgtgccaattaaaacaactgtttcagctacagttttagaggaggcattgaatggttcggttatggtttctcaactccagctaggaaactcagtgcagagaaaggtggaaaagcaatcggcccatttctattctgtggatataactgaaaaacaagctaaaatggggctagtttgtcgtgttcactcaaacgataaaagcaaattcaagtacatttcttgtggtcttggtgttttggtatttttatctaccttttctagtattctttttattgattctgtgccttgtatttttgttgtcctctgtttggttagctttgaatgtttcatatttgtgaactgtgatactaacaatctagcttccagttccacacaggttcccag

SEQ ID NO: 135059 - DNA, 1155 bp, Zea Mays
aaaaacagtatccacactaatccacatcacaaaccccatcccaattcccaggccccgccgcgtgcttgtggccgccgccgccgccgccgcgagagagagagatgtcgctctgctgctgctgcagcaccgccaccggccgcggcgttctcctccctagcctcctcctcggccgacgccactggacgggtcaccacctcctcaacctccgggccaccacgaccgtcgtatcctcctcctccgcggccgccacctcctccctctcgccgccgcagcagcgccagatcaccgtctacgtggacactctccttgaatggaaccagagaatgaacctcaccgccgtcaccgacgaggccgaggtcatggcgcgccacgtggccgactctctcgccatgctgcccccgctggagcgtgtgtaccgcggccgttccacctccgctggtggcgctatcgacggagtcaggcttattgacgtcggctctggcgctgggctcccgggctggaagtttacgctgttggagtcgatgcggaagcggtgcacgttcttggagcatgctgttgaagccatgaacttgtcaaatgtggatgtggtgtgtgaccgagctgagaagaatctatctggacagaaagttggccaaagtcttgatttcagagaaagttatgatatagtagctgcaagagccgttgctgaactgaaagttctagcggagtactgcatcccattggttcgcattggtggtttgtttatagctgcaaaaggacatgatccccatgaagaagtcagaaatgcagaaggtgcaataaagaaattgggtgcttcaatgcttgagttatgtaatgttgaatcaatgggacctcatggtcaacgaacagctgttctatacgtcaaagaacgtgccactccaaaaaagtacccgcgccttccaggtactccttccaaggcgccattatgaggagcatgtagactttttctatcaattaaagaccgataattgtgattgacctagttagtaggccgtcttgctttacaaggatggcagggtatcttggaatcgaatatctgctaagggtttcaggtatatctatgtatggctcatcgtgcttcgtgccaaacaagtttgtacaggaaagcctaaaaaacttttggttcgtgctata

SEQ ID NO: 135060 - DNA, 1164 bp, Zea Mays
aaaaacagtatccacactaatccacatcacaaaccccatcccaattcccaggccccgccgcgtgcttgtggccgccgccgccgccgccgcgagagagagagatgtcgctctgctgctgctgcagcaccgccaccggccgcggcgttctcctccctagcctcctcctcggccgacgccactggacgggtcaccacctcctcaacctccgggccaccacgaccgtcgtatcctcctcctccgcggccgccacctcctccctctcgccgccgcagcagcgccagatcaccgtctacgtggacactctccttgaatggaaccagagaatgaacctcaccgccgtcaccgacgaggccgaggtcatggcgcgccacgtggccgactctctcgccatgctgcccccgctggagcgtgtgtaccgcggccgttccacctccgctggtggcgctatcgacggagtcaggcttattgacgtcggctctggcgctgggctcccgggtctgatccttgccgttgcgcggccgagctggaagtttacgctgttggagtcgatgcggaagcggtgcacgttcttggagcatgctgttgaagccatgaacttgtcaaatgtggatgtggtgtgtgaccgagctgagaaagttggccaaagtcttgatttcagagaaagttatgatatagtagctgcaagagccgttgctgaactgaaagttctagcggagtactgcatcccattggttcgcattggtggtttgtttatagctgcaaaaggacatgatccccatgaagaagtcagaaatgcagaaggtgcaataaagaaattgggtgcttcaatgcttgagttatgtaatgttgaatcaatgggacctcatggtcaacgaacagctgttctatacgtcaaagaacgtgccactccaaaaaagtacccgcgccttccaggtactccttccaaggcgccattatgaggagcatgtagactttttctatcaattaaagaccgataattgtgattgacctagttagtaggccgtcttgctttacaaggatggcagggtatcttggaatcgaatatctgctaagggtttcaggtatatctatgtatggctcatcgtgcttcgtgccaaacaagtttgtacaggaaagcctaaaaaacttttggttcgtgctata

SEQ ID NO: 135061 - DNA, 1623 bp, Zea Mays
atcgagtccagcgtcaacaggcaacaggtgtcccagccgcgcgccgcacgccctgttgccttctctcgacttcgagagcaccgccgcacggcataacgctcgcacggccgagccccgacattctaccgcactccctccgctgcacccctttccattctaccgccggcgacgccaaagttcttgggcctcctcatcggcgacttttccgccggcgacaggaaacaacgaaccaaaccacttctctgtcgagaggcgtcgcgctcctctcttcgccctctgctgttatttttcttaacccggctttctctcgattgctgcgtaaagttgaagatgaggaagctcaagttccatgagcagaagctcctcaagaggcacaatttcttggagtacaagagggagggcggccaccgcgaggcgctcgtcacacagcgctaccgcctcgtggagagggacgactacaagaagtacaatgggatatgcttaatggtgcaaaagctcgttaacatcataaagcagatggacccaagagaccctttcagaatccagatgacagacttgattctcgataagctgtaagactgctagttcactttacttgatcgtgagattgtatataccattggttatgtaaattttgagctggggttacatcctcaagtaccaaaatcttacaagttcgcctcctgtgtagctattgattgtatctttgactgcttgtagagttaacggtattgaacttcacctgtacctgtttgtagtatgtaaggaaaggcatactgctgtttcctttactacctcacatatataggaacattttataattgcattctcgaatcctgtgttttcctgtgaaattgagatggttcttgtgaaatttctgtgtttcaaatgggccctcagtgtgttgaggtatctacatatgaattgtttgactggttgctcagaactcactgcagtgtaaatgtgccaaaggttgcttggatatctgaaatcatgagatttctaattatatttcctgcgttccaaatggaccctcagtgtgttgaggtatctacatatgaattgtttgactggttcctcagaacttactccagtgtaactgtggcaaaggttgcttggatatctgaaatcatgagatttctaattatatgtttgtattcttcctatgtctggtcatacaatccaatattgaacttcactgcgaaagagtctctagccgatttggttaggtggtctgagtagcactcctcaggttctgagttcgaatccagtgggagcgaattttaggctgaggttaaaaaaggtcactcgctggttcccatggttgtgtgcacgcgagatggactgacctatgggggcggatcctcttgtaggggctaggagggctcaaagcatgagtaaagatctgtcctaaagggggcgcatccgttgcatggggggcagcttttctgacctttctggggctctgattgaaattcttcttaacataatactgtgggggcagtattttccttaccggccgagtttttttaatattgaacttcactagtactatcataatttcttcatctgcattggacttcattgccattgcctgtcatctgtaatagtggtcgttccctg

SEQ ID NO: 135062 - DNA, 1090 bp, Zea Mays
atcgagtccagcgtcaacaggcaacaggtgtcccagccgcgcgccgcacgccctgttgccttctctcgacttcgagagcaccgccgcacggcataacgctcgcacggccgagccccgacattctaccgcactccctccgctgcacccctttccattctaccgccggcgacgccaaagttcttgggcctcctcatcggcgacttttccgccggcgacaggaaacaacgaaccaaaccacttctctgtcgagaggcgtcgcgctcctctcttcgccctctgctgttgaagatgaggaagctcaagttccatgagcagaagctcctcaagaggcacaatttcttggagtacaagagggagggcggccaccgcgaggcgctcgtcacacagcgctaccgcctcgtggagagggacgactacaagaagtacaatgggatatgcttaatggtgcaaaagctcgttaacatcataaagcagatggacccaagagaccctttcagaatccagatgacagacttgattctcgataagctgtataatatgggtgtaatttcaacaaaagagagcttgttaaagtgtgagaaactttcagtgagcgccttctgcaggcggagacttgcaacagttatggtgaagctcaagtttgcagagcaccttaaggaggctgtgacgtacatcgaacaggggcacgtgcgtgtcggtccagatgcagtcacggacccagcctttcttgtgaccagaaacatggaggacttcatcacctgggtggattcctcaaagatcaagaggaaggtcatggagtacaatgatgcattagatgattatgatgccatgttctgagaaaataattctgcagaaatttatgtgcccgtcagtagtgtaatcttaagcctgccacatatgggtcttttctgaacaaatctgtgggagttgtcttctgcatggctacttgcatttgtattgcacctgcagatgtgatgcaattttgtggttggttgaaggcacattataaattcatatctgatgtagttgtgcaattgtctttgttaaagagcgggtttgcccggatttcccctaaaaaaaaaaaggtaaa

SEQ ID NO: 135063 - DNA, 1593 bp, Zea Mays
cccagccgcgcgccgcacgccctgttgccttctctcgacttcgagagcaccgccgcacggcataacgctcgcacggccgagccccgacattctaccgcactccctccgctgcacccctttccattctaccgccggcgacgccaaagttcttgggcctcctcatcggcgacttttccgccggcgacaggaaacaacgaaccaaaccacttctctgtcgagaggcgtcgcgctcctctcttcgccctctgctgttatttttcttaacccggctttctctcgattgctgcgtaaagttgaagatgaggaagctcaagttccatgagcagaagctcctcaagaggcacaatttcttggagtacaagagggagggcggccaccgcgaggcgctcgtcacacagcgctaccgcctcgtggagagggacgactacaagaagtacaatgggatatgcttaatggtgcaaaagctcgttaacatcataaagcagatggacccaagagaccctttcagaatccagatgacagacttgattctcgataagctgtataatatgggtgtaatttcaacaaaagagagcttgttaaagtgtgagaaactttcagtgagcgccttctgcaggtctcttcctccctctccctcttcctctcctccctagcaatctggcacgtttgttttcctttataggatgttgtgttctagccatctcacttcagctcaagtgttctttcttggctaaggtctgcaactctttggtagagtatatcatattattcactttgctagccgcttttatggtaaggtagaacaagtaggaaacaatgacatgtgcagttccatttaccttgtttactcaattcttgcaggcggagacttgcaacagttatggtgaagctcaagtttgcagagcaccttaaggaggctgtgacgtacatcgaacaggggcacgtgcgtgtcggtccagatgcagtcacggacccagcctttcttgtgaccagaaacatggaggacttcatcacctgggtggattcctcaaagatcaagaggaaggtcatggagtacaatgatgcattagatgattatgatgccatgttctgagaaaataattctgcagaaatttatgtgcccgtcagtagtgtaatcttaagcctgccacatatgggtcttttctgaacaaatctgtgggagttgtcttctgcatggctacttgcatttgtattgcacctgcagatgtgatgcaattttgtggttggttgaaggcacattataaattcatatctgatgtagttgtgcaattgtctttgttaaagagcgggtttgcccggatttcccctagtctgaaattcctgcaccatgtttcgttttgcagttcgtttgtgcttgccggcattattacgtctagagattaatttagcgccacaatttcaataggtcattaataatggcagcagcggagtcggctgttactgccagacgctttcagcctaggctcctagccagtgtttggctaacaaataaaaggtaaacgatagactgatttcaattcacacttccacttcaactcacactttcacgggcatttccaaagaaaaaaaaaa

SEQ ID NO: 135064 - DNA, 2940 bp, Zea Mays
cattggaaacataccctcctctccccgcggggacatgatactcctgcaaaaccctcgacctagacggtgcagcgccgccggcccgccgccgcggtctctgcctctgcctcgtcatggcgcggacgatgctgccgtctccttcgcctcacaccgccgtcaagagagaaatcgaggacgcagagcccaccgctcacacgccggcgtcactgcctcgcaagaagcgccgccgtggaggccgcctcccagtgactcccacccagcttcccctaagccctcccctcgtcacgccccagaccatcccatcggtggcatcaggggacgcgtccttcgccggcctaacgccgacgcccgtgttctctgccgtcaaggacgagtccggcgcggacaccggggtggggagcaacgggagggcgtccgggaaacggaatgactcgcaggacctccgctccgtcccgaggcccgcggcagcggagcctcccactctctggctcaaccgccggcgtctgggcctcatcctccacgagctcgcgggagcgcaccggtggcgcgacgcggccagcgtcgtctcgacgctccttagcggcaaccgaaagcccgactcctacgaggagacgcgcagaatgttcgtggtggccatggagattcataagcggcttgctgaggacagcagcgtgcagtacggtggcaggagcagctactacctcagaacgcagaagttgttcaatgtttggatgcgaaagctgatttggtttccttcttgcccaaaaaaaaacttggttacacttgaactggccctattttacctttcacaaggcaacatcgacaatgcacacatcgcaacaagaacccttatcgccaatggtaaactgcagacagaaccaatcttaaatctcgttcatggtttaatatcatttgataaatggtactctggcttgcctaaagatatgcaagttgaggattttgatgtttatgatgaatcatgcggtattccgatgaagtcaaatggttctgcaggaactgatcttctggttaattcagatgaggatagcatgaatattgatgagtccagtttggctacttgctcttcagaaagttctatcaataatgagaatatagacaaaaaaatgaataacaaacctggttttcttcaccctaaagaggaaatggatccacttgaatcacaaggaaatgaaaacttgcgaagcatatttttggatacctctgatggtcctacttgtgggactcgaacccgggactttgggtgctacttgagctgtgtgctactacccagtcaagtcgcaggcttgtttgcgatgatgcagcttcatttgtgttttctgtcagaatagtcctcagactgatccacctcattaagctgaactaccaccttatcagtatatttcaacttaattttgtatcttgttgtgaagtcatatgtagctcccgatgatttgtatcctaaaatgtcacattctattatttgcactgaaggattggagcagagcttgctgcctttaaagctgaagttcgctactggggcttccaatgattgttttgataaatatatgaagtacaagtcagtgcctaataccttgtatgaagatgcagaaaaatgtctaagattggctctttattcaaatccgccagtgatggctgcattattgccactaatacagattctcctcctaggtgataaactgaaagttgcactaaatgagcttgagaaggcctgcctcagtttagctacagccctccctttcaggttgagaggtaggctgctggaagagtatgaccaaaaccaggtatcaaccattttctcttgctatgaggaggctttgagaagagatcctacatgtagctactccatggagaggctaatcaaaatgcataaaaaaggatattataacaccatccaactacttgaggcaatagctttacatttagattccgtcaatgggaaatcctgcatctgggaagagcttgtatcatgtttccttcggcttttttctgacaatactgctgactacgaggattgcatatcatgtactaatacccatgggggtgaatcattggaggcttccagtaaattttcttcagtcttttttgagcagtttaccagagaatcatggaaggcccgatgcagatggtgggcacgccatcatttcagccaaaatgcttatacatcagaagctcagtcaggtgattgcaagctcctggctgccaaggcagcttgtgctgctcatttgtttggaccagaattcccatatgtcaaagcagttggtgtctatattgcaaagcaagaagctctggacgaaatcagtgtcctagtcagaaataagcagaactctgtcaggctattacaaactttggagaaactaacacgatgattctttcaccattgcttggtgttggtaattagcataatgttgacgatattttatagaccccttgatgaagcaaaattttgtaggatcaatagcatgtcactaatgtagtgtgttggcagaaaattttgtagtatcaatagcatgtcactaatgtatgtgttggcagaaccttggcgctggatgaaatcttggcgcgggtgatgccatacgttgtgtagcagcaaaaaaagcaaagacatcagaaacgtaagagatagaagccatttgctcccttgttttttttttgtttttgcgaaatgtaagtacaaggccgagaagagtcctgaaaatttatacttatttcattatccctggagctgcactgagggtctgtttgacaactttacaaatgaaaattttaagcacatgtgatcccttgtaacggttcctcttgtagtcccttgtaggtttctcatgtagtttgctgttcagataaaaacgaattcaactgcagctcagccttgtgaattaagatggactacatttaagaataattgtctctagagagttggat

SEQ ID NO: 135065 - DNA, 2957 bp, Zea Mays
caccaaccaatcttgctaggagtaggagaggagtagtatagtgtgcccaactggagcccagaaattaaggttgagttcgaataaaggagcctccaaaatattgttctgtcacaataaacacgccgtagacgttgtgaaaattaaaataaaaaatagaataagcgtccacagatgactccgtgtaaacacatctccagaaatggcaccaatactgctatagtgatgtgataccaaaaaaagcatccagcagatggcatcgaaatactactctgctgaaaaaagacaattaattaatgcacagcgcaacgcagtccactcccaactcccaagatctcatctcttccccttccgtcctgcgccctgcccctgcggcctccctctcctacccggcaggcagccaggcacccatcccttccacgagctattagtacccgccacgccatcgtccccgcttcgccgcctgcctctccggactcccactctccaagccacctaccttcctacacccaagtaggagtacctacctgcgcagagcccacgacggctcggactccgccgtgtcgacaccgctcctgtcggagcatcgaggctacattaccaagtagtaggaaaccatgggccctgcgccgagggagcccatgaagcagcgcgtgaaccgctgcctgctgcgcctctcggaccgggacacggaggcgatggccgcggcggagctggacgcgatcgcgcgcgagctggacgccgacgagctgccggtgttcgtggccgcggtctccgacgcgcggcccaccgacaggacgccgctgcggcggcactcgctccggctgctggcgctcgtcgccggggagcacccgcgggacgccgtcgcgccgctcgtgcccaggctcctggccgccgcgctgcgccgcgtccgggacccggactcctccgtgcgcgccgcgctcgtcgacgcggcccgcgccgcggcgggcgccgcggcgtcgcctcccgcggcgctggccccgctcgccgacgccgtgctccacgagcaggaccagtgcgcgcagctggccgccgcgctcgccgccgccgccgccgtcgaggcctcggagcccaccgacgacctcgccgcgtacctccgggggctcctcccgcgcctctacaagctcctccgcagcgcggcgttcaaggccaagcccgcgctcatctccctcatcggcgctgcctcggcagcctccggcggtggagccgcctccgccgccgtgccttgcctccgcgacgcgctcactgccgacgattgggccgccaggaaggctgccgccgaggcgctcgctttgttggccctcgagcacggagacgacctcgtctcacacaaatcttcctgcattaccgtcttcgaagccaagagatttgataaggtgaaaatagtgcgcgagtccatgaaccggttgatcgaagcatggaaggagatcccggatttggatgaggaggtctgctccttaccatcgtcccagtctagatcttctctcacagatactgcaagtgatggccgatacccagctgattcctcgggctccacctctagcccttcaattacaaggaggaactcatggccgactaacaggcagccccaaccggatggatcgaacaatgccatcaacagaaaaggcagccctccttccatcgtggctaagaaaaatctgcctccttcacgccgcagcacagaccagttcaagaaatctgaggacagggttgttgttactacggctccagacgcaacgccaattaaaatggtggctgaggaaaagcttctgaaagaaggcaatgttagggagaggcttgaagcgcggcgggtgctgtttcagaagactggtgacaaaggttacaagaaggtggctggtcccaagtcaggatccagagttgttccatacagcggggaaggggatggtgactcggaagagacggctgagactgaggacgcgcccgaagaatttcagtcagctcacaaagatgaggacttgtcgaagatcaggatgcagctcgttcagattgagaatcagcaagccagtttgcttaatcttctccagaaattcatggggagctcccagaatgggatacgttccttggagacaagggtgaacgggctggagatggtgttggacgagatatcccgtgatttggctgcttcctcgggaaggattccgaacagcgagcctgacacaaacgcttgctgcattctgagcccaaagttctggagaaggcatgacggaggtaggtacacttccaggtaccctatatcggacgcagcaaactactccgaggagagcagaagtccttacaagtgggacagacagcagaaatttggagtccatggtggttttgtcaccaatcccttagcagagccgaatgattcatctgtaaggagcatagctggttcccagcaagggaggagaagagactcggctcaatacagatcaaggtaaggttgagttaggtgtgacaggaagtggtccatgtgaagtgagaacaacgagcttcagcaataaggccgggtgtttgaagacgatcccactgttggtgtattttcgaaattttcttttctccaagcttagagctgagatcgtatgtcctatactcctatggggcttttattcatgaattgtcaagggttcagacagcctaaactctaaagcaagacgccaagaccctcgccgctggctcggtaaccatacgatggtttagcagtgagaaaaattgagaatcgacactcattgtccagtcatggatgtaccttgtactgcttgtaaatagtttctatacagtgattcatgtgctcgcaagtcgcaaggtgttgtcccacgaaaattcgttgggtgtgctgagatcattcaagtagggaaaaggttcagagcgcgacaaatgtgtagggtaacggcatgtggctatgcttcaataatctcttttagagttggtttggtgac

SEQ ID NO: 135066 - DNA, 2981 bp, Zea Mays
caccaaccaatcttgctaggagtaggagaggagtagtatagtgtgcccaactggagcccagaaattaaggttgagttcgaataaaggagcctccaaaatattgttctgtcacaataaacacgccgtagacgttgtgaaaattaaaataaaaaatagaataagcgtccacagatgactccgtgtaaacacatctccagaaatggcaccaatactgctatagtgatgtgataccaaaaaaagcatccagcagatggcatcgaaatactactctgctgaaaaaagacaattaattaatgcacagcgcaacgcagtccactcccaactcccaagatctcatctcttccccttccgtcctgcgccctgcccctgcggcctccctctcctacccggcaggcagccaggcacccatcccttccacgagctattagtacccgccacgccatcgtccccgcttcgccgcctgcctctccggactcccactctccaagccacctaccttcctacacccaagtaggagtacctacctgcgcagagcccacgacggctcggactccgccgtgtcgacaccgctcctgtcggagcatcgaggctacattaccaagtagtaggaaaccatgggccctgcgccgagggagcccatgaagcagcgcgtgaaccgctgcctgctgcgcctctcggaccgggacacggaggcgatggccgcggcggagctggacgcgatcgcgcgcgagctggacgccgacgagctgccggtgttcgtggccgcggtctccgacgcgcggcccaccgacaggacgccgctgcggcggcactcgctccggctgctggcgctcgtcgccggggagcacccgcgggacgccgtcgcgccgctcgtgcccaggctcctggccgccgcgctgcgccgcgtccgggacccggactcctccgtgcgcgccgcgctcgtcgacgcggcccgcgccgcggcgggcgccgcggcgtcgcctcccgcggcgctggccccgctcgccgacgccgtgctccacgagcaggaccagtgcgcgcagctggccgccgcgctcgccgccgccgccgccgtcgaggcctcggagcccaccgacgacctcgccgcgtacctccgggggctcctcccgcgcctctacaagctcctccgcagcgcggcgttcaaggccaagcccgcgctcatctccctcatcggcgctgcctcggcagcctccggcggtggagccgcctccgccgccgtgccttgcctccgcgacgcgctcactgccgacgattgggccgccaggaaggctgccgccgaggcgctcgctttgttggccctcgagcacggagacgacctcgtctcacacaaatcttcctgcattaccgtcttcgaagccaagagatttgataaggtgaaaatagtgcgcgagtccatgaaccggttgatcgaagcatggaaggagatcccggatttggatgaggaggtctgctccttaccatcgtcccagtctagatcttctctcacagatactgcaagtgatggccgatacccagctgattcctcgggctccacctctagcccttcaattacaaggaggaactcatggccgactaacaggcagccccaaccggatggatcgaacaatgccatcaacagaaaaggcagccctccttccatcgtggctaagaaaaatctgcctccttcacgccgcagcacagaccagttcaagaaatctgaggacagggttgttgttactacggctccagacgcaacgccaattaaaatggtggctgaggaaaagcttctgaaagaaggcaatgttagggagaggcttgaagcgcggcgggtgctgtttcagaagactggtgacaaaggttacaagaaggtggctggtcccaagtcaggatccagagttgttccatacagcggggaaggggatggtgactcggaagagacggctgagactgaggacgcgcccgaagaatttcagtcagctcacaaagatgaggacttgtcgaagatcaggatgcagctcgttcagattgagaatcagcaagccagtttgcttaatcttctccagaaattcatggggagctcccagaatgggatacgttccttggagacaagggtgaacgggctggagatggtgttggacgagatatcccgtgatttggctgcttcctcgggaaggattccgaacagcgagcctgacacaaacgcttgctgcattctgagcccaaagttctggagaaggcatgacggaggtaggtacacttccaggtaccctatatcggacgcagcaaactactccgaggagagcagaagtccttacaagtgggacagacagcagaaatttggagtccatggtggttttgtcaccaatcccttagcagagccgaatgattcatctgtaaggagcatagctggttcccagcaagggaggagaagagactcggctcaatacagatcaaggttgagttaggtgtgacaggaagtggtccatgtgaagtgagaacaacgagcttcagcaataaggccgggtgtttgaagacgatcccactgttggtgtattttcgaaattttcttttctccaagcttagagctgagatcgtatgtcctatactcctatggggcttttattcatgaattgtcaagggttcagacagcctaaactctaaagcaagacgccaagaccctcgccgctggctcggtaaccatacgatggtttagcagtgagaaaaattgagaatcgacactcattgtccagtcatggatgtaccttgtactgcttgtaaatagtttctatacagtgattcatgtgctcgcaagtcgcaaggtgttgtcccacgaaaattcgttgggtgtgctgagatcattcaagtagggaaaaggttcagagcgcgacaaatgtgtagggtaacggcatgtggctatgcttcaataatctcttttagagttggtttggtgacaaaagaattaaaagggatccattggaaag

SEQ ID NO: 135067 - DNA, 1091 bp, Zea Mays
gcgtttgcggtgtgccgatgctgctcggccacgtctctccatcgctaaccacggaaacaaccccacaggctgcgcctggctgcacgcactgttgtgtagttattaccagcatcggtggtgcgccatccaacaagcatcagagctcggtgtcacaaaacctgaccgatggcggcccggtgctccacagctgcctccgtggtcagaacaggatcgcgagacctctccccctccttttccttcacagccgcggcgctcccctcggcgcgtctgaggccggtaggagcgtgggtccgcggtggagggtacacctgcaggctccgcgccgtctgcgccatgggctccgcgccgtcgtcgtcccaatccccgtcgccgcacacgccttcaggacaaacccaagggaaagcagattataaatcactgagtgaagaggagtggaagaagcgcctgactgaagagcagtattatgttactcggcagaagggcactgaaagagcattcactggggaatactggaatactaaaaccccaggcatttatcagtgtgtctgctgcgacacccctctgtttcagtcatcaaccaaatttgatagtggtactgggtggccatcctattataaaccaattggtgaaaatgtcaagagcaagcttgatatgtcaatcatttttatgccccggaccgaggtgctctgtgcaacctgtgatgctcatctggggcatgtcttcgatgacgggccaccaccaacagggaagagatactgtatcaatagtgcatctctgaaattgaagccccaatagttgctggatactttagcaagaagtcaactataacgctggtccgccctatgtaaacttcggggttatgtatataaactactcgagttgtagcatatttattattctctttgttatgtaatatatgtgttcacaaaccgatgaaagtatgaaacaaacagccgctacttcactctggtattctggtctagaattaaggtgttgtttggttgacgaattgtaacgtaaatggcaacggtaatggtttgcactcgagtgacagttgacaacggtaataaatttaaatagatctttattaa

SEQ ID NO: 135068 - DNA, 1585 bp, Zea Mays
aaaaaatcacttcaggtaagggcgaagaagagcattccctctcccggtctccccatctcccgaaccgcgtgagccaaaccctcccagctcgcgcgccctcgatggatgcctccgccgccacccccgcccccgggccttccttctctggcgccgagtcctccgcggccgccgcccagccgccggcggaggctccgcagttgcgcgtccacggcgccggcagcggcagcggcgtcgcgcgagcctgccgccaccacgcgtacagccgcaagcagaagtcgctcggccttctctgctccaacttcgtggcgctgtacgaccgggaggacgtggaggtgattgggctggacgacgcggccaagcgtctcggcgtcgagcgacgccggatctacgacatagtcaacgttctcgagagcgtcgggattcttgtgcggagggccaagaatcggtatacatggctcggattcgggggagtccctgctgcgctgaaagaactcaaggagagggcgctaaggaagatgtccggatcaccggtgttactgtcaatggaggactcctctactgccaacttatcagatgatgaggatgatgaaaaattgggcgatgctgatgaagatgctgagagcgagaagctcagccaacctgttgacaatacgtctgataagcctgacgcacccagctgccgccttagatctgatcatcggaaggagaagtcccttgggctcctcactcagaattttgtcaagctcttcctcaacatggaggttgggacaatctcacttgacgaagctgcaaggcttctccttggagagggacatgcagacagcaacatgagaaccaaagttcgtcgattgtatgacattgccaatgtgctgtcttctttgaacctcattgagaagacgcagcaagcagacacaagaaaacctgcattccggtggctaggccaggcaaagcgaaagcaagataacaatgtcatggtttctgtacctccatcgatgaaggcaatgcccaataagagagcatttggtactgatcttacaaacattgacaataagcgaggcaagttagactcagcagcggagaacaaagtcaagctcatgcagggtgctggtaacatagtgaagacttttgagaggcagctggtgcaagggaaaaggagtgactttgtttatgggcccttccaccctgctggtgcaaagaaacacgaaactgatgatcaaactgttaagcagcaggagaggaagaacattcaggactgggaaaaccttgctgtgtccttccgtccacaatatcagaatcaagcactgaatgatctttttggtcattatgtggaagcatggaaatcatggtacgtggatcttacccaggaaacggcatcatgaagcagaatgttggcaggtcagttgtaacttgtaagccgtttccagtagttagatcaactgagttgttgatgcttgcttagggaaccaccctgtacaagatggaataaaaacacgaaggcaattttgtctttcgactgtatttactcgaatgctagaagtgaggccattttttcataaggaaaaaagcagggaaaatgggaaatcga

SEQ ID NO: 135069 - DNA, 1523 bp, Zea Mays
cgcgtgagccaaaccctcccagctcgcgcgccctcgatggatgcctccgccgccacccccgcccccgggccttccttctctggcgccgagtcctccgcggccgccgcccagccgccggcggaggctccgcagttgcgcgtccacggcgccggcagcggcagcggcgtcgcgcgagcctgccgccaccacgcgtacagccgcaagcagaagtcgctcggccttctctgctccaacttcgtggcgctgtacgaccgggaggacgtggaggtgattgggctggacgacgcggccaagcgtctcggcgtcgagcgacgccggatctacgacatagtcaacgttctcgagagcgtcgggattcttgtgcggagggccaagaatcggtatacatggctcggattcgggggagtccctgctgcgctgaaagaactcaaggagagggcgctaaggaagatgtccggatcaccggtgttactgtcaatggaggactcctctactgccaacttatcagatgatgaggatgatgaaaaattgggcgatgctgatgaagatgctgagagcgagaagctcagccaacctgttgacaatacgtctgataagcctgacgcacccagctgccgccttagatctgatcatcggaaggagaagtcccttgggctcctcactcagaattttgtcaagctcttcctcaacatggaggttgggacaatctcacttgacgaagctgcaaggcttctccttggagagggacatgcagacagcaacatgagaacagccaaagttcgtcgattgtatgacattgccaatgtgctgtcttctttgaacctcattgagaagacgcagcaagcagacacaagaaaacctgcattccggtggctaggccaggcaaagcgaaagcaagataacaatgtcatggtttctgtacctccatcgatgaaggcaatgcccaataagagagcatttggtactgatcttacaaacattgacaataagcgaggcaagttagactcagcagcggagaacaaagtcaagctcatgcagggtgctggtaacatagtgaagacttttgagaggcagctggtgcaagggaaaaggagtgactttgtttatgggcccttccaccctgctggtgcaaagaaacacgaaactgatgatcaaactgttaagcagcaggagaggaagaacattcaggactgggaaaaccttgctgtgtccttccgtccacaatatcagaatcaagcactgaatgatctttttggtcattatgtggaagcatggaaatcatggtacgtggatcttacccaggaaacggcatcatgaagcagaatgttggcaggtcagttgtaacttgtaagccgtttccagtagttagatcaactgagttgttgatgcttgcttagggaaccaccctgtacaagatggaataaaaacacgaaggcaattttgtctttcgactgtatttactcgaatgctagaagtgaggccattttttcataaggaaaaaagcagggaaaatgggaaatcga

SEQ ID NO: 135070 - DNA, 1311 bp, Zea Mays
atccaaatgacaattttatcactgaagtgcggcaaatccagatgacagatgaatatgaacatcaagcatggacgatcaaactcatccaccatcatacatataccaagtcatcaccaagcgctcaaagtacttttagaggtcatggatgtccccaacatattgagttgccagcaaagtgtaaaatccccagtagcaagtagtagtagtagtatgccaatcaacatgcttcacttagggtcagtgaagaacttgttaactgcaggcatgatctcaggagtcttgtcgtgcacaaagcttcttaggccatgcatggcgtaacgtctcccctcctcatggttctcaagcacaccagctgccctccctgccttgtttaccctgtaaaattcaaggcattcgtgttgatagtgttacaggattaatgtatatgtaaacatggatgcatgtaactaggtaagcacaaacaaacagctacaattgtgacatcctcgtgttgtcaaatagtggacaatcagactgaagatgtgaacagcgtgcctacatgcatatgccgttttaaactcagaaaaaaaaatactgtaattggcaccatgcatgtaaacaaactattaagatgtcatgtaaagaacagaagcatatgcatacattttatgcttatagccacgaattagcactcccaaaccttacacttcggttcctacaatctgaccgaacagctacaaatggtctagtcgttttcaaccttgcccagcaaaaggaactagttttccaaccgggaaaactaccaagacaaatttcacctgatggatacaatacaactctggttctggcaagtcaacggctcaacgccgaaccatggttcagcctttcagacaagacaaagaaataaagcgactactgaactagtgaacttgaactacatatagactaaaacttcaacagcacccaaaccaagcagatctaccctgatccagcaggagcagcacatttcttgcaagaataaaacaggcaggagttaagagcacggagcggacctgacttccgggttgccagtgatgttccggaagagctgaaacccgcagatgccgacggccacgcccgtcgccgcgaacagcgggtacacctgcgctgcaccaccatgagagagagagagagagagagagagagagagagagagagagagagagagtgcaatcgaagagatcgaggaagctgacctcgggccggacccagcggctggccatctgagtcggagtctcttcgcactgggacgcggcctcgacggcggagaagcacggggaaagtggacaggcg

SEQ ID NO: 135071 - DNA, 902 bp, Zea Mays
ccagattcttagaaaagctggtcagaacacagctgaaccaaacatggcccacgtcatatcgggagattcaacacgctatttgtgacttgtgagagcaaaccacaccagtcaccagcctcattgcctcaaccccaaaccaatccgtcgcagacactcaaggtcgcaggatgccgccgccgcgtgagcaccaccagccccaggacgaagaggacgacgataccgcaggcgttgtcaagctcatcagcgccgagggcttcgaattcgttgttgacaggaaggccgccatggtctccaacaccctccgcaacatgctcacatccccaggcggcttctctgagacgcgccagggcgaggtccgcttcccagagatccccaccaacatcctcgagaagatctgccagtatttctattggtcgctccattactccagtgggaaggagacagcggagtttccaatcgaaccggagataaccctggagcttatgatggccgcaaactatctggacacttgatgaggagcctgaggggtataatcctagtttgttattaaatatgaaagaacgaagcaatgaatactagtgaatctttccttccattcgtttctttttctttttctttttttttttgcattacatgatgtaaccagcatacgctggatgaaatgcttgttttttcacagatttgatctgatctgatccgatccagtgtggtctggcacaatgtaatgtaaaggtgggagggaagcagaaaccaaggaatacattttgcaatctacagtgtgtgctactatcaactcttggtagtgttttgttgtctcctgggaggccgtgactgctgctgctgtttgatgtatgtattactttttgctttggacggttccgatggaaaaccgaacggagacg

SEQ ID NO: 135072 - DNA, 787 bp, Zea Mays
ccagattcttagaaaagctggtcagaacacagctgaaccaaacatggcccacgtcatatcgggagattcaacacgctatttgtgacttgtgagagcaaaccacaccagtcaccagcctcattgcctcaaccccaaaccaatccgtcgcagacactcaaggtcgcaggatgccgccgccgcgtgagcaccaccagccccaggacgaagaggacgacgataccgcaggcgttgtcaagctcatcagcgccgagggcttcgaattcgttgttgacaggaaggccgccatggtctccaacaccctccgcaacatgctcacatccccaggcggcttctctgagacgcgccagggcgaggtccgcttcccagagatccccaccaacatcctcgagaagatctgccagtatttctattggtcgctccattactccagtgggaaggagacagcggagtttccaatcgaaccggagataaccctggagcttatgatggccgcaaactatctggacacttgatgaggagcctgagggatttgatctgatctgatccgatccagtgtggtctggcacaatgtaatgtaaaggtgggagggaagcagaaaccaaggaatacattttgcaatctacagtgtgtgctactatcaactcttggtagtgttttgttgtctcctgggaggccgtgactgctgctgctgtttgatgtatgtattactttttgctttggacggttccgatggaaaaccgaacggagacgctttgatatattgttgctgaattctgatcgtgtcgct

SEQ ID NO: 135073 - DNA, 3384 bp, Zea Mays
ccttctccgctgtatgtgagtctgtccctctcgtgtgtcgcccaaatccatcaccccccacgtctctcccatcccatccccgtgtagatttcaaatccgcgtcagagctcaggtctgggtctcctccttcgccgccagttgcctcctccagtcgagatccgccgtcggggagaccactgaccatggaggccatggaggagctatcggagctcgccgagtcgatgcgccaggcggcgtcactcctcgccgacgacgacccctccgacgacgccgcgccgcgtcgccccaccaccttcctcaacgccgtcgccctcggcaacgtcggcgctggcaagtcggccgtgctgaacagcctcatcggccacccggtcttgccgacgggggagaacggggcgacgcgggcgccgatagtggttgacctgcagagggagccggggctcagcagcaagtccatcgtgctgcagatcgacagcaagtcgcagcaggtttccgcaagtgctctccggcattcactgcaggacagactcagcaggggagcatctggtggatcagggaggggccgtgttgatgagatttacctcaaactgcggaccagtacagctccctcattaaagctgattgatttacctgggatagaccagcgagctgttgatgattccatgatcaatgagtatgctgggcacaatgatgcaatactgctcattgtcatacccgcaatgcaagctgctgatgttgcatcatctcgagctctgaggttggccaaggatatcgatgcagatgggacaagaacagttggtgttataagcaaagttgatcaagcaaatggagatgcaaaaactatagcctgtgttcaggccctactgtcaaacaagggcccaaaaaaccttcctgacattgagtgggttgctctaattggacaatctgttgcaattgcgtcagcacaatcagttgggtctgaaaactcactagaaacagcctggagagctgaagctgaaagcctgaaaaacatcttaactggatctcctcagaataagcttggtagaattgctttggttgacacaattgctaagcaaatccgtaaaagaatgaaagtgcgggttcctaacctattgagtggacttcagggtaagtctcaaatggtgcaagatgaactggcaaggctgggagaatctatggtacaaagtgccgaaggaacccgagcagttgctttggagctgtgccgagaatttgaggacaagtttcttgctcacataacatctggtgagggatctggatggaaaattgttgcaagttttgaaggcaagtttccagacagaattaaacagctaccgttggaccgacatttcgatctcaacaacgtcaaaaggattgtcttggaagcagatggttatcaaccatatttgatatctccagagaaagggttgagatccttaataaaaatagtactggaaatggcaaaggagccatcacgactatgtgttgaagaggttcatcgtgtattgttagacatagtcaatgcttccgcaaatgccacaccaggacttgggagatatcctccattcaagcgtgaggttgttgcaatagcatcaaatgcattggagaccttcaaaaacgacgccaaaaagatggtcgttgcgcttgttgatatggaacgtgcttttgttcctccccaacatttcatccgcttagtacaaagaagaatggaaagacagcgtcgggaggatgaattgagaaatcgatcttctaagaaaacacaagaagctgaacagccaacatctaagagggcctcaagtccccaaacagatgctgagcaaggtggtggcagcttaaaatcaatgaaagacaaatctggccagcaagataaagacacaaaagagggatcaaatttgcaagttgctggtcctgctggtgaaattactgcaggttaccttttaaagaaaagcgcaaaaactaatgggtggagcaaaagatggtttgttcttaatgagaagagtggaaagcttgggtacacaaagaaacaagaggagagacattttcgtggtgtcatcactcttgaggagtgcaaccttgaggaggtagaggaggaagagccttctaaaagttcaaaggactcaaaaaaggcaaatggatcagaaaaaatctcaagtcttgtatttaagattactaatagggttgcatacaaaacggtcctcaaagctcacagtgctgttgtgttaaaggctgagagcatggccgacaaggttgagtgggtaaataagatcaaagctgttattcagagcaaagggggttctttcaagggtccaagtactgagggtagttcaatgaggcaaagcaattcggatggcgctttagatactatggcacgtagacctgctgatcctgaagaagaacttagatggatgtctcaagaagttcgtggttatgtcgaggctgttttgaatagtctggcagcaaatgttccaaaggctattgtgctttgtcaagtggagaaagcaaaggaagacatgcttaaccagctatacagctcgataagcgggcaaagcaatgctaagattgaagagctgcttcaagaggaccataatgctaagcgcagaagggagaagtaccaaaaacaatcatctctcctgtcaaaacttactcgtcaactcagtatccatgataacagggcatctgtttcctcttattctaatgacaccactgaagccgagagccctcgaacaccaacccgctcaggtgaggactggaggtcagcttttgattccgcttcaaatggtcctgttgctggaagcacaaacagtcaatcaaggtccaaaagtgctgacggtcgcagtcggcgctatgagaacggggacgtgagctcaggtgccaactctggcagccggcgcacaccaaaccggttgccaccagcaccgccaaaatactaatcgtgctgattggtattcatgaacatttatgtattcttgcctggcacatgcgcccagatcggctgctagagattgtggtgtagtggatggagtatcgggtgattgcgtgaacattgtgttcgcaggtcgctgcgtctcagatgagctgtttatagaaaaatatacaggtaaccgtggtttctactgtttattatctctgtatatttatgacgtccctgccttttgattttgttggggcattcgatctgcttccgcacttggtcgatctaggacaacggctgtcagactaagatttatcttgtcctgccccgcatattgttcgttgccactgacgattcttatttagtcgtggtttatctctactacttattaaggtagtaagggtagtctgtcattttctgttctgtcttttttcattttctgttttgccctcatccctgttatggcttaaaaaataaaa

SEQ ID NO: 135074 - DNA, 2058 bp, Zea Mays
gtccagggtccagaccagagggagcctccgtcattgttccagtccaaaccctgcgcgacaggtatattgcaggtcacaactgtagcccttcgccaccaaaaagaaaaaaaaaagagtctcatactgtagtgtagctagctgtgtgtctcaacatgagggtatacagtcagctacccagcagcaacggcatccatattaggcagaacacaaacctacgacgaacacttcaaattaaagggggacgcaatcacgcaaaggcagtgacttgtacggctccccgtcttgctccttattggcccgtcattacggcacgagttccttccatcagaactattataccaacatcgaaacgcccggctgaactgtacaaacaagggaattcttctagctccagaaagttacatacagttgactggactcagttctggttccttccgacaaattgaagggcgctagctgcttggttgtcaacttggcttgccacctccctgcatgacaggcaacgcataaaagtaagcacatcttagaatctaaacccagcggttgaatacaccaccctgaccgcatttgacacggtgcttcaggatacgttctgaacatgaactgcagttgacgaggtctatgaaacgagatctctttcactgaccacaaccgcagatcacacccaagttggaagggatgaaaccctgtcaagccaacctggtttcgtctgaaccttcaccgcttatacacaagtgtgtgtgtatatatagctcatgaatttccagcaggagagagagagagaactggcaggagcgagcccacatacatacctggacaagtcatcagctgacgaaaaatgtgcacaccaccgacggccttgccatggttccagtctacattcgatctctgctccagtttgaactgtcgtccgtggtgctggagttctcctttttttgctggtcctgccctgcagaagatgagctcacacgttactcctgggattttacaacgtttgaacatgatacagattttgctcacctgtatagggagagagctgtggcctgtgtactgctgcatgagttgtcgctctgaggcgtgatttgtgtcagaagtgcacccaaactaacagcgatgatgttcagtttgttgacatttggaaggctaagactctgataaaaaaggtgcttgccaattgccattatgagttgaaggagtacagaattgacgctattggaggagaaggggaacaaaacactatgcttgatagaaaactgttcgatgggttgatatattcagtattcaaataatacaaccaaaactttcttctccttgttcattcatggtcttagctttttgtcatttgctaatagtagtttgctgagtcaagattatgggagccatggagaacgtgttaggaacgctttgctggggttatctttgtcgaagtgccatacttgtattatgagagctggggtggttcaagcagacctgacttcacatgtaaaagtatcaaagtttaagagctggtggtggtagagctaatggtgatggatccaagaagatagagaacatgtgatcgacctaaggcagtttcagctccagagaaggtccattactcatgcaaatgctaagagcaagagtgaaaagtttcctaccctcacatcaaggtggtacggttggtgtctccttggatgcttcagtacccttttcctatgtaccttttcgatgctcttggtgtggtatatatggaatcaaacatttccgaaggcgaagaatgatgggttcaaagtgacaaatgtgaatgctagcaacatcaaatttgtgctctatttaatggaagaaggaatgatggaggacaagctgaatatacttgccccaattgctacgtcgaggaggtcaaatgtgggctgcacaaacctttaccacagtgtgctcttcttggagaaaaagttttacgaataactgttcttagtgatcatatagatgatcgataccgtgtagctgctgcaggataaacaagatcatgcttcaaatgtctatctatttgttcgcctgttaattcgagatggatttgat

SEQ ID NO: 135075 - DNA, 2452 bp, Zea Mays
cttttgatccctttgttgcatgaaacattttaatctctctgtttcaccaatttcaggcagccattccataagaacatccacagtcacataattaggagtgcacctctcttctctcatccggtccataagttcaaaggccttttctgccattttcttatcctggagacctttcaacaatgcattgtaggttgtcacatttgcaggcacattcttttccctcatttcatcaaacagcttgatagctacatcaacttctctgctcttgcagaggaagtcaattagcgtattgtatattacagtgttgggttgtatcctggcctcatccatggacctgaaaattctcaatgcttcatctgttttaccagctttgcaatatccatgtacaagtgtgccgaaagtgaccacagaaggctggcagccatcatcaatcatatgccccaataattcatccacagctgagaaatctcctgctttgcacaaaccagacaacagggtattgtaggtgtacacatctggctgaagaccaactcctttcatctcctcaagcaactcataggcctcatgcaactttttcttccggcaaaatccaccaatcagaatgttgtatgcctttgcgtctaacttaaatcctgccttcttcatcgatgccgcagtggtgcaagcatccagcaaccgccctgcttgtgtcaatccagatatcatggtgaaatacatgactgcgtccggtcgatgcccatggtccgccatctcatggaacaattccattgccatgtccacattgttgcagtggaggaaagcactagccaaagtgctataggtcacagcatttcccctggcctccggccaaactgttctcttctcacggaagaactccagtgcagcaccaaccctcccaactcggcataagccaccaataattgtgttcatcgtgataacattaggtgccacaccctctttctccattctcgccacaattttgcaagccatgccaatatcccccactcggcaaaacgcatcagccaagcagttatacgtaactgcgttgggcgcacacccatgcacgtgcctcatccgctcatccacgaatataatggcctgctgcagcctcccaatcttgcacagcccatccactacggtgttcaatatggcaatatccgggcagacgtcagagcctgggctggacattcggtcgagcaccttgagcgcgtccccaacgtggcctgacttgcaaagcccgttgagaagtatcccatatgtgactacatcgggcttgacggaggcatctcgcatggacgtgaacagctccgtcatgccgcgcaggttgccagcgcggccaagcgcggtaaggaggctgttgaagatggaaatgtccggcgccggcgcgcccgatgcgagggagtcgcgcaagaatcctgcagcttcggctggggaggagaagcgcctgacgagcttggaaaggagcaatgcagagggaggcgggatgcggtggcgggccgcgagggagtggagggaagcgagggaagcaggcgtgaaagcgtgggatggctcagcgatgagggcgtatagctcggaggcgaggccgggcgacaagcggaggagggacagcgtggcggcggagggggtgtgcccatggaggaggatggcgaggatggctgcggcatttgggctgttgggggtgggagaggaggtggaggagaggcggcggcgggatcggagcttgtggacagcagacggcacgagacgccgggtcgacgacatggtggtggacggcagcggctcagtgaggacaaatcaagaaggcagtgctaggcagaccgccgatacagccggccgtgaggaatttggcaaaacaggtgggcccgcgtctttatgtgccgattttgcccttacgcctgaacgcaacaccgtctcctcccgtcttcttcgtcgcacgcagcctttcttctcttctctacctccttctctggacgacgcggccgcactcaatggcgaaccctttcttcgctgcggcacatcggcgacgttgacgacgaccttctcctcttttcagtcggatgtgagtcggcgtcgagctagtggaaatagggggtcgtcgaagcctgtgataggatcctgtcgcgccacttgcttctgcagctttattattgagaatgctgaaaataaggataatggggatcatggtgatatgtttagaatctgtgatgaggatgagattggaatccaatcttcaagtgcgccaagtggagaaggtggaccatccactgttttagaaacacaaggtgcagcgccaagtggagaaggtggagggtccactattttaaaaacacaaggtgcagtgccaagtggagaaggtggaccaggaacagatggaagacctctttttattactaggaccatccagtttagcaccaagtcttccatctactccatcatgccatggcgttggtcctag

SEQ ID NO: 135076 - DNA, 1693 bp, Zea Mays
tttccagcaatttccacaccacacggccaactttttacgcttccgctgcgatggacatggacctctccgcggccctttttaatatatctacgacgactgccgactgacttggttggctcgtggtcgctttgcccatctgatgatctcccgctagctagcttccttcttgctactcccgcagtccccagttccccacccgccgcgccctcgccatggatccgagctccgaaatcatactggacactccatacttccgcatctacagcgaccggcgcatcgaccgcttgatgggcaccgaaacggtgccggccggctttgatcccagcaccggcgtcacctccaaagatgtcgtcatagacagcgacgccggcctctacgtccgcctctacctcccgctcccggacacggtggctgccgccgcgtcaccgccgcccaacgttaacgacagcaagaccaagctcccggtgctggtctacttccacggcggcggcttcgtcacgcagtcggcggcgtctccgatctaccagcgcctcctcaacgcgctggccgcgagggccggcctgctcatcgtgtccgtgaactaccgcctcgcgccggagcacccgctgccggcaggctacgaggactccttccgcgcgctggagtgggtggcggcctccggcggggacccctggctgtcgcgccatggcgacctgcgccgcgtcttcctggccggcgacagcgccggcggcaacatcgtccacaacgtcgccatgatggccgccgcgtcggggccgcgggtcgagggcgccgtcctcctgcacgccgggttcgggggcaaggagcccgttcacggcgaggcgccggcgtctgtggcgctgatggagaggctgtggggcgtcgtgtgccccggggcgacggacggcgtggacgacccgtgggtgaatcccttggccgccgtggcgccgcccaggcccagcctgcgggacatgccgtgcgagagggtgctcgtgtgcggggcggagctggactccctgctgccgagggacagggcgtactacgaggccctcgcggcaagcgggtggggcggcacggtggagtggttcgagtccaagggccaggaccacgtcttcttcctcttcaaacccgactgcggtgagtccgtggcgctcatcgatcgactcgtcgcgttcttcgctgcgaactgaaattcgtcatgtgtgctccctattttatacatagtagtgacatataaaactgccctataattttaaaataagtatattttatataatttaagtcaccaataaaatatcttgctctaacagtaaaacgtcaaatctaaattatagagcagcttattatggtgtagtatatttgagtcatttgaaaatgtgtactataacttttttactaaattttatgaaacacgttattgttggagtagctttttctatgtagaactatatatttcaatttgagacatcagttatattattggagatgctcttacaatcttatgtctcgatccatatgaagatgtgtcaagtctgtattttatttctatttatttataactatgtgtgatttgttattgtagaatgttgtatgtgaagttacgttctatgtgcgctttaaggatgtaattcgtattcgaattcgatcgaatttgatatgtctaagagagttaatattcatttagggttaaaattag

SEQ ID NO: 135077 - DNA, 1794 bp, Zea Mays
cgagccgattcgttccaacttccaagggttttagcggcagcggcagccggagatgggggagcgggcgaaggaatggctcctcgcagcaggcgccggcgccgccgtcggcgcgctctctgccgccgctgtcatcgatcttctctcgagatccaagcggagagagaggtacgcgcgggacctgctggagtccaatggaatgacgactgggaacactcggtccagcaagcacctgggctctcttggtagctcggctcttctctctgatgaagtggtctctgaacagcttacaaggaatatacaattttttggcatggactctcagaagaaagtgactgaatcctatgttgtggttattggtcttggaggggttggcagtcatgcagcatcaatgctcctgagatctggtgttggcaggttgcttcttgtggattttgatcaggtatcactctcatcactaaatcggcatgctgtggcaaccagagatgacgttggaacttcaaaagcgttgtgcctcaagaagcatttttcaatgatatacccagagtgccaaatagatgcaaaagtgcaattgtatgatgcatcgtctgaggaggaaattctttctggacagcctgactttgttcttgattgcatagataacattgataccaaggtgtcactccttgcagcttgcgtgcgcagaggtttgaaggtactttctgcaatgggggctggagctcgagctgatcccaccagaattcgtgtcgcagatttgagagaatcaagcaatgaccccctctctcgatcggtgaggtacaggctcaagaaagaacatggaattgagggtggaataccagtagtcttttcattggaaaagccaaaggcaaagcttcttccttttcaagcttcaaaagaagaggaaactccatcagattaccagattgtgccaggattcagggttcgcattataccagtattgggaaccatccctgcaatatttggtcaagttatggcctcctatgtggtcactcagcttgctggattagattttcaaactgaaccagttgttaacctggatttggatcattaccgtatacttcatcagcgtcttattgagcatgaggaactgatgtatggcacagccgagcaagttctggtagatgctgaagaggtaatgtacattgtcaaagaattgtggcgtggtcgaagtgctagagaccaaagccaggacactggccggaagatgtggagatctgtgaacgaactaatgcttgttcggtgggacaaatcaaaggctgctggcatctcaaacttaatacttgtcaagttcagtgaggctgacgcccatgaatccaccacactcgaccgaataaaagaacaagaacctgaattctactctatggtttcacgtgtcctgaaacgagctgagatggagtttgccttatgacttgatgagtagcgagggttgatcctgttggactcccacagttgctattcagtgatggccttggaacagcattcagtttggcgggaatcacacttggggtacctgattggtgtgctatggtgaaaatgtgatgtgcaaagtttcttcttgaggccgctgaaacatcagctctgtgttatcactgagttgtgcacttgtggccatctatgtatgttttttttttctgcacgccaaatctgaaattttgtttctagtctgattgtctgatgtagttttgatgtgatttatgcttgctgtttaccacgaacatagccacttgtagacttaccgatcaccgatgataatgatatgacacgggtttgcgctcc

SEQ ID NO: 135078 - DNA, 1706 bp, Zea Mays
cgagccgattcgttccaacttccaagggttttagcggcagcggcagccggagatgggggagcgggcgaaggaatggctcctcgcagcaggcgccggcgccgccgtcggcgcgctctctgccgccgctgtcatcgatcttctctcgagatccaagcggagagagaggtacgcgcgggacctgctggagtccaatggaatgacgactgggaacactcggtccagcaagcacctgggctctcttggtagctcggctcttctctctgatgaagtggtctctgaacagcttacaagtcatgcagcatcaatgctcctgagatctggtgttggcaggttgcttcttgtggattttgatcaggtatcactctcatcactaaatcggcatgctgtggcaaccagagatgacgttggaacttcaaaagcgttgtgcctcaagaagcatttttcaatgatatacccagagtgccaaatagatgcaaaagtgcaattgtatgatgcatcgtctgaggaggaaattctttctggacagcctgactttgttcttgattgcatagataacattgataccaaggtgtcactccttgcagcttgcgtgcgcagaggtttgaaggtactttctgcaatgggggctggagctcgagctgatcccaccagaattcgtgtcgcagatttgagagaatcaagcaatgaccccctctctcgatcggtgaggtacaggctcaagaaagaacatggaattgagggtggaataccagtagtcttttcattggaaaagccaaaggcaaagcttcttccttttcaagcttcaaaagaagaggaaactccatcagattaccagattgtgccaggattcagggttcgcattataccagtattgggaaccatccctgcaatatttggtcaagttatggcctcctatgtggtcactcagcttgctggattagattttcaaactgaaccagttgttaacctggatttggatcattaccgtatacttcatcagcgtcttattgagcatgaggaactgatgtatggcacagccgagcaagttctgatgctgaagaggtaatgtacattgtcaaagaattgtggcgtggtcgaagtgctagagaccaaagccaggacactggccggaagatgtggagatctgtgaacgaactaatgcttgttcggtgggacaaatcaaaggctgctggcatctcaaacttaatacttgtcaagttcagtgaggctgacgcccatgaatccaccacactcgaccgaataaaagaacaagaacctgaattctactctatggtttcacgtgtcctgaaacgagctgagatggagtttgccttatgacttgatgagtagcgagggttgatcctgttggactcccacagttgctattcagtgatggccttggaacagcattcagtttggcgggaatcacacttggggtacctgattggtgtgctatggtgaaaatgtgatgtgcaaagtttcttcttgaggccgctgaaacatcagctctgtgttatcactgagttgtgcacttgtggccatctatgtatgttttttttttctgcacgccaaatctgaaattttgtttctagtctgattgtctgatgtagttttgatgtgatttatgcttgctgtttaccacgaacatagccacttgtagacttaccgatcaccgatgataatgatatgacacgggtttgcgctcc

SEQ ID NO: 135079 - DNA, 766 bp, Zea Mays
aagggttttagcggcagcggcagccggagatgggggagcgggcgaaggaatggctcctcgcagcaggcgccggcgccgccgtcggcgcgctctctgccgccgctgtcatcgatcttctctcgagatccaagcggagagagaggtacgcgcgggacctgctggagtccaatggaatgacgactgggaacactcggtccagcaagcacctgggctctcttggtagctcggctcttctctctgatgaagtggtctctgaacagcttacaaggaatatacaattttttggcatggactctcagaagaaagtgactgaatcctatgttgtggttattggtcttggaggggttggcagtcatgcagcatcaatgctcctgagatctggtgttggcaggttgcttcttgtggattttgatcaggtaagcattaacaaggcactcatgatatgttgaaaggtatcactctcatcactaaatcggcatgctgtggcaaccagagatgacgttggaacttcaaaagcgttgtgcctcaagaagcatttttcaatgatatacccagagtgccaaatagatgcaaaagtgcaattgtatgatgcatcgtctgaggaggaaattctttctggacagcctgactttgttcttgattgcatagataacattgataccaaggtaacaaatactagcattgaaacttcagctttcatttttctgtaggtgcaacccccaactttatgttaccccgatcctcctttttgtactggtagttatag

SEQ ID NO: 135080 - DNA, 1730 bp, Zea Mays
aagggttttagcggcagcggcagccggagatgggggagcgggcgaaggaatggctcctcgcagcaggcgccggcgccgccgtcggcgcgctctctgccgccgctgtcatcgatcttctctcgagatccaagcggagagagaggtacgcgcgggacctgctggagtccaatggaatgacgactgggaacactcggtccagcaagcacctgggctctcttggtagctcggctcttctctctgatgaagtggtctctgaacagcttacaaggaatatacaattttttggcatggactctcagaagaaagtgactgaatcctatgttgtggttattggtcttggaggggttggcagtcatgcagcatcaatgctcctgagatctggtgttggcaggttgcttcttgtggattttgatcagagatgacgttggaacttcaaaagcgttgtgcctcaagaagcatttttcaatgatatacccagagtgccaaatagatgcaaaagtgcaattgtatgatgcatcgtctgaggaggaaattctttctggacagcctgactttgttcttgattgcatagataacattgataccaaggtgtcactccttgcagcttgcgtgcgcagaggtttgaaggtactttctgcaatgggggctggagctcgagctgatcccaccagaattcgtgtcgcagatttgagagaatcaagcaatgaccccctctctcgatcggtgaggtacaggctcaagaaagaacatggaattgagggtggaataccagtagtcttttcattggaaaagccaaaggcaaagcttcttccttttcaagcttcaaaagaagaggaaactccatcagattaccagattgtgccaggattcagggttcgcattataccagtattgggaaccatccctgcaatatttggtcaagttatggcctcctatgtggtcactcagcttgctggattagattttcaaactgaaccagttgttaacctggatttggatcattaccgtatacttcatcagcgtcttattgagcatgaggaactgatgtatggcacagccgagcaagttctggtagatgctgaagaggtaatgtacattgtcaaagaattgtggcgtggtcgaagtgctagagaccaaagccaggacactggccggaagatgtggagatctgtgaacgaactaatgcttgttcggtgggacaaatcaaaggctgctggcatctcaaacttaatacttgtcaagttcagtgaggctgacgcccatgaatccaccacactcgaccgaataaaagaacaagaacctgaattctactctatggtttcacgtgtcctgaaacgagctgagatggagtttgccttatgacttgatgagtagcgagggttgatcctgttggactcccacagttgctattcagtgatggccttggaacagcattcagtttggcgggaatcacacttggggtacctgattggtgtgctatggtgaaaatgtgatgtgcaaagtttcttcttgaggccgctgaaacatcagctctgtgttatcactgagttgtgcacttgtggccatctatgtatgttttttttttctgcacgccaaatctgaaattttgtttctagtctgattgtctgatgtagttttgatgtgatttatgcttgctgtttaccacgaacatagccacttgtagacttaccgatcaccgatgataatgatatgacacgggtttgcgctcc

SEQ ID NO: 135081 - DNA, 2414 bp, Zea Mays
atgggggagcgggcgaaggaatggctcctcgcagcaggcgccggcgccgccgtcggcgcgctctctgccgccgctgtcatcgatcttctctcgagatccaagcggagagagaggtacgcgcgggacctgctggagtccaatggaatgacgactgggaacactcggtccagcaagcacctgggctctcttggtagctcggctcttctctctgatgaagtggtctctgaacagcttacaaggaatatacaattttttggcatggactctcagaagaaagtgactgaatcctatgttgtggttattggtcttggaggggttggcagtcatgcagcatcaatgctcctgagatctggtgttggcaggttgcttcttgtggattttgatcaggtatcactctcatcactaaatcggcatgctgtggcaaccagagatgacgttggaacttcaaaagcgttgtgcctcaagaagcatttttcaatgatatacccagagtgccaaatagatgcaaaagtgcaattgtatgatgcatcgtctgaggaggaaattctttctggacagcctgactttgttcttgattgcatagataacattgataccaaggtgtcactccttgcagcttgcgtgcgcagaggtttgaaggtactttctgcaatgggggctggagctcgagctgatcccaccagaattcgtgtcgcagatttgagagaatcaagcaatgaccccctctctcgatcggtgaggtacaggctcaagaaagaacatggaattgagggtggaataccagtagtcttttcattggaaaagccaaaggcaaagcttcttccttttcaagcttcaaaagaagaggaaactccatcagattaccagattgtgccaggattcagggttcgcattataccagtattgggaaccatccctgcaatatttggtcaagttatggcctcctatgtggtcactcagcttgctggattagattttcaaactgaaccagttgttaacctggatttggatcattaccgtatacttcatcagcgtcttattgagcatgaggaactgatgtatggcacagccgagcaagttctggtagatgctgaagaggtaatgtacattgtcaaagaattgtggcgtggtcgaagtgctagagaccaaagccaggacactggccggaagatgtggagatctgtgaacgaactaatgcttgttcggtgggacaaatcaaaggctgctggcatctcaaacttaatacttgtcaagttcagtgaggctgacgcccatgaatccaccacactcgaccgaataaaagaacaagaacctgaattctactctatggtttcactttcgacgcgtgtcgaactagactgccacggacgcgaagatctcaaccacttgccacagcgcacatggtatggagcgagcggacccagagccacctctccagcttcgccccaggcccagcgtgctcgctgcctcgctctgccggagcctccctccaccatggtccacgtggccacagcaagaagaagaatccccatgcggcggcggtggcgaccgcattggaggaagcagggatgtgcggcgcgaggccaaggccatggcacgcctacgagatggcctagattctcgtgggacccacgatgccgcgcgcgcagtagcatcgcaccccgccacaggaaacaggatgctgcagggaggcgcccgaagcgccgccacggggacgaggacaacccatccccgaccccgacggcgttgtgctggcagacaccgccatcgtgggcgaggacgaccgctgaggtggaggcggcggaggagaagaggctgaggatcagcccgaggccggactcgtctgccgctgcggcggcggagcgcgcgccaggcgaaggcggccgagatggaggcagccgccagcaaccaccgccaagagctggcgtctttggagcccaagcctcgtggcaccacaccaactactttcccatcaccgatgacccgctcgagcccaccgccgccgaggagggcgaggacgccgatgacaatgagggcaacacggaggagtggaggacattgtctagcgcctccgactaagctagactgcaacttttaaaatgtatgtaaatagttaatttagcatctcacttccagcaaagatgatactcacacgtagtttcatgttataatgatttacgtgttccagtttcttttatatcttccaagttgggttgatcaaagcttattctgaaaccagattacccaaaaaaatgtttgtatgaaattaagattttgtttcgtattcctcttggaaactaatgtttttacaatgtttgtccagcggatataaaattaagtttttgtcatttttgtatgatgccaaggttatagagagagtagtgtctgcaagatttgcagaaatagaaaacaaa

SEQ ID NO: 135082 - DNA, 326 bp, Zea Mays
aataagtttggcatgggagaaaagaaatcatgctgctcaccatctaagatcaaagatagttcaggtggagctgtgcttcgttatgctttgcacctgcgatttctttgcccctccaagaaatcatcaaaaccaatgcttcggtgcaaatctgagccaacatcgtcaccatatagtagcattgcagtactcgaggaagagcgaaggttctatctctacaatgatcttaggagttgtatttcctcgttcctcgaaggcactcatatgcagatgaaggccagctgagagtggagcatgacttccctgccgatcccaagtacttcgacata

SEQ ID NO: 135083 - DNA, 309 bp, Zea Mays
gcaggcggcggccggagtcgagcgagctcggcggcgagctcggcgggagaggcgggcgccgggcgggcggcgagctcggcgggcgcgctcggcgggttagattagttttggttggggtgcgccaggcttaggcagtagtgcaacacctaagcgacgctcaagagctccagtagcaagctactgttgcgagctctaccccacaaaaaataaatttaatatcgaagtagacacatggtctacatatcagatattaaactgataagaacagatactacacttgatcttagccaaaaggccgagaaaggtatg

SEQ ID NO: 135084 - DNA, 1590 bp, Zea Mays
aagacccaacgacactgaccagctccattatctatttctcacgcaagtcgctaaagagctcgcctcgcacgcacacgtaaacgtacgcgaccatggctgaggaggtcacgccccacaacatccacatcctcctcatctgctacccgagccagggccacatcaaccctatgctccgcctcgcgaagcgcatcgcagccaagggcatcctcgtcacctgctcctcgtcctccgtcgtccgcgacgatctcgccgctgcctcgggggtgtcggctggcggcgacggcgtgcccttcggcgccggccgcctccggttcgacttcctagacgacccattcgacgggacacttctggacctggaggacttcctgcggcaccttgagaccgccgggcggctggctttggcggacctgctgagacgccaggcggaagcagggcggccggtgtcgtgcgtcatcggcaacccattcctgccgtgggtgaccgacgtcgcggccgacgctggcatcccttcggcggtgctgtgggtgcagtcgtgcgcggtgttctcggtctactaccactttgtgcacgggctagcggagttcccgcgcgaggacgacctcgaggcgcggttcatgctcccgggcctcccgacgctgtccgtcgccgacgtgccgtcgttcctgcacgcgtcacacccgtacaaggtactcggcgacacgattcaggaccagttccgcaacatgggcaaggcgtcgtgggtgttcgttaactcattcgccgagctggagcgcgacgtgatcgccgcactccctagcgtcaggccgcgccctccgcagctgatccccgtgggcccgctggtcgagctcggggaccaggacgacgccccggtgcgcggcgacctgatcaaagcggcggacgactgcatcgggtggctggacgcgcaggcgccgcgctccgtcgtgtacgcgtcggttggcagcatcgtaacgctctccaccgaggtgattgccgagatggcgtacgggctcgcgtcgaccggccggccgttcctatgggtggtgcggccggacactcgccccctgctccccgaggggtttcttgacgccgccgtcgcgggtcgcggcatggtcgtgccgtggagcccgcaggaccgcgtgctcgcgcacgcctccacggcatgcttcctgacgcactgcgggtggaactccacgctcgagacggtcgccgccggcgtgcctgtgctggctttcccgcagtggggcgaccagtgcacagacgccaagttcctagtcgacgagctcaggatgggcgttctcctccgcgccccgctgcggcgggaaggtgtccgcgaggctgtcgatgcagcaacgacaggggcagaggctgacgccatgttcgccaacgccatgttttggagcgcggcggcgcgggctgcattgacgccaggaggatcgtcggaccggaacgtgcaggcgttcatcgacgaggtctctcggcaagcacgtcagaggacaagctaaaagcagctacggtctagtttttaaaataaaaagcaacatatccgtgcgttgcaatcgattgtatatataacggcttatatatttactc

SEQ ID NO: 135085 - DNA, 876 bp, Zea Mays
aacacatgtacttgaactggtctacatatgtatccaaatccaaaccaaggaacgtcaaaagcaagagaaatcttcacatgatcgatgagaaacacgaccattagtcacatgattcatcactagctagctagctacaacgcgctaccatagcaacagcatgacgacgaccaacccaaccgcgatcctctccgtggtgctgctcatcgcgggcgtcgctgtgatgctcgtcgcccacatcctcgtcgttttctgggctctgctgcgggggctcggctcccgcggcagcagccagcacgccgccaaccaggaggagcgcgtagaggacggccgcggccgccggggactgtccagcggcgagctcgctacgcttccttgccatgagtacttcaaggctgccgcagacggagagaccggggactgcgcggtctgcctcgaggcgttcgaggccggtgaccggtgcaggcagctgccgcggtgcgagcacagcttccacgcggagtgcgtggactcgtggctcaggaagagcagcgcgtgccccgtgtgccgcgtcgacgcagtggaccggcggccgcccaagggcgaggcgaaggcggcggcggtctcaggggtcgtcgtcgtggacatggcggggaggagaagctcgagacccgcaccggagatcgtcattgaaagataggttgcctgcgtacggcccatggcagttgggaatcgggacggcgacaagctgcgttggggcaacacttgaaccactagattttgttgcttgtgcaagcatgtggacaccttcttttaagctgcacactcaactttcctttcatctgtcacatgaatgtaccttcgttatcttgatgttacgctatgaaatgttgccatgca

SEQ ID NO: 135086 - DNA, 294 bp, Zea Mays
cccaaaggatgtaaagtatggactaatttagtaatctgaaaaaattcaatattcaatgctggtcttgcatacatgcactgatgagagatgactatcatatgcaaacattgtcccgtcacaaaaacatgtttgggacaatatttagtcaaacctttaaaagtgcaaacatcaataaattctaaattatcttgtttcaaaaccgtgcaagtttatgatgtagaattgtattgcaaatacttgctaattaaatctcattaagttcaagaattttgagaatatattctagaaaatttc

SEQ ID NO: 135087 - DNA, 965 bp, Zea Mays
agcacgagcagcggcgagcgggcgagagcgccaccaggcaccagcagacccctcttgtctctctcaccacgcttcctctccctcgttgctttactacgccttctctcctttgtctcttccctcctttttcacccggcgacgtcgagcgagaacggccgggccccaaaagaggccgcattcttggtgctttctgaaccttctttactttgtcctcaaatggcctcctcgctctcttcacatctcccttcaccataggcacaggcacctctccccccctgcaagctcctccctttctcgcctcctgattcttgctctgtcagcccagaggcagagcaagcaagcatcggcggccatggcggcgccaggtcgagcggcgctcctggccgccgcgctcctgttcggcactttcttcccatccgcgtcctctgcgtcctcgtaccccgcaaggattgcgggcaggctcctgtccaccacgtcgtcggcagtggccaagcagctgtggtcgctcaaatcggccgccaccaagacggcgacgacggccgtgacggggcggtccatggtgaggtacgagggcgggtacgcggtggacacggtgttcgacggcagcaagctggggatcgagccgcacgccgtcgagatcacccccgccggcaacctcctcgtgctcgactccatcaacagcaacatctacagggtacagctgccgttgtcaccatatagcagaccaaagctccttgctggttctccaaaaggtttatctggccatgtggatggaagactgcgagaagcaaggatgaaccatcctaaagggttcactgtggacgataggggcaacatttatgttgcagacggcatgaacatggcaatacgaaaaatcagtgatacaggtaagctaaaatggcccattctgaggtagttcacatggcattgtctggtcccccagttccccttctgtttgttctatg

SEQ ID NO: 135088 - DNA, 2162 bp, Zea Mays
agcacgagcagcggcgagcgggcgagagcgccaccaggcaccagcagacccctcttgtctctctcaccacgcttcctctccctcgttgctttactacgccttctctcctttgtctcttccctcctttttcacccggcgacgtcgagcgagaacggccgggccccaaaagaggccgcattcttggtgctttctgaaccttctttactttgtcctcaaatggcctcctcgctctcttcacatctcccttcaccataggcacaggcacctctccccccctgcaagctcctccctttctcgcctcctgattcttgctctgtcagcccagaggcagagcaagcaagcatcggcggccatggcggcgccaggtcgagcggcgctcctggccgccgcgctcctgttcggcactttcttcccatccgcgtcctctgcgtcctcgtaccccgcaaggattgcgggcaggctcctgtccaccacgtcgtcggcagtggccaagcagctgtggtcgctcaaatcggccgccaccaagacggcgacgacggccgtgacggggcggtccatggtgaggtacgagggcgggtacgcggtggacacggtgttcgacggcagcaagctggggatcgagccgcacgccgtcgagatcacccccgccggcaacctcctcgtgctcgactccatcaacagcaacatctacagggtacagctgccgttgtcaccatatagcagaccaaagctccttgctggttctccaaaaggtttatctggccatgtggatggaagactgcgagaagcaaggatgaaccatcctaaagggttcactgtggacgataggggcaacatttatgttgcagacggcatgaacatggcaatacgaaaaatcagtgatacaggggttacaaccattgctgggggaaaatcaattagaggagggcacatagatgggcccagtgatgatgcaaaattctcaactgattttgaaatcaagtacatcagcagtagctgctctctcttggtcattgatagaggaaaccaagcaattcgagaaattccactcaacgatgatgactgtgcatatcagtatgaagctggttttccactagggtttgcattgctttgtgctgctggcttctttggttatatgcttgcgatgctccaacgccggcttttaggaatgtcatcaacaacagatgatcctcaagcgcctccaagacccagcattgcaagtatccctccatcataccagaagcctttaaatccttatattcgtcatccattcatcccgagagaagaaactgcaaaacaggaaaccggagaggggttcttcaccacagctggcaaactcatgggaggggcaaaatcatctgtgggtgagatatttggtttcaagaagaagcgcctgagcagcccataccatcatcagcagcagcagcagcgaagagctaacccgtggccagtgcaagaaagctatgccatgacacacgatgaaccacctccagcactggacacgagagcaccaaccccgcagaagaactacagcctcatgagaaaggagcccgagaagacccactacgtccgccatgggcacccgtatttcaatagctgggacggtcactgtcacccccagcagcagccggaccagcagctgtatcgccagcagcagcacctgcagcagcacaggcagtactctgcaggcccacagacattttacgagcagagctgcgagcctacaaaggagatcgtctttggcgcggtccaggaggtggacagcaagcggcgcatggtcgagatcaaggctgtgaactacggagacacattctatgagcggtacggaatgcggtaccgcaacaatttcatcggctacaacaacaataacaactactgaacagcctgcctatttcttcaacttttcctgcccgtctaggttagatttactggttgttgtttctttgtttgcaatcctccacattccctgtaacaaaaaaaaaaaagaaaagaaaagtgggggcagcagaagctatctcctgtttttgacttgtacaaacggggaaaaactgggttttggaagcacatcatgattgcatattccttagactttctgatgtgtatgtgttttactgacatatttcagactagtaggtacagcaataacttcttacattcctgca

SEQ ID NO: 135089 - DNA, 86 bp, Zea Mays
gtcaatagttttactggcaagggtccggcaccctgtggctgtgatgacaggtagcccccccaccccacaaccaaaaaaaataaaaa

SEQ ID NO: 135090 - DNA, 1134 bp, Zea Mays
aacactattaaaatgcatcctcttattattgtacatataagaaatgtagaataaactgaaccaaatgtgaccttttctgctgacaccacaaaagatgaaatgaaaacgaagtggccacatcatttagcaaaaggacaaatggacaatttgaccaaaaggaatgtacagcaatagctctcacacggttgaagcctgtagtaggatcaccattcatatcggtaaatttgatttgatggctacattaatccccagtgaaaaaatcaatcaaacacacattaatatccgcagcaaaactcagggaattgagcacagaagaaacagcccccaccccaaacctgctccaccattttattgtcaaccataacatcgaacaggtgaggtgcaatcataaacaacccgtccggccgtcggtctcaagaaggcgaggctctgtatgatcgtaccgaatataagagtgaccagattgagtagtacgaggctccgggccttcctgggcacccaagacaccaccttccgccacgcagcgcgtgccctccgcctcgccgaccagagggccgtccgcggcggtgatgggtcctcagtttcagtttcagggtcagcggactcgcgcattccaggcgacaccgccttccacctcctgatttcatccggcggcttattctgcgatgaccccttcgcggcagagagtggggaatccctggacgggaagctggaggaggcagcggccgacgaccgaaggagatgtcgccgttctgataatgtcgtcgcggggatgcgggagcgagggcgaacgagaggaacgcctggttgcaggcaggtgcgccccggacgggtagggctcggatgcttgggaaggaacatccggagcccggaggagaagattccgaaaggaggcgatgcgcgatcggacgagagcgccgggcaggctagtaggagacgtgtgagtggccctcaaaagacgaggatactatttggagcctccaaatgctatgacctaaaataggtacctttcaactttcatgttttaaagatattaatataccgtgcatcctgcgtacgatatcagaatcatttgtataacttttacatgattgtagtactcaacaaaaaataagatcatacaacattgtgata

SEQ ID NO: 135091 - DNA, 315 bp, Zea Mays
atgggagccgctcggccatgggcgcagcaagccagggatgagcagccggcgcgcataaaaaggagtcaggggcggtccggcggtggaaggataagattcaagaagaatcagagcatccacgacgtgagatatttcaaagagaagagacgcataggagaaggcttccgggagctaagcggcgtgggccaacatgagggagcagggaaggatgaagacatacggctcctggagactgtcagggaagaatcgagcaggaaaatgtgtgtccgtttatgtggatggagcatgagacgagagtgcttagaagccacataa

SEQ ID NO: 135092 - DNA, 283 bp, Zea Mays
ggtcagtcacatttttagaaccttcgaaagaggaaggcccccaacacatgataacatcatttcatcatgacatcatgcataacatctcttacaatttcatacaaaagagagcaagaaggaaatatcctcttctttttgaaatctatgaaaaggttcagccaattggtaatagtgtcaagaacctgaagcaatttagaaaaagcctcgtcgaaagcactcagaagcatttacctatttcgaaaaggtaactctttcgggaacattattgaaaacatcatcaaca

SEQ ID NO: 135093 - DNA, 157 bp, Zea Mays
ttatatatttttatatttggcacatgcatggaatgctgatacagtttatatgaaagagttagttatagttacaccatgcatacaatacatataaatcgttatttgctccacaaagaatacaactactagaataatcccaataatgaccgagtacccg

SEQ ID NO: 135094 - DNA, 1854 bp, Zea Mays
gttcaaaaaccaaatgttctccctgctccaccccgttctcactccgtcgccgcgtgctcgccggaaccctaggaccctgcggccgtggtaggaagcgctgccgcagccatgacagggacaacttggataattgacagccaaagatttgccaccaaaataaaaaatgcttctgggtcttcagatccaagtaaacagaaatggatcggcaacccaagtaaagagtgcccaaagtgcagtcatgtgattgataacagtgatgttgttcaccagtggcccggtttgcctaaaggtgtaaaatttgatccttctgaccaggaattaatctggcacttaatggcaaaacatggaaaatctggaataaaaccacatccgttcattgatgaattcattccaacagttgaggaagatgaaggcatctgttacactcatccacagaaacttccaggtgttaaacaaaatggaagtgtatcacatttcttccacagaacatttaaggcttacaacactgggactaggaagcgtcgaaggataaacactgacgatgctgatgtccgttggcacaagacaggcaacacaaagccagtactagttgatggaaaacaccttggttgtaagaaaataatggtgctttatataagcccgttgaagggtggaaaggctgagaagaccaattgggtgatccaccagtaccacctaggcactggagaggatgagagagatggtgaatatgttgtctccaaaatattttttcagcaacagtttaaacctagggacaagaatgctcaagagctaactacatccgatgatctggaatcaatggctgctgaatcaaatctcccagattttactacattgcccactgacaaacatgttggtacagtccaagaagttgttcataatcctgagcataatctttaccagcttaatagaaactgtgaaataaacattgaagagactgttgtcctcccaccctctgtaaaaacaacaaaggacggagataatctccaatcacaagatcagaagttgtgggaaggcgattcccagtttgaattgttagactctcagcagctggcagaaggactcgctctctgtgacgagttcctcctgagtcagtctcagacctcttgtggaggtggagatgaacctagagagaccaaaccctgcctggctgcttatgcccatctgtcagcagaggacttcaagaaggatttagaggagtgccagcggttggagcccacagataacacaaaccttgagcttgacaacactgatgagtttcgactcagccaaattgaattttcacaggatagctttatgacatgggcagctgaaaagattactgacgactgacgctgccctagtgcactctcggcaccattttggtacatgaagaaacaactgatctgttttttgtgggacggcagtgaagtatgcaacaacagtggtctcgcttttgctttgagtagctctggtgcacatgaaatgatttatatgaaatatgaaaggctgaggaatcatgctgtaccaactgtggagtgttgttcagtgtgagattggcctttcttggttgcatcagcttgtacattttgtaatgaatatgctcattttagttggcagaccagttgcttgtttggaattggtactgacgtattgctctgctaattttcggatttttcagggattaatatttgagtcttctttttccatgcatgccctgattgaaccaacgcaagcatagatgagccataacatcatagaatagtgagatggaaaaaaatgctctaagtttttctttagctcttttatagcgaggctgggaacaaatctatcttacacctccaacctttcgtgtat

SEQ ID NO: 135095 - DNA, 1712 bp, Zea Mays
gttcaaaaaccaaatgttctccctgctccaccccgttctcactccgtcgccgcgtgctcgccggaaccctaggaccctgcggccgtggtaggaagcgctgccgcagccatgacagggttgttcaccagtggcccggtttgcctaaaggtgtaaaatttgatccttctgaccaggaattaatctggcacttaatggcaaaacatggaaaatctggaataaaaccacatccgttcattgatgaattcattccaacagttgaggaagatgaaggcatctgttacactcatccacagaaacttccaggtgttaaacaaaatggaagtgtatcacatttcttccacagaacatttaaggcttacaacactgggactaggaagcgtcgaaggataaacactgacgatgctgatgtccgttggcacaagacaggcaacacaaagccagtactagttgatggaaaacaccttggttgtaagaaaataatggtgctttatataagcccgttgaagggtggaaaggctgagaagaccaattgggtgatccaccagtaccacctaggcactggagaggatgagagagatggtgaatatgttgtctccaaaatattttttcagcaacagtttaaacctagggacaagaatgctcaagagctaactacatccgatgatctggaatcaatggctgctgaatcaaatctcccagattttactacattgcccactgacaaacatgttggtacagtccaagaagttgttcataatcctgagcataatctttaccagcttaatagaaactgtgaaataaacattgaagagactgttgtcctcccaccctctgtaaaaacaacaaaggacggagataatctccaatcacaagatcagaagttgtgggaaggcgattcccagtttgaattgttagactctcagcagctggcagaaggactcgctctctgtgacgagttcctcctgagtcagtctcagacctcttgtggaggtggagatgaacctagagagaccaaaccctgcctggctgcttatgcccatctgtcagcagaggacttcaagaaggatttagaggagtgccagcggttggagcccacagataacacaaaccttgagcttgacaacactgatgagtttcgactcagccaaattgaattttcacaggatagctttatgacatgggcagctgaaaagattactgacgactgacgctgccctagtgcactctcggcaccattttggtacatgaagaaacaactgatctgttttttgtgggacggcagtgaagtatgcaacaacagtggtctcgcttttgctttgagtagctctggtgcacatgaaatgatttatatgaaatatgaaaggctgaggaatcatgctgtaccaactgtggagtgttgttcagtgtgagattggcctttcttggttgcatcagcttgtacattttgtaatgaatatgctcattttagttggcagaccagttgcttgtttggaattggtactgacgtattgctctgctaattttcggatttttcagggattaatatttgagtcttctttttccatgcatgccctgattgaaccaacgcaagcatagatgagccataacatcatagaatagtgagatggaaaaaaatgctctaagtttttctttagctcttttatagcgaggctgggaacaaatctatcttacacctccaacctttcgtgtat

SEQ ID NO: 135096 - DNA, 1292 bp, Zea Mays
ggctaacagttgtatgatcgtgtcaaccatgactcggcgaggacgtgcacttgactccctctggcggttttttttgtttagccctcgttcaaaaaccaaatgttctccctgctccaccccgttctcacgccgccgccgcgtgctagccggaaccctaggaccctgcggccgtggtaggaagcgctgccgcagccatgacagggacaacttggataattgacagccaaagatttgccaccaaaataaaaaatgcttctgggtctttagatccaagtaaacagaaatggatcggcaacccaagtaaagagtgcccaaagtgcagtcatgtgattgataacagtgatgttgttcaccagtggcccggtttgcctaaaggtgtaaaatttgatccttctgaccaggaattaatctggcacttaatggcaaaacatggaaaatctggaataaaacctcatccgttcattgatgaattcattccaacagttgaggaagatgaaggcatctgttacactcatccacaaaaacttccaggtgttaaacaaaatggaagtgtatcacatttcttccacagaacatttaaggcttacaacactgggactaggaagcgtcgaaggataaacactgacgatgctgatgtccgttggcacaagacaggcaagacaaagccagtactagttgatggaaaacaccttggttgtaagaaaataatggtgctttatataagcccgttgaagggtggaaaggctgagaagaccaattgggtgatccaccagtaccacctaggcactggagaggatgagagagatggtgaatatgttgtctccaaactattttttcagcaacagtttaaacctggggacaagaatgctcaagagctaactacatccgatgatctggaatcaatggctgctgaatcaaatctcccagattttactacattgcccactgacaaacatgttggtacagtccaagaagttgttcataatcctgagcataatctttaccagcttaatagaaactgtgaaataagcattgaagagactgttgtcctcccaccctctggaaaaacaacaaaggacggatataatctccaatcacaagattagaagttgtgggaaggcgattcccagtttgaattgttagactcgcagcagctggcagaaggactcgctctctgtgacgagttcctcctgagtcagtctcagacctcttgtggaggtggagatgaacctagagagaccaaaccctgcctggctgcttatgcccatctgtcagcagaggacttcaagaag

SEQ ID NO: 135097 - DNA, 993 bp, Zea Mays
atgtctcaggttgttcaccagtggcccggtttgcctaaaggtgtaaaatttgatccttctgaccaggaattaatctggcacttaatggcaaaacatggaaaatctggaataaaacctcatccgttcattgatgaattcattccaacagttgaggaagatgaaggcatctgttacactcatccacagaaacttccaggtgttaaacaaaatggaagtgtatcacatttcttccacagaacatttaaggcttacaacactgggactaggaagcgtcgaaggataaacactgacgatgctgatgtccgttggcacaagacaggcaagacaaagccagtactagttgatggaaaacaccttggttgtaagaaaataatggtgctttatataagcccgttgaagggtggaaaggctgagaagaccaattgggtgatccaccagtaccacctaggcgctggagaggatgagagagatggtgaatatgttgtctccaaactattttttcagcaacagtttaaacctggggacaagaatgctcaagagctaactacatccgatgatctggaatcaatggctgctgaatcaaatctcccagattttactacattgcccactgacaaacatgttggtacagtccaagaagttgttcataatcctgagcataatctttaccagcttaatagaaactgtgaaataagcattgaagagactgttgtcctcccaccctctgtaaaaacaataaaggacggagataatctccaatcacaagatcagaagttgtgggaaggcgattcctagtttgaattgttagactcgcagcagctggcagaaggactcgctctctgtgacgagttcctcctgagtcagtctcaaacctcttgtggaggtggagatgaacctagagagaccaaaccttgcctggctgcttatgcccatctgtcagcagaggacttcaagaagagagtaggaggacgggtcggggtgagagccgccaga

SEQ ID NO: 135098 - DNA, 2312 bp, Zea Mays
atggtgcggggtccggtgccgacggtcggtgcgggcgggacgccatacactccgcccacggtgttagaggaggcgaccccgccgtcgtgggtcgcaggcgaggagctgttccgccgcggcaatctgagcagcgatagcatcagcggcctcgcgttcgcgctcccacacgagagcggcttcccgcaaacgggcctgtcgcgccgcgtgctccgcacgggaagcagtcagggcggcgacggtggatccctggtgggcgaccggtggagggggaggcggcggatcaacgacaggcgacgaggggattggcgggggagggtcctccggaccggcaacccccgcaggaggggcatctgccacagccgcaaggaccgatgcggtgcccgtcgcggtgagggaccctccggcggcaatgggccctgccccccacggcggcctaagcacagcagcagcggcaggagggacggcggcgggtcgaccaagagacgcggcccgtacccaggaagagaggggagggaactcggcatccatgggaggagggaagacccgggcgcgctggcggcgctcgggggcgtctggtcgggcgggacagaggcagggcgtgcgggggcgcgcacctgggcgctcctggcaggcgcggcgcggctcctggcggcgctcgcctgggacagaggaagggcggggccgggcgagcagagcggcgctctagcggcgctcccctgtgcgcggcgaggcagaggcagggtggggccccccaaggcagggcgaggcgggcagagcggcgcgccggggcgctccgggtgggtgcggcccctggcgggcgcggcagcgggcgctggcggcgcccctgggcgcgacgacggcagcagggaagggaggtggcggctgcatagggaagggaggtggaacccctggctcgataccatgtctcaggttgttcaccagtggcccggtttgcctaaaggtgtaaaatttgatccttctgaccaggaattaatctggcacttaatggcaaaacatggaaaatctggaataaaacctcatccgttcattgatgaattcattccaacagttgaggaagatgaaggcatctgttacactcatccacaaaaacttccaggtgttaaacaaaatggaagtgtatcacatttcttccacagaacatttaaggcttacaacactgggactaggaagcgtcgaaggataaacactgacgatgctgatgtccgttggcacaagacaggcaagacaaagccagtactagttgatggaaaacaccttggttgtaagaaaataatggtgctttatataagcccgttgaagggtggaaaggctgagaagaccaattgggtgatccaccagtaccacctaggcactggagaggatgagagagatggtgaatatgttgtctccaaactattttttcagcaacagtttaaacctggggacaagaatgctcaagagctaactacatccgatgatctggaatcaatggctgctgaatcaaatctcccagattttactacattgcccactgacaaacatgttggtacagtccaagaagttgttcataatcctgagcataatctttaccagcttaatagaaactgtgaaataagcattgaagagactgttgtcctcccaccctctgtaaaaacaacaaaggacggagataatctccaatcacaagatcagaagttgtgggaaggcgattcccagtttgaattgttagactctcagcagctggcagaaggactcgctctctgtgacgagttcctcctgagtcagtctcagacctcttgtggaggtggagatgaacctagagagaccaaaccctgcctggctgcttatgcccatctgtcagcagaggacttcaagaaggatttagagtgccagcggttggagcccacagataacacaaaccttgagcttgacaacactgatgagtttcgactcagccaaattgaattttcacaggatagctttatgacatgggcagctgaaaagattactgacgactgacgctgctctagtgcactctcggcaccattttggtacatgaagaaacaactgatctgtttttttgtgggacggcagtgaagtctgcaacaacagtggtctcgcttttgctttgagtagctctggtgcacataaaataatttatatgaaatatgaaaggctgaggaatcatgcggtaccaactgtggagtactgttcagtgtgagattggccttggttgcatcagcttgtacattttgtaatgaatatgctcattttagttggcagaccagttgcttgtttggaattggtactga

SEQ ID NO: 135099 - DNA, 777 bp, Zea Mays
atgaatccgcatggtcaccccatctcacaacggatacagattacagtctcagcgcaaccaaccaacgacagctcccgtccgtgtgcctacgccgaatcaatccgtcggccgcgtcagccacagggagctgagcgcacggagccgcgagaagtagtcactgatgacgagcagcgcgcgcgcggcttggcgcgtggtcaggatccggcgcacctgcttcagcgtctgctgccgcagcaggtccgcctggcggaggaagttctccacggtggcgagcttgctcatggcgacggccatctggcccatgtagttggtgacgctgtcggcggcgcacggcgtggcggcggcggcgagcgtgtccccgagggcctgctgcagggcctccatcccctgcgacagcgcgtcctcggcctgctgcagcgactgctgcaggccgcagatgcccaccagctgctgctccgtcagcggctccacgtgccgcgccagcaccttgagcagctccgacgaccggaacccgcccagccacatgaagaaccgctccgcggggctcatccacatgcccgacagcacgtggaacacgtccgtcctcgtggccacgcccttgagccggaacatctggtcgtagtgcagcatcgcgccgtccaccagcacgcccaggtcgtcgtcgccgatctgcgcgctcagggccacccggaggtcgttcatgtggtgctggtgctcgtccagccaccgcgcgtactccaggtcgaacgccaacgcacctgcaaggacacaggttag

SEQ ID NO: 135100 - DNA, 1233 bp, Zea Mays
atggggttcttggacggcttccgtcccgacacgctgctaaagcgcgtctgcaagtcgctgctcaagaagcggctgggggatctgatcctcggcgacctggacctcgatcagttcgacatccagcttggccacggcacgctgcagctcaacgacctcgctctcaacgctgagttcatcaaccgtaagttatcaggatcccctattacgctgaaagaaggatcaataaaatccttgctagtaagattcgctgctagctgcgagattgttgttgaagaattggagcttgtgctttctccatctgttgcaagtgaagttgatgatgtgcatactgaatgctctgtctctggtagtactagtgacacacacactttagtcaagatccaaagaaatgaatccgatagtaatcagtgttccacttctgtatctcgagatgtggatgatggtgtaaagagaattgccaatgccgtcaaacggtttctgacaagctttaatatcaagttaaagaatgcctatgtcatatttgatcctcaaaccagtttgagtagtagatttccagaaactagtcgatctctagttttccgaattaaagagttggaatttggaacccaacttggtctatttaaactggacaactttttaactttccgtgaggcagtcattgagtttttgaagatggatgatgtcgacacactgcttcaaaatgatctaaatagaggaacagctgacatttcagcacatcatagtactaccgcagtcttaaccggtcccattggtggattctcagggaaactcaatttaagcatcccatggaataagggttgcttgagctttgagaaaattgatgcagatgtatcagttgattcattagaattacgtttacaattcagcagcatccggtggatcatgaatgtatgggattctctccaaagaaagccagtagacgaacagagttgtgttcataatattgcagatatctctattagtgcttcgagctctgcctactgtccacctgcttcaagctctttgaagccatgttcagattctgtgatagccagtgactacatggcacagagcacattttctcaaaacaggcaggataaagttcaggattctttccttacaagcgcacacgtgataacagactggatggagcctgttgctcgtaaggatctgtgtgaccctgattcagattgtgatgaaaggtttgtttctgccctgcatttcattccttga

SEQ ID NO: 135101 - DNA, 5117 bp, Zea Mays
gttatttctgacagcattgatcagttctttgaatgttttgaggaattgaggaactcccagtcaagtttaggaaacagtggtatatgggactggacgtgttcagtattcaatgccataagttttgcatccactttagcttctggatctgatcaagttcctaaagaaccagttgtcgagaggaccttacgagcctccatcaccgagatatctgttcttcttttgttcagtgatgacacagatataaaaaattccagtgttcctatcagtgcattggatgatatgagacattctgaaatgttttcgagctgcctttcctctgagcattttgagaaatcaattatatctcctgctacagcttccagcttaaatatgcatcatctcaaagccaagtgtgagaacattcatcttgatctacagacttatccaaaaaatgtaaggctcaaggcatcaattgcccaaattaaacttgatgaatactaccacgccggaaacaatatttcagatgattcaaaccttggtaatcacttcttgaacaataacttgcggcaaggagttcaagcttccctccctcagtgcctgtttgctgttggagatcattcggtggaaacctatgaattttgtggcaatagttcaactgaattgactagagttgaattgctaaaaacttttggcgagtgcacattctgttatgatgtcagtaccaaagatcaagatggcaatttagtgagctcaacttccatgtcgatctatttggctcctttgcttttatgggtgcactttcatacaatatacatgctactgagttttgtaagtaatgttgagtctgatttgtcacatggagagcataaaattcaaaagcatggtgacgaaaagggaagcagattgactaccagcacaaccatgtcctcaagtggaagtctaaaagttcagatatccctagcacaggcaagaattgtcctgtgctttccatctgagttttcatgggatttgagccacccatctgtcctggataagttcctggtgatcgaccatacttcatgtctgaacatggtagaaactgcatcacaccctcaaaacgaaatgcaaaatgaggttcatcttagcaagtcgtgtacctcaatacatttggctgtaggggacatagatgtatatttggttaagccagtcaataatgtattggttggtagaatctgttcttcaagtaggcaaactttctctgcaatgaaaattctttctgttactggatccagttataatgactctggcatcacactgatcaggagaaagtatcctgtaactggccctgagattttgaacaatgcttggagtttgccaaagatgcatgatgaaaagatcactaaaaatcaaaacagcaaatgggctggcatttccccttcttcaaatgatcttttagagacaggatctagtatgcgccaggagctccttaagagcactgagctcttatttcatgttcaactttcttgtgtttcattacgacttagtaaaaaggattgtgagttactaaataagctgctagatcatgtcattaaggggatatcaaatgaacaaacaagcatttctggaaattccaaggaccaatctgttctgatcaatgataccttcattcaaacgtctgtcctttttgaatgcagtatattggaaatttgcactgaattgaatgaaacagtggaagttggtcctttattacaggcagaactaaaaggatcctggaactctgttaagttgaatgtttcaaaattttgtcttttctcctgttcaaatgttggaggcctcaacaatgccagttttctttgggtgaatcatggtgaaggtgagctttggggttctgttagtgctaagaatgataaaatccctggagaaagtaaagattttcttatagtggcttgcaaggactctgcctgcaggcggggtgatggtgaaggtactaatgtgctgtctattggtgctgctggctgttctgtgacccacatcaggaacccaaagctaaaagagaattacacttctgttgatgttcgttctggcacaattgtagcacctggtggccgtatggattggatcaatgcgatatgcctgctgttcagttcaggctcagatagaactgaaaagtcagatgatagtaacacaccaaatagctatcagtctggtgaaccttattcatcatctttatttatcgagttggctgatgttgctgttagctatgaacctcattttaaacattccactctcagtgctggagcagccgaccgcaagtttttctcatgccttttagctgcatcatcatttaaactccataataaatctgcatcagcctctgcagctactgattttgatatccaattacgtgatcttggagtcctcatttctcaatcatctggttcaacaaatggtacttgcagttatggtgtagattaccttcgtcaagcaggttatactaaggttgtccagaacacattcattgaagcttctctaagattagattcttccttttggaagcttgaaatatctgattcccaatttgacattggtacatgtcatgacacaacttatggtcttattggtttgggatctcaactccagcagctatatggtccagatatgcaggatgctttagatcatctgcagtctaggtggaatagtgttcagcaagcaaacaagcaaaatatggctgctgatgcatcagacaagtctgagagcagtttggagattttggtcgattctggggattaccagtcagatggacttcttgatgatattattgagaatgcttttaacacagaggattgcatggacaccaatttttgggagaacaattaccatcacttatttagtagcagtgagacggatgatggatttgagctgaatgcggccacttcacatgtatttcctatatctactccagaaggcaatgttactcaaatatcactagaacagaacgtctgtcctgatcaaatcattgattcatattgtgtgcctgaatttcatcaatcattatcaactctatgtgatgaagagcataaatgtacatctggtgacaattctcatagaaccctggaaagtgaagatgctggatggtataacaatgttcccttaacaatagttgagaatcatgttttgaaaaagaaaaacgagcaagtacttcaacacaaagtgtcttctgtttgcagtttgaatcctgatgaatattgtaatctgaaaggaaaggttcatattcatgatatagatgtaaagtggcggatgtatgctggagatgactggttattacctcagaaagatttgactagcttaacatgcacagatggaagaaataggagctcttcactggaatttactgtgagagggctcaatatccaagttgacatgtatccaaatggggatgtttctatatctaggctatctgtagctgctgaggacataactctttgtgatcaaagtatccatgctccatggaaactggttcttggatgttacaactcaaaggattacccaagagagtcatgctccagtgcattcaggttagaattggagtctgtgaggccggagccacaggctcctttggaagactacaggctccatcttgagattttgcctctacagttgcatcttgatcaagagcaacttaacttcctaataaatttcttcaagaatgattcatgtaacaatgatcctcatttgcattgcgaaaatgatactgttgatgtgaagagcacaagcaatggaagcaatatggttgtggatgaggcattacttcctttctttcagaaatttgacgtaaagccacttattctgcacattaattatataccccgtcagtttgacccgattgccctaagcaagggaaattacgcagaacttctcaacattcttccatggaagggaattgatttgaagcttaagcatgtttctgcaatgggcatttacggatggaacagcataggtgatacggtagcagcggaatggttggaagacatttctaaaaatcaggtgcacaaattgctaaaagggcttcctccaataagatcactagttgctgttggttcagggaccagaaagttggtctcgttgcccatcaaaagctacaagaaggatcggaaattgctcaagggaatgcaaagaggcgcagttgcttttattagaagtgttaccattgaggcagtagggcttggagtccatttggctgcaggagctcatgatatgcttgtgaagacagaatgcgcccttacaactgttccaccacctttagcctcatgtgaagtgaaacgaacaaagcacaacattagagctaaccaacctgaaagtgcacagcaaggaatgaaacaggcatatgaaagtttaactgacgggtttggaagaacttcctctgctatcattggcaatcctattaaagtttataaccgaggggctggtgtcggatcagttctggctactgcaatctgtggagcaccagctgctgcagtagctccaatctcagcatctgctcgtgctttacattatgcacttcttgggctaaggaacagccttgatcctgagcataagaaggaatccatgtacaaataccagggaccctcccaagcatagacgtcattggtggtcggttcattctttggcgagccttacaccatctccctgaaactggttttaggagctcctttgccagtctcgtccaatggtgaggtgcaaacttgtacagtgtgtacagatcgtaagacagattatatttggcatcaaagccacacactaaattgacacataagggtttaattagcactcatattttgcaccacgaaggcacgtggaagttttgtaatccctcttcgttgcatgactgcccccgatgtacataatgtggttgctgtgtgggttgtgcggatgtaaattatcttcatgactgtccccaatgtacataatgtggctgctgcgtgagttgtgcggatgtaaatatctcttttgctttggttgcgtgtgcgcgcgcctctggtccgctgttcaagagtgtgttttgagctgctgctgctggtgtcatttgccgcagcccatgaacctgatcattctggctttctagtgttatcacgctaaaatatctgatatagaagttgtgc

SEQ ID NO: 135102 - DNA, 289 bp, Zea Mays
gaggcagggagcagaatggtgtacgaggccaacgcgcgcgtcagggacccggtgtatggctgcgcgggcgccgctgcagcagcaggtagaggcactgcaggcgcagctggcgctggcgcaggccgaggtggtccgcctcaagatgagcaacgactacgtcctgcgccgcatcaaggcggtcggcgccggcgggggcaacagcagcagctacgccagctcgccgttgtccatgtccttgctcaagatgacagcgacggcggcggagccgtacgcgcgctgcagggccact

SEQ ID NO: 135103 - DNA, 189 bp, Zea Mays
aagcatgtctgggataactactgcttgacacatcgcaatgagaagttgatagaggacaattcaacgctttcttcttatgacgttcggaataactctaaggtctgtttctcgtcgcacgtcatgtccagagtacatcggaaacactcaagaagaagaaaacatcgcttcttccatggtcttagcaggaaa

SEQ ID NO: 135104 - DNA, 563 bp, Zea Mays
tcaaatccaaattgtagatgttttaccatattgtaaatcattttagcttttgtagattcaatagtttttacaacgcacctatatgtgttacatttagatgcttttttaaaaaactatttagctagaaaagccaagacgccttacaattcataatagaaaaggagcaaactaaacaaatcagcaatctacctcttcccaccaaatcaaaggcctcgatttgacacggtgtaacagatattgaattaatatgtacttagaaagcattccgaacacatgaaaataaaagatggtcagcagcatagcataaacaaccaagtatctctcatcagacggaggtcatcagaacgacactatgctgttctgctactgcctcggtttcctgcatccaccacaccatatcacccactattgctgctgctcgtcaaactcgtggccatgatcaaggaggtagttggctgcaagctcttcgtccttgttgcatgcaaagaaaacttctagcacaagctcatggttgaagcccattccctcaagctgataaagaatataataatataataatgtaa

SEQ ID NO: 135105 - DNA, 444 bp, Zea Mays
gagagtatctaggtcggccccgagcgccacgcgctggttttctagcctgcagctttcggattgtttcgcctttaacttcgcttccccgtgcgctctcgtcgtcttcgcgaggtcgaaatccccaaggcgaggcgttgaaacccttaaccctcttccacctcgaagcggcgcgaggagggagagtgtgagtggactcaggaggcggcgggcgaaatgaagcttaacgtcaagaccctcaagggcaccaacttcgagatcgaggcgagccccgatgcgtcggttgctgaggtgaagaggatcatcgaaactactcagggtcagagtacctacccagcagaccagcaaatgctcatataccaagggaaaattctgaaggatgagaccactttggaaagcaacggagttgctgagaacagcttccttgttataatgctgtccaaggta

SEQ ID NO: 135106 - DNA, 1752 bp, Zea Mays
gcacacatttttcttctaaaatctacagtacactacatacaaactctagactgtacgtcggcacatgtgaatacattgagcgtacaagcggccatcactgagtagcaagatcgttgcacaccgctcggaagagaaatgattgccacgacccgcggcagctcggcgaaggcggcggcggcggtgggcggcaaggcggcgcgcgcctgtgacgggtgcctgcggcggcgggcgaggtggtactgcgcggcggacgacgcgttcctgtgccaagggtgcgacacgtcggtgcactcggcgaacccgctcgcgcggcggcacgagcggctgcgcctgtgcccggcgtctccgctgcagacgccgccagatcgctcggcggcggcggcagcgacggcgactaataagcgcgagcgtcacgacgaggtggcggtgcccgcgtggttcgggcgcaaggcgcgaaccccgcgcggcgggcacgccaaaagcgtcggccaggtggcgttgtcgcggcgcctcgtcgtaccgcatgcggctggcggggactcagactcacccgatgagcgaaacggcggcgaggaggagcagctgctctaccgcgtgcccatccttgaccccgccctagccgagttctgctcgcccccgcctctcgaggacgcggccggtctcgctctcgacgcgtcggtgtgcaacgaagacggcgccatcgaggaccccgcgaagccggatcctgcggcgccgctggcccagttctgccccgtcagcggccatttcaacttcggcccgaccgacgccgagctcagggagttcgccgcggacatggaagccctcctcgggcacggcctggacgacggaaacgaggaggactcgtcgttttacatggagacgctgggcctcctcgacccaatggaagtgggcgacgatgccacgcaagtcaaggtggagaccgacggcagcagtgcgtgctgcgaagccagtggcacgctggcctgtggcctggagctggacttagaggcatctgacgagatgctggacatcgacttcgactacgcatcgcctcaggacacggcgacggacgagagagccgccagcagcgacacgggagccgacgcccagttcttgcagacgagcctctcgctcaccctcaactacgaggccatcatccagagctgggggagctcgccgtggaccggtggcggtgagcgaccacacgtcaagctcgacaccaggtggccccacgactacacgaacatgtgggttgtgggaggagtggtcggccacggcggcgaggacctgccgggcacgcctaggctggggatggacggcggccgggaggcccgggtgtcgcggtaccgggagaagcggaggacgcggctcttctccaagaagatacggtacgaggtgcgcaagctcaacgccgagaagcggccacggatgaagggccgattcgtcaagcgtgctaccgccggtggcagcctcgccatcgctggcctcgcttaatgccgccggcttgctgcatgtttggttgttgagcctgcgtgtctgcatatctcgtcacgtcgtcatgaaatcatgacaagaatgaacaaacaattcgtcgaagctgccttttagttaattcaacttaaaataaaaaaaacatgtttttttcaccgatcaatttgccaatttaattattttataagcgggtgacttcgagtggcacttgcctccttatggcgataatcgagtaataatactagtgcaatattgctagct

SEQ ID NO: 135107 - DNA, 523 bp, Zea Mays
cttggccgccgccccccctgcccatctcctcctctctcaatttttgcagccaccaaaccctagccgcccccctcaatcccctcctcccaaggtgccaatccttgccgctcggatcgtcgtctcgtggtgcgaatctccaaccgttttggtggagggaagaagggaggaagaaaagggggagaacccaaggtggtggacttccggatcgttcttagggatttttgcccaaacttcggtgaaggcacctaatttctgctttggggaatagagggatgtagcagcacggccactacacctttaataaaggaaccaccatttaataatgttgttaatcagagttggacaagactagtgaattgctttgttcttggttgagcgtttattttggggtgggctgagtttcttatcccatttgttttacttcagttgggtcataattaggttttaccacttttgcattatagtttctactatgtgagttatatgtctttatatcttgtatgagcttcatgtttcccctcct

SEQ ID NO: 135108 - DNA, 2040 bp, Zea Mays
gacctccgtggcccaccaacatgcgtcgataattccctcgctgatcccaccggctttaaaatcctaccctcccgctcccaagatcactctcactctcacgcacacactccacagtgccactcgtctcgctcgcgcagcagacagcatgggttcgtcggcggcgcttcagccgaagcagctgtaccagctcgtggtgaacaacttcgtcgccgtgctcgctgcgccgctggccgtggcggccgtcgtcaatgcggcgcgcgtcgggccggacgagctgctcggcaggctgcaggcgctccgggcggtgcacgtatttctcgccgtgtttgtcgcggccgccacggcgatactgtacgtcctgctgcggccccgggccgtgtacctggtggactacgcctgcttccgcacgcggcccaactgccgcgtccccttcgccaccttcctggagcacgcgaagctggtgacgttcgtggagggggcctccatcgacgagcgcagcgtccggttcatgacgcggctgctggagcggtccggcctcggcgaggagacctgcctgcccccggcccaccactacatcccgccgtaccggaacatggaggcctcgcgcgcggaggtggagctcgtcatcttctcggccatcgacgacctgctcgcgaagacgggcatcagccccagcgccatcgacatcctggtggtgaactgcagcctcttcgcgcccgtcccgtccttcacggacatggtgatcaacaggtacgggatgcggccggacgtccgcaatgtgcacctgtccgggatggggtgcagcgccgggctcatctccgtggggctggcgcgcaacctgctgcaggtggcgggccggggcgcgcacgcgctggtggtgtcgacggagaccatcaccccaaactactacgtgggcaaggagcgcgccatgctcctgcccaactgcctcttccgcatcggcggcgccgccgtgctgctgtccacgtcccggtccagggcccggttccgcctggcccgcgtggtgcgcacgctgacgggcgcccaggacagcgcgtaccggtgcgtgttccaggaggaggacggcgagggccaccgcgggatcaacctgtccaaggacctgatgaccatcgcgggcgacgcgctcaaggccaacatcaccgccatcgggccgctggtgctgccggcctcggagcagctcctgttcgcgctgtccttcatcgcgcggcgcgtgctgaaccggcgcgtgaagccgtacctcccggacttccgcacggcgttcgagcacttctgcatccacgcggggggccgcgcggtgatcgacgagctgcagcgcagcctgggcctgtcggacgaggacgtggaggcgtcgcgcatggcgctgcaccggttcggcaacacgtcgagcagctcggtgtggtacgagctggcgtacatcgaggccaagggccggatgcgccgcggcgaccgcgtgtggatgatcggattcggctccgggttcaagtgcaacagcgcggcctgggagtgcatcgcgccggcgcgcaccgccgaggggccctgggcggagagcgtcagccgctaccccgtggacatccccgaggtgctcaagcactagccgctatcccgtggacatcaggccgggcatgcatgtgagtatgtgaccgacgacgtgacagcgtgttttggacttgcttgtggtgctggccgggccggacgcgttgaatgccgagcctgacgcgtccatgtgtgcggtgcgctccagcccggacaggtggttgcgagagggtacaccgtgttaaatccgggccatttacacacgtatagtactcgtgctcctctagatcgtgtaccccttccttctcttcttgttcttcttctttttaccttccttttcaacatttgttttcccactaataatttacttgtgtccattttaaaaacaagccaaaatgtaccgcgagttggatcgattacattacatatgttactatagcaagcattattgtactctacctgaataatttatgaagtgaagttactaca

SEQ ID NO: 135109 - DNA, 318 bp, Zea Mays
atggattgcagctgcagcaatccaaacagctgcaacagtgtcggcttgtagccagccgaacacgcccagagcctagcagctgccaatcctacaaaagactatgcggcagctgatacactggtgtaaattcacctagctaaattaccacctgcaattaacacgatacgtatatgaccatctagaattatgattccatggacattgatggcctgagttcatatgatatgatagccgtcatgtggtagctaagatccagcaagctgtttatagctaacctgaagaacgttgacacttagacattcagatatggggaggaag

SEQ ID NO: 135110 - DNA, 1647 bp, Zea Mays
cacgtatcaaccggaggtatcagtgatttcggtcatatgcctaacaaatgtttctttgtccttcatatgcctaacaaaatatttacaaaatgcatccttccttgtccttgagccgaatactcaccgtctcctttgacctcggccccaaccggccctagcagtagcagcctagccttttccccccttccctttttaattcctccttgacgccctaaccggctacgcacaaacaacgcctccaacgcgagctgcgaaagaagagcaggggcaggccaaaaccaagcgaaacaccagctgcgtctgcgtgcaccaccccctctacggacccacccacccggagcgaaggggagacagcagcagcagcagaagccgcgcgcgtgcaaactgcaatgggcaacagcatcggcgggcggcgcaagggcgccaaggtgatgcagctggacggcacggcgttccgcgtgaagccgccggcgtccgcgggcacggtgctgcgcgaccacccggggttccagctgctcgagtcggaggaggtgaagctgctgggcgtccgcgcccggccgctggcgcacgacgcgcagctccgcccgggccgcctctacttcctcgtcgcgctgccccggccggccgccccgccgcgccgcgcctggtccggcgcgctccacgtcggcgcgcgggagcggctcgagtcgctcatgctcacgcgccgctccacctccgacctctccctcgccgcctccgcgggcacggcgccgccgtccccgctctccacggcctccgagggcggcgggcccgtccgcctccggatgcgcctgcccaaggcggaggtcgacaggctcatggccgagagccgcgacgccgccgacgccgctgccaggatcatgcagctctgcgccgccgccacgcccgaccggaccccgcggttcgtgcccactccggactggggcgctggcgccgccgccgccgcgttcccgcagacgcccgaccggagccccaggttcgcggcgacgcccgactggggcactgggttcatgatgccgccgggcgctgcggctgcgccgacgacgccggagaggtggcccgcgctgccccgcactccggagtacgcgtcgccgggcgtcaaggctagccggaaagagaagcgaacgcggttcgtggcgctgccagatgagataatcgcgtgacctttttctctcttcctctgccgccggagatgaaaggacgacagggcggccgcgcgcggttgctcgaaacatgtcagagagccagaaggtgtagactggtccgcagggtcccgtggtcggtcggtcgttttcctcggctgcgggctgggggaaagaccacctgctgccggtcgccggtggcggaagctgcagcttccttcctgtcctgtcctgtcttggtcttgcctccggcgacggggactggagcttcgtctaattgctttttttcttcttctgttggtgtgcggtccgctccgtctgtaaggctctcccttgcttgctcgtcgtgcgcctctactctctagatgtacgtaggtagctgaagaagctttagagtataaatagttcttacatgcatgcaaatggacgtactttgtgtaaatattcagtcaaagaggaataagggggttgcatgttttggtggtgc

SEQ ID NO: 135111 - DNA, 5444 bp, Zea Mays
gcacaagcttcctccttcccacatgggcaccgtctcctccttccccaattgcaagctccattcgcgctcctcgtcctccgctgcctccagcctagtcccatctctgctcgattggagaggtttgggccatgcttcctcctcgcgcgccacgttctcgacggaatttctcgtctacacaggagccaaggaacgctagaattagacgcttcccggggtcccttttagttcccctctaacgaatcataggtttgcagtttggtgtggacgtatcctgtgatttgtggatggttttggtgtagagtttagagagatcaagaacttccaacttggggtttcctgtagccttttttagctgttctggggcttttatgggagtgcccgtcgcgcagaagtccgattcttgggtgactgtgcttgcgatgacggacagcggcggcctcggcgttcggcctattaacggaggccgagggagtgccgtggagcagcgtgggctcggactcggagacaacgggcctccagtgtccccaccagagcgtgtttctacgccgcctgcgccgagactagctgcttggtggcgcatgtcgtcgcctggtcctctccggtgctcaaccccgaggagcgttggatgtgaagatggtgatgattcggataggtacttttccccacagagtgagttttctcaagacacttctgatacagattcgatgagcacaagtattagtaggatgtataccttcaggttagggacttcgagcccattagatagtcctatcaaacaattgggagtaggagacacaagtcctccctcaaggaagggttgccattctcctagatatccttggaattcttgccggggatcagatgatgttgattctagctttatgagttcacctcggcatgatgatgaagagaggaaatatgatgtgcaaccaattgattttgagagtagacacatctggtatcctccaccacctcaggatgaaaatggtacttttcaatatgatgaggatgatgacaatgatgtttgtgatgggaaggtctttggacatattaaccatgattattgtgacggcgaagatgatgatgatgtgttagggatcaaaggaaaacatagtatatctcacaaagagttcttgaggagtgctttacatgggcatttcagggctctcgtctcacaattgctcgaaggacatggcattgatcctgtggatggctggccagacatagtatcctcattagcttggcaagcagctacctttgtcaggccagacacgagcaaaggtggtagcatggatcccacagactatgtcaaagtcaaatgcgtagcatcaggaaatccaaatgatagtgctttcattaaaggtgttgtttgttctaagaatgtaaaacacaaacgcatggtgtcaaaacatgagaaccctaggctgcttcttttgggaggagcactagaataccagaaagtcacgaacaaactagcttcaataaacagcattcttgaacaggaaaaggagtatcttaagaatgctgttgcaaagatagaggctcaacgcccacaagtcttgctagttgagaaaagtgtgccattgcatgcacaacagcttcttgcaaaagatatctctttagtattgaacgtcaagagatcacttctggaaagaatttctcgctgcacaggtgctcaaattgcatcttctgttgaaaatatcacttctacaggagttggacaatgccaaacattctggattgagagagttacagaatgttcatcaccgaaggtctcaaacaaaaacacagtcaagacactgatgttttttgatggttgtccaagacgcttggggtgcacggttcttctaagaggaaaatcatatgaagagttaaagaaagtcaaacttgctgtacagtatgctttatttgcagcataccacctgtcacttgaaacctcatatcttgctgacgagggtgcaacacttccaaaagtcccttcagaccttcaacttgagaagccgaattcttcctcaagatactatcagcagaatttgattgaatttcaaaccattgaaggggaaacttatggagctggatgcatcacaccttgccttaatggctctgcaaatcaatctcattcaagagatgacataattcatgaggaacatgcacactgtcattcaagatctgacttaagttgggaagaatatactggtggaaccattgatgtatacccttattccacagaagcttcaatgtatagtagctgtatgccacctgtatgcatgactgttcagacacctaaaagttcacttgccagtgcgagaaaaagtacaccaggaaatttgtttttttccaataatgttcacatagatgaagcaggtggtggaatgtcaaaggttgataatgacgtccttgacttggataatggttggaatcatatctcagatgaagattctgtagcaatacatgatcacaacggtaatcacaatgaatattttccaacatctgacagtccacagagcattttggtttccttgtcaattgcatgccctctgagaggaattgtatgtaagcagtctcagctatttcgtataaagttctatggtacttttgataagccgcttggaacgtattttcgtgaagatttatttgttcagacatcatgctgtgaatcctgcaaggagcctgcagaatctcatgtgcgatgttacactcatcaacaaggcagtctcacaatcagtgtcaaaactcttccatctgtgaagctacccggggagcttgatgggaaggtatggatgtggcacaggtgtctcaggtgcaaaccaaaagatggaattcctccagccacacaaaggatagtcatgtcagatgcagcacgtggattatcttttgggaagtttctggaacttagtttttcaaatcacacaacagccaatcgaattgcctgctgtggacactccctccaaagggactgccttcgtttctatgggcttgggagcatggttgctgtcttccgttattcaccagtagacattctttctgtcaacttgccatcctcagtactggactttgcttgtccaaaagctcaagattggatcatcaaagaagctgttgatgtatgcgctaggaaggaacatctgtatagggaaatcgttgctaaacttgactgcatcgaaaagatagttaaagaccagaacattggtatgaagtcaggcttgcataaacatgttgctgatcttaaggagttggttaaagttgagtggaagaagtatgacgttgtatcagcgttttctatcgtagataacttgcagacatttgaaccgtatatagatgttctagagctcaatctcctgaggagagagcttgtacatgatattcacgtatgggatcgcagactgtacatgatgcactccctcacgaaagagaactgtcgtactatgccaaatgacgcacaattttctgagaagtttactgaaagctcattagaacaatcaaaggatgtgacatctggtaaacatttgaatgctgagagttctctagaacagaatcaaccaagtacgttggaagtggctgcagtttcagtgaaatcatcccctatgacggaacaaaccaacactagcatttcacatttggcattggaaaccaccattatgggtgatgcatccatgcattctgtctcaactgttatcagctttgccccaggctcgtatgaaatgcagagtgaaggagtgctggctgaactagaagctggaaagactttgcagaaatcacaatcttctgcctccaatctttctgatagaattgacttagcatggactggttctggtcagcttgttaacgattcatcaagtagcatggaggcagtttcattcatacctgctagtctgaaggataatcctgcataccagaaggttatagcacccattagaatcaaatcgtttgattctgctataagttccagaaatgttgatgattcaaatgctagtataagaagatcttattctcaaaggcccccaaaggctattgagagaactggtaagggtctgtcaccaacattcttgaacaagctctcacttcctggtatgattcatggcgagagtcggttgctgctgtcacaaaatgattcaggtgttattgttccaatttatgatgatgaaccatctagcatgatagcccatgccatgactgttccagaatatcacagcttcttgttgccacttctgtatcagaataatgaatctaatttattgaattatggttctgatcagcctcaacctataactagaaatgattctaagtataaccatttcactatttcttttgaggatgaagactcaaattccgttgataaagcaaaattttctgtgacatgttattttgcaaagcagtttgatgcaatcaggagaaagtgctgtccagatgaactagactatatccgctccttaagtcgctgcaagcgatggagtgctcaaggtggcaagagtaatgtctactttgccaaaacactagatgacagatttgtgataaagcaagtgacccggacagaattagattcatttgaggattatgctgctgattatttcaaatatttgatagactctgtatcatctggaagcccaacttgcctcactaaagtccttggtctttatcagatcattgccaagaatttgagagatgggaaagagctgaagatggatgtaatggtcatggaaaacctatttttcaagagaaaggtatcaagaatatatgacctaaagggttctttgcgttcccgctacaaccctgatacttcagggaacaacaaggttctcttggatcttaatctgttagagacacttcacacaaagcccatttttcttggaagcaaagcaaaaagaaggctagaacgagctgtctggaatgatacttcttttctggcatcggtggatgtgatggactactctctcctagtcggcattgatgaagaaaggaaagagcttgtgatggggattatcgactatcttcggcaatacacttgggacaaacaactagagacttgggtgaaggcgacaggatttcttggtggctccaaggatgttctgccgaccattatatctcctgaccagtacaagaagaggttcaggaaggccatgtccaagtacttcttggctcttcctgaccaatggtcaccgtaacgccaacaatgcatccaggccattccaagcgcggcgacagggaagaccactccggttttctttttctttttctctcccttctgtttcttttaggacgatctatccatctgtgcctattgtatgctgtttttgttcacaacaggcaggatgaactctgtggaagattgtggcgattgttgtccagccaagcagaggttaggcgtcaatacgtgtacataccctacactgtaacatgaaattgcaaaggaaatgaaaatacgcgaactcgcgagttccttaccagtg

SEQ ID NO: 135112 - DNA, 249 bp, Zea Mays
aaaccttcagcggtgaggcagatccatctccagttactgctgatgaaccatgtaccaattgttgataggcaacacccagaagtggcagtggaaatgttactgattttgacatatccatcacatggcttgcttttttccttgttgattttagaaaatcaatcagcaaaggatcttcactcagaagttttggaactaactccacaaatatcctcgagctcccagcagcattcgatattatgtcataaataa

SEQ ID NO: 135113 - DNA, 1903 bp, Zea Mays
gcgatagtagaaaaccgtcaatttatacatattaaacccaataaactcttttatcatcttctgcacataatcttcaccatattcagattatagctagattataaaaaaaatctcctaaaaaaactgaactgaacagccactataaaagattaccgaaatttggcagcccagcgagcctaaccgcttcaaggaatttcacactcccagcccattttaccgaaacggtccttactaccatctgtcagtcaagctgcgctccgctgcctcagtggctctaactgtctagtaaaaatattccgctgaaattttcaaccactccacaaaaaaaaaactgattttttcccccaatcttccgtcgcacggcacggcacggcgcgcctcctgtcttctccctccagcccggcttatccgttcgtcgcgcgccccggccttcttctcttgcaagctagcgccaacgggaatgccgttccaattcaaaaactgcggttgaattccccaccagccctataagttccccgcctccttgctcacctccataaaccaacccaaaagccccccaatttcacgctagataaaccataccccaaccctctgacgatgccttctacgccgacgctggtccctccgtgcgacgcggtggagccactgctggcggagtcctccgaccgcttctccatgttcccgatccgcttcccgcagatctgggagttctacaagaaggcggtggcgtccttctggacggccgaggaggttgacctctctgccgacgcccggcactgggacgaggcgctgtcccccgacgagcgccacttcatctctcacgtgctcgccttcttcgccgcctccgacggcatcgtgctcgagaacctcgcgtcccgcttcatgtccgacgtgcaggtcgccgaggcgcgggccttctacggcttccagatcgccatcgagaacatccactcggagatgtactcgctgctgctcgagacctacatccgcgacgacgtcgagaaggaccgcctcttccgcgccatcgatacggtgcccgcggtccggcgcaaggcggactgggccatgcgctggatcgacggcggggagcgcttcgccgagcgcctcgttgccttcgcctgcgtcgagggcatcttcttctcgggctccttctgcgccatcttttggctgaagaagcgcgggctcatgccgggcctcaccttctccaacgagctcatctcccgcgacgagggcctgcactgcgatttcgcctgcctcctctacgatgtcctacgcagcaagctcgacgaggcccgcgtgcgcacgatcgtcgctgacgccgtcgacatcgagcgcgagttcgtctgcgacgccctccctgtctccctcgtcggcatgaacggggacctcatgagccagtacatcgagttcgtggccgaccgcctgctcatggcgctcgggtgcaagaagatgtacaacgtgaccaaccccttcgactggatggagctcatctcgctgcagggaaagaccaacttcttcgagaagcgcgtcggtgactaccagaaggcctccgtcatgaacagcctcaacggcagcgccgccgccaaccacgtcttcagcatcgacgaggacttttgagttggcgcgcatgatctatttcgcagataatcttaggatttccgtgagctgcgtggtgctgtttccttctgttttacgggttcttgttcctgatgtaatgtttaatcaatttcccgttacaccggaagctgtaaattgggactaatcgggaccaatataacgagcttctggaatacaacgggatcagcctaagctgcggccatcgtgttcaatgcattggccgcaacggatgatgtccttctcggacacggcgcagggcgctcgatgaaatgctcaattgaactct

SEQ ID NO: 135114 - DNA, 588 bp, Zea Mays
atgtccattgactggagtagctttattattgagaatgctgaaaataaggataatgggaagacgggtgatatgtttagaatctgtgatgaggatgagatgtatgcgttcttgggacttggagatgaggatgaggagatgaatcgaaccaacccagaaccaagcaactttgcatctcattttacatcggaaagtaatagttttgatccaagtaatctagatgctgccatgtcagttgatgatgaaaatgcagaaatggtcgatatattgcacgatgttgaccaccctgatctgaagttggttagtggcatccaaacttcaagtgcgccaagtggagaaggtggaccatccactgttttagaaacacaaggtgcatcaccaagtggagaaggtggaccatccactattttagaaacacaaggtgcagcaccaagtagagaaggtggaccaggaaaagatggaagacctcttttattattaggaccatccagtgtagcgccaagtcttccaactactccatcatgccatggcactggtcctagaatgcttaaaaagaagctcacaccaaaaaaggaaggcatgggtacctga

SEQ ID NO: 135115 - DNA, 2678 bp, Zea Mays
ttaactacacagcttttattgtgcttactgtacgatcatacctcccaacttttgtcatcggaaaccgtagccggccatcgggatagctttgactggcggccagagagatctctaccgcagctcgttcgcagcataccggaccggcggcgggaaggatggccggatgggcaccgccgcgccccgcacggtcctccctatgccggctgtctggtatcggcgtgcacatgcctgccccacgcggccacgcgccgctggtcgcatgcattcccaagaagcaaggagcccacgtcgtcacgtgatgagctcgccggcgacccgggccctcaccactcagcaggatcccacctcctcatcctctcgaccagtcacgtcgacctcctcgccggtcactcagtccggctttgacccacgtcgaaaccctgcgccgcgccccggccgggccgctggtccatgtactccacgaggcaaaccggtaggtaagttaaggccctgtttggcacagctgcgtaagctgctcaagcggcaacccacaaggacctggtccatggaaatggaagcacagcggcgccctgccgctacctcgtagcgcgcgccacagcattccgacacggttcacggacgtgtagccccccatttggccgacctcccgagcaactcacatcacatgccccctttctggcgcgcccattccccctctgcgcaagctcacatggccatttaccaccccgtggttttactgcactggatgatgtctgtgcgtcgccgtcgccgtcgcgtcgggccctattaaattcctccgcaccgcaccccggcctgtctcccaaccgccgcgcgcgcgcgcagaaccaaccaacttaaaccgccaacaccgagcccaaggcacaaacgttcccatggcgcggctggtgtcgacggcgacgaaggcaatggcggtcgtggtcctcgcggcggcgtcggcagcgctggccgcgcacgactacggtgacgccctccacaagagcatcctcttcttcgaaggccagcggtccggccggctgccaccgaaccagcgcctccggtggcggcaggactcggccatccacgacggcgccgaggcgggggtggacctgacgggcgggtactacgacgcgggcgacaacgtgaagttcgggttccctatggcgttcacggcgacgctcatgtcgtggggcctgatcgacttcggtcgcagcttcggcgcgcacgaggcggaggcccgggacgcggtgcggtgggcgacggactacctgatgaaggcgacggcgacgccgggggtggtgtacgtgcaggtcggggacgcgtcccgggaccacgcgtgctgggagcggccggaggacatggacaccccgcgcaccgtgtacagggtggacgcggcgcacccggggtcggacgtggccgccgagaccgcggcggcgctggcggccggctccatcgtgttccgcgacgccgacccgggctactcgcgccggctcctgggccgcgccgccgaggtgttcgagttcgcggaccggcaccgcggggcctacagcggcagcctgcgcgccgcggtgtgcccctgctactgcgactacgacgggtaccaggacgagctgctgtggggcgccgcctggctgcacagggcgtcgcgccgccgggagtaccgcgactacatcaagcgcaacgaggtggcgctcggcgccagcgacgccatcaacgagtttggctgggacaacaagcacgccggcatcaacgtcctcatctccaaggaggtcctcatgggcaaggacgagttcttccggtcgttccgggagaacgccgacaacttcatctgcagcctcctgccgggcatctccggccacccacagatccagtactcgccgggtggcctcctcttcaaggtgggcaacagcaacatgcagcacgtgacgtcgctctccttcctgctcctcgtctactccaactacctcagccacgccgacgcccgcgtcccgtgctcctcctcctcctccgccgctgccgcctcgcccgtccagctccgccgcgtcgccaagcgacaggtggactacatcctgggggacaacccgctgcggatgtcctacatggtggggtacggcccgcggtacccgctgcggatccaccaccgggccagctcgctgccgtcggtctcggcccacccggcgcgcatcgggtgcaaggccggggcggcctactacgccagcccggcgccgaaccccaacctgctggtgggcgccgtggtgggcgggcccagcaacagcaccgacgcgttccccgacgcgcgggccgtgttccagcagtccgagcccaccacctacatcaacgcgccgctgctcggcctgctcgcctacttctcccagcaccccgacccagcgcagcactgatgaacgggcagctagctagctagtagtaggtgttgtagtagtattcttccgttgctgctgctgctcgtgctatttgttttgcagtatttatgttttggtagcatatattgtgccgatccattcctgtaaaaaaaatggcaggaacgaggattggtcctactgcttgtactcgtactatgccccaagtaagctgctgtatggtggtaagatgcattctgaaatcgccttaatttcggagtttcagcgtcgtatatagaaaccactgctggacatattgctact

SEQ ID NO: 135116 - DNA, 2690 bp, Zea Mays
ttaactacacagcttttattgtgcttactgtacgatcatacctcccaacttttgtcatcggaaaccgtagccggccatcgggatagctttgactggcggccagagagatctctaccgcagctcgttcgcagcataccggaccggcggcgggaaggatggccggatgggcaccgccgcgccccgcacggtcctccctatgccggctgtctggtatcggcgtgcacatgcctgccccacgcggccacgcgccgctggtcgcatgcattcccaagaagcaaggagcccacgtcgtcacgtgatgagctcgccggcgacccgggccctcaccactcagcaggatcccacctcctcatcctctcgaccagtcacgtcgacctcctcgccggtcactcagtccggctttgacccacgtcgaaaccctgcgccgcgccccggccgggccgctggtccatgtactccacgaggcaaaccggtaggtaagttaaggccctgtttggcacagctgcgtaagctgctcaagcggcaacccacaaggacctggtccatggaaatggaagcacagcggcgccctgccgctacctcgtagcgcgcgccacagcattccgacacggttcacggacgtgtagccccccatttggccgacctcccgagcaactcacatcacatgccccctttctggcgcgcccattccccctctgcgcaagctcacatggccatttaccaccccgtggttttactgcactggatgatgtctgtgcgtcgccgtcgccgtcgcgtcgggccctattaaattcctccgcaccgcaccccggcctgtctcccaaccgccgcgcgcgcgcgcagaaccaaccaacttaaaccgccaacaccgagcccaaggcacaaacgttcccatggcgcggctggtgtcgacggcgacgaaggcaatggcggtcgtggtcctcgcggcggcgtcggcagcgctggccgcgcacgactacggtgacgccctccacaagagcatcctcttcttcgaaggccagcggtccggccggctgccaccgaaccagcgcctccggtggcggcaggactcggccatccacgacggcgccgaggcgggggtacggacgggagtggacctgacgggcgggtactacgacgcgggcgacaacgtgaagttcgggttccctatggcgttcacggcgacgctcatgtcgtggggcctgatcgacttcggtcgcagcttcggcgcgcacgaggcggaggcccgggacgcggtgcggtgggcgacggactacctgatgaaggcgacggcgacgccgggggtggtgtacgtgcaggtcggggacgcgtcccgggaccacgcgtgctgggagcggccggaggacatggacaccccgcgcaccgtgtacagggtggacgcggcgcacccggggtcggacgtggccgccgagaccgcggcggcgctggcggccggctccatcgtgttccgcgacgccgacccgggctactcgcgccggctcctgggccgcgccgccgaggtgttcgagttcgcggaccggcaccgcggggcctacagcggcagcctgcgcgccgcggtgtgcccctgctactgcgactacgacgggtaccaggacgagctgctgtggggcgccgcctggctgcacagggcgtcgcgccgccgggagtaccgcgactacatcaagcgcaacgaggtggcgctcggcgccagcgacgccatcaacgagtttggctgggacaacaagcacgccggcatcaacgtcctcatctccaaggaggtcctcatgggcaaggacgagttcttccggtcgttccgggagaacgccgacaacttcatctgcagcctcctgccgggcatctccggccacccacagatccagtactcgccgggtggcctcctcttcaaggtgggcaacagcaacatgcagcacgtgacgtcgctctccttcctgctcctcgtctactccaactacctcagccacgccgacgcccgcgtcccgtgctcctcctcctcctccgccgctgccgcctcgcccgtccagctccgccgcgtcgccaagcgacaggtggactacatcctgggggacaacccgctgcggatgtcctacatggtggggtacggcccgcggtacccgctgcggatccaccaccgggccagctcgctgccgtcggtctcggcccacccggcgcgcatcgggtgcaaggccggggcggcctactacgccagcccggcgccgaaccccaacctgctggtgggcgccgtggtgggcgggcccagcaacagcaccgacgcgttccccgacgcgcgggccgtgttccagcagtccgagcccaccacctacatcaacgcgccgctgctcggcctgctcgcctacttctcccagcaccccgacccagcgcagcactgatgaacgggcagctagctagctagtagtaggtgttgtagtagtattcttccgttgctgctgctgctcgtgctatttgttttgcagtatttatgttttggtagcatatattgtgccgatccattcctgtaaaaaaaatggcaggaacgaggattggtcctactgcttgtactcgtactatgccccaagtaagctgctgtatggtggtaagatgcattctgaaatcgccttaatttcggagtttcagcgtcgtatatagaaaccactgctggacatattgctact

SEQ ID NO: 135117 - DNA, 1432 bp, Zea Mays
gattgcttttccctttcacttgtatctttgtttcaatctgccggtccttggtgatcttactcgttcgactagaaatccaagtcacaacgatataaggttcccaacctagaagtgagcgggagcaacgaccgagtcgttgaggttgaggggtcctcctcctcctccatggcggacgtgtacaaaggcgagctcacgccgctgcagaggcacgtctccttcttcgaccgcaacaaggacggcgtcatctacccctccgagacataccaagggttccgagctatcgggtgtggcgtcgccctgtctgctgctgctgccgtcttcgtcaacggtggacttggacccaagaccgtactggagaacgagaagcctgcgcctttcaagttccccatctacgtgaagaacatccacaggggcaagcacggcagcgattcgggcgtctacgattccaacggaagatttgtacctgaaaagtttgaggagattttcaagaagtatgcccacacgaggcctgatgcccttacaggcaaagagctacaggagatgatgaaagcaaacagagaacccaaggacttgaaaggatggctgggtggcttcacagagtggaaggtgctgtactccctgtgcaaagacaaggacgggtttctccacaaagacactgtcagggcggtctacgatggcagcctgtttgaaaggttggagcaagagaggaactcaaagaaagagtcgagtaagaagaaatgatgagaaatccagacgctcttatgtggacgagtttgcaagtcacgctgtgcgtgtggttgggtactatcataatttgatttattctatatgtttgtcgattcatataacgatattgcaagtatttgtcgaacgtgtttgaattagcaagacatatagctgtgagctttgatagcctcccatatttttttcagttcatattttacattaacgtttttgtgcggtgcttgaaaatatttcgagcgtgttgttgttttttttcagttgtcttagtcatggactcatggtagattgctaccgcttttaaggctattgtttgtctagtttaagcctctttcatctatataatcagatgctcttgctcggttggttaatggaacaccccaaattccaatttgtgagttcaataatttttttattttttatttgagttaattaccccttttacataaatttagaattgaaataaataaatggtgattgaaaatattttgtatggtatgctggatttttaattgttgtatttcaagtgcaaacttgaaatatacattcttatttgaatttgaatttaaaacttgaactagaaaagaaaactataaaaaggaatgatcaaattagggtatttttgtgcatttaatataattttctaaaatgaataatgagacaaaaataaaataaataaatataaatataa

SEQ ID NO: 135118 - DNA, 1549 bp, Zea Mays
aaaaattcacttgtcaatcgtgactttgcgctcgactccgcacttgtgaggatatggcacccaggaaaaaaagcagggggggctcggtagctgccattcttccccttgaccttaacaactagcttctgtttctacgatccttctctcctcctctcgtccttcgtcgtcgtcgtcgtcgtcgcgtgatctcggcctcctgcgacctccatggctggcaaagctgctgcagacactgggagcaacgaccgagtcgttgaggttgaggggtcctcctcctcctccatggcggacgtgtacaaaggcgagctcacgccgctgcagaggcacgtctccttcttcgaccgcaacaaggacggcgtcatctacccctccgagacataccaagggttccgagctatcgggtgtggcgtcgccctgtctgctgctgctgccgtcttcgtcaacggtggacttggacccaagaccgtactggagaacgagaagcctgcgcctttcaagttccccatctacgtgaagaacatccacaggggcaagcacggcagcgattcgggcgtctacgattccaacggaagatttgtacctgaaaagtttgaggagattttcaagaagtatgcccacacgaggcctgatgcccttacaggcaaagagctacaggagatgatgaaagcaaacagagaacccaaggacttgaaaggatggctgggtggcttcacagagtggaaggtgctgtactccctgtgcaaagacaaggacgggtttctccacaaagacactgtcagggcggtctacgatggcagcctgtttgaaaggttggagcaagagaggaactcaaagaaagagtcgagtaagaagaaatgatgagaaatccagacgctcttatgtggacgagtttgcaagtcacgctgtgcgtgtggttgggtactatcataatttgatttattctatatgtttgtcgattcatataacgatattgcaagtatttgtcgaacgtgtttgaattagcaagacatatagctgtgagctttgatagcctcccatatttttttcagttcatattttacattaacgtttttgtgcggtgcttgaaaatatttcgagcgtgttgttgttttttttcagttgtcttagtcatggactcatggtagattgctaccgcttttaaggctattgtttgtctagtttaagcctctttcatctatataatcagatgctcttgctcggttggttaatggaacaccccaaattccaatttgtgagttcaataatttttttattttttatttgagttaattaccccttttacataaatttagaattgaaataaataaatggtgattgaaaatattttgtatggtatgctggatttttaattgttgtatttcaagtgcaaacttgaaatatacattcttatttgaatttgaatttaaaacttgaactagaaaagaaaactataaaaaggaatgatcaaattagggtatttttgtgcatttaatataattttctaaaatgaataatgagacaaaaataaaataaataaatataaatataa

SEQ ID NO: 135119 - DNA, 1995 bp, Zea Mays
gcaatagctcaaatattcttctgaatatagaagcgttagtaacacgtacctgtcttaacaacctcgatcgccaacaacaagtttggaccggctggagcagcacggccgcgacccgcgagacacgaaacccggcgtcgactggtttcttttcgcgttgcgcgcaggcagaggcagggcagtgcaagcgcaacgcaacacggctggagcggcggcattcatgcagataactcccacctcctcacgccacgccacgccaccaacgcatccgcagacagcgtcagtttccaccgatcgaaatcgaaactgccctcgattcctttccaccccgtcctctctgtcgcccgctacgtcgctgacacaccacaccgctttgaggggggcttgcagctggagcatctctgttccgagttccttcctctttcctccaaggcaaggctcctccaacttgcgctccctgtttctctacagatccttctctcctcctctcgtccttcgtcgtcgtcgtcgtcgtcgcgtgatctcggcctcctgcgacctccatggctggcaaagctgctgcagacactggtaagtagtaggccgccaagaagacagaaagagagaccatgcggatgcggcatgtccttcgcggcgcaagtgtcgctcttgtaaccgccgcgctcctttctgtgctgggaccagggagcaacgaccgagtcgttgaggttgaggggtcctcctcctcctccatggcggacgtgtacaaaggcgagctcacgccgctgcagaggcacgtctccttcttcgaccgcaacaaggacggcgtcatctacccctccgagacataccaagggttccgagctatcgggtgtggcgtcgccctgtctgctgctgctgccgtcttcgtcaacggtggacttggacccaagaccgtactggagaacgagaagcctgcgcctttcaagttccccatctacgtgaagaacatccacaggggcaagcacggcagcgattcgggcgtctacgattccaacggaagatttgtacctgaaaagtttgaggagattttcaagaagtatgcccacacgaggcctgatgcccttacaggcaaagagctacaggagatgatgaaagcaaacagagaacccaaggacttgaaaggatggctgggtggcttcacagagtggaaggtgctgtactccctgtgcaaagacaaggacgggtttctccacaaagacactgtcagggcggtctacgatggcagcctgtttgaaaggttggagcaagagaggaactcaaagaaagagtcgagtaagaagaaatgatgagaaatccagacgctcttatgtggacgagtttgcaagtcacgctgtgcgtgtggttgggtactatcataatttgatttattctatatgtttgtcgattcatataacgatattgcaagtatttgtcgaacgtgtttgaattagcaagacatatagctgtgagctttgatagcctcccatatttttttcagttcatattttacattaacgtttttgtgcggtgcttgaaaatatttcgagcgtgttgttgttttttttcagttgtcttagtcatggactcatggtagattgctaccgcttttaaggctattgtttgtctagtttaagcctctttcatctatataatcagatgctcttgctcggttggttaatggaacaccccaaattccaatttgtgagttcaataatttttttattttttatttgagttaattaccccttttacataaatttagaattgaaataaataaatggtgattgaaaatattttgtatggtatgctggatttttaattgttgtatttcaagtgcaaacttgaaatatacattcttatttgaatttgaatttaaaacttgaactagaaaagaaaactataaaaaggaatgatcaaattagggtatttttgtgcatttaatataattttctaaaatgaataatgagacaaaaataaaataaataaatataaatataa

SEQ ID NO: 135120 - DNA, 1881 bp, Zea Mays
gcaatagctcaaatattcttctgaatatagaagcgttagtaacacgtacctgtcttaacaacctcgatcgccaacaacaagtttggaccggctggagcagcacggccgcgacccgcgagacacgaaacccggcgtcgactggtttcttttcgcgttgcgcgcaggcagaggcagggcagtgcaagcgcaacgcaacacggctggagcggcggcattcatgcagataactcccacctcctcacgccacgccacgccaccaacgcatccgcagacagcgtcagtttccaccgatcgaaatcgaaactgccctcgattcctttccaccccgtcctctctgtcgcccgctacgtcgctgacacaccacaccgctttgaggggggcttgcagctggagcatctctgttccgagttccttcctctttcctccaaggcaaggctcctccaacttgcgctccctgtttctctacagatccttctctcctcctctcgtccttcgtcgtcgtcgtcgtcgtcgcgtgatctcggcctcctgcgacctccatggctggcaaagctgctgcagacactgggagcaacgaccgagtcgttgaggttgaggggtcctcctcctcctccatggcggacgtgtacaaaggcgagctcacgccgctgcagaggcacgtctccttcttcgaccgcaacaaggacggcgtcatctacccctccgagacataccaagggttccgagctatcgggtgtggcgtcgccctgtctgctgctgctgccgtcttcgtcaacggtggacttggacccaagaccgtactggagaacgagaagcctgcgcctttcaagttccccatctacgtgaagaacatccacaggggcaagcacggcagcgattcgggcgtctacgattccaacggaagatttgtacctgaaaagtttgaggagattttcaagaagtatgcccacacgaggcctgatgcccttacaggcaaagagctacaggagatgatgaaagcaaacagagaacccaaggacttgaaaggatggctgggtggcttcacagagtggaaggtgctgtactccctgtgcaaagacaaggacgggtttctccacaaagacactgtcagggcggtctacgatggcagcctgtttgaaaggttggagcaagagaggaactcaaagaaagagtcgagtaagaagaaatgatgagaaatccagacgctcttatgtggacgagtttgcaagtcacgctgtgcgtgtggttgggtactatcataatttgatttattctatatgtttgtcgattcatataacgatattgcaagtatttgtcgaacgtgtttgaattagcaagacatatagctgtgagctttgatagcctcccatatttttttcagttcatattttacattaacgtttttgtgcggtgcttgaaaatatttcgagcgtgttgttgttttttttcagttgtcttagtcatggactcatggtagattgctaccgcttttaaggctattgtttgtctagtttaagcctctttcatctatataatcagatgctcttgctcggttggttaatggaacaccccaaattccaatttgtgagttcaataatttttttattttttatttgagttaattaccccttttacataaatttagaattgaaataaataaatggtgattgaaaatattttgtatggtatgctggatttttaattgttgtatttcaagtgcaaacttgaaatatacattcttatttgaatttgaatttaaaacttgaactagaaaagaaaactataaaaaggaatgatcaaattagggtatttttgtgcatttaatataattttctaaaatgaataatgagacaaaaataaaataaataaatataaatataa

SEQ ID NO: 135121 - DNA, 1130 bp, Zea Mays
actctggctcgttcgtgtccgtgcatgccttctctggcgtcgcgcgctgaaggagaacgagaagcctgcgcctttcaagttccccatctacgtgaagaacatccacaggggcaagcacggcagcgattcgggcgtctacgattccaacggaagatttgtacctgaaaagtttgaggagattttcaagaagtatgcccacacgaggcctgatgcccttacaggcaaagagctacaggagatgatgaaagcaaacagagaacccaaggacttgaaaggatggctgggtggcttcacagagtggaaggtgctgtactccctgtgcaaagacaaggacgggtttctccacaaagacactgtcagggcggtctacgatggcagcctgtttgaaaggttggagcaagagaggaactcaaagaaagagtcgagtaagaagaaatgatgagaaatccagacgctcttatgtggacgagtttgcaagtcacgctgtgcgtgtggttgggtactatcataatttgatttattctatatgtttgtcgattcatataacgatattgcaagtatttgtcgaacgtgtttgaattagcaagacatatagctgtgagctttgatagcctcccatatttttttcagttcatattttacattaacgtttttgtgcggtgcttgaaaatatttcgagcgtgttgttgttttttttcagttgtcttagtcatggactcatggtagattgctaccgcttttaaggctattgtttgtctagtttaagcctctttcatctatataatcagatgctcttgctcggttggttaatggaacaccccaaattccaatttgtgagttcaataatttttttattttttatttgagttaattaccccttttacataaatttagaattgaaataaataaatggtgattgaaaatattttgtatggtatgctggatttttaattgttgtatttcaagtgcaaacttgaaatatacattcttatttgaatttgaatttaaaacttgaactagaaaagaaaactataaaaaggaatgatcaaattagggtatttttgtgcatttaatataattttctaaaatgaataatgagacaaaaataaaataaataaatataaatataa

SEQ ID NO: 135122 - DNA, 1453 bp, Zea Mays
tactgtacacaattatttattatataaaaacccttaagcccatccttccactgtcacacaggcacacacacttggctcttcgcagcctcttgttggtctcctcagccaccttggaaagccatacgtgcaggaattagcaagaaggaaggaagcatgtggaagcttgttgcagcagcagtagcgctaatcgtgctgtgcgcgtgcacgacgccagcgcgcggcggcgacgactacacggcgttcgtgtacgccgggtgctcgcaggggcggtacgaccccgggtcgcagtacgccgcggacgtggacaccgcgctgtcgtccctcgtgaacagcgcaggcttcgtggcctacgcaaactacacctcgccggggcagctggtgggcgtgtaccagtgccggtccgacctccccgcggcggtgtgcggcggctgcgtgaggtcggccgtctccaagctgtcctcgctgtgcaacgcggcggcgggcgccgcggtgcagctgcgcgcctgcttcgtgcggtacgggaacgactcgttcctggggaggcaggacacgacggtgctgttcaagaagtgcggcggcggcgagagcgcggggggcgacacgggcgtggtggccatgcgcgacgcggcgctcggcgcgctcgtggccgccgcggcacccggcgccggcgagggctcgtaccgcgccggcgcggcggggtacgtgcaggccatgtcgcagtgcgtcggggacctcggcgccaaggcctgcaccgactgcgtctccgccgcggcctcgcagctcaaggccggctgcggctacgcctccgcgggggaggtgtacctcggcaagtgctacgcgcgcttctggtccaatgccgcccccggcggcggcggtggcgaaggcaccggcactggcggtggattaccggtggtcggaggtggcggcggcaatgtcatcggcggcggcggcgtgggaggagcaggcaacggatacggatacggcggattcgtgccaaacacgtacgggcagcacgatgaatctgggaaaacccttgccatcatcatcggcctggtggcagcggccgccattgtcatcgtcttcctctccttcctccgtaggtccagggctgccggaggcaaaagctaagagcttgcaggatggtcaccacttggctcggattggatcaatcggtcggtggcttttgcttgaaaaccgcttatcccatctacctcccttttatcttttaggggtctcttttctcatgtctgcatctctccaaacaaagggatgtctgaaaggcgttccctgtgcagacatgtgcaaagtaaagattccatccggtaccagctactcgtaaagccacgatgcgcaatgcaagatatattttcacaaaaaaaaagatatatgtggtttctgcccatcatatatatacttatatacaatgtacttattatggagcatgattcagcat

SEQ ID NO: 135123 - DNA, 453 bp, Zea Mays
cgtggtggtgaatctgtccaaatggcatgtgtgatcgtagagaaggatgcagaaaagactaataaaccatctgacagggaagacacatatgtgaagaaactctacctaaaaggaaccacatataatcttggtgttcatagctatttgcactatgggttgttggctgctagagcagtggtcttaaaatctagcaatggcaatggttacaacaactgtatgttagaaggatatcaagggcaatataaatatggctctgaaacatttgaagcctcagcttcaccttctggtgcaagttattcaaaatgcaagaatgatgttgtgaaatctcttaaagtggataaagcatgtacccacctgaaatgttcttttggtggcatttggaatggtggcggtggtgctggacagaaaaatctttttgtggcatcgtttttctttgacatggctgatgagata

SEQ ID NO: 135124 - DNA, 246 bp, Zea Mays
atggaggtagaaccaaatgaagatctgcatcagtgggatatggatgttgagtttcaaccggatgcccgacctgagttacctgcagcactagtgggaccagaggtcgtggtcttggatgattatgatgaggactcagaacaccagccatctaatggagatgtctccactggagagatggattcgtctgatgaggaggacgaggacatggatggggaggacattgcaacaattgagccaggagaataa

SEQ ID NO: 135125 - DNA, 3148 bp, Zea Mays
gaattcgagcttgggcacgtaggcgtcgctcctgccatcgccgcagcggtcactggactctcacgccgccgccgccgccgccggagaccattagttctcctgcgcggcggctccgcggctcccgccctctcccttaccttcttcccgctagggttttctccgatccccaatcactgctggttcacaaatggcttcatctcagcatgttgagatggaggctgcgaaacttctacataaacttatccaggagtcgaaggatgagcctgctaaactagcaacaaaactttacgtgatatgtcagcatatgaaactaagtggaaaggagcaatcactgccatatcaagtcatatcaagggctatggagacagttgtgaaccaacatggaattgatatggatgcattgcgatcatcacgaattccatttgctggtggtcctcaggcaggggattctagtggtgtcatgtcaaaggacaaggaggtcattggtaaccagtctcccatggtcggaagtgatgcttcccaaagtagtggacaagctggattatggcagcttccatcaggttcaaccgatatgataagacatggggcatctatttcaggtagggtacccacagggccaaataggggagatttctcagcagctgatattcatcaaggctccatgtcacaaaaaagcggtagatcctctggcattgaaagccctgcaagtctgcagatggaggacaccagatctatgaattcacatgattctttgaaatccgatgagaaaacaagtaagaaaacctcttccaagagaaaaaggatggattcaaaaggagctggtgatttgcgttcagaagacaactcaaagtcagatgttatctccactggacagaataccaggaaggggaaacaggttggtaaggctggtagacaaggtcagccttccatgggaattgagcatgagcagcaacctcataaactgcaaggtggtactggtcaggtaccacctatacatggtggtgcaccttttctcaggactcgctcagaaggtccttctgggaggacaatggacaagactaaaccatcaaatccattctcaatgggtcaaattccaaattttcctgaagggctggcttctactggtgctccaatcgagttgcagaaaagtatacagggtggagcaagtttatttaatcctggttttggctggaaccaaaatccacaagttcaaaccttgaagaattctcaaggttctattcataatttagtgaggtctggagttactgttgaagggaaagttaatgtaggggcacaaggagcttttaactctgcctctgcaccacagatggaatttcccacagttcctccatacaacccctcttccttcggagctagctcacagtttctggacaaaggcaaggagttggtttccagcattataagcactgaacctcattcatctaaagttgcatctcagcctgggatttctcatggaagtcccatgcaagaaaggcaaggtatgatcagggtgccacagagaggcgaggcatcatttcaggaacgcaggccatcttcacttccgagtagaagtactgggccaagtccaatgtctcacatttcttccaacacaccatttaaagaacagcagctgaagcagctcagagcacagtgcttagtatttcttgcatttaggaataatttgcagcccaggaaggtacatcttgaaattgctttgggcagagggcctcctgcagaaagtgacagtgcaggtcaaaggggcagcgagggcagagtgtctgatgctctgggaaaggaaaatggtagcagtcgggagaactctggtgtcttttgtaggcaaactgatatctctagacttccagccacatctgcaggaagtattgcagaggatgattccttatcgaaggatccagaaaatgctacaaaaaaaatcaagttagctgaacaggagaagtcattgatggaagtagaaaatgtccagcaagcttctgttatgcaaggaactagttctgaaatgcgttcccaagaaactgcatctcaaaatccatatcgaccacaacagtcatattatcaaggagatacaagaagaatcgcctcggatatccataggactgatgctgaaattttgaaccagaatttaagttggggaggccagggatctactgctttgggtggtactagacagcttctgaatcaggaaactaaagaatcacttgcaccttcaaagtcacaccatatgcctgttgatggttacaactccaatatacaaggaatagatcggactccagagatagctggagctggtaatgatgttgaaaattgtagccacgtagcagatattgtgcctgagcaggctgctgatgaaggagatgaggacctctcagagcatgaggatttattgtcatctccaaagcacacaatgacggaaaaatggatcttagattaccagaagagaatttacaatgagaaacaaaagagaacattggagcagcataaggtacacagcagaatgtcagcaacatatgaggagctaaaggagagcgttaattcatccgaagatctttctgcaaagaccaagagcgtcattgaattgaaaaagcttcagcttctgccacttcaacgtcgtgtacgcagtgaatttttgctggattttttcaagcctaatacatccgacttagagcgcataaaatcactgaagaaacataggcatgggcggcgggtgaaacagcttgaaaaaattgaacagaaaatgaaggaagaaaggcaaaagagaattcgtgagagacagaaggaattctttgctgatattgaagcttacagagagaaactcgaggataacttcaaggttaagagagagcgcttgaaggggttcaatcgatacataaaagaatttcacaaaaggaaagaaagaattcatcgggagaaactggataggatccaacgcgagaaaatcaacctgcttaagaacaatgatgttgaaggttatcttagaatggtcaaggtgagttttgtcttgctttattttgatttaatggtatcttgatcttagcccttcatttttttctcgaacacgcaggagagatgcacatcattataataagagaggaaaggtccaaaatggaacgaaatacaacgccctggagggcag

SEQ ID NO: 135126 - DNA, 760 bp, Zea Mays
attgtaggatgcaaaatctgatcgtgtcaagcaactattgcgtgaaactgagaaatatcttcagaaacttgggaacaaattacagagtgcaaagtccacagatggccgctcatcttttgttactgataagagtgacactgcaaacgacattgaagatgagagctaccagccacagcattatctggaaagtaatgaaaagtactatcaactggcacacagtgtaaaggaaactgtaaatgatcagccatcttatcttcagggcggcaaattgcgagagtaccaaatgaatggcttgcgttggctggtttcattgtacaataataatttgaatggtattttagcagatgagatgggccttggtaaaacagtacaagtaatctctttgatatgctaccttatggaaacaaaaaatgaccgtgggccttttctcgtggttgtaccatcatctgttcttcctggatgggaatctgaactcagcttctgggcacctagtataaataaaattgcttatgctggtcctcctgaagaaaggcgcaggatgttcaaagagatgattgttcatcagaagttcaatgttcttctgacaacatatgagtacttgatgaacaagcatgataggccaaaactaagcaaaatacaatggcactatataataatcgatgaagggcatcgtattaaaaatgcttcttgtaaacttaatgctgatttgaagctttatcggagctctcatcggatattattgacaggaacacctcttcag

SEQ ID NO: 135127 - DNA, 8170 bp, Zea Mays
aataatctcgaggagctgtgggcacttctaaattttttgttgcccaatatttttaattcgtcagaggacttctctcagtggtttaacaaaccatttgaaagtaatggtgataattcacctgatgaggtacaacctcagttttacttgtttccctcaggcctcagtaatggactgttctgttctaaggaatgatgtttgactgcattatcttttctgtttaaaggccttactttcagaggaggagaacttgttgatcataaatcgtcttcaccaggttcttcggccctttgtactcagaagacttaagcataaggtcgaaaatgagcttcctgaaaaaattgaaagacttgtaagatgtgaggcatctgcttatcagaaacttctcatgacaagggtggaagaaaatcttggtggaattggagccgttaaggttcgctccgttcacaactctgtcatggaattgaggaacatatgcaaccatccatacttgagccagcttcatgttgaagagattgagggctacctacctaaacattacctaccatctattttgaggctctgcggaaaacttgagatgttggacagattgctgcctaaactcaaagctacgggccatagggttctacttttttctacaatgacaagattgcttgatgtaatggaggattacttggtttggaaaaagtataaatatcttcgattggatgggcacacttctggccatgaaagaggagctcttatcgataaatttaacgatcctaattctcaagcattcatttttcttcttagtatacgagctggaggtgttggggtcaatctccaagctgccgatacagttatcatatttgatactgattggaatcctcaggttgatctgcaagcacaggctagggcccacaggattggtcaaaagaaggaggttcttgttttacgtttagaaacggtccgaactgttgaagagcaagtcagggcttcagcagaacacaaattaggtgttgctaatcagagtataactgctggtttttttgacaataacacaagtgctgaagatcgaagagagtatcttgaatcactcctacgtgagtctaaaaaggaagaagcagctccagtgttagatgatgatgctctgaatgacattctagctcggagcgaagctgagattgacatattcgaatctattgacaagcaaaggagagaagaagaaatggcagcttggcaaaaggtggttcaggatggttcaactagtgggctagaccctggagtattgccttctcgtcttgtaactgatgatgatctgaagcccttctgccatgctatgaaactttatgagccatcaaatgtgaaaacagtaaatgtgaatgtgaggaagaagggtgaacttgggggccttgatacacagcactatggaaggggtaaacgagcccgtgaggttcgctcttatgaagaccaatggactgaagaagaatttgaaaaactttgtcaagctgattctcctgaatcatcccaacctggtggcatgtcgaaggatttggatattcttaataaaggcattaagactgaaattcttgtggagagttcaaaagaaccagaacaaacgaagatggaggcatccccaactgtcggtgactctccaccagccaaacggcggagaggtagacctaaaaggtcagatgtttttgtatctcctactgctggtctgactgatgctgtcaaacaagacacaggaaccacacaggacggtagttctgctacaccagcaagtaccatccactctgatgcaccagctactgcaatcaattcagctgtttcagatgttaatatacattctattccaccagctgataccaagaaacaagagttcagtactgataccaaggtttccagttctgtttctgttttggaaggatctgtgccgaatgaaattggtacaccattacagagtgttcataatgtagcagtttctgcaccaccgcatcaatcagctaggggcaggaaatgccaagcaggagaaacacctcgtaggcgaggccgaaaaccaaaatctctatcttcatctggtgtagatgatgttagtcttaacccaaccttttcaactgttagtggtgtagcagacactagttatgttccttcatattctcaggtctcatcacaaggcactgctgtggcactggcaggaatccagaaggattttgtgacagttaagttggatacattgttaccagatagtggtaagggtgctcctcctgttaatgagggagataaaggtgctactgttacaacacctgtggcaaaagatatatgtgctgggactgtgacaacatcagacaacactgtcaccctgacaccaaatactcttaaggaaaacattggattagttcaagtggcatctgcaccttctatgctcgtggcttctgaagaactaatgaaaatagcacatgttgcggtggccgataagcctgttgagaagcaaactgcttcacgtcgccgcagaaagaaaacatctagtagcgaggatactggagtcagcactagacaaagatcagctatgaaaagatcttactacaacacctctgttgccgttgatgatattggttctgctgtgatcccaaatgaaaaatcaggaataacgaaggaaagagatgtcagttcaattcaaagtacatccaatgaactaccaaatattaactcaccattgtatgagaagtctggatatgattctcaaccaagcacacctatagctgtccccatcaatgaagacactcttcctagtggttttgacacctgtactaattctatgataactcttgccacatctgccaactctgctgaagatgataaaccagttgatttgcaccttaatgcacctgtttctgttgattcccaaaaccaagaacaacacatgacagggaaggaccatttggcagtgtgttctagaatctttgctactcagttacagacggacactgcaaatcctgctattgatcataaaccaggaactgcccagtttgaaccatctgcttccttgccccagaattcaggcaaggatgctactgcactaccttctgaggttgacagtgctgctccaaatagggcatcaagcaggaggaggaaagggtcaactcgagaaccacgcaccagaagtaattctgcatcagctgcaagtgaacgtcgtgcccgacttactggattgaagcaggcagaggacataaagaagttagagatgtcagcaacgccgaccacaacagtgtgtatttcatcggtagagcaacagggagctgcttctttaagtgcgaagattaccaatgcttctgtttctgaaggacagaagaatcctggaaattatatgccttctgccatttcaattcccgtggggagccatgttctgggcctgggcgcaacaagtattgaagaaacaactgccactatgataactcaggctcctgcagtttcaaaatcagaacgaagaaaacttccaggaggcagtcaacaaggtattcagtttgagagttcagcatcaaaaacaaagatggtatcagctgtggaaccagcacctgcaaatgttgaatgcatgcaaggtactgaagttaatagttcagaacagacaatagtttctgctactgaaccagcacctgcaaatgatgaacacatgcaagagcaaccaacaaatatcgtttcatctgtggaatcagaaccttcaaatgatgaagagcacacaaagcatgaagtgtttcttgcgactactggtgataatatgcttgcttctagtgcaggaactgaaatattgcgggatacagttgagcatgctgcttgccagccagaagcagtatgcacagatggaactgcaaggcagtctgaattgtcgcaacttgatagaaaagcctttcatgatgcctcatataaatacactcatgggtccactaaagatgatggtatcttgcccagtgaaggtacttctgttgatgttactggttctaagcaggatgatgtgaacattgttggcacacaaactgatgatgtttctcggggttctagtcattttccagttattttacaatcaactgagtcagatcggcctccaggtcaagtgaagaatttggagagtaggatggagcaggtgaaaacagaagaagctttggttaacagttctggtggcaatcaaactcacagtctgggcgatgaaccttctcataatacatcattagcaagaaattctccctcagaacactcgaatgagcgttgctctgatcaagtaattggtgaaaatttcaaaagtaaagaaaatattgttgaagtccattctggcattaatactgatggccccgatgaagctctgaatgcattgcacacccaatctaaggaggccagcatgacagatattggtgtacctactgatggtgatagatgtgaaggtaaagggactagtgtcgaggtctgtgctgacatgaatactgatgggcctgtggctacccaggatgcttcgtccacgaaatctgataaagagtcctgcatgatggaatgtggtgtgtctaccgatggctgtcccacagtttgcaaaacacacaatgatctccagggtcatgtatcttgtgaagaaacctttgttaggactggtggtgatgacacaacccatatcaccaatgcaaattatggttctaataatgaaagtgaggccaccattgctagtcctgttgaaaccacacaaaaactgatggaagggagcactgttattgtgtcggagaattctgatttaaataagcaatgccacacattgcatactagaaatgatcctcctgcaaataccctgttgatagttgagtctaacaaagttacttgtgatgctgaaattgtttgtgctagcaggttagaatcttctggcattgaggctgaaacagtgggtatccaagagtcagctcttactgattttgagggaacaaaaggaactggggatttgggtgacagaactaacagtcaactgcatgatgatgttcatgggacatcatgttccacgatagctcttgtatctgagaaagaaccttccgaagatcttaccaccggtagccattcagaagcatctaatttacttgctgctgtagaacaaactcaagaaactactgttgagaaccaagagatcatagatgcagtagtgtttatggatgcctgcaaggcagaacctgttggtgattttactattgctaaaggagctgaacagactgtagaaatggttcattatgttgataagcaatctgctgtattagactatgttgagacacagacaaaacgaacttcggtttgtggttctacgctaaatgaatcccctcaggctgcagggttggaagaagactgctctgtactgaagcatggtgatcctacttcatctgagcttcttactgtagcacctaatccaatcggtgaaacttctgttattcaagtggaaccagaggcaagaaactcagatggatactgcacaacagaggctggcagtgctttatctgaaactgtcatgggattggagccaaataaagaaactgcggttccaatgcaagagaatattggagaagctaatgataattttaataattgcgaagcacacaataattcggagattcatgcatttgaagtgtcgatggaaacgcagtcatcagaagtcaaggaagtatcttctattcagtctggtgcagcaaatttgagcacacagacaactgcactgcctgatgtaacaggacaaaccagtatggcatcgactggagaactagtatctacaaatgaacacatacacatgcaaggcactgaaatcaattcagagcaacaaacaaagatggtttcacctgctgaatcagcacctgctaatgatgaacacgtgcaagacattgtgattcttagttcagaacagcaaacaaagatggttttagctgcagagattgacgcattatgcgtccaggagactgcaattattgatcttgggggagcaagaggaacagttgacctgaatgacataagaacacaggttcctgcattacctggaagggatgtgctaggtgatgaaattaagggttcagaacaagcaaaaatcgaatcgattgcagagatcgaaacagtgggcgtcaaggagaatgtcattgctgatcataaggaaacaggtattgaggttgatgctcatgttttggaacaagcaaagatggtttcagctctagaaccagactctactccagatgtggagagtgctggcaacatggcagggcagaggtgggcaccgatgaagaggacatggcttgtggcaggtgagaggcagctaggcgaccttgacacccagaaacttttcttgcctggacgactaggcaacgactttaaaaccatgaacataagcagtggtgctgatgtggacctaataactagccaaaggaaaacagactctgaagggaccatttttactgatcctcctgtgactaccctggtgacagctgaatctgataaaggtacttgtgatgcagaagtttgtgctgacaagttagaaccttctggtgctgatgatgttggaatgattgttgtccaggaggctgcttctgttgatgatcacaatagagcacaaggtggtgaggctcattgttcagaacaaataaagatggcttcaattgcacaagcggtgtctagcatggctttagtaggatattcttcttcagaagactcaatggtggatgctgctgcccgagtaactgatgctgattttgtggatagtaaagcagctggtgtttatcgccaagaaactatgcctactcaaaccacctctaccctcccagagaacatggattctcctgcaactgctgctaccatggttgaatcgaagtttgctgcctcgtctgagcacgttgcaggacccgagccaattgatgaaacttctgttatgcaagtggaactggcaacaagcacaggggatggatgtgcagcagatggtcacaatcttgtttcatctgaaactgttgttgaagtgaagcttgctcaagaaattgttgttcctagtccaggtggtagcatagaagctaataatacttctaccatcagcgaagtatacaaagatacccagtctcgtgcatctggtgaagcatgcaatgatggtcagtctcatggtgatgaaaatatgaaacttggtgaagcttacactgaactgcagctggcaccttcctctggtgaggaggccatgacatgtatgtgtagtgagctgcccagccaggaggtggaggctccaagcagtgaccctttggagaataatgaagaaacgaaaaatgaagctgctgctcaaggatcagtaaatgaggattctgctcctcgtgctgaaaatgcaaagattgatgaagctgacacagaacaggaactgcttccatctggtgaggccacggtagacgaatccagcgagctactcagccaagacgaaaaggtggctcgtaaagatgcaaagatggaagagtctgctgctgctgctgctgcacagagacagctaactactgaagttgctcatgcaagtgaaaacgcgaaacttggtgaagatggcacggagctgcaactgccaccaccttcaatggtagacatatctagggagcaactcagccaggaagtggaggttgcaagctctgggccttcaggaactgatgaaactgctgagatgaaacggctaaacactgaacattcacctggtgatgaaacttcaaaacttgttggaactgatctaggactgcaattgtcaccttctggtgatgccatggtagatatatctaataagccacccagctgccaagacgtaaaggaggccccgagcagtgacattttgggaaatgatgaaaattcagacaccgagaagactcctgctgccttgcatggacggctgaacaccgaacttgctcctagtggcagaaatacagaatttagtgaagctgacactggaaaacaagagacacccgtgtctgctgaggctatggtagaatcatcgagcgagcctcgcagccatgaggcaaaggaagctccaacccctgacctgtctggggatgatgaaaaagcgaagtcagcaagggctgctgttgttgcggaactttttggagatgcaacagaaggtggttcggatcagccattgccgtctcctagagaacaaggcaaggaagcagaggccgatggaggcttttag

SEQ ID NO: 135128 - DNA, 8676 bp, Zea Mays
aataatctcgaggagctgtgggcacttctaaattttttgttgcccaatatttttaattcgtcagaggacttctctcagtggtttaacaaaccatttgaaagtaatggtgataattcacctgatgaggtacaacctcagttttacttgtttccctcaggcctcagtaatggactgttctgttctaaggaatgatgtttgactgcattatcttttctgtttaaaggccttactttcagaggaggagaacttgttgatcataaatcgtcttcaccaggttcttcggccctttgtactcagaagacttaagcataaggtcgaaaatgagcttcctgaaaaaattgaaagacttgtaagatgtgaggcatctgcttatcagaaacttctcatgacaagggtggaagaaaatcttggtggaattggagccgttaaggttcgctccgttcacaactctgtcatggaattgaggaacatatgcaaccatccatacttgagccagcttcatgttgaagagattgagggctacctacctaaacattacctaccatctattttgaggctctgcggaaaacttgagatgttggacagattgctgcctaaactcaaagctacgggccatagggttctacttttttctacaatgacaagattgcttgatgtaatggaggattacttggtttggaaaaagtataaatatcttcgattggatgggcacacttctggccatgaaagaggagctcttatcgataaatttaacgatcctaattctcaagcattcatttttcttcttagtatacgagctggaggtgttggggtcaatctccaagctgccgatacagttatcatatttgatactgattggaatcctcaggttgatctgcaagcacaggctagggcccacaggattggtcaaaagaaggaggttcttgttttacgtttagaaacggtccgaactgttgaagagcaagtcagggcttcagcagaacacaaattaggtgttgctaatcagagtataactgctggtttttttgacaataacacaagtgctgaagatcgaagagagtatcttgaatcactcctacgtgagtctaaaaaggaagaagcagctccagtgttagatgatgatgctctgaatgacattctagctcggagcgaagctgagattgacatattcgaatctattgacaagcaaaggagagaagaagaaatggcagcttggcaaaaggtggttcaggatggttcaactagtgggctagaccctggagtattgccttctcgtcttgtaactgatgatgatctgaagcccttctgccatgctatgaaactttatgagccatcaaatgtgaaaacagtaaatgtgaatgtgaggaagaagggtgaacttgggggccttgatacacagcactatggaaggggtaaacgagcccgtgaggttcgctcttatgaagaccaatggactgaagaagaatttgaaaaactttgtcaagctgattctcctgaatcatcccaacctggtggcatgtcgaaggatttggatattcttaataaaggcattaagactgaaattcttgtggagagttcaaaagaaccagaacaaacgaagatggaggcatccccaactgtcggtgactctccaccagccaaacggcggagaggtagacctaaaaggtcagatgtttttgtatctcctactgctggtctgactgatgctgtcaaacaagacacaggaaccacacaggacggtagttctgctacaccagcaagtaccatccactctgatgcaccagctactgcaatcaattcagctgtttcagatgttaatatacattctattccaccagctgataccaagaaacaagagttcagtactgataccaaggtttccagttctgtttctgttttggaaggatctgtgccgaatgaaattggtacaccattacagagtgttcataatgtagcagtttctgcaccaccgcatcaatcagctaggggcaggaaatgccaagcaggagaaacacctcgtaggcgaggccgaaaaccaaaatctctatcttcatctggtgtagatgatgttagtcttaacccaaccttttcaactgttagtggtgtagcagacactagttatgttccttcatattctcaggtctcatcacaaggcactgctgtggcactggcaggaatccagaaggattttgtgacagttaagttggatacattgttaccagatagtggtaagggtgctcctcctgttaatgagggagataaaggtgctactgttacaacacctgtggcaaaagatatatgtgctgggactgtgacaacatcagacaacactgtcaccctgacaccaaatactcttaaggaaaacattggattagttcaagtggcatctgcaccttctatgctcgtggcttctgaagaactaatgaaaatagcacatgttgcggtggccgataagcctgttgagaagcaaactgcttcacgtcgccgcagaaagaaaacatctagtagcgaggatactggagtcagcactagacaaagatcagctatgaaaagatcttactacaacacctctgttgccgttgatgatattggttctgctgtgatcccaaatgaaaaatcaggaataacgaaggaaagagatgtcagttcaattcaaagtacatccaatgaactaccaaatattaactcaccattgtatgagaagtctggatatgattctcaaccaagcacacctatagctgtccccatcaatgaagacactcttcctagtggttttgacacctgtactaattctatgataactcttgccacatctgccaactctgctgaagatgataaaccagttgatttgcaccttaatgcacctgtttctgttgattcccaaaaccaagaacaacacatgacagggaaggaccatttggcagtgtgttctagaatctttgctactcagttacagacggacactgcaaatcctgctattgatcataaaccaggaactgcccagtttgaaccatctgcttccttgccccagaattcaggcaaggatgctactgcactaccttctgaggttgacagtgctgctccaaatagggcatcaagcaggaggaggaaagggtcaactcgagaaccacgcaccagaagtaattctgcatcagctgcaagtgaacgtcgtgcccgacttactggattgaagcaggcagaggacataaagaagttagagatgtcagcaacgccgaccacaacagtgtgtatttcatcggtagagcaacagggagctgcttctttaagtgcgaagattaccaatgcttctgtttctgaaggacagaagaatcctggaaattatatgccttctgccatttcaattcccgtggggagccatgttctgggcctgggcgcaacaagtattgaagaaacaactgccactatgataactcaggctcctgcagtttcaaaatcagaacgaagaaaacttccaggaggcagtcaacaaggtattatttattctactcagatcatgatcaattttcttggtccagatgagaagagtattcagtttgagagttcagcatcaaaaacaaagatggtatcagctgtggaaccagcacctgcaaatgttgaatgcatgcaaggtactgaagttaatagttcagaacagacaatagtttctgctactgaaccagcacctgcaaatgatgaacacatgcaagagcaaccaacaaatatcgtttcatctgtggaatcagaaccttcaaatgatgaagagcacacaaagcatgaagtgtttcttgcgactactggtgataatatgcttgcttctagtgcaggaactgaaatattgcgggatacagttgagcatgctgcttgccagccagaagcagtatgcacagatggaactgcaaggcagtctgaattgtcgcaacttgatagaaaagcctttcatgatgcctcatataaatacactcatgggtccactaaagatgatggtatcttgcccagtgaaggtacttctgttgatgttactggttctaagcaggatgatgtgaacattgttggcacacaaactgatgatgtttctcggggttctagtcattttccagttattttacaatcaactgagtcagatcggcctccaggtcaagtgaagaatttggagagtaggatggagcaggtgaaaacagaagaagctttggttaacagttctggtggcaatcaaactcacagtctgggcgatgaaccttctcataatacatcattagcaagaaattctccctcagaacactcgaatgagcgttgctctgatcaagtaattggtgaaaatttcaaaagtaaagaaaatattgttgaagtccattctggcattaatactgatggccccgatgaagctctgaatgcattgcacacccaatctaaggaggccagcatgacagatattggtgtacctactgatggtgatagatgtgaaggtaaagggactagtgtcgaggtctgtgctgacatgaatactgatgggcctgtggctacccaggatgcttcgtccacgaaatctgataaagagtcctgcatgatggaatgtggtgtgtctaccgatggctgtcccacagtttgcaaaacacacaatgatctccagggtcatgtatcttgtgaagaaacctttgttaggactggtggtgatgacacaacccatatcaccaatgcaaattatggttctaataatgaaagtgaggccaccattgctagtcctgttgaaaccacacaaaaactgatggaagggagcactgttattgtgtcggagaattctgatttaaataagcaatgccacacattgcatactagaaatgatcctcctgcaaataccctgttgatagttgagtctaacaaagttacttgtgatgctgaaattgtttgtgctagcaggttagaatcttctggcattgaggctgaaacagtgggtatccaagagtcagctcttactgattttgagggaacaaaaggaactggggatttgggtgacagaactaacagtcaactgcatgatgatgttcatgggacatcatgttccacgatagctcttgtatctgagaaagaaccttccgaagatcttaccaccggtagccattcagaagcatctaatttacttgctgctgtagaacaaactcaagaaactactgttgagaaccaagagatcatagatgcagtagtgtttatggatgcctgcaaggcagaacctgttggtgattttactattgctaaaggagctgaacagactgtagaaatggttcattatgttgataagcaatctgctgtattagactatgttgagacacagacaaaacgaacttcggtttgtggttctacgctaaatgaatcccctcaggctgcagggttggaagaagactgctctgtactgaagcatggtgatcctacttcatctgagcttcttactgtagcacctaatccaatcggtgaaacttctgttattcaagtggaaccagaggcaagaaactcagatggatactgcacaacagaggctggcagtgctttatctgaaactgtcatgggattggagccaaataaagaaactgcggttccaatgcaagagaatattggagaagctaatgataattttaataattgcgaagcacacaataattcggagattcatgcatttgaagtgtcgatggaaacgcagtcatcagaagtcaaggaagtatcttctattcagtctggtgcagcaaatttgagcacacagacaactgcactgcctgatgtaacaggacaaaccagtatggcatcgactggagaactagtatctacaaatgaacacatacacatgcaaggcactgaaatcaattcagagcaacaaacaaagatggtttcacctgctgaatcagcacctgctaatgatgaacacgtgcaagacattgtgattcttagttcagaacagcaaacaaagatggttttagctgcagagattgacgcattatgcgtccaggagactgcaattattgatcttgggggagcaagaggaacagttgacctgaatgacataagaacacaggttcctgcattacctggaagggatgtgctagatgtggaggcacatattttggagcaaaaaaaaacatcttcaccaggtgatgaaattaagggttcagaacaagcaaaaatcgaatcgattgcagagatcgaaacagtgggcgtcaaggagaatgtcattgctgatcataaggaaacaggtaacaacagtggcgtaagtatacatgcgcctctattagttgaatctggacaaaaggcatcacctggagttgaattgcgtggtattgaggttgatgctcatgttttggaacaagcaaagatggtttcagctctagaaccagactctactccagaagtttgtgctgacaagttagaaccttctggtgctgatgatgttggaatgattgttgtccaggaggctgcttctgttgatgatcacaatagagcacaaggtggtgaggctcattgttcagaacaaataaagatggcttcaattgcacaagcggtgtctagcatggctttagtaggatattcttcttcagaagactcaatggtggatgctgctgcccgagtaactgatgctgattttgtggatagtaaagcagctggtgtttatcgccaagaaactatgcctactcaaaccacctctaccctcccagagaacatggattctcctgcaactgctgctaccatggttgaatcgaagtttgctgcctcgtctgagcacgttgcaggacccgagccaattgatgaaacttctgttatgcaagtggaactggcaacaagcacaggggatggatgtgcagcagatggtcacaatcttgtttcatctgaaactgttgttgaagtgaagcttgctcaagaaattgttgttcctagtccaggtggtagcatagaagctaataatacttctaccatcagcgaagtatacaaagatacccagtctcgtgcatctggtgaagcatgcaatgatggtcagtctcatggtgatgaaaatatgaaacttggtgaagcttacactgaactgcagctggcaccttcctctggtgaggaggccatgacatgtatgtgtagtgagctgcccagccaggaggtggaggctccaagcagtgaccctttggagaataatgaagaaacgaaaaatgaagctgctgctcaaggatcagtaaatgaggattctgctcctcgtgctgaaaatgcaaagattgatgaagctgacacagaacaggaactgcttccatctggtgaggccacggtagacgaatccagcgagctactcagccaagacgaaaaggtggctcgtaaagatgcaaagatggaagagtctgctgctgctgctgctgcacagagacagctaactactgaagttgctcatgcaagtgaaaacgcgaaacttggtgaagatggcacggagctgcaactgccaccaccttcaatggtagacatatctagggagcaactcagccaggaagtggaggttgcaagctctgggccttcaggaactgatgaaactgctgagatgaaacggctaaacactgaacattcacctggtgatgaaacttcaaaacttgttggaactgatctaggactgcaattgtcaccttctggtgatgccatggtagatatatctaataagccacccagctgccaagacgtaaaggaggccccgagcagtgacattttgggaaatgatgaaaattcagacaccgagaagactcctgctgccttgcatggacggctgaacaccgaacttgctcctagtggcagaaatacagaatttagtgaagctgacactggaaaacaagagacacccgtgtctgctgaggctatggtagaatcatcgagcgagcctcgcagccatgaggcaaaggaagctccaacccctgacctgtctggggatgatgaaaaagcgaagtcagcaagggctgctgttgttgcggaactttttggagatgcaacagaaggtggttcggatcagccattgccgtctcctagagaacaaggcaaggaagcagaggccgatggaggcttttagagtaaagttgcaaatattgtatcaagagatactagaatccgtgtaagtaagaactgctaatagtgcttttagttgtaactggtgtaagcttctactcagaatcaaaagcgacgtgctgagattacagcaacagtggcctacggcagtttactactgttttgtgcaatattgctgctgagttttgttgagacaggcaattgatctgtcatctgtctcgtcttgcatcgaagttggcagcaccatggtgaggtgctcccgccttaacctggaagcgctgacagagggaagaacaatactctctggtttcctaatgttttcctgttcactgttttgatttgatgctgcattgcagtagtgtgacttagtaacataatggtgcgtttggatagacggacataccgatccagaatcatctgaacctaaatattgagtacaagcttagattatctgtttggtctgctttatgtctgggtgcaatgctctctgatttctggacggagtggtaccgcaatccaaacagactttaatgtttgggtgcttcaggtcataatcaaccatctaatttactttgcaaatgaatgtttcaaactggactgctcaagcct

SEQ ID NO: 135129 - DNA, 465 bp, Zea Mays
atggcttcatggataggtggcggggtggaggtcctggtgatcagctcgcggaagaagggccccgcggggggcgcgctgatccccaagggcgggtgggagctgctggacgagtccatggatgaggcggctcggcgcgaggccaagcggcggaggctggcgtggtcggggacaccggcccctcgctgggccgcagctacgacgccacgcacgagggcttcgtcctttgtgctcccgctgcgcgtcaccgccgagctcgaccgctggcccgagatggccgcccgccgcagggagtgggtgcccgccgcccaggccattgcgcgctgccctcacccgtggatgcgcacctctagataggcggccgccgccgccgtacgtctctgctctgctgcggttagattggacggaacgaacacgcgacagacaaatccggacgttcgacgcggcctgtacattcttccagggtgg

SEQ ID NO: 135130 - DNA, 2224 bp, Zea Mays
acacggcaggcactgcacagccagcgaggcagaagaaacacagggagcgccgcgcccccaccagacctgccctgccacccactccagctcgccgggctcgggcgttccggaagaaacaaggctggaaaatatattttttaaacaattcgaccaaccccaagtccagacccgcagcgcccgccggaggcggagggaaccgagccggcgaccggcagaccgcagagaagaggcctggagccgaccgcagagaagaggccaggagccgaccgcaggcagccgccaccgcaccagaacccgaggtctcgaggcaatcgagcgcacgcgggtcgggggctgcggccatgtcggtgagttgcgggctcgagtgggtggtgtgccttggctgcacgcggtgggcgtggaagcggctcacctacatcggcgcctacgacagcgagacgtggccgccggcgtccgccgacgagttcgagcccgtcccgcgcctctgccgcgccgtgctcgcgaactacgacgaggagctctccagccccaagttcgcgccgccggagcacggctacttcgatatcgaccccaagggcatcctcaagcgggctaactacgacgaggtccgcaacgcgtgcccgccgtacctcgtctacgtcgacgaggcgcacaaggagatcatcctcgccgtgcgcggcctcaacctcgtgcgcaacgccgactacaaggtgctcatggacaacaagctcgggatgcagatgttcgacggcggctacgtgcaccacggcctgctcaaggccgccaagttcatcctggagcgggagacggagacgctgaggaacctgctgcgccgttacgggcccgagtacaagctcatcctcaccggccactcgctcggctccggcatcgccgcgctcatgaccgtgctggtggtcaacaaccgcaaggagttcgacaacatacccaggagccgagtcaagtgctacgccctcgcgcccgccaggtgtatgtcgctcaacctcgccgtcaagtacgctgacgtcatcaactccgtcgtgctccaggacgactttttgccaagaacaccgactccgctagagtacatttttggttctatcttctgcttgccctgcatgctatttctcatctgcttgagagatacatttaaacaagacaagagaaaatttaaagatccaagaagactgtatgcacctgggcgaatgtatcatatcgttgagaggaaattttgcagatgtggaagattcccacctgaggttagaactgcaattccagtggaagggcgctttgagcatgttgtgttatcatgcagtaccacttctgatcatggcatttattggattgaacgagaatcacaaaaggctttagagctaatgataaacagcaagaaggaaacgactccaccttcgcagcaaaagatggagagattgcaaagttttgaggaggaacacaagaatgctctccagagagcaaagaccctggatgttcctcatgctgcggacctgtctgaagaggagattcaggaggaggatagcactgcaccaccctctgatactcatagcgaaacaaccacggaaacaaaatctggaggtagaacgagttgggacgaactgatggagaagcttttcaccagggatgaagatgggagacttgtcgtgaacaaggacgcgatggcgagggaaattgttgtcctgtaacgagtgccgagactgctctgtccgtggtagtttattctattagcgagctgtataaaagagtaagctgcggttgtgatatatttaaaactgtattcaacagcttatctatacccatattcatattcaaagtacactctacaaacagtgtaatatacattacactgtaaaacagtgtttttttgaccatatgggtgaactggtatatattgcacccatatagtcacccaaaatactgttttacaccattttgcaatgtacattacacgtttgtagaatatagtttgaatatgtatatgagtatgaataagttgttggagatagtaggactagtttggaaagtggaaacttaaatctcttcgggattctcgaggattagagagaaaattaatctcaatcttcagaaatttcgaagaggatttaagtttttaaactagtccttagtgtttaaactgtcttttttagatcaaggtctatctggtagacaattacacactttaaatagtacaaagcccgtgttttatgatggc

SEQ ID NO: 135131 - DNA, 792 bp, Zea Mays
atttcattaagagggaaggagttctattacagcatgacctgcataatacaatgcttaaggtgttttatttaacattttttttcactgttgtacacgaaagtatgctatgatatttttaatggatatagttctactcatctgcagatgtggaagattcccacctgaggttagaactgcaattccagtggaagggcgctttgagcatgttgtgttatcatgcagtaccacttctgatcatggcatttattggattgaacgagaatcacaaaaggctttagagctaatgataaacagcaagaaggaaacgactccaccttcgcagcaaaagatggagagattgcaaagttttgaggaggaacacaagaatgctctccagagagcaaagaccctggatgttcctcatgctgcggacctgtctgaagaggagattcaggaggaggatagcactgcaccaccctctgatactcatagcgaaacaaccacggaaacaaaatctggaggtagaacgagttgggacgaactgatggagaagcttttcaccagggatgaagatgggagacttgtcgtgaacaaggacgcgatggcgagggaaattgttgtcctgtaacgagtgccgagactgctctgtccgtggtagtttattctattagcgagctgtataaaagagtaagctgcggttgtgatatatttaaaactgtattcaacagcttatctatacccatattcatattcaaagtacactctacaaacagtgtaatatacattacactgtaaaacagtgtttttttgacc

SEQ ID NO: 135132 - DNA, 525 bp, Zea Mays
gattaggttgaacagtaacatatgacagaagcccctcttcgctgtagccgaggtacaggagaggacactatatagagccaatatgaaaggacaaaaatgacacaaaaatgtatgcacctcaaaacgctccctacaaaattccagagttggtgcacaacaggaattagggacttattccaatgttcagctgctttaacatgtcgatgattaccgagtggattaaaatgaatgtaagaaaagaatggcaagtgtgcgcatcaaagccttctttaggcatatggatcgatgttacatttagctgcaaagagtatggcacaaacaaattaatcccctacttttactgaaagattaatatacgaaagtcgtggagggtgacaaagagaattcaccttcaacaccaaaaatgcatcaaccatgaatcatttacagtactgtaaagttgtacccttttcttataccacattctaccttgccaaaatagaccaacaaaattgtacatctggtgaagaaatattataggctgtg

SEQ ID NO: 135133 - DNA, 3741 bp, Zea Mays
caccgcactccacccctgcaacaacactcttctatatcccaccgcaaacaccccgccccgacggcgggcggtgccgcaaccctaggtttacccctcccctcccgccgctgtatgcagccctccaccgatcgccgccgcgggggtggacccgtggtcaccgcctcccatgtgtggcgaccccgccccgccgcctctgcccccggctcgatcctgcccctccctacctcggcctcggcttcggcctcggaggcacgcccgccccgccgccgcccacgccgccctaatcacggtaacagccacaatcaccgccctgccgcgcctcaggagcagaacgacaacgcaggacaccgtcgccggggcccaccgccggagagtccgactcccgcgccgcctgctcgtttctgtgatcgcgcacccgcgcctgcagcggcgtcgactcggggagatggggcggtgccgcagctggtgcaggagatccaggacaagctctcccgcggcgcggtggagtgcatgatctgctacgaaatggtgcggcggtcggcggccatctggtcctgcggcagctgcttctccatattccacctcccctgcatccggaagtgggtgcgctacccggcctccgctgcggatgcatcccgagcagcagagccggcctccccttcctggcgctgcccggggtgtcagttcgtgtacgccaccccggcccgcgagctcacctacagctgcttctgtgggcgccggagagatccccccaacgaccatttcctcacaccccactcctgcggcgagccctgctccaagcctctcgagagagcggaaccgcctggcgccaagggggaggatgttgacgccaccaggtgtccgcacgtctgcgtccttcagtgccacccgggcccgtgcccgccatgcaaagcatttgctccggatcgaccctgcccctgcgggaagcagatcatcgtgcggcgctgtgcggacaggagcacgcctgtgacctgtggccgcccttgtgaacagatgctgccttgcaaaaggcatcgctgcgagaaggtttgccacactggttcttgcggggattgcgctgttctcatctctgtgcgttgcttctgccggaataagaatgagacattgctatgtggagacttgatggaaaagggggagctgtctgaggaggacggggtgttttcttgcaatgaggtatgtggccgcacgcttgcctgtggcaaccatgcttgcaaggatatgtgccacccagggccttgtggggagtgtgagctcatgccgtggaaggtcagtacatgtcattgcggcaagaccaggctgctggagaggagggcgagctgcttggacacaatccccacctgtgataagatatgcgataagaaactgccatgtggggtgcacaagtgcaaggtcaattgccatgagggagaatgcccaccttgtttggtgctcgttgagcagaagtgccgttgtggctcatcaggtcagatggtggagtgtcacaagttctcaatggaagagtttcgctgcaagaagccttgtggcctcaagaagaactgtgggagacatcggtgcagtgagatctgttgtccactgtctaggaaagttgcacaccttgaaggtggcaactgggatcctcatctctgccagatatcatgtggcaagaagctccgatgtgggcagcatgcatgccagctactctgccacagtggtcattgcccaccctgcttggagactatattcactgatctcacttgtgcctgtggcagaacttctctcctgccacctctgccttgtggaacaccaacaccatcttgtccacatcagtgctcagtgccccagccttgtggacatcctgcctcacattcatgccattttggggactgtccgccttgtattgtgccggtgatgagagaatgcattggaggacatgtgatgctgaggaatatcccttgcggatcgaaggatatcaggtgcaaccaaccatgtgggaaaaatcgccaatgtggaatccatgcttgcaacaggccttgccaccctcccccttgtgatcagacacctgcaaatggagatgctagctcaagctctggcggcaaagctgcttgtggacaagtatgcggtgccgcgaggagggaatgcaagcatacatgtactgccccatgccacccatcgtccccatgcccagatttgagatgtgaatttgctgtgactattacctgctcttgtggccgaatcactgcaactgttccctgtggtgctggtggatcctccatgggtgataatatgtttgaagtctccatcatacagaagctgtcaatgcctctccaatcagtggaatcaaatgggagggtgcctcttgggcagaggaagctttgttgtgatgaggagtgtgcaaagatggagaagaagagggtccttgctgaagcatttgacatcactccacccaatttggatgcattgcattttggtgagaattcaagttcatcagatttggtttctgacttgttccggcgtgagccaaagtgggtgctggccatagaagagaggtgtaagtttcttgtacttggcaaggtgagaggcagttcttcaagcaatgtgaaactgcatgtcttttgccccatgatgaaggacaagagagatgctatcaggcaaatcgcagggcggtggaagctttctgttcagtcggctggttgggagcctaagcgttttgttactatccatgccacacccaaatcaaaaccacctgctcgcatcctgggatccaaggcaggtgtacctgttacagctgcccatccttactttgatccacttgttgacatggatccgaggctggtcgttgccatgcttgacctgccacgtgatgctggtgtcagtgctctagtcctaaggtttggcggggaatgtgaattggtctggctgaatgacaagaatgccatagctgtattcaatgatccagctagagcagcaacagcgctgaggaggctggattatgggtctgcttaccagggcgctgcgatgtttatgccaagcagcgctcaggcatctttttcaagcaatgtttggattggagagcagaaggatggggggatcactgctaggaacaatccgtggaagaagcctgcttctgctgctgagcctgatccgccctctggagactggactggtgttgctggccatgctccagcaccaggatggagaggcgtcaacaccgcctctcaagtcatggggaccacaaaccgatggaatgttctggaatcagacgctgctgcaagctctggtccaggcaacgagcggaagcctgctccgcgcatggatactgcatacagcgcaataccaaacgttgggaatgctgggccatcgatgaccaagctgcagcctgacgcagaggtggaccactgggaagaagcttgtgaatgaggtagcaagtagcatcgggaagttgggtccagatgtttttttttttttgttctgaaatctggttataggtcgctctgcttagctggtataccgagcctctatgttctagcacattttaaagtagtttggtgatttcctggtggactgttgggtcagtgtcagaagtgtttgattttgttacgcaggccaatgagccggcaaatgaatatctttaaggctgctgattattttagcaggtcttcttttgagttcagaaggtattaatgttttttaggtttttcgatggtatcttgttataaattacttggcagcgggtggtagtcc

SEQ ID NO: 135134 - DNA, 130 bp, Zea Mays
gcagcaatggagacacaaacaatggatactagtgccttaggtctagctagggatgctattctttggcaatggagaaatcaaaacaccaactagagacacacacaagaagaagctcctaaccactgtcgac

SEQ ID NO: 135135 - DNA, 84 bp, Zea Mays
atgacgcctataagcattgagatggacaagggaaaggagtacccagtgttgaaggatcccacaaattgtagaggtcgatgctaa

SEQ ID NO: 135136 - DNA, 399 bp, Zea Mays
atggcacttcccctcccgcctcttggcctccctcctccaccccttcgcctcctttctctggccggcgcctcagccccttcatccggcagcctcacaccggttcttattccaaggctggtggccactacccttccctccccggcgtcggccgcttcccctatcccttcccgctccccaagttcctttcccagtggacgttcgaaggctcagcgttggaatgaggacggcggtcgcagtgaggtccagcgctccttcaaggatgtgatgttggctgtgaagcctcctgaccctggtggtgctggcggtgttgatgctgatgatggctgggtgagagttgaaggtcgccgcgctcgacgtcgggcttctaaccgttccacgggcaatatgataagaaaataa

SEQ ID NO: 135137 - DNA, 306 bp, Zea Mays
tcgcatgcgccctttgccgctcctcggtcctcggtcctcacacgccgcccgcccgcaacgaagcccgcatagccgccgccgagcgccagagttgccacctaccgcgcgcccatctgccaccgatgctgcgcactcatttgctacccgaggcttggcggcggccactgccccaggaggcaggagcccgacaccaaagtccgcgcatttccttccaccgagctgcaccaagatctgggatccaaggtgaccaacttcgctgaacttcgatggctatcctcgtcgcggaattcatcctcagattcacag

SEQ ID NO: 135138 - DNA, 2640 bp, Zea Mays
ggcgtccccacaaaccgctcaaccttccctccctctcccctcttcatcgctccgctgcgctggccacgagatccacgccgcctcctctccggcgccccgccctcgcctctggtgggccacgctgccctcctcgcgacctccgcgcggctgcgaacgaccgacgaccgccggtttcgctgagcactgcgcaggaggcacgaggaggtggattccccgacaggcgcggtgccggcctgagtgacagggcggccgggcgccggtgacctgctcggcttcgccaaatttgcgggcggcgtcttgcgccgtgctgctgtcgctggaggcgtggagcaagggagcccggaggagggggaggccttgctcgcagccgcattggccggtaatactatctccgaccgaggaggcaggcggccgatttagtagttccctccccgctccggacgcgccgggcgccctaggtgcctctcgcccccgcttggtccatggtccatggggtggaaggttaagtcgtcgccggcggcggcgcccggcgacaagctcaggttccctccctcctccgccgcgcggtcgcggatgaagctctggctggtgcccgccaccaccacggtgctgctctggacctgcgtcctgcagctcaccgccgtcggggacacctggggcccacgtgtgctcaagggctggccctcctgcctcacgccgcacgaggaggcttccgccgcgcgcccgcaccctctcgccgtcgacaaggccgcgctcgcgctgccgcccaaaagaatatataggaacaatggttacttgatggtttcgtgcaatggtgggcttaaccaaatgcgagctgcaatatgtgacatggttgtaattgcaagatatttgaatgtgactttagtcgtgccagagttggataaaacttcattttggaacgatccaagtgagttccaagatatatttgatgttgagcactttataacctcattacgaggtgaagttcgcattctgagagaattacctccaagggtaaagagaagagttgaacttggaatgtttcactccatgcctccaattagttggtctgatatctcctactatcaaaatcagattcttcctttgattcgtaagtacaaggttctccatttgaatagaactgatgctaggctagcaaacaatggtttaccaatagaaattcagaaacttcgatgccgagtaaattatgcctccctcaaatttaccccacaaattgaagagttgggcaagagagtaattagaattcttcgccaaaatggacctttcttggtacttcatttacggtatgaaatggatatgttggctttctctggctgtacacaaggttgcagtactgaagaggcagaagaactcacaagaatgaggtatgcttatccatggtggaaagaaaaagtgattgactcagacttgaaaagaaaagatggcctttgcccattgacgcctgaggagactgctcttgtcctcagagcacttgacatcgatagaagtatgcaaatatacattgctgctggggaaatatacggtggaaagcgcaggatggcttctctaacttcagcatacccgaatgttgtgaggaaggagacacttctggaaccttctgatctgatgttcttccagaaccattcatcacaaatggcagcacttgattacttagtatccttagaaagtgatatatttgttccaacatatgatggaaacatggctaaagtcgttgagggtcatcggagattcatgggttacaagaagaccgtcttgttagaccgaaaactcattgttgagctagtggaccggtacacaaatggttctctgctgtgggatgagttctcttcactgatcaaggttgcccatgcaaagcggatgggatcagcttcaaagaggatggtgattcctgacagacccaaggaagaggactatttctatgccaatccccaagaatgcctccaggatcgtgattttttgcaaacatcataatatcctttcatgtctatataccatgttcacattataccattcttctgcaaacaacacaactgaacccaaaagcaatattttggagccagaaaggcgactcggcttctgtcgagtcatagatgaggccgatctgtaaacttgagggagggagggagggaaggagaaaggctgaaagggggtgggtgggggtggatttagttggtaaatacacattatagaatggagggggatttgttcattccaaaataaaaaaaagagagatgggcttgtatagatggtgatagaattaccgctaagaagaatgtaacttagatgcagctgggtctgggttcctgcatctggtcttgcgttgtgtaacatagcagttgttcttggacagccgcccccattgtccccaccggcgaaattttggcaaccatgtagaaagatgtatacactttttattgtatcgatacaacctgtattatatatgtaaattgtgcagaatgtttgtaccacttgcacattttataatgtggttagtacattgaattccttcacggagggtgcttgttgacatctgagttcgtgatctacgggccaaagcattggtgaaagtgtttctgtcggtactgatgatttcttcatgtgggctgggcaaaaacaacg

SEQ ID NO: 135139 - DNA, 1053 bp, Zea Mays
gttccatcgtccgaacccaatgcctcgaaaagccttaaaccccgaccacagcctgtccgagtcacccgaccgttttccatcttcactcccaaccgtttcattcccacctaacttactttttccgatttcgactcgattcgtcattccaaacaggacaccgaatgcacgatcgatcccacaagccgcagccgccggaggctggcgagggcgccggcggcgggaacgtggatcgagtgctcttcaagaacctcgtcgagatggtgccgctcgtcgagtcgctcatggaccggagggtcaactcggcctactcgcgacgcacttcgctagtctacacgccggcgccgcccaagaaggcgagcgaattggaaagtgtcaaattgccacagagcgtatcggccaaaaagcggagagaccctggcgatgtatccaagaagagcacccctgattctaacggcgacaacggcttggttgtgccattgtctctatcgggtgctgaaaataagcccaaggatgatgttgctgggctgcgcgagcaggtcgattacctgcaaaagaaactgctcgagaaggaggaggcgctgaggtccgcggagagcctcgtgactgagatgaacgcggcatatgcaaccatcgatgaactccgacgcctggtgtctgacaaagaagctttgatcagatctaccaattctcagttgcatgatgcaaagattatgcttgcagacaagcaagcatctgtagagaaactggaatgggaggtaaagatgtcaaataaaaaggtcgaagatcttcaaggagatgtgtcaaatatgggattcgagataagctcgttgatggcatttttcgataaaatttcagagaatctttcaggtgactcttatgatgacacagtaccatcatcatatgaattagaggcaattcaatcaacggtgagcatgcatccttggagcaacgtttggcctgtttgaaccattaaatgtataactaaagctagtgactgagtgcaaattaatgttatggcgttttaagtggtctaattagcttgccattccagag

SEQ ID NO: 135140 - DNA, 1381 bp, Zea Mays
gttccatcgtccgaacccaatgcctcgaaaagccttaaaccccgaccacagcctgtccgagtcacccgaccgttttccatcttcactcccaaccgtttcattcccacctaacttactttttccgatttcgactcgattcgtcattccaaacaggacaccgaatgcacgatcgatcccacaagccgcagccgccggaggctggcgagggcgccggcggcgggaacgtggatcgagtgctcttcaagaacctcgtcgagatggtgccgctcgtcgagtcgctcatggaccggagggtcaactcggcctactcgcgacgcacttcgctagtctacacgccggcgccgcccaagaaggcgagcgaattggaaagtgtcaaattgccacagagcgtatcggccaaaaagcggagagaccctggcgatgtatccaagaagagcacccctgattctaacggcgacaacggcttggttgtgccattgtctctatcgggtgctgaaaataagcccaaggatgatgttgctgggctgcgcgagcaggtcgattacctgcaaaagaaactgctcgagaaggaggaggcgctgaggtccgcggagagcctcgtgactgagatgaacgcggcatatgcaaccatcgatgaactccgacgcctggtgtctgacaaagaagctttgatcagatctaccaattctcagttgcatgatgcaaagattatgcttgcagacaagcaagcatctgtagagaaactggaatgggaggtaaagatgtcaaataaaaaggtcgaagatcttcaaggagatgtgtcaaatatgggattcgagataagctcgttgatggcatttttcgataaaatttcagagaatctttcaggtgactcttatgatgacacagtaccatcatcatatgaattagaggcaattcaatcaacgagtgaaattgacaagatcgaggtcgacaaaatagagcaggagaggattacctatggtgaagctctcgcggcagcgagagagaaccctgacgaggagcacttgaatatagctgccgaggcaaggtcaaggctgcaggtccttgtactatagtggtggcccccttctaattctagtgtatgtatgataatgttgaactgctgatgtaattttaccttgttggcttgagttgaggcgcttgtgaaatcgttccaggggtaatggaacgagcactgtatcttttttttttcctgaggtctgcattttttatcatgaagcttgagctatagttagattttttgtgacggttatcatctcaagatttaaacctatggttggaactgcttatgtaaattgttcttgagcctaaggtataggcaatagctttttaacagtgtataatggggtctgtttggtat

SEQ ID NO: 135141 - DNA, 324 bp, Zea Mays
attaatctgaaattggttggggatttgagctgggatggatcctgcttgtgtttcagaagggtaatctcctctcgcattctaaaaattgttctaatttttttggtattttcatgtacgagtacaagcttatggttgtctgaagtgaattaatgggatctatcttgttgattggtccttaaaattttttctttgttccgtttgtgttcggtctctatttcagggataattcaaagaacctgcataaaatagatgttaccgtcaactcttatttcgccgttcttgatggtaaaaaggtgtacaatcgggacagaacaataaatttgg

SEQ ID NO: 135142 - DNA, 721 bp, Zea Mays
caccccacaaagcaataacccggccctctcctttcgtcaccatcacatccagccagccaacaaaaatgtcgcgcgtcacagctgcggtgctcttttacatcctcgccgttgctgccctcagcgcggccgaggccccggcagagtcaccgaaggaaggcagtgctgccaaggcacctgaggctgccaagagaactgctgcccccgctgaagcacccggagccgcgtccacccccgtcgccgccgctgccccatcatcgtcgtctaggaagtctggtccagctaccgcgccagccaccgcctctacacccccttcttccacggacgaggagttgagcccttccccgccagcatccaccgccgcggcgtcccctgcggctgagggaccggctgctgatgactccgccggtgctgctgcccttggaagtggagctgccatcgccggcgttgccgctgctgttgctaccatgatcttcttctactaaactcaccgacgatggtcgtgtcgcggtgagacattagggtggacacgtaattggctgtgctgtaatcgctctcgtctggtggggagggagggaccaagtgtttctttgctttgctcacttcgtttgctcttgtaacattatggggtcaaccgttatgtaactaatggatttgattaatctggtctctaactctctatctgtctatcatgcatgtttatattctaatatcttactgattt

SEQ ID NO: 135143 - DNA, 311 bp, Zea Mays
taatccaaaaccccatgaaccagtcacaaatgaattacaaactaggcatactgttgcaattcagttcacagaactgaataaaaaattcagttgtgttcagcctgactgtccaaatttagacaaccttttctccaatttttacacagcaacaaaccaagctcacattaccaaagttattccttagatatagctctattactttggtatagtacccctaggttgaaaacattcagaacaatttttatgaagcaccaaagtggagctcaacacattagaatatagtttcagctttctgcactaaatctgggatc

SEQ ID NO: 135144 - DNA, 2809 bp, Zea Mays
ctcagacaacaaagctcccaccatgctctgttccacctctgctcctcgtgttcgcaaaccctgctcgcattaaaccataatacgcgagccccacggcttctctcatgaccccgatctcctttcctgcccaccacaaccgatggccgccgctcacctccggttattgccgctcttgctgctaacgctgacagcggcggccaagaacgtcaccctcgactctgccatactatccttcgcggacctcacgctgctgggggactccttcctccgcaacggctccgtctggctcacccgggataccgacgtgccctcctccagcgccggcaccgtgctctgcacccagcccgtcgcgttccggggccccgacgccacggcctccaatgccaccgccgccgtcgcatcgttcgcggccaggttctccttcgtcatcgccaaccccaacgcgggcgccgcggggggcgacggcatcgcgttcttcatctcccccgaccgcaccacgctcggcgccaccggcggctacctcggcctcttcaactcctccaactccgccgcagccaagaacggctccgcgtccgccaccattgtcgccgtcgagttcgacaccatggccaacccggagttcgccgaccccagcgacaaccacgtcggcctggacctcggctcgccggtctccgtcaccgcggccgacctcgccgcatctggggtcgacctcaagagcggcaacgtcacgacggcgtggatcgactaccgcagcgcggaccgccgcctggaggtgttcctgagcagctacgccgtggccgccaagccgaagcggccggtcctctccgtcgctgtcgacctctcgccgtacatcaaggaggccatgtacgtcggcttctcggcgtccacagaggggagcacgcagcagcacaccatcaaagggtggaccttccagacgttcggcttcccgcccacggccaactcaacctttgaatccaatgccaccagcaactcttcagagccggccgcgccagcgccaccgccagcctccaacgcccccaacagccacaagaggagggtcgggatcgcgcttggaatcctcggccccgttgcgcttgccctcgccttcatcttcttcgcctgggtctccatcaagaagctcatagaactcacctcccggaccgacgccgctttctcgaccgagctggtcaagggcccgaggaagttcagctacagggagctgagcgcggccaccagagggttccacatgagcagggtcgtcggcaagggcgcgttcgggactgtgtacaaggccgccatgccgggagctgccgccaccacctacgccgttaagaggtcgacgcaggcgcaccagagccggagcgagttcgtcgccgagctatccgtcatcgcgtgcctccggcacaagaaccttgtccagcttgaggggtggtgcgaggagaaaggcgagctgctgctggtgtacgagtacatgcccaatggaagcctggacaaggccctctacggcgagccttgcacgttgtcgtggccgcagagatacacggtcgccgccggcatcgcgtcggtgctgtcgtacctccaccaggagtgcgagcagcgcgtcatccaccgggacatcaagaccagcaacatcctgctggacgtcaacctgagcccgcgcctgggcgacttcgggctggccaggctcatggaccacaacaagagccccgtgtccacgctcaccgcggggaccatgggctacctcgcgccggagtaccttcagtccggcaaggccaccgagcagaccgacgtgttcagctacggcgtggtgctcctcgaggtgtgctgcgggaggcggcccatcgacaaggacgagcgcggcgggggcggcaggggcggcgggggcaagaacgtgaacctggtggactgggtgtggcgcctccacggcgaggacaggctcatcgaggccgcggacgcacggttggccggcgagtttgacaaggccgagatgctgctgctgctgctcgtggggctgagctgcgccaatcccaactgtgaggagcgtcccgcgatgcggcgggtggtgcagatcctcaaccgagaggcggagcctgcgcccgtgccgcccaagaaaccactgctggtgttcagctccagcgcgtccgcgaagctgcaggagatcgccttctcctgtggcgatgacgtccgaggcggctactccgttgccaagcctgcatcaccaaagtccgagggagccgacattgaacgctgacgcgaagcagtcgataccaattacactactacagatttgttggtgtgggaatatataggtgcttcagtctggaaagtgctgatgaatgcaaattccatgagtcatctacggtctagagaagctggcattgacgcttgatagcaagcgatcaatgcactgatagtgaattactacttgtgtgattcatatatgcattggccatgtgctcgtgaggggaatataggtaataatcccctctgttgtatgaatgttcaatactgaataatggagtcatttgctaagtgtgtttctgcagatttcagagttcagaggaagcgtcaaaattgctaggtagagcaaagtgctgatgaatgcaaattccatgagtcatctacggtctagagaagctggcattgacgcttgatagcaagcgatcaatgcactgatagtgaattactacttgtgtgattcatatatgcattggccatgtgctcgtgaggggaatataggtaataatcccctctgttgtatgaatgttcaatactgaataatggagtcatttgctaagtgtgtttctgc

SEQ ID NO: 135145 - DNA, 906 bp, Zea Mays
aagaagggaaagggacgctgatccgatcgcaagagacgaatcgtgcagttggatcacggagcgcggtcgagtgacgaagttgtcgcattgtgccgagcattaacgaatcgagctcgatcgagagtccgcagctagtggcggcgtttggtgccagcgcgcgaccagggccatggccggcgccgcgttccgggctgtggttttctccctcctcggcgccgccactttcttcgtgggttcctcttcggcgtcgtggcatgcgcaggtgttcgtggtcggcggcgagccgagggggtggaggaagccaacggcgcccaacgaggagagctacaaccactgggccgccaggaaccgcttccacgtcggggacttcctccatttcaagtacgagaagaacgactcggtgctggtggtcacccgcggcgactaccagctctgcgccgccgacaagccaacgctgcggttcgagggcggggacaccaggttccacctcaaccacagcggctactgctacttcatcagcggcgcgccgggacactgcgacgcggggcagcggatgaccttgcgcgccatggtgccgcagcagcaggacggcggcaacaatcccgccgccccggccagggcgcccgccgcgatgtcgccaggtggtgaggacgacgaaggcgggacgttcgagcctcccggcgctcgttcttccacgccagggtccgatgccgggtcgaggccgccgccgcacgtggcggcaggcgccgatgggaataagaccagcgccgctgggtctatgcacgacgcgtcatcgcccccgtcgcttcgtgggcatcgcgtccttgggattgctctggctgcgttgctgatgttcttgcccgcctgagatgcatggttcgtgtatgcatatcgcgcacgcatggc

SEQ ID NO: 135146 - DNA, 867 bp, Zea Mays
catcgttgcactcaagaatttttttagttatgaaacttattatctcttcttttcgggtttcaaaaattggcatcgctatctgggctatacaacccaaagattgcaagatagatggtatattcactttcttctcttccaacaaatccacaagcctctacaaggttgcaaatggaacaaataattaaataatgcacttgaattgccaacagtatatgccattagcatgggaaaatagtaacaggattacagaaggaactaagtttgtaattggtaccttgtaaagaacagatagtgacataagaccatcatcttttgtaatggcagcaagtgcatgaacagagtatttagcctgcctccgtgtaccctctaagcataaacgctctaatagaagatcaagggaactgaaatagaagacacatcaatttagttttgtaaccttagtagttattatcaagacagatcataggatcccaataaacaagatgctcttaagaagatgcaccttgttgaggctaactgttcacgaatagtgccaccagccttcgataacacatgtgcaataccctctttaagcacttcattatcctctttcaggagttcaacaatgtcttcttcaagtccagacaaaagagacggaaagaaactagatattgcctgcacaatgaatggattaagaggttagaagcattaaaaccttactaaccaggttcccagatcgatgggatcgagttacggaaacgttgtacgctactaaaactaagttttaacactatgggaacgagattgttcccaagttcccggaacaaagaatgtggccatgttccacgttcccggtttctaagattaaaacgaccctcttgtgtattg

SEQ ID NO: 135147 - DNA, 779 bp, Zea Mays
agtctctccacaccagtgcggcttttcctttccgttccactccacatcgattcgcctcctccgctctttactcttcgtcgtactcgtctcctcccacccgcaaccgcagggagagaaaggggaagcccgccgccgccccggcccccagcaaccagcagatcgggacctctgttctgcgcaatccatccatggcggccgtcccttgccaaagtttggtgaatgggatgtcaacgatccggcttccgcagacggatttactgtcatattcaacaaagccagagatgagaagaagggtgggaatggtcaagacacagactcaccttccaaggaccccaggactgagagggtggagtcttatgctgcaaaaccaagcacgaagaaatggttttgttgtgtgacagccagccctacgcaatcctgaggaaggcaattgcatgcgctggaaatactgcccctttaattttctatacatactatccataagacactgtagaggtacccatggctctctgggctccaggatgggtgtctcataaaactctggcgtgcatgtatgtatgtatggtgtgagagttgtcggcatacatttgcaaagtggacttctgcttgtaattctagtcctgtctctcttttttttttcctgttggtctgctagtacgggtccgaatttgtgtgttcgtttcaaagtggattgagtgggattaaacccttcccgttcaaaattgaacatgaagggatataatcctcctcaatcccttacaatctagatgcaactgaac

SEQ ID NO: 135148 - DNA, 789 bp, Zea Mays
agtctctccacaccagtgcggcttttcctttccgttccactccacatcgattcgcctcctccgctctttactcttcgtcgtactcgtctcctcccacccgcaaccgcagggagagaaaggggaagcccgccgccgccccggcccccagcaaccagcagatcgggacctctgttctgcgcaatccatccatggcggaggaatcaggccgtcccttgccaaagtttggtgaatgggatgtcaacgatccggcttccgcagacggatttactgtcatattcaacaaagccagagatgagaagaagggtgggaatggtcaagacacagactcaccttccaaggaccccaggactgagagggtggagtcttatgctgcaaaaccaagcacgaagaaatggttttgttgtgtgacagccagccctacgcaatcctgaggaaggcaattgcatgcgctggaaatactgcccctttaattttctatacatactatccataagacactgtagaggtacccatggctctctgggctccaggatgggtgtctcataaaactctggcgtgcatgtatgtatgtatggtgtgagagttgtcggcatacatttgcaaagtggacttctgcttgtaattctagtcctgtctctcttttttttttcctgttggtctgctagtacgggtccgaatttgtgtgttcgtttcaaagtggattgagtgggattaaacccttcccgttcaaaattgaacatgaagggatataatcctcctcaatcccttacaatctagatgcaactgaac

SEQ ID NO: 135149 - DNA, 561 bp, Zea Mays
tctcctcaagcctcaagctcctcccttaagcttggcgatgaagtcatgcatgttacggtaactcgtgccgccctccgcgacggcctttgcggcctcctcgcgggccaccgccacgctcgccctcaacttcccgtcggccataacctccttcaccttgtcggcgatctcctgcctggtcaccagcgtgtcctccccgtcccagctccagtgctccgcccacgccccgatgcctgccctcactgccgccatcgcgttcacgcggtggtcgccgagctgcggccacaccagcagcggcacgccggcggacgacgcctccagcgccgagttccacccgccgtggctcacgaacatgcccacagccgggtgtttcagcagctcctcctgctccacccaccccttggtcacgatgccgcgccctttcacgcgctcaaggtatccgtctccaagcacctccgccagctcggcgtcgtcctcccggtccaccttcgtggtcttgagcacccacaggaaaggatagccactgtcctccagcccggcggcgatctcccggatctggtccag

SEQ ID NO: 135150 - DNA, 432 bp, Zea Mays
atggcaccatggggtgagggcgccgaccatctaggaggtggggatgagatggggaagggctgggcgagctcagcaagaccccaggcttgggggcgacgacagccatggggagaggagtgcgcgcagggagggatccaggcggaaaccgccatgggaggggcaaggagatgggatcgccgacctgccgcagaagagggagggcgcggccataggagtagggctggcattgggaggggcgaccagcgtgcaggaaacaggtgctgcggcggccatggaaagaaactcggccaagggctcagcgggagcacctgggaaggggcctggacgagcagaatcttggagctcgcgtccatggtagaggaagggaaggggaggagacgctatggctaccgacgatcgaagctgggagatcaagcaccttcgttggcttaa

SEQ ID NO: 135151 - DNA, 1886 bp, Zea Mays
tgctcccaagtgactccaacgtgccgtctatataaagcaccctactctctatcgccacttcactcgggtccatagttcaaaacgaaaccaagcaagctttcggtcatggccccgccggcaacgaatagcccgggagaggtcgacagcggcggccgcccgcatgtcatgttcatcccaagcgctggcatgggccacctcatcccattcttccgcttcatcgcggctctcgctgggcagagcgtcgacatctctgtggtgactgtccttcctaccgtttctgccgccgaggaggactacttcaccagcctcttcgctgccctcccccgtgtccgccgcgtcgacctccacctcctgccgttcgacgcgtccaagctcccaagcaacgaccgcgacccgttcgttctccggtgggaggccctgcgccgctcagcgcacctcctgggcccgcttattgccggcgccgccccacgcgtctcggccgtcattacagacgtgaccctgacctcccacgtcatccccatcgccaaggagctcggcgtccagtgccacgtcctcttcccctccagcgccaccatgctctcgctccttgcttacacccctgtacacatcgacaagaaggccgagcaggggagtgacatcggcgacgtcgacatccccggtgtgtgtcgcataccgcagtcttgtctcccgcaggtgctgcttcacctcgacaaactcttcaccaagcagttcatcgccaacggccgcgagatcatcaacgctgacggctttctggtgaacacgttcgacgccttggagccggtggcgctcgctgccctgagagatggcaaggtcgtcccggggttcccaccggtgtacgccattggcccactcatgtcgcagcaaaactcagttgacgaaggtgggaaggaagaaggatcgggctcccccgttgcctggcttgacgagcagccagcgcggtctgtggtgtacgtcgcgttcggcaaccgctgcgccgtgagccatgaccagatcagggagatcgccgccgggctcgaggcgagcaactgtcggttcctttgggtgctcaaaaccacaacggtggatagggacgacagcgccgtgctgacggaattgctcggcgaggagttcctggagcgagtgcagggtcgcggcctcgtgaccaaggcgtgggtggaccaggaggccctgctgaagcacccggccatggggctgtttctaagccacagcgggtggaactcggtgaccgaggcggctgccgccagcgtgccgctgctggcgtggccccgcggcggcgaccaccgcgtgaacgccatggtaacggtgagcggtggggttgggatgtggatggagcactggagctgggacggggaggactggctggtgaccggggtggagatcgcgaagaaagtaaaagaggtcatgtccgacgaagcggtcagggcaaggacgacgaggaccgccgaggaagcggccaaggcagttgcagagggtggcaccagctaccggagcatggaggagtttatttccagcgtcaaagcaaccgtggcgtcttgattgcgtcgtggggttcctgatttccacaagtttgtgtcccctactcccctaccctaccttcccactgatggggagttgtgacgtcgttgtcgtgtggctggttgcagtgtcaaccaaaacagttctcacacacgtgagttgttgggaggtaggtagcctgtactatcacgtacctaccccatcaagaatagtgcgtcatctgtcatcttgtgatgtcatcttgtaatgaaataaaaatagttgcattttaaatatttgtctaccattagtttattttaaactaaaacgcgacaaataaaaaaatagaggaagtaccattctattttaac

SEQ ID NO: 135152 - DNA, 1374 bp, Zea Mays
gatgaacacattaccagcgcagccagcagaatttgtgtacaaacctttgctagctgcaggacccagcgaccgaacaagaacaacagtatatacctcgaaaatatcacaagaataacatcccagcccagagccccagacgaccaaatatatatatcttcgtccagcacggccgtacacacaccggcaccacgcgccagacgacgactcctgctcctgctcgatcgtcttcacatccctctacctcacgtcctcacctggccagggcccggcggccgggttaatccaaggcgcgcgcgcgtgcatggcagaggccggtggcggtggcgtcgaccaggacgccggtagcctgccgagccacaccaacggtgttggcggcggcggcagcagcacgtgggagatagaggagctggagccggatgacggaagaccgccgcggagcgtcccggtcgccgacgacgtgtacgtggcggtcggcagcggcggctccagcatggcggctctgtcctgggcgctgcgccgcctcgccaagccgcgcagcttcgtctacctcgtccacgtcttccccgtcgtcaccagcatacccaccccattaggaatgatgcctaagagccaagcaagcccggagcagatcgaaacgtacctgaaccaagagagatcgaagaggcgagacatgctgcagaaattcttggaccagtgccgcgagattcaggttaccgttgacgtctacctcatcgaaagtgatcagattgctaacgcgatcatcgagcttgttcctgttcttcgcataagtcaactggtactaggcgtctcaaagtcaaatgtgcggaagctgaagaaaggaaccacgatagcaggacaggtacacaagggcgcacctctctactgcgaagtcaagatcatctgcgacggcaaagaggtgacgactgctgacccaacgccaccgctgtcaccttcccctgttaacaacaacagcagcagcagcagatccaacaacccgacaccaccgtcgtctacgccgaatcatgatacaacagctgcaaacggtgacaggaaagacagagaaagaaggaaaatcacaaagttcctgagatgtttctcgctatgaatttgtgcccacattcctgcttcattaatttaccttctcagagctagcacatttgtatgcatcgtgattgggcatcgtaattttgtgatcaacatttttactaatgtttttgttacacgaagttcttggtttcttgtgtagacaaatgagattttcatgtatgtgcggaaacactttagcatttttttcagttttgttgttgttgttgttagaagtcaaacttgagatgttttggcactccaataaagttggattgagtcttcttcata

SEQ ID NO: 135153 - DNA, 1371 bp, Zea Mays
gatgaacacattaccagcgcagccagcagaatttgtgtacaaacctttgctagctgcaggacccagcgaccgaacaagaacaacagtatatacctcgaaaatatcacaagaataacatcccagcccagagccccagacgaccaaatatatatatcttcgtccagcacggccgtacacacaccggcaccacgcgccagacgacgactcctgctcctgctcgatcgtcttcacatccctctacctcacgtcctcacctggccagggcccggcggccgggttaatccaaggcgcgcgcgcgtgcatggcagaggccggtggcggtggcgtcgaccaggacgccggtagcctgccgagccacaccaacggtgttggcggcggcggcagcagcacgtgggagatagaggagctggagccggatgacggaagaccgccgcggagcgtcccggtcgccgacgacgtgtacgtggcggtcggcagcggcggctccagcatggcggctctgtcctgggcgctgcgccgcctcgccaagccgcgcagcttcgtctacctcgtccacgtcttccccgtcgtcaccagcatacccaccccatgaatgatgcctaagagccaagcaagcccggagcagatcgaaacgtacctgaaccaagagagatcgaagaggcgagacatgctgcagaaattcttggaccagtgccgcgagattcaggttaccgttgacgtctacctcatcgaaagtgatcagattgctaacgcgatcatcgagcttgttcctgttcttcgcataagtcaactggtactaggcgtctcaaagtcaaatgtgcggaagctgaagaaaggaaccacgatagcaggacaggtacacaagggcgcacctctctactgcgaagtcaagatcatctgcgacggcaaagaggtgacgactgctgacccaacgccaccgctgtcaccttcccctgttaacaacaacagcagcagcagcagatccaacaacccgacaccaccgtcgtctacgccgaatcatgatacaacagctgcaaacggtgacaggaaagacagagaaagaaggaaaatcacaaagttcctgagatgtttctcgctatgaatttgtgcccacattcctgcttcattaatttaccttctcagagctagcacatttgtatgcatcgtgattgggcatcgtaattttgtgatcaacatttttactaatgtttttgttacacgaagttcttggtttcttgtgtagacaaatgagattttcatgtatgtgcggaaacactttagcatttttttcagttttgttgttgttgttgttagaagtcaaacttgagatgttttggcactccaataaagttggattgagtcttcttcata

SEQ ID NO: 135154 - DNA, 895 bp, Zea Mays
aaaaataaggatggcaaacgtcaacgtcaacgtcgcacaagaaagtgcccagcttccagcagcaacgagcaatgataataacagtagtaaagacgagggatccaaccagctgaagcagacgacgccgacaagcagtaacatcaatataggtggtgtcaccaatgtcattgcaggtgatagtggtggcatcgatgggaaatccaggaaggcgaacgtggccgccgagaaggtcctatcggtgtcggcgaacctggcgaagctgctgccgtcgggcgcggtgctggtgttccagacgctgtcggcgaacttcaccaaccagggctcctgcaacaccgccaacaggtggctcagcggcttgctcgtcgccttcctcaccgccgcctgcatcttcctcaccttcaccgacagcatcctccacaaaggcaagatctactacggcgtggcgctcccggagcgcctcaacgtgttcggcctcaccaagaaggaggagcgccagctgctcaaggagatcgggcccgacctcagggagcgtaggctcaagacgctggactgggtccatgccttcttcaccgccatcgtcttcatctccatcgccatgggcgacgtcggcctccagcagtgcttcgtcccgaacctggacagtcccgatatggttaacgtcaaggagctgctgaggaacgcgccgctggggctggcgctcctctccagctttgtcttcatgatcttcccaaccagaagacgcggcgttggcttcgacaatggcgaacgcggcgatgtcgatacatcgtccgcggaagcaaacaagacggcggcgcctaaccagccacagacaaaggacgctttatcaaacgtttagaatcacataaattccaagaaaaaagggcacagttgaaac

SEQ ID NO: 135155 - DNA, 1778 bp, Zea Mays
gaggaatatgcacaattatattaggtcgaagaagccgccactgccggatctggcgcagcgctagggcacaacgtgcgttggcgaggcaggcgagcgtgccgtgggtctgcgtgcccttggagctcctccaggtgacgtagggccatcacgccaattcacagttcgagatccgacgctggagccgccgctccaccagctcatcggcggtagctccgtgcggacagcgacgtcgacgcgtcgtcatctggtggcatggcagcggtggtcctcaccgatggctcagccatccgcaagagcgcaagcatggggacctctccctcgtcttcgcggggtccaccagcgacagcgcgtccccaactgttgggcccgacctcgccgacagcggtgtggggccatgacttcgaacgacatcgtcctccgcgagccatgagcgtaaaaaggttaggtactgccctatctctgcccctcctctctaatcgatcaatggtaatagcacactacgagtactcttgccattgtattccattagcgacaaatctgctagaaaactatgttatggctagaaactgttagaagtttcaggaatggtgttttatgttacctcgtcatatttttcaagatacatgtcttgtggtcgaaatttcttaagatttcttagttgtcttatagttttgattaagttgacaacttgaagtctggatagagaaattaatgatgaaccagtgtgcaatataagacatatatcatatttaatggtttagtgacatccttattagcacccgttttgaggacatggacttccacatacgtggctgattctcttgaaccatgacggtacaatctctgatttcaactgaagaaaatctctgctttcctgtcctttcccatgaaaatcgtccgagagatgactaggatgaaggatgagaggaataggctgaggatgatcatggcacagtacttggtgtggcttcattcttcatgcaagatctgagcaaccttgagtagcaaatcgaggggaagggtacgagcagcttcggcaagcgccggaacaagacgcacacgctctgcatccgctgcagcagccgtagcttccacctccagaagagcacctgctcctcctgcgattacactgccgcccgcatccgcaagtaaggacaagcctccacgtcgatagaagcaaatcaatccatttcgtttgacaagtagaagattatctgtgttcaaccaaatggacataattagtgctgttttgcaaaagcattttggattttccagtctcaaagcattccaaaaggaagtcttggatgcttggtttgctcatgaggattgtgttctcctaacagccataggatcaggaggtaccaaaggaaatgagcaaaacatagcatacagtctcagatgctgcaggatcacatgaaaattattgaagacgacggtccagggacctctcaagcaacaacctcaatggataaggcatattaaatacattacttcttcagcatcatgggagaaaatcttactgtcagggttcagaggatgttgtacggaatgaagttggttgatttgacgaagaagaaaacatttttagtcttgtggctgtgcgtctagctgttgatgcagctgatgagaagtcggctatagccgagagaatttcagtcatcctgcagaaatatgtcttcccatatgacttctttcgttgttggatttatcatcgagtggagagtggcaatacttagtctggccactacttgtgcttgccaactttgcttaggtaattt

SEQ ID NO: 135156 - DNA, 469 bp, Zea Mays
ctctccggtctccaaatctgactgctgcgccatagccctgttgccgtcgcccgctcgccctcatccctcacaatccttcaggcctccgtttctccgattagggcaacttcatggcgagcgggcacggatccaacgccagcgcctccgctccaacgacctctcccccctcaacgcctccgctgcccctctccctgttcggcgccgatggacaggaagaggagaaagggccgctcgaccgccaccgatggccatggcgtcacagtgtgccccgtccgtcccgcccaaccggtcagcaaacaatggcgtccaacgacagcgacgtggtgatgatgtacgggacacggcgctgctagagccgtccaagcagccctcagtgactttctccgtcaaggtgagcctagcgcagatgctccgtggcatggtcatcatggacgtggtcaccctggagcaggcacgcatcgcagattcg

SEQ ID NO: 135157 - DNA, 927 bp, Zea Mays
ctctccggtctccaaatctgactgctgcgccatagccctgttgccgtcgcccgctcgccctcatccctcacaatccttcaggcctccgtttctccgattagggcaacttcatggcgagcgggcacggatccaacgccagcgcctccgctccaacgacctctcccccctcaacgcctccgctgcccctctccctgttcggcgccgatggacaggaagaggagaaagggccgctcgaccgccaccgatggccatggcgtcacagtgtgccccgtccgtcccgcccaaccggtcagcaaacaatggcgtccaacgacagcgacgtggtgatgatgtacgggacacggcgctgctagagccgtccaagcagccctcagtgactttctccgtcaaggtattagaattcctggattccaaatctgagacggatgttgatgttgactataacagcttgtactcaaagcaggactttctacagggtgagattcatgctattagagattcatacctcaggtttgcaagatctcacatggtgaagtatggagtagaaataactctacagcgactgggtgtcagcggcagggccctctccgttgccgccttcggcagcacaaagtcccggatcaacggtggggccctcatcagtgagtaccaccatcttccttatcttattaatcacaatttggagcatagattagctagccatcaacccctgtcgtgtgctttacacttatgtctgctttttccctggctggtaacctcgctaccatggaccattgcattagcttcgtgagtaattctcatggatggcaattaatgaactagtgttggcggggcattcagttgaatttacttagaaaccgtaccattcacttttgaggcatgtggctgaatttacttgaaatcatatcatccagcctgaggtttaga

SEQ ID NO: 135158 - DNA, 3976 bp, Zea Mays
gcgacaaatgcgacgcggggtggactcgccccgtctcctccttccgcaccccccttttccctccatccaatccaggccttcattgcctgagccgaacctcccatccaccacctcctccctccgccgcccctggacctccctcccagcgagtcaatcgcccacaacacacgcgcagcagtaagaagaggatctgattcgatcggaggagacctagtgacgccgccaaatcgaatcgaatttcttggcaacagcaacagtaacaaaaactagattctggattcgtcccattttttgcactagggaaataaaatgaggctggtggtacgcgtcatcgaggcgcggggcctcccgcccacggacgcagacgggacgcgggacccctacgccaaggcgcagctcgggaagcagcgggccaagaccaaggtgatgcgcaagacgctctgccccgcctgggacgaggagttcgccttccgggtcggggacctcagggacaacctcctcgtctccgtgttccacgaggaccgctacttcgccgccgacgtcctcggccaggtcaagttgcccctcaccgccgtgctcgacgccgacaaccgcacgctcggaacgcagtggtaccaactgcagcccaagagcaagaagtccaagctcaaggattgcggagaaattcgtctcaacgtttctctggctcaaaactactctgaagaagagacgacggcacctgcacattgggcctcagatgaccttgcatcaaattcagacaaatcaactgaattggtgaaaggatcttctttgctgaatgttcctattgaagtatccacagcagtaccagagatctatgagatagaagctgccgaggaggataaatcaaacgctgctccatcatttgtcaacaagctatatcaaatgtttaatagtaaaccaaaagatacagaagcttctgccccacttccctccaagctgaacgacccttcagatattgccgaagaaacactgtcaaccagctctgaagctcctgagaagcaggatcatgatgtcagtgcaactatgacctttgatgagctactaaaggccttcggttctcagcatgaagggaaagaaatgcctgaaaatttgtctggtggagttgttcttgatcaagtttatgctgttgcaccgagtgacctgaacacacttcttttctctccaagttcagactttctgcagtcacttgcggagattcaaggaactacaggtcttgaaattcaacaatggcgacttgaaaatgacggtgaaatcctgaggagggtggtaagctacacaaaagctcctaccaaactagttaaggccgtgaaagcaacagaggacatgacatatttgaaggcagatggagagatgtttgcagtttttgcagatgttagtactcctgaagttccttttggcaatactttcagagtggaggttttgacctgtataatgccaggacctgaactacgaggtgacgaaaaatcttcacgtcttatggtctcttggcacataaattttgtccaaagtaccatgatgaagagcatgattgaaaatggagccaaacaaggcttgaaggataactatgttcagttctctgagctgctggctaaacattgtaggccagttgatacaaaagatacaactagcagtaatgaagtgctttcttctgtgcaaccagagcaagaatctgactggaagctagcttttcgaatatttggaaatttcgcacttttgtcctcagtttttgcatttttttatgtttctgcacacatcatccttgcaagccctagtataattcaaggtcttgagttcccgggcctggacctgccagattctgctggtgaagttgtagtttgtggagttcttgttctacaaggacagcgtgtgctaaatatgattgcacgatttatccaggcgaagaggcagagaggtgatcatggagtcaaagcacaaggggatggctggttgctgactgttgctctgatggagggaaccaacttggcagcaaccaaatcatctggttactctgatccatatgttgtatttacatgcaatgggaagacaaagacaagttcgattaactttcacacccttgaccctcagtggaatgaaatttttgaatttgacgccatggaagatcctccatcagtgatgaaaatacatgtgtatgatttcgatggaccctttgacgaagttgcatcccttggtcatgctgaagtgaatttcttgaaatataataatatatccgagcttgctgacatttggattcctttgaaaggaaagctggctcaagcatgccagtcaaaattgcatctaagaatcttcttaaacaatacaaggggtactgaagtcgtgaaggattacctggataaagtggagaaagaagttggcaaaaagattgctatgaggtctcctcacacaaacttagcattccagaaaatcttttctttgccaccagaagaatttcttatcaatgattttacttgtcacttaaagaggaaaatgctaacacagggtcgtatttttctatctccaagaatatttgggttttacacaaatctttttggccacaaaacaaaattcttctttctttgggaagatattgaagacatcctactggtccctgcaaccctgtcttccatgggaagtccgtctctggttattattcttcgaaaggacagaggaatggatgcaaagcatggagcaaagcaactggacagtcaagggagactaaagttccatttccagtcttttgtttcattcaatgtggcacataagtaagtacattttcttgcatgatacgtattaacccagtaataagggctgtctacctttctgtctatttacacctcacctgtttggttctgtttcttcatgagtatgtttgtttaaaacgccaatggcctgctctacagaacaattacagcactgtggaaggcaaggtccttaacccctgaacaaaaggtacagcttgtagaagaggaatcagaaacagaagacttccaaaatgaggagggagaatctttgttagggatagaggatgccaaaatgtcaggagttttttcatgtacaaaaccttttgatgtatcaacactaatgggcatatttgagggtggtcctttggagtgccgggtgatggagaaagttggctgtatggactactctgttacagcatgggaacctgtcagagctgatatttaccagaggcaagttcattataagtttgacaagaaatcagcacggcacggaggagaagcaatgagcacccagcaaaagtcccctttgtctaataagaatggctggcttgttgaagaagtgatgacacttgaaggtatccctgttggcgaatgtttcaatctccatatccgataccaactggagagcaatgcatccaagcacaagacatgcacaatccaggtatttattggcatagtatggctaaagagctgcaagaaccgaaagaagatcacgcaggatgtagcaaccagtgcatcttctcgcctgaagaagatattcaaccaacttgagaaggaatctataccagcaaagtaggaaccttgtttttgtctgcgtcctacttttgctgctgcacatatgctggcactatgtttgtccttgctggctgctgcccatgctgagcaaagatcagtgacctaatgaggaagttgcagcacaagccaaagccctcaggcagagttttataaagcaacacgaagcaaggaccgcattgcaagatttcagattagagaactaactgtagagcctggaacgtggtttagcttaaccatgtatacataacgttcaaacatcgttctgacttctacaaaaagttaagaggatctgaaattctaaatcttgcctacgcctttttagttagattggaagcaaagatagcttccatgaccacagaaaaataactattcttttcctgttgtaatttctagaagttttgagatattttgtctggtttaaa

SEQ ID NO: 135159 - DNA, 3419 bp, Zea Mays
aataaaatgaggctggtggtacgcgtcatcgaggcgcggggcctcccgcccacggacgcagacgggacgcgggacccctacgccaaggcgcagctcgggaagcagcgggccaagaccaaggtgatgcgcaagacgctctgccccgcctgggacgaggagttcgccttccgggtcggggacctcagggacaacctcctcgtctccgtgttccacgaggaccgctacttcgccgccgacgtcctcggccaggtcaagttgcccctcaccgccgtgctcgacgccgacaaccgcacgctcggaacgcagtggtaccaactgcagcccaagagcaagaagtccaagctcaaggattgcggagaaattcgtctcaacgtttctctggctcaaaactactctgaagaagagacgacggcacctgcacattgggcctcagatgaccttgcatcaaattcagacaaatcaactgaattggtgaaaggatcttctttgctgaatgttcctattgaagtatccacagcagtaccagagatctatgagatagaagctgccgaggaggataaatcaaacgctgctccatcatttgtcaacaagctatatcaaatgtttaatagtaaaccaaaagatacagaagcttctgccccacttccctccaagctgaacgacccttcagatattgccgaagaaacactgtcaaccagctctgaagctcctgagaagcaggatcatgatgtcagtgcaactatgacctttgatgagctactaaaggccttcggttctcagcatgaagggaaagaaatgcctgaaaatttgtctggtggagttgttcttgatcaagtttatgctgttgcaccgagtgacctgaacacacttcttttctctccaagttcagactttctgcagtcacttgcggagattcaaggaactacaggtcttgaaattcaacaatggcgacttgaaaatgacggtgaaatcctgaggagggtggtaagctacacaaaagctcctaccaaactagttaaggccgtgaaagcaacagaggacatgacatatttgaaggcagatggagagatgtttgcagtttttgcagatgttagtactcctgaagttccttttggcaatactttcagagtggaggttttgacctgtataatgccaggacctgaactacgaggtgacgaaaaatcttcacgtcttatggtctcttggcacataaattttgtccaaagtaccatgatgaagagcatgattgaaaatggagccaaacaaggcttgaaggataactatgttcagttctctgagctgctggctaaacattgtaggccagttgatacaaaagatacaactagcagtaatgaagtgctttcttctgtgcaaccagagcaagaatctgactggaagctagcttttcgaatatttggaaatttcgcacttttgtcctcagtttttgcatttttttatgtttctgcacacatcatccttgcaagccctagtataattcaaggtcttgagttcccgggcctggacctgccagattctgctggtgaagttgtagtttgtggagttcttgttctacaaggacagcgtgtgctaaatatgattgcacgatttatccaggcgaagaggcagagaggtgatcatggagtcaaagcacaaggggatggctggttgctgactgttgctctgatggagggaaccaacttggcagcaaccaaatcatctggttactctgatccatatgttgtatttacatgcaatgggaagacaaagacaagttcgattaactttcacacccttgaccctcagtggaatgaaatttttgaatttgacgccatggaagatcctccatcagtgatgaaaatacatgtgtatgatttcgatggaccctttgacgaagttgcatcccttggtcatgctgaagtgaatttcttgaaatataataatatatccgagcttgctgacatttggattcctttgaaaggaaagctggctcaagcatgccagtcaaaattgcatctaagaatcttcttaaacaatacaaggggtactgaagtcgtgaaggattacctggataaagtggagaaagaagttggcaaaaagattgctatgaggtctcctcacacaaacttagcattccagaaaatcttttctttgccaccagaagaatttcttatcaatgattttacttgtcacttaaagaggaaaatgctaacacagggtcgtatttttctatctccaagaatatttgggttttacacaaatctttttggccacaaaacaaaattcttctttctttgggaagatattgaagacatcctactggtccctgcaaccctgtcttccatgggaagtccgtctctggttattattcttcgaaaggacagaggaatggatgcaaagcatggagcaaagcaactggacagtcaagggagactaaagttccatttccagtcttttgtttcattcaatgtggcacataaaacaattacagcactgtggaaggcaaggtccttaacccctgaacaaaaggtacagcttgtagaagaggaatcagaaacagaagacttccaaaatgaggagggagaatctttgttagggatagaggatgccaaaatgtcaggagttttttcatgtacaaaaccttttgatgtatcaacactaatgggcatatttgagggtggtcctttggagtgccgggtgatggagaaagttggctgtatggactactctgttacagcatgggaacctgtcagagctgatatttaccagaggcaagttcattataagtttgacaagaaatcagcacggcacggaggagaagcaatgagcacccagcaaaagtcccctttgtctaataagaatggctggcttgttgaagaagtgatgacacttgaaggtatccctgttggcgaatgtttcaatctccatatccgataccaactggagagcaatgcatccaagcacaagacatgcacaatccaggtatttattggcatagtatggctaaagagctgcaagaaccgaaagaagatcacgcaggatgtagcaaccagtgcatcttctcgcctgaagaagatattcaaccaacttgagaaggaatctataccagcaaagtaggaaccttgtttttgtctgcgtcctacttttgctgctgcacatatgctggcactatgtttgtccttgctggctgctgcccatgctgagcaaagatcagtgacctaatgaggaagttgcagcacaagccaaagccctcaggcagagttttataaagcaacacgaagcaaggaccgcattgcaagatttcagattagagaactaactgtagagcctggaacgtggtttagcttaaccatgtatacataacgttcaaacatcgttctgacttctacaaaaagttaagaggatctgaaattctaaatctt

SEQ ID NO: 135160 - DNA, 2213 bp, Zea Mays
caccaacgagcaaatcgtcattttcctctcgcaaatatgtggcaaagagctactccgtctctgcaaataaattacagaccagagaggcagcagaacacaaggaacacgctctcacgaaagctctccattcctgcctgcatctagcttgttgagttcttacagttgcagaaatggctaacctcttgcaaacacctttccttgtacccttcctactttccatggccctaataaaccttgtgtgcttcacggccactgtcagcagtgaggacgatcagttcgtctactcgtgcttctccggcaaaaacctcaccctcgacggagcagccgccgttacagcagacggcgtccttgagctgaccaatcgcacggtgcacgtcaaaggccatgccttctacccagctccatggcgattccgcaggtcccctggtgagacggtgcagtctttctcggtcacctttgtgttcggcatggtccccatctactccgacaaatgcaccgacggcatggctttcctgatctccccgaccaaggatttctccggtgcgcaggagtcgcagtacctgggcctcctcaacaaaacaagcgacggcaaagcaagcaaccacatatttgcagtcgagcttgatagcagcgagaactccgagttccatgacatcgacgacaaccacgtcggcatcaacatcaacagcctcacctcatttaggtccctttcagctggcttctacgacgacgacgacaagaacggtctcttccaaaacttgtcccttgttagccgcaaagagatgcaagtttgggtggactataatggagataccacgcagatcaacgtgacactggctcccctcaaggtcaatgtagccaaaccgtccaaaccgctactcacagctacctacaacctctcaacagtattggcggaagacccatcttacgttggcttctctgcatcaactggtccaatcaactcgctgtactgtgtgctcggctggagcttaggcatcaatgccccagctccacctattgatgtcgccaagctgccaaagctacctcgtgctggcccaaagcctcggtccaagctgcttgagatcatcctaccaatagtcacagccactttcatcatccttatcggaacaagcatatttctgtttgtgcggaggaggatgaagtatgctgaggtacaagaagactgggaagctgagttcgggccacaccgcttcccctacaaggacttgttccatgctacggatggattcaagaacaagaacctacttggcttaggaggattcgggaaggtgtacaaaggcgtgctccctgtctcaaagctagaggtcgctgtgaagagggtgtcacatgaatcaaggcagggaatgaaggagtttattgcagagattgtcagtattggccgtctccgccatcgcaacctggtccagctacttggttactgtagaagaaagggtgagctactgttggtatatgactacatgtcaaatggaagtcttgacaagtatttacattgcgaaggggataagcccactctaaactgggaccaaaggtttcagatcatcaagggcgttgcttctggcctgttctacctgcatgagaggtgggagaaagttgtgatccaccgtgacatcaaagccagcaatgtgttactggacagtgagatgaatggacgcctaggtgattttggtctggcaaggctgtatgatcacggtactaacccacagacaactcatgtggttggtaccatgggatatatagccccagaactggcccggaccggtaaggcaacacctctgacagatgtgtatgcgtttggtatcttcattcttgaggtaacctgtgggcaaaggccaatcagtagccatgcagaggacagttctcaggtcctaattgattgggttgtcaaccattggcacaaaggatcagtcacatacacagtggacagtaggttgcaatgcagctacaatgcagatgaggtgcgcctagcgttgaaccttggactcatgtgtgcgcacccaatttgtaatgcaaggcccagtatgagacaggtcgtacaatacctcaacggcgaaatgccactcccagaaatgatgcccacagacttaagctatagtgttctggccttcatgcaaaatgaaggctttgaccagtatacatccacagttgggagcagtggcatcaccgcctcaagcctctcgagtggaaggtgacaa

SEQ ID NO: 135161 - DNA, 375 bp, Zea Mays
atgtcatcgacgcaggcagcccctagtgaggtcgagctcactactgctcatgccccagaagaggttgtgcagcgtgccaaagaggacgctactgccgctgaggagaggaccaacctagtcaccaaagccaccgtcgccgccaaagctgttgctgacgcccgtgcacgtgtcctcgtcacagccaaagccctggaaaaggaacaagcaatcgtcgctgccctagagtgtgtggccgccattgctgtcaagctgatgcaacccccaatctccttttttgacttcgaggccgctgcgatccatgatgcctccatcattgccaacctccacacgcaggatgttgattgggtgatcaactctagcgcttccaccacatga

SEQ ID NO: 135162 - DNA, 1850 bp, Zea Mays
tgtcctttccgcaacagagcttgtgagcttgaccagcgagaggcgagtggctaggacctaggcctccgatccatgcaggtccctgtgggtttcctcggcaagctctggagcttcgtttccttcgtgcccttcttcgtcctcctcctgcttctgggatccatcaaagctgccctagtcggcccggtcacagcttccatcgtattcttcgggagctctgcggttattattggcctctggcctgctcatttcatctggacatactactgcgttcttaaaacagaaaggatcgggctgcagttgaagattcttactggactactgctgccattgccactgcttctcttgccagtacttgctagcatcgggagtctcctgggtggtactggatacggagtttgcgtacctctcatggcgaccttcgaggctgttggcgagggtgtcactgacaagctgacccattgtttcacggatggaaccgtaagcgcgatggctggagcttgcacggttgtccgtgatgtcaccgatttctgcttccactcgtacttctctttcatggatgatcttattgacaaaatgggggacaatgaagaagcccctctcgacatcaagttgtcttatctaccacggagcatggtcgttgccttaatcgccgttccagtggatgtgctgctgataagcgcagtggctttgtggaaaagcccctgcatgttgttcaaaggatggcagaggttatgtgaggatctagttggaagggaagggccgttcttagaaactgtctgcgtgccttttgctggtttggccattgtgttatggccacttgcggtgattggggggttacttgcttcatttttcagcagcttcttcttcggttttcgcgcgggactggttgcttatcaggaggcttctttccaaatgggacttgcatacatgatttcagcagtagcaattttcgatgaatacaccaatgacttgctttacctaagagaaggatcatgccttccaaggcccaagtatcggagagcagatatcatgagggagtgtgaaactgagcctgcagagaggcaacaaactggccatcacaagcatagaaggacgttacctcgatcaaagacgttcatgcaaaccgtccagcgactacgaccgattcaaatatgggattggttcttccggtcctgtgagctcaatggaaggatactactgagcgagggcctgattactgcccaagacatggagcaatacatcaccaatggaaaatgcaagaagctggacactaaattaccctgctggtgtatcttccagtgcctattacgatctgcgaactctgattcagacggtttggtcatatctgatcatgtccaagtgacgaccctcaactggcccaaagacagagtccttgactggctgctcggaccactcctgctcatcaaggatcaaatgaagaaactggaggtcaccgaagacgaggagatgtgcctgaggaagctgatcatgacaagcaagaacgagaagccatctgactgggacgattcgggtttcccgtcagacgacaacataaagagaggccagctgcagtcgataatcagaaggttgcaagggattgtggcctacatgtcccgagtgccgagtttcaggaggcgcttcatcaacctggtcaaggccatgtatctagaggccatcgaagcaggggccatcgacggatcgcgcaaagttaaggcggatgtggctgacaggtgtgcggaagatattgccggttcatgttcatcaaccgacacgccagcgaacattcacatggtctgatgatgtttcaccagcatagcagagctcgacgagctgtgctgaattctgctatt

SEQ ID NO: 135163 - DNA, 705 bp, Zea Mays
atggaactatctgaaacagtaggacaaaagataagacgagaacctaatggcagtagagttccccatctcaatgaaccattgtcccaagtcttccatctggctccaattagccagcgcccaaagctgaaaaacaaggatgtcacattttgtgaagccgagtgtttcaagattgatgcaaatagaaaaactgtacattgtcgttctgctgttggaactaatcttgatgggaatggtgattttatgttggattatgactacttagttgttgctcttggggctattgtaagtacatttaacactcctggagtgctggagcactactgctttttgaagtgtccttatggtcattcttcgaagatttacattcatgaagctactaactgcatcatctatcatgtaatattttctgccttcctctatcatgacatggcttcacatcatgaaagtcaggaagtagaggatgctcagaagatacggaagggtgtgatagattgttttgaaaaagcatcacttccaaatattagtgaagaagagaaaaggaaaatcctacattttgtagttattggtggtggacctactggagttgaatttgcagcagagatgcatgattttcttgtcgaagatttagtgaaactatatcctgccattcaagaccttgtgaagataacaattattcaatcggcagagcatatattgactatgtaa

SEQ ID NO: 135164 - DNA, 127 bp, Zea Mays
taatgttctgcgttgcttcacactaatttcatgggaattttatctaaagtttttccacggttttataaatgactcctgtaacacttgtttgaaagagcaacgaagcatcatcgattattcaaagatc

SEQ ID NO: 135165 - DNA, 1340 bp, Zea Mays
cattatccacattctttccagctagctcctgagattacttgcaaaacattcttgttgtttgctctagctagctgctgcaccatatatagaactatcgatctgagccattatattgttggcatttgtgctcgatcgacgtcgtcgtcgtcgtcccatggcgactaataagccttttgcagttaataagctgctgccagttgtggccctcctgctcctcctcgcagcatgtagctcaccggtggtggtggctcagctggtcgccggctactacagcaaaacatgcccggacgtcgaggagatcgtccgcgacgagatggagaagatcatctcggctgcacccagccttgctggcccgctcctcaggctgcatttccacgactgcttcgtcaggggctgtgacgcctctgtgctgctcaactctacggagggcaacctggcggagagggacgcgaagccgaacaagagcctccggggattcggttccgtggagagggtgaaggccaggctggaggccgcctgccccggcaccgtttcctgcgcggacgtcctcaccctcatggcccgcgacgccgtcgtgcttgccaaggggccattctggccagtcgcgctggggaggagagacggccgtgcgtccagcgcgacggaggcggccgaccatctgcctccagcttacggagacgtgcccctgctcaccaggatcttctcttccaagggcctcggcgtcaaggacctcgccgtcctctccggcgcccacacgctaggcacggcgcactgcccctcctacgccgaccgcctctacaacttcagcagcgcctacgactcggacccgtccctcgacaccgcgtacgccgaccggctcaggtcgcgctgcaagagcgtccaccacgacgacaaggacaaggccattctgtccgagatggatcccggcagctacaagaccttcgacaccagctactaccgacacgtcgccaagcgccgggggctcttccagtccgacgccgcgctcctcgccgacgccaccactagggagtacgtccaccgtattgccaccggcaagtttgacgacgtgttcttcaacgacttcgccgagtccatgaccaagatggccaacgtcgacgtgctcaccggtgccgagggggagatcaggaagaaatgctacatcgtcaactaaagtatacatgtattatcagctagctaaatcattattgttgttttaatgagtttaactccgtccactagatgatagggcgtgtgtctgcctgttattaatcaatgtaatgtatgtactcctattttgctgtaaattcattcttatcaatatgatcgtggcagataaactc

SEQ ID NO: 135166 - DNA, 819 bp, Zea Mays
atggcggagggcgcgaccaatggcggagggcggcagagggcccgactggaggacgtcgacgatgatgacgagcggtggagggcgcgatcgggggcggaggaggtggcagagagtgcgcgccgttactgctcgggtcgccgttgcctaatgcttgaagtgcctgacgccggtgaggacgagcgacacaccatacttgtggcagcacgcgacgacgtcctcttccttcttactacctcctggctgggcgatgatgtcgatgccgatctggcacgcctcctcgacggcatcattccaagctcgtcgcccaccgttccgccgctagtgccctgcctcgccgacgccgagcactgcagcaacggcagccccgtcggcgctcggggcgactgcacagcggcgggcacgaccaagtcctgcgatgagaagctcagatcaccgttagagcacacagtcgcacaggtccttgtacccgtacctcaccacgcaccggaacatgtggaagctcctgggccaggaaccgctcctctgtcagcacggtgtacacggggaggggccgaataccgccgggatcgtggctttgttcctcgtcacgagatatggcttcgtttgtcgtcgggagctgctggatcccgcatggcttcgtttctctctgagaatggactggatctctctgagaagaccacaaaacccgatgagagctggacgaggttgcatgcgctaccagatcatgccggatccaatcgtttattgcagaaactcggcatcgaagaggcggatctcgttgcttttcacgcgataaatgatgtcgtcgatgctagctga

SEQ ID NO: 135167 - DNA, 2124 bp, Zea Mays
aaatttccacggaatgaaatatcttctccgtcgccgggcctcccgtccgaatcggatattttttgcgcaccagttctgtcttctgtgggctatccgcctatcccccaaggccccaacccatcactttccacgccgccggccgctgcgctcccagtccggagagacatggactcggaacccgatgtcgagcttcggggccttgacatcgacgtagaacttgacccggaggaccttcagccgtcggtgcccctcaaaaaggtccccggcggcgacctcttcgaggcggcgcgggccggggattgcgaccgcctcgccctcctcctcgacgccggcgccaacgtcaacgcgcgtgaccgttgggactccgtcgcgctctattacgcctgcctggcgggacacgccgaggccgcgcggatgttgctcgaggccggcgccgtctgcgccgagcgcaccttcgacggcgaccgttgccactacgcggccctcaacctgcgcttacgctggctgctcaagtcgttcgaggccaggccgccaccgctcgcgccgctccccaccgcgctgcgggcgacgttccttgcctgccctgccaaccgcaccgctttcctcgagatgctccaggggagcgccggcgccgaatccgccgccctcgccgcggccgccggatttggcccaaaggatgatccatcaagtgcttgccttttccctccagatatcacattctatgtggacagaaagcctgttgaagctcatcgggtcatcctttgtgcccgatctcctttcttcgaaaagaagttcaagacagactggaaagacaggaaggaagtgagattttctaaccaaaagttgtattttggcgccttatacagcctcatccatttcttctattctgatagactcgaggtagctgttgacgacatggaaaatttggcgcgtgcatgcaaagtttgcaagtgcgaggagttgcaaaaagttttggataaagaagttgtgcatcagaagtatgcggagtacaagtcagcaagagaactggatatggacagctcacagaaacgattcatcttacaagcgcaatccttgcctgaggaagatcgccttccatcagccttgcagcgtattctgcagacttgtctagcaaactcaagagaaggttactgtagtgaggaatcaaatgagatgataaggaactcagaggatgatgatcttgcagatctttatattaaagtaggtgataaggttttccattgtcatcaggtgattttggcctcaaggtcagagtactttagagccaggctatctcgaactgttgattttcttgaaggtaactgtggctttgaagctgctcagaatgttccgcttcttgaggagcatgacataagtgcagaagcatttgaaaagatgctcgaatacatgtatactgataagctagagcatttggaccctggccaggctgaagaactatttgatgttgcatcaaggtacctgctgtttccccttaagcgggttgtagctgatatgctgctgccatatctcgaacatgtttcgcctgcagaactgtgccactggttgatgatgtcagacatatacggtgtcatgaaaataagggagtatatcttggatatcattgcttgcaactttgagatgtttgcagccacccgggagttccgggccttgctcttgactcttccaccaccatccggagatgactcactacggacaacacgtcccagtgcacctgggactggaggcaacaccgaccaaggcaacattcttgatgatttgcgtgagaagtggctagaagcagagggtgccgagctcgacgagagggatgagagtgcagctctgttcgacaagcgactggagatgcttatgctagttgcagagaaagaagccgatgatgaagacgcttgagtttcggagagtacgtgtgctagggtagcattgtttttgcattcttcactgcgcagttgtttaggtttgtgagttacaagttcatcttttgttgtatgaacttcaaacagatcagttttgacccatcaagtatccagtgagcaagtatttatgaacgaattaaacgatgtaagtttcttgcatataatatgcgattttgatgtagggtctagatga

SEQ ID NO: 135168 - DNA, 101 bp, Zea Mays
gaaaaaccactaaggcttatggaacatcaacatggataagtgtaccatgttggcacatcagggtcatatgcttagggataaaaattattatacacgagaat

SEQ ID NO: 135169 - DNA, 876 bp, Zea Mays
aaatcacactccgatagcaaaaaaccaatgttgaacggattataataataaaactccaattacaatgttcaggatactattttttagaagcccagtcttgtcttgatgatacctggttcaaaaagctcgtcgggaagaggagcaaaacaaaccctatctaaaccgcggcggactcttcgtccagcaaggtttcccatccagatccggccacgccacttgctcctcttctccgccacaccgatggtgtacgtggattcctgggacgagttcgtggagcggtccgtgcagctcttccgcggcgaccccaacgccacccgctacgtgatgaagtaccggcactgcgaggggaagctcgtgctcaaggtcaccgacgaccgcgagtgcttgaagttcaagacagatcaagctcaagacgcaaagaagatggagaagctcaacaacatcttttttgctctcatgacacgtgggcctgatgttgatatcagtgaagtttcagggaaggaacaggcagagcaacagcaagcgaagaaaggtcggggaaggaggcaataatgcggtctgatccttatttgttacagaaaattcacaactggaatgatggattaacatttcattgactttttgtactctgaagaaagtttttccagtacagaaccgagaacaaactaaatgcactctatcatgaatgaatgcatgattgagaaacgcccaaggcttcaaccctgcttcgttttaatgcacgtgaagcgttttcatccatgttttctggtagaggaatgtagcttgatactctgcctgatcttatattgcgcactgcctgttggggttgggccatacgattttaggctattctcaatgggaatgaatttcgtagca

SEQ ID NO: 135170 - DNA, 975 bp, Zea Mays
attgcccactaaggcatcattccgccaaagacccaaagtggcaaacgcccaaatcgacaaaccctaatgacctaatccccaacccccagccggcagccgccgagcaaaccagctcatccggtcggtcatccactcatcctcatcccctgcccatctgatccgatcggtcatctcatcctcatcccctacccgatcggatcccctgctcatccgccgagcaccaccaggcagcaggctccagtcatcgagcaccagcaggagcacggcgcgctgcccagtaggagcacggccaagaggatgacgcccgcatcctgcctcttctcctctgctactggagcctctactgctaggagcacggctaggaggacaacacccgcatccagcaggagcaccagcaggaggaggacgcccatgctgctgccgttgagcgatgatctgatgcgcccccatcatggctcttctcctccctcacggcctcgcctcgatctgctgctgccggtgatctgctgctgccggatccgagcgccgtgcccacgggtcacggccagcgatatgcagggatcaagaatccaactttgagaaaaattgctcgagatgtaaatggcgccgccggagtaccagcagtacctcgtgcaggtgaccaagtaccaggccgcacagaactgcaaggtacgtatgcacacatggttacatttactatagaactggaattatattttgatgcaaaggctgccaggtcatggtgatttcacgtccgttaggctcgagaggtggactcaaacatgacatccaagttttgcaagttttgatgttggatgttaaatttctatgctcacccctcgtttggttattgatgtactatttccatctcatgtcacaaatttggcataaggaatgggtattggtggctactgactgtgtttgtttccacgtattatacatgtacaatggaacagttgataatagttttgcatg

SEQ ID NO: 135171 - DNA, 1629 bp, Zea Mays
attgcccactaaggcatcattccgccaaagacccaaagtggcaaacgcccaaatcgacaaaccctaatgacctaatccccaacccccagccggcagccgccgagcaaaccagctcatccggtcggtcatccactcatcctcatcccctgcccatctgatccgatcggtcatctcatcctcatcccctacccgatcggatcccctgctcatccgccgagcaccaccaggcagcaggctccagtcatcgagcaccagcaggagcacggcgcgctgcccagtaggagcacggccaagaggatgacgcccgcatcctgcctcttctcctctgctactggagcctctactgctaggagcacggctaggaggacaacacccgcatccagcaggagcaccagcaggaggaggacgcccatgctgctgccgttgagcgatgatctgatgcgcccccatcatggctcttctcctccctcacggcctcgcctcgatctgctgctgccggtgatctgctgctgccggatccgagcgccgtgcccacgggtcacggccagcgatatgcagggatcaagaatccaactttgagaaaaattgctcgagatgtaaatggcgccgccggagtaccagcagtacctcgtgcaggtgaccaagtaccaggccgcacagaactgcaagttgataatagttttgcatgaactattggtgttggctatctaaaggacagaaaggcagacatgagcaacagatcccgctccatgggctgaaactgggattcgtgatggtcagctaagcataccttcgccttcaaatttgcgtagcttcgtttttattctgcaagttgtttggtctatcgttcaaatgccttattattctgcgagctgttttaagactgggcctcaatttttttccaggcagaaagtgctactgtcgctctcaattgtagcggtgtggtactgggatccttgccaataagtgtgtttttagggtgagcccgtccaagatgcccatgcgtccccgcgcccctcgccagctgatgtcgtactaggctaggggattgaagaagcacttgaagaggctcaatgcgcccaagcattggatgctcgacaagcttggcggagcttttttcatgctctgcaaggtgaggtctgttcagtttggccagaaaggtatcccctacctgaacacctacgatgatcgcaccatccgctaccccgacccgctcatcaaggccaacgacaccatcaagatcgatctagagaccaacaagatcatggacttcatcaagtttgacgtcggcaacgtggtcatggtgaccggcgggaggaacaccgggcgtgtaggagtgatcaagaacagggagaagcacaagggcagcttcgagaccatccacgtgctgcttggagctttttgctatgtctagttttttcctatttgttgtacaagaaaacataaaatggaattcaactttggtggccgcaaaagtttagagacttgatttcatataaagttaggctgaacattactgcaaacagttgtattttagtttagatttagagtacacttatgtatgtgttgtttgacaatgcttatttatgatatattgaatggtacttatttatattatattaattataa

SEQ ID NO: 135172 - DNA, 1607 bp, Zea Mays
attgcccactaaggcatcattccgccaaagacccaaagtggcaaacgcccaaatcgacaaaccctaatgacctaatccccaacccccagccggcagccgccgagcaaaccagctcatccggtcggtcatccactcatcctcatcccctgcccatctgatccgatcggtcatctcatcctcatcccctacccgatcggatcccctgctcatccgccgagcaccaccaggcagcaggctccagtcatcgagcaccagcaggagcacggcgcgctgcccagtaggagcacggccaagaggatgacgcccgcatcctgcctcttctcctctgctactggagcctctactgctaggagcacggctaggaggacaacacccgcatccagcaggagcaccagcaggaggaggacgcccatgctgctgccgttgagcgatgatctgatgcgcccccatcatggctcttctcctccctcacggcctcgcctcgatctgctgctgccggtgatctgctgctgccggatccgagcgccgtgcccacgggtcacggccagcgatatgcagggatcaagaatccaactttgagaaaaattgctcgagatgtaaatggcgccgccggagtaccagcagtacctcgtgcaggtgaccaagtaccaggccgcacagaactgcaaggtcatggtgatttcacgtccgttaggctcgagaggtggactcaaacatgacatccaagttttgcaagttttgatgttggatgttaaatttctatgctcacccctcgtttggttattgatttgataatagttttgcatgaactattggtgttggctatctaaaggacagaaaggcagacatgagcaacagatcccgctccatgggctgaaactgggattcgtgatggcagaaagtgctactgtcgctctcaattgtagcggtgtggtactgggatccttgccaataagggtgagcccgtccaagatgcccatgcgtccccgcgcccctcgccagctgatgtcgtactaggctaggggattgaagaagcacttgaagaggctcaatgcgcccaagcattggatgctcgacaagcttggcggagcttttttcatgctctgcaaggtgaggtctgttcagtttggccagaaaggtatcccctacctgaacacctacgatgatcgcaccatccgctaccccgacccgctcatcaaggccaacgacaccatcaagatcgatctagagaccaacaagatcatggacttcatcaagtttgacgtcggcaacgtggtcatggtgaccggcgggaggaacaccgggcgtgtaggagtgatcaagaacagggagaagcacaagggcagcttcgagaccatccacgtgctgcttggagctttttgctatgtctagttttttcctatttgttgtacaagaaaacataaaatggaattcaactttggtggccgcaaaagtttagagacttgatttcatataaagttaggctgaacattactgcaaacagttgtattttagtttagatttagagtacacttatgtatgtgttgtttgacaatgcttatttatgatatattgaatggtacttatttatattatattaattataa

SEQ ID NO: 135173 - DNA, 1495 bp, Zea Mays
attgcccactaaggcatcattccgccaaagacccaaagtggcaaacgcccaaatcgacaaaccctaatgacctaatccccaacccccagccggcagccgccgagcaaaccagctcatccggtcggtcatccactcatcctcatcccctgcccatctgatccgatcggtcatctcatcctcatcccctacccgatcggatcccctgctcatccgccgagcaccaccaggcagcaggctccagtcatcgagcaccagcaggagcacggcgcgctgcccagtaggagcacggccaagaggatgacgcccgcatcctgcctcttctcctctgctactggagcctctactgctaggagcacggctaggaggacaacacccgcatccagcaggagcaccagcaggaggaggacgcccatgctgctgccgttgagcgatgatctgatgcgcccccatcatggctcttctcctccctcacggcctcgcctcgatctgctgctgccggtgatctgctgctgccggatccgagcgccgtgcccacgggtcacggccagcgatatgcagggatcaagaatccaactttgagaaaaattgctcgagatgtaaatggcgccgccggagtaccagcagtacctcgtgcaggtgaccaagtaccaggccgcacagaactgcaagttgataatagttttgcatgaactattggtgttggctatctaaaggacagaaaggcagacatgagcaacagatcccgctccatgggctgaaactgggattcgtgatggcagaaagtgctactgtcgctctcaattgtagcggtgtggtactgggatccttgccaataagggtgagcccgtccaagatgcccatgcgtccccgcgcccctcgccagctgatgtcgtactaggctaggggattgaagaagcacttgaagaggctcaatgcgcccaagcattggatgctcgacaagcttggcggagcttttttcatgctctgcaaggtgaggtctgttcagtttggccagaaaggtatcccctacctgaacacctacgatgatcgcaccatccgctaccccgacccgctcatcaaggccaacgacaccatcaagatcgatctagagaccaacaagatcatggacttcatcaagtttgacgtcggcaacgtggtcatggtgaccggcgggaggaacaccgggcgtgtaggagtgatcaagaacagggagaagcacaagggcagcttcgagaccatccacgtgctgcttggagctttttgctatgtctagttttttcctatttgttgtacaagaaaacataaaatggaattcaactttggtggccgcaaaagtttagagacttgatttcatataaagttaggctgaacattactgcaaacagttgtattttagtttagatttagagtacacttatgtatgtgttgtttgacaatgcttatttatgatatattgaatggtacttatttatattatattaattataatgttgtt

SEQ ID NO: 135174 - DNA, 1510 bp, Zea Mays
attgcccactaaggcatcattccgccaaagacccaaagtggcaaacgcccaaatcgacaaaccctaatgacctaatccccaacccccagccggcagccgccgagcaaaccagctcatccggtcggtcatccactcatcctcatcccctgcccatctgatccgatcggtcatctcatcctcatcccctacccgatcggatcccctgctcatccgccgagcaccaccaggcagcaggctccagtcatcgagcaccagcaggagcacggcgcgctgcccagtaggagcacggccaagaggatgacgcccgcatcctgcctcttctcctctgctactggagcctctactgctaggagcacggctaggaggacaacacccgcatccagcaggagcaccagcaggaggaggacgcccatgctgctgccgttgagcgatgatctgatgcgcccccatcatggctcttctcctccctcacggcctcgcctcgatctgctgctgccggtgatctgctgctgccggatccgagcgccgtgcccacgggtcacggccagcgatatgcagggatcaagaatccaactttgagaaaaattgctcgagatgtaaatggcgccgccggagtaccagcagtacctcgtgcaggtgaccaagtaccaggccgcacagaactgcaagttgataatagttttgcatgaactattggtgttggctatctaaaggacagaaaggcagacatgagcaacagatcccgctccatgggctgaaactgggattcgtgatggcagaaagtgctactgtcgctctcaattgtagcggtgtggtactgggatccttgccaataagtgtgtttttagggtgagcccgtccaagatgcccatgcgtccccgcgcccctcgccagctgatgtcgtactaggctaggggattgaagaagcacttgaagaggctcaatgcgcccaagcattggatgctcgacaagcttggcggagcttttttcatgctctgcaaggtgaggtctgttcagtttggccagaaaggtatcccctacctgaacacctacgatgatcgcaccatccgctaccccgacccgctcatcaaggccaacgacaccatcaagatcgatctagagaccaacaagatcatggacttcatcaagtttgacgtcggcaacgtggtcatggtgaccggcgggaggaacaccgggcgtgtaggagtgatcaagaacagggagaagcacaagggcagcttcgagaccatccacgtgctgcttggagctttttgctatgtctagttttttcctatttgttgtacaagaaaacataaaatggaattcaactttggtggccgcaaaagtttagagacttgatttcatataaagttaggctgaacattactgcaaacagttgtattttagtttagatttagagtacacttatgtatgtgttgtttgacaatgcttatttatgatatattgaatggtacttatttatattatattaattataatgttgttcaat

SEQ ID NO: 135175 - DNA, 790 bp, Zea Mays
cgtccaagatgcccatgcgtccccgcgcccctcgccagctgatgtcgtactaggctaggggattgaagaagcacttgaagaggctcaatgcgcccaagcattggatgctcgacaagcttggcggagcttttgtaagtaaaaaatattttctagctttggtacctacaatcttctgtacttccccatttgtctaatgcttcaggttgttcttttttctgtagatctgtgtaccttatccttgctatactgtccatatatgctgtgtgcatgaaagtcttgcattgaaaatgtcatgtgctacaatcgttaggactattaatagatgttgctctgtctatctatccatttcatcgctggaaattcccatgccctttcatagtacgcctgtgaaatgctcgctgcttttctattggtttgtgtgcagttcatgctctgcaaggtgaggtctgttcagtttggccagaaaggtatcccctacctgaacacctacgatgatcgcaccatccgctaccccgacccgctcatcaaggccaacgacaccatcaagatcgatctagagaccaacaagatcatggacttcatcaagtttgacgtcggcaacgtggtcatggtgaccggcgggaggaacaccgggcgtgtaggagtgatcaagaacagggagaagcacaagggcagcttcgagaccatccacgtgctgcttggagctttttgctatgtctagttttttcctatttgttgtacaagaaaacataaaatggaattcaactttggtggccgcaaaagtttagag

SEQ ID NO: 135176 - DNA, 222 bp, Zea Mays
atgacgctatcgatctggatgaatggtgagctcaacgatctagagtcaaatctggtggggaagaagactggtcggtcgttaccagcggcaacgctggctgcagagctgatcatgccaccagcacaagagatcaaggagttctttgccatcgccgaggcggccaggacaaacgctttgcttccaaatcaaggacccttcaagaggaggatgctttttaggtga

SEQ ID NO: 135177 - DNA, 336 bp, Zea Mays
ctgcagattgccccacccgcacgaccccctgtacggccgggtttgaagctgaccaaacagagtggatacagtcatgctcaaagttggcaagctgtgtcaacaagcaggcccccatctgctactcgcttcatgggcatgcagtaaagccttggtatttagccgttgcagcttgggaaggatgcacctgcagcacgagctgcacgtagagttagtgctcaacgaaagatgatcgaggttgagtctgttgcagctgctgataaacaagagattcgagatgtagtgaagaagtgattccgtgctgagtacatggaaaaaaggcctgaggcccgggacaaa

SEQ ID NO: 135178 - DNA, 148 bp, Zea Mays
ttttttttcctttttgtgcctttgatgcttctcatctaggagttgttaaacatatgttaggctcacacggttgggcccttttgtctgacggcttaggccttttgcctcttgtatatttgctaagatgctattgtcatgttgacattta

SEQ ID NO: 135179 - DNA, 224 bp, Zea Mays
atgttacgtttgcagatatggacctcggtggttttctccacattaggaaagctggaagagccttttgaactcagtttttttttgctaccagtggtgttatggtgaaacagagttttgtgtgtatgtaccaacagctgaaatgtaaacacgacattatcatagttgagtacatgaataattatctcttatatcttattgtaaaatctgaaacaattctcatgtag

SEQ ID NO: 135180 - DNA, 1697 bp, Zea Mays
ctgacacacatacagcttcaatcatcgccttccagcctcttcggctcttcttgtcatcttcgatccatccgcagttcttcctgcattccccatttgcgcgttcttccatctcccagattgatctccttcccgacttgggctttcccggtgggaaagcagctgtacctaggccgcgagccatcgtcgccggcgccgcctcgggccgtccgtaccaaggcctacaagatgcttccggactggggctacggccgtatctacaccgtcgtcgtcgttaactgcacattccccaccaaccccaacgccgacaaccgcggcgggaagctcttcatccaagcatactactccaccgcctcccgccggtacgagcgcttcgtggcgctcgaggaggtgccgggttcctacgacgagtcccggttccggccgcccttcccctacgagtacctctactgcggttcttcgctctacgggaatctgagcgcggctcgcatgcgggagtggctagcttaccacgcgcatttcttcggccccaagtcgcacttcgtgctccacgacgccggtggtgtcagcacggaggtcagggcggtgctggatccgtggatccgggctggacgggtcaccgtccaggacatccgggcgcaggcggagtacgatggctactactacaaccagttcttggtggtgaacgattgcctccaccgctatcggcacgccgcaaattggaccttcttcttcgatgtcgatgagtacatctacctcccagacggccggacgctgcaggaggtgctggggcagctggagccctacacgcagttcaccattgagcagaaccccatgtccagcaaactctgcgtggaagatccaacaatggaatactcaaggaaatggggtttcgagaagctcgtcttccgtaattcgatcaccagagtcaggcgagaccgcaaatatgcgatccgagctcggaacgcgtactccacaggtgtacacatgtcccagaatgtcatcggtaggacaacccacaagacggagagcttgatcctatactaccactatcacaactcgatcaacgtcatgggggagccctgcagggaattcgtgccgagacccaacaatggaagcaaggtgatgtttgaggggataccgtatgtctacgatgacaacatggagcgcgtggcaggggagatcaaacgcttcgaggaggagacacttgggaccgtccgtacataggatcggcgcaaaagcatcgcatcgctggtgcgtatacagctctgtaccttgagctcgtgcccatccgttcgttccccgtgactctcgtcttgtgcactttgagctgccattccaacaagcagaatggaagaatctgtctcggggtcgaattagtgtaaagtttcagtttagctttgaatctgtcatctgtgtggagggcaatgcctttatgctgtgttttccgttcttgtctctatgatgttgtatgtatctcattgtagatttgtctagactgactgttgggctttattagatttttctgaatgtcgtatagggcgcagtgtgaagcgtctgaatatttgacttgttaaccaccctctggagtctgtatttgttcctgcacaaactggagcgtcagttcccatgttttctgttatgtacacctaccagaatagtggacagctcagcaatggtgaagcagttttttaacatgt

SEQ ID NO: 135181 - DNA, 2381 bp, Zea Mays
ctgacacacatacagcttcaatcatcgccttccagcctcttcggctcttcttgtcatcttcgatccatccgcagttcttcctgcattccccatttgcgcgttcttccatctcccagattgatctccttcccgacttgggctttcccggtgggaaagcagctgtacctaggccgcgagccacccgcccctcctgctcttcggcaaacgcggagaaagtgggcaggcaataaagtatccgcggcgccggcacgacctcctgctccgctccgtttggttcgccttcttccagcagcgaggagtggcgcagacctagaggccaagaaccagatcggcgggtccatgaagcccgacgtgaggaaagatgccggctgtggcgtgaccgcattcggcgtctcctgcttcgacatcaagtctttcgtcgcctccctcgcgctgctcacgctcgtcatggcgctctggcagctccacccctaccagccgctcctctccgcctcccgtccgtcttccatctgccccctgctcccccggccgaccatctcagcttcctcccgcgccgcttccaccgccgccgcatttccctccgccaactccagtaccaacgctgccagcaccaaggcggcctcttcggctgctcccgccgttacgacgacgaagccggctgcgtccgtgctgccagctgcccggccgcgggaccccaacaagcgggagttccgttcctacggcagcgcggcggctctgttcgttcagatgggcgcgtaccggggcggcccgcgtacgttcgccgtcattgggttggcctccaagccagcacacgtctatgacaccccctacttcaagtgcgagtgggtgccgaaccaggagccatcgtcgccggcgccgcctcgggccgtccgtaccaaggcctacaagatgcttccggactggggctacggccgtatctacaccgtcgtcgtcgttaactgcacattccccaccaaccccaacgccgacaaccgcggcgggaagctcttcatccaagcatactactccaccgcctcccgccggtacgagcgcttcgtggcgctcgaggaggtgccgggttcctacgacgagtcccggttccggccgcccttcccctacgagtacctctactgcggttcttcgctctacgggaatctgagcgcggctcgcatgcgggagtggctagcttaccacgcgcatttcttcggccccaagtcgcacttcgtgctccacgacgccggtggtgtcagcacggaggtcagggcggtgctggatccgtggatccgggctggacgggtcaccgtccaggacatccgggcgcaggcggagtacgatggctactactacaaccagttcttggtggtgaacgattgcctccaccgctatcggcacgccgcaaattggaccttcttcttcgatgtcgatgagtacatctacctcccagacggccggacgctgcaggaggtgctggggcagctggagccctacacgcagttcaccattgagcagaaccccatgtccagcaaactctgcgtggaagatccaacaatggaatactcaaggaaatggggtttcgagaagctcgtcttccgtaattcgatcaccagagtcaggcgagaccgcaaatatgcgatccgagctcggaacgcgtactccacaggtgtacacatgtcccagaatgtcatcggtaggacaacccacaagacggagagcttgatcctatactaccactatcacaactcgatcaacgtcatgggggagccctgcagggaattcgtgccgagacccaacaatggaagcaaggtgatgtttgaggggataccgtatgtctacgatgacaacatggagcgcgtggcaggggagatcaaacgcttcgaggaggagacacttgggaccgtccgtacataggatcggcgcaaaagcatcgcatcgctggtgcgtatacagctctgtaccttgagctcgtgcccatccgttcgttccccgtgactctcgtcttgtgcactttgagctgccattccaacaagcagaatggaagaatctgtctcggggtcgaattagtgtaaagtttcagtttagctttgaatctgtcatctgtgtggagggcaatgcctttatgctgtgttttccgttcttgtctctatgatgttgtatgtatctcattgtagatttgtctagactgactgttgggctttattagatttttctgaatgtcgtatagggcgcagtgtgaagcgtctgaatatttgacttgttaaccaccctctggagtctgtatttgttcctgcacaaactggagcgtcagttcccatgttttctgttatgtacacctaccagaatagtggacagctcagcaatggtgaagcagttttttaacatgt

SEQ ID NO: 135182 - DNA, 775 bp, Zea Mays
gtcaaacttggccgccgaggatccagccgactagtccactctttatcagtcgtcacaaacgcccccgccccgcccgttgacaagctgcttcttccttgacctgtccaccaccgccggctgggctatatatggctccaaaccaaacgcgtgcctccgcaagccagagagagccacttttcaccttgcagttccacaacacagagatccagataccaggatgggcgcgacgctcctgcaggcggtggcgtcgctcctgaccaggctgcagcgggcggcgcggaggatggccgccggaaccgctggaggtgggggtgggaagggctcgccgcgggcccaggccgccgtggcgcagtggaagaagaccttttcgtcgctggcgccggcgtctgggacgacgaccaacaaggaggccgccgagcccggggtgtggacaaaggagatcctcatgggggagcgctgccagccgctcgacttctccggggtcatctactacgacgccgagggccgccgcctcgcgcagccgccgccgcccaggtcgcccatgcgcagcccgctcccggcctcacacgggctcgccgccgcccacgcccgcgcctactagctagtggctagggtactaggctactagcttgtgtgcctagctagtggtagtggaggatcacaccgattggatacttgaaaaaaaaacagagtcgtctgtcactcttcttggaccggtggcatttgcagctgtataactgtattgtacatgatatgagattgggtgttcttgtcc

SEQ ID NO: 135183 - DNA, 835 bp, Zea Mays
atctataaataggacctagacgatcaatcgcaatcgcatatccactattctctaggaagcaagggaatcacatcgccatggcagccaagatgtttgcattgtttgcgctcctagctctttgtgcaaccgccactagtgctacccatatcccagggcacttgtcaccactactgatgccattggctaccatgaacccatggatgcagtactgcatgaagcaacagggggttgccaacttgctagcgtggccgaccctgatgctgcagcaactgttggcctcaccgcttcagccgtgccagatgccaatgatgatgccaggtatgatgccaccgatgacaatgatgccgatgccgaatatgatgccatcgatgatggtgccgactatgatgtcaccaataacgatagctagtatgatgccaccgatgatgatgccaaacatggtttcaccaatgatgatgccgagtatgatgccttcgacgatgacgccgagtatgatgccaccgataatgatgccaagtatgataccaccgatgatgatgccgagcatggtgtcatcaatgataatgccaaacatgatgacagtgccacaatgttactctgattccatctcgcacattatacaacaacaacaattaccattcatgttcagccccacagccgtggcgatctcacccatgtttttacagcagccctttgttggtgctgcattctagatataagcatttgtgttgtacccaataatgaagtcggcatgccatcgcatgcgactcattgtttaggaataaaacaagctaataatgacttttctctcattataatgtatatctctccctgt

SEQ ID NO: 135184 - DNA, 1004 bp, Zea Mays
accaaacatgcttgtccatgcctctcatcgtccttccactatcatatcgccggctagcttataaatactctccggccgtgacccctgctcaccaccatctccactattgctagtagatagtaagtagatcacgcagcgcagtagctctggattaattaataataattgctcgtgcgtgtgtccagagccgccatggctgcccatgtggacccgctggttgtggggagggtgatcggcgacgtggtggacttgttcgtgccgacggtggccgtgtcggcgcgcttcggcgccaaggacctcaccaacggctgcgagatcaagccatccgtcgccgcggccgctcccgccgtcctcatcgccggcagggccaacgacctcttcaccctggttatgactgacccagatgctccgagccctagcgagccaacgatgagggagttgctccactggctggtggttaacataccaggtggagcagatgcttctcaaggcggtgagacggtggtgccgtacgtgggcccgcgcccgccggtgggtatccaccgctacgtgctggtggtgtaccagcagaaggcccgcgtcacggctccgccgtcgctggcgccggcgacggaggcgacgcgcgcacggttcagcaaccgcgccttcgccgaccgccatgacctaggcctccctgtcgccgccatgttcttcaacgcgcagaaggagacagctagtcgccgccgccactactgagacaggctgatcgtcgtccaacggcaattacgtacccagcaaagcttaagccagccgctgcagtcactcatctcatcgagaagaagacaatcttcctagtcgctgttcttgccaagtactagtaccttgttaattattatgtaagctaaacccgtgtgcctgtgattatattgggacgtgtctcgctttaatacaaccgctcaacttgtggcgtttaattattttatttattagatataccaaggtgtcatcaagtcacttgccttaca

SEQ ID NO: 135185 - DNA, 845 bp, Zea Mays
accatctccactattgctagtagataagccgccatggctgcccatgtggacccgctggttgtggggagggtgatcggcgacgtggtggacttgttcgtgccgacggtggccgtgtcggcgcgcttcggcgccaaggacctcaccaacggctgcgagatcaagccatccgtcgccgcggccgctcccgccgtcctcatcgccggcagggccaacgacctcttcaccctggttatgactgacccagatgctccgagccctagcgagccaacgatgagggagttgctccactggctggtggttaacataccaggtggagcagatgcttctcaaggcggtgagacggtggtgccgtacgtgggcccgcgcccgccggtgggtatccaccgctacgtgctggtggtgtaccagcagaaggcccgcgtcacggctccgccgtcgctggcgccggcgacggaggcgacgcgcgcacggttcagcaaccgcgccttcgccgaccgccatgacctaggcctccctgtcgccgccatgttcttcaacgcgcagaaggagacagctagtcgccgccgccactactgagacaggctgatcgtcgtccaacggcaattacgtacccagcaaagcttaagccagccgctgcagtcactcatctcatcgagaagaagacaatcttcctagtcgctgttcttgccaagtactagtaccttgttaattattatgtaagctaaacccgtgtgcctgtgattatattgggacgtgtctcgctttaatacaaccgctcaacttgtggcgtttaattattttatttattagatataccaaggtgtcatcaagtcacttgccttaca

SEQ ID NO: 135186 - DNA, 1103 bp, Zea Mays
acccagcagcagcagcagtcggcagcaccggaaaactcgtgaaggaagcagtttgggcggccagcggtggccccagcaacgcgcttcacccatgtggagatccccatcggccccggcgacccgcctcctcttgtgtccgagtgcgaggaggagcctcccgtggatcacgcgttcgccaagtgccttggcgggctggtgagcgtggtgatgcaagaggtgcatctggagttggcgttcctgacgggggagatcacagcggtgtactcgtgcgggcccgggcagcaggccgtggcagtctccggtggtgcaggggtgagcgtgcggctgggcgagatgtacgcggaggaggagcgcgaactgctggtggaggtgcgggcgccgctgggcagccacccgcactcgttgacggtgcggtgcacgtaccacaacccggcgtcgcaggagacggtgcgcggcgcggtgcagcctctgctgctgcccgcgctccatgttgagcgggcgctgtcggcgtcgtcgtcgtctcggcggctgcacgacctgtttgtggcgacgcgcgtggtggcggagtcgcggcggctggcggagctgcaggacctggggacgacgatccacctgctgtcgtcggcgcgggcgctggtgctgcagtcgccggcgacgcagcagcagcaggacctggtgggcagcctggacacggagctgagcgacatgcggtggcggcgtggcaacagccagcatcagcatcagcatgaggaggcagtgacgccgacgtcgaggagcggcaggaggaggggagacggggacacgacgacggccgtggggaccccgcgcgggtcagccggggcaggggaggcgctgacgccgacgtcggcgtagcgcgcgacgcagcagctggccaaggtggccatcatgcgcaagtctatgaacagggtcagcgacctgcacggcttcgagaacgcgcgcttctgaagctagctatcgtcgacctcgtgtctgtctgtaattgagacgtgttctgttttggccttctttttcccattttctttcgctagtgaaacgagatgagtacccaaagtggaggaagaagatagcccccgccccgcgcc

SEQ ID NO: 135187 - DNA, 966 bp, Zea Mays
atggcatctagagaaggtctcagcgtctatgttagcggggcagttgcatgggcagtgcagcgagccgcggagcagcgaacatgggatcagcagtcacagattgtcatgaattgtgaccccaacagaaaaacaattgttgacatcactacaacagaacttgacaaaacaagttcagaaatcaacagacacaaagttaacgtaactacaagtgagaagttggtgaaaaggttaaccaagggcattgaggagtccaagaaagatagagaaaaactttctgctgaaacagagaagatgatgtctatgttcaaagagattgagaagaaagtatttgttgttcaggaagagtataagaaaacacaggagatgatagacaaccataaagttgagcttgacaaaactaaggaagaatacaccaaactaaaaaaagcaatggatgaactgagagccacagaggttgacgctgagtacaaattgcaagatacaaaaaagcttgccaaggagtgggaaatgaaggtgaaaacattcaagaaaaggcttgatgaaattcatataataatccaaaaggatgctgttgatcctgagaaactcaaagcgactccaggtgatgagcaactaaatgacacatatgacatgaaaagggcaatggagatggtagcattgttagaggcccagattaaagatttgaacccaaatctggattccatagcagagtaccgcacaaaggcttgcttgtacggtgagcgtgttgatgagttaaatgctaccactcaagaacgtgatgatcttaaaaagttgtacgatgggttaaggaagagaaggctggatgaattcatggctggattcaacataatatctttgaaactgaaggagatgtaccagataatggaaacatttggcttcaatgcttcatcctcagacaaattagcaacttatttgaaccaattgactggactgagtttaacataa

SEQ ID NO: 135188 - DNA, 1008 bp, Zea Mays
atggggagggaggcacagagagggcgtcgtcgcgccggacggccggttgaggcagcatggatgtcgggggcgcagagaggggtggtttgggcgaaggggatttcgtgggggaaggagcacgatgtctgcggggcgccattgattggcaacgagataatgatggtagaattaaaggacgtgtacgactcgctggacatccacgtcgtccactgcctctccgtgctggtcgacgctgaccaggcgctcggcgactactacatggtggcctccacgcggttcatccacgacgtcggggccgcctccatcgtcatccgctacgccggctccagcagcgccccgccgacgcccaacatgactgagtcgccggccggctgggcatggtccatcaaccaggccagcccgcagggctcctaccactacggccagatcaacatcacccgcaccatcaaggtcatggtctcccgcggccacatcgacggcaagctccgctacatcttcaacgacatctcccacagggacaccgagacccccccaagctcgccgagtacttcaacgtcactaacggggtgttcagctacaactagatgggcgacgtgcccctcgccgtcaacgggccactccatgtcatccccaaagtcatcatcgccgagttgcatctatttgatcatatctgcaacctggtcagcttggcggaaacgttctcctttattcacaaactatgttgattttcttaccaagtttccttccttacagatccatagaaaatatggtacaaatggcaacacggataagagacgtacagaaagttgcagaacgaccatattacagcaaaagaacgactttagtaagaacatggtactaatatgtcatgttgtgtttagtggaatcctccctatcttgaggtttcttcttgatcatggtgatgatctccatgaagaaggcagcctagaaggtcatgacaggttcaccgttcttcatacaactacaaagaaagatataattgtgtag

SEQ ID NO: 135189 - DNA, 114 bp, Zea Mays
ttcggttaaacccatcatggaatataacccaaaggtttgggaattttttaaactatggaagacatggattctatccatagcctattaggtatggaacaaatccatgagatattg

SEQ ID NO: 135190 - DNA, 2226 bp, Zea Mays
cccgcgaggagtttatcgaagggtttttaaaaagagaaaaagggagaaaataaaggcgagagaaaaaaaactgcggagaggtagcggtggatcgaaaccctaggcgcggtcggcggcgatggcggcggcggcagcagcggcagctgcagcgcctgagtcgtacatcgggagcttgataagcctcatgtcgaagagcgagatccggtacgagggcgtcctgtacaccatcaacaccgaggagtccagcatcgggctaaaaaacgttcgctcatttggaactgaaggtcgtaagaaggatggccaacagattcctgccagcgacaagatatatgagtacatactctttcgaggaagtgatataaaggatttgcaagtcaaatcatctccaccatctcagtcggcaactttacacaatgatcctgctattattcagtcacattatcctcatccagcttcgctttctacaagtttgccttctgctgcaagcacaataggagccaaccctacttcacagaatgctccatctttgattcagatgccaccgccatttcaagggaatttgcccccttaccagtctggcaccagcttacagtcatggaactcagcacctatgccatcatctgcaaatggcactggccttacaatgccaccaatgtactggccaggatattacacaccaccaactgggttttctcatctgcagccaccactcttccttaggccaccccacagtttggctgttccacaggtcctgcagcttcctgtacaatatcctggacttggatctttacctgctggatttccaaatatgccggagcttccttctttccttcaacctggtaacagtaatagtttaaatcaaacttcaggtgtacctacatctgtgtcaacgcctgcttcattgagtacatcacaaactgaatcatcaagaagccaactgccaaataagttttcatctgattcagcttctgtattttctgtgggttttactcctccatctgtgactccttcagtttcgacagttgaaccttccattcctgtgtcagcagtcttgccttctctggtgaacagtaagccagtagctctacctgactccaccatgccatctctctccactgccaagcctgtgattgtacctgatgcttcagtgcttacctatctatcatctcagccaccatctgctaatgatgtttctccagtcaatgctgcggagcaggttccattggtaacccctgggcaacttctgtcaactacttcctctacaattatatcatctcatgccttgcaaactgcttctgctgtggatctatcctctaaggctgccccctctacagttccatcttctcaggctacattgtttgaaggttcaaccacacaggttgcctcctcttctattttgtcacaacaggtggcaatgacaaatgaaagtaaagtagccaagcagcgtgagtggaaggcaaaacaaactgtggttggtagacccggaaataaggagcccctattgcctgaaccaaagtcggtgtttcaaaagcctgtaggagtttcctcatatgtccggtacaacagtagaggtcgcggaagaggaagaggccgtgggcaatcgcatcccataaccaagttcacagaggactttgatttcatggcaatgaatgagaagttcaacaaagatgaagtatggggccatcttggtaaaagaatagggcagttaaatgatgaaccaaatggttacgaagatgatgttatagaagatgatgagatatctcctagaaagccagaagctaaggctgtgtatgttaaagatgacttctttgattcactctcttgcaaccaaattgacaatggagggaggaacggaagagtgaaattctctgagcagaggaaaatagacactgagacctttggtgactcagcaaggcatcgaccaatgggcatccgaggtaggggcccccgtggcggcgctcgtggtcgtggctattatggtattagaggatatggatatacgggtagggggcgtggctactcttacccaaatcaccagccgtgatacctcggtgtctggaagcacactgaatggcaatggtaaattggccaatttgcgtggtaaaactgagatttatcgcagattacagtgctgctgttgtaagcgtcttattagtttgtttactgatgtggttggtaattcaagaatcaacgtctcttttattgatggcagattggtgtagaagc

SEQ ID NO: 135191 - DNA, 2439 bp, Zea Mays
cccgcgaggagtttatcgaagggtttttaaaaagagaaaaagggagaaaataaaggcgagagaaaaaaaactgcggagaggtagcggtggatcgaaaccctaggcgcggtcggcggcgatggcggcggcggcagcagcggcagctgcagcgcctgagtcgtacatcgggagcttgataagcctcatgtcgaagagcgagatccggtacgagggcgtcctgtacaccatcaacaccgaggagtccagcatcgggctaaaaaacgttcgctcatttggaactgaaggtcgtaagaaggatggccaacagattcctgccagcgacaagatatatgagtacatactctttcgaggaagtgatataaaggatttgcaagtcaaatcatctccaccatctcagtcggcaactttacacaatgatcctgctattattcagtcacattatcctcatccagcttcgctttctacaagtttgccttctgctgcaagcacaataggagccaaccctacttcacagaatgctccatctttgattcagatgccaccgccatttcaagggaatttgcccccttaccagtctggcaccagcttacagtcatggaactcagcacctatgccatcatctgcaaatggcactggccttacaatgccaccaatgtactggccaggatattacacaccaccaactgggttttctcatctgcagccaccactcttccttaggccaccccacagtttggctgttccacaggtcctgcagcttcctgtacaatatcctggacttggatctttacctgctggatttccaaatatgccggagcttccttctttccttcaacctggtaacagtaatagtttaaatcaaacttcaggtgtacctacatctgtgtcaacgcctgcttcattgagtacatcacaaactgaatcatcaagaagccaactgccaaataagttttcatctgattcagcttctgtattttctgtgggttttactcctccatctgtgactccttcagtttcgacagttgaaccttccattcctgtgtcagcagtcttgccttctctggtgaacagtaagccagtagctctacctgactccaccatgccatctctctccactgccaagcctgtgattgtacctgatgcttcagtgcttacctatctatcatctcagccaccatctgctaatgatgtttctccagtcaatgctgcggagcaggttccattggtaacccctgggcaacttctgtcaactacttcctctacaattatatcatctcatgccttgcaaactgcttctgctgtggatctatcctctaaggctgccccctctacagttccatcttctcaggctacattgtttgaaggttcaaccacacaggttgcctcctcttctattttgtcacaacaggtggcaatgacaaatgaaagtaaagtagccaagcagcgtgagtggaaggcaaaacaaactgtggttggtagacccggaaataaggagcccctattgcctgaaccaaagtcggtgtttcaaaagcctgtaggagtttcctcatatgtccggtacaacagtagaggtcgcggaagaggaagaggccgtgggcaatcgcatcccataaccaagttcacagaggactttgatttcatggcaatgaatgagaagttcaacaaagatgaagtatggggccatcttggtaaaagaatagggcagttaaatgatgaaccaaatggttacgaagatgatgttatagaagatgatgagatatctcctagaaagccagaagctaaggctgtgtatgttaaagatgacttctttgattcactctcttgcaaccaaattgacaatggagggaggaacggaagagtgaaattctctgagcagaggaaaatagacactgaggtattcacagataggcattgaatctttaccttcccatatcaccttagcattcagtgcatatcatgatttattttggctgtagacctttggtgactcagcaaggcatcgaccaatgggcatccgaggtaggggcccccgtggcggcgctcgtggtcgtggctattatggtattagaggatatggatatacgggtagggggcgtggctactcttacccaaatcaccagccgtgatacctcggtgtctggaagcacactgaatggcaatggtaaattggccaatttgcgtggtaaaactgagatttatcgcagattacagtgctgctgttgtaagcgtcttattagtttgtttactgatgtggttggtaattcaagaatcaacgtctcttttattgatggcagattggtgtagaagctttcacatctatatcttgttagtgtcgatggtcatttatttccttttggaggtagaagctgttagcagattgctagatgatgtaacacagatctgtccaagatcaacggaaaaacaagcagcagtattgat

SEQ ID NO: 135192 - DNA, 1057 bp, Zea Mays
gttcttgaccgtcgcatccaatccaacggcattctggttctagggagcccgcaggaaggcacctctgcggcgaccagcgtgaagaaaggggatcggaacgcctccatctcaaaccccacgaaggcacgaaccctctcttcctaggttcatcgttcctcctccgcgtccttccttccctccgcagcgcggcgcggcgcggcgcgatgatacagctgctcttcacgctgctagcggcggagggcgccgtggcggcggtgctactcttcaagacgccgctgcggaggctggccgtgctcgcgctcgaccacctcaagcggggccgcgggcccgtcatggtgcgcaccatcgcggccaccgtgcttgtcgtgctcgcatccagtctccacagcatgggccaagatccgcggccacgccgagggggagctcgacggctccggggtcgtggggctcacccccaccgaccaggtccttcttgcgcgacacctcctcgaggcgtcactcatgggatactccttattccttgctttagtcattgaccggctgcacaactatgtcaaagaaaatcgaaggctcaggaagaaattggaagaggtgttgaaacagaataaggcactagaagaagcaacaaatggaaagctagaagagaacaggcctgaccagaaagacctttcccatgccaaggataattaacaatgacatgcgctcaagaaactccctgccatcactgcctatgcctgaataggatgccggtcactgatgttctccctgttgagaattagcattggtaaatgaatgctcggttacaacgtgctaaatcctttgcatctggccaaatttgtaaataagcactgggtgatgcccatcagtaaacacatgatgctactgctgttaaactaaatgtggcaaatttcataatgctaggtattgttctcggtatctaaggtgttgtttggttgctaagtatggtggaacgaagtcgctctgctctcattctattgttgtttggagctctcattctattgttgtttggattggtttcgtagagaacagtgactct

SEQ ID NO: 135193 - DNA, 632 bp, Zea Mays
atccaatccaacggcattctggttctagggagcccgcaggaaggcacctctgcggcgaccagcgtgaagaaaggggatcggaacgcctccatctcaaaccccacgaaggcacgaaccctctcttcctaggttcatcgttcctcctccgcgtccttccttccctccgcagcgcggcgcggcgcggcgcgatgatacagctgctcttcacgctgctagcggcggagggcgccgtggcggcggtgctactcttcaagacgccgctgcggaggctggccgtgctcgcgctcgaccacctcaagcggggccgcgggcccgtcatggtgcgcaccatcgcggccaccgtgcttgtcgtgctcgcatccagtctccacagcatgggccaagatccgcggccacgccgagggggagctcgacggctccggggtcgtggggctcacccccaccgaccaggtccttcttgcgcgacacctcctcgaggcgtcactcatgggtatgcacgcgagcatctctggaatgttggttgaagtcattcaccctctctctctctaatcaatttgttcgatcgtcctcatactcgtcatcatgaagcacctatgaaataggtctgtcacatttagtgtaatgtgtgaatt

SEQ ID NO: 135194 - DNA, 819 bp, Zea Mays
atgatacagctgctcttcacgctgctagcggcggagggcgccgtggcggcggtgctactcttcaagacgccgctgcggaggctggccgtgctcgcgctcgaccacctcaagcggggccgcgggcccgtcatggtgcgcaccatcgcggccaccgtgcttgtcgtgctcgcatccagtctccacagcatgggccaagatccgcggccacgccgagggggagctcgacggctccggggtcgtggggctcacccccaccgaccaggtccttcttgcgcgacacctcctcgaggcgtcactcatgggatactccttattccttgctttagtcattgaccggctgcacaactatgtcaaagaaaatcgaaggctcaggaagaaattggaagaggtgttgaaacagaataaggcactagaagaagcaacaaatggaaagctagaagagaacaggcctgaccagaaagacctttcccatgccaaggataattaacaatgacatgcgctcaagaaactccctgccatcactgcctatgcctgaataggatgccggtcactgatgttctccctgttgagaattagcattggtaaatgaatgctcggttacaacgtgctaaatcctttgcatctggccaaatttgtaaataagcactgggtgatgcccatcagtaaacacatgatgctactgctgttaaactaaatgtggcaaatttcataatgctagttggcttcggaactaaacactacccaatacaacgccggtactgtgagcgataaagaccgacccacgattttgtttctggctgagctatgcatttctgtatc

SEQ ID NO: 135195 - DNA, 822 bp, Zea Mays
tcatcgcaaagatgtattctctcacaatctgatacccctccttaagaaagggaagaacctactatgcttagaccaattcgacttggaaactacggaaccaacaatgctatgaaagagataggatgcagacagagcaatgtatcgtatactcgcccacaacccagacaagacaaactctagatttgcggaaatcaaccaacatcatctaaatgatgtcctatttgtgcagttttccaaccaatttttgttcacaagattgcattctttcaggatactccttattccttgctttagtcattgaccggctgcacaactatgtcaaagaaaatcgaaggctcaggaagaaattggaagaggtgttgaaacagaataaggcactagaagaagcaacaaatggaaagctagaagagaacaggcctgaccagaaagacctttcccatgccaaggataattaacaatgacatgcgctcaagaaactccctgccatcactgcctatgcctgaataggatgccggtcactgatgttctccctgttgagaattagcattggtaaatgaatgctcggttacaacgtgctaaatcctttgcatctggccaaatttgtaaataagcactgggtgatgcccatcagtaaacacatgatgctactgctgttaaactaaatgtggcaaatttcataatgctaggtattgttctcggtatctaaggtgttgtttggttgctaagtatggtggaacgaagtcgctctgctctcattctattgttgtttggagctctcattctattgttgtttggattggtttcgtagagaacagtgactct

SEQ ID NO: 135196 - DNA, 753 bp, Zea Mays
atcttttcgtggacacgtagcaggtcgatgatgaggagcggcgacacgtcgtgacggacgttactttcgcgccgtattctagtcttctagagatatccatccagttctcgctatatctttttctccccaagaaaaaaaaggcggcgagagcataagaaaaaaacacacacacacacacacacaaagcgcacttttcaaatcgacaaaggggaaaggttcgcttcttctcgcatcttgctttacttcgagtgccatggccgatccggcggaggagaacgttgtctcgccgccaccgacccctgcggccccagccgtgggcgcctcagactcgcccctgcagcctgttgctgacggcgcctcaacggagaaggtgtctgccccggcgccggaggtaaggtcccggggattcaggcttcttggagaggacacttccgtgcacaaatcccttgggggcggtaaaagtacgtatttctttcttcatttttctgctgactttcttcctgtgctccaattaatcgtatggtgttagcttggagttgtgcttttttataacaggaggtcaggagatgtgtttgtttctttctggttattattctaagtgcataggaaacaatagacgagataacgcacggaatgagattgattatttattcggagtttcttttgagaaagtatattcaaatcactccgtaccggttattaggtgtgttaaattttgttcaaaaataataacgggtgttaaaaaatatgttc

SEQ ID NO: 135197 - DNA, 1517 bp, Zea Mays
atcttttcgtggacacgtagcaggtcgatgatgaggagcggcgacacgtcgtgacggacgttactttcgcgccgtattctagtcttctagagatatccatccagttctcgctatatctttttctccccaagaaaaaaaaggcggcgagagcataagaaaaaaacacacacacacacacacacaaagcgcacttttcaaatcgacaaaggggaaaggttcgcttcttctcgcatcttgctttacttcgagtgccatggccgatccggcggaggagaacgttgtctcgccgccaccgacccctgcggccccagccgtgggcgcctcagactcgcccctgcagcctgttgctgacggcgcctcaacggagaaggtgtctgccccggcgccggaggtaaggtcccggggattcaggcttcttggagaggacacttccgtgcacaaatcccttgggggcggtaaaactgctgacgttctgttatggaaagacaagaaaacttctgctgttgtaataggcggcgcaactgtcatctgggttctgttcgaagtgcttgattaccacctcctgaccctgatatcccatgtactgattggtgtgcttgccaccttattcctgtggtccaaagcaaccacgttcatcaagaagagtccaccggatattccagtagtgcaggtatctgaggaccttgttgtgaatgtttcacgggcattacggaatgacatcaacagagcgcttcacttgttccgtgagatcgcaatggggcatgatctgaagaagtttttgggtgtgatcgtgggtctgtgggttctctccggagttggaagcagctgtgacttcctcacgttgacatacattgccgtcctgatgctccacacggtgccaatcttgtacgacaagtaccaggacaaggtggaccatgtcgctggaagggcacacaccgaggccctcaagcagtacaaggtgctggatgccaaggtcctgagcaaaatccccaggggtgcggtcaaatccaaaaagcagaactagttaggataagccgcagattgtgaatgcccgtatcatgagtatcgggcttgtggtttgcatggcatatgtaaatctgtctgttggcttcagcttggttcttctgcgactactttgttgatgttattatagtcctatgtatgtactgtgtacatgacagatgttcggacgtctcggctactgctgtagcttgtaaattccagtggtgcgttgctaagcacgatgctccccttgttttatgtggtgttggactaatgattactacactaaggtttaatgactcaattaggatcattttgtgaagaaacattttgtgaaaaaacatttggatcataatcttgaactaaaaactaaaatttatttagtattctatcattttgtgaataaatatttgatcataatctattatcacctataggtttaggtgtctataggtatccttgttttcacataaacactagttaccactggaaattattatttttatttgcatggt

SEQ ID NO: 135198 - DNA, 1533 bp, Zea Mays
cggaaacgatgttttttgtccatttttcctaggggcgcactccagaagatgttaatggcttttgacaggtggctacaccaacacacttgtaaaagtgaatctacacttgaatcatatggcttcgggctcctctttttcaatcattgacacttaaaactccagataatatgctttggcaacaaatttaaatttttaacactttgccatacacagtgatgggcaacatatatagtgtaaaagggattatggtgctaacattgtaacatcaaattttatccatcggatccaccataatctatggttgaattcaatcttgtatggggacaaaatataggagttctttagaaagtagtctatgaaattgatagatgaagacatctttaaaccatgagctaaccttaattgagattagcttaggtcattgctgttatctcttttgttctaattctgctccttgtggaggagaactttctgcagctgctgacgttctgttatggaaagacaagaaaacttctgctgttgtaataggcggcgcaactgtcatctgggttctgttcgaagtgcttgattaccacctcctgaccctgatatcccatgtactgattggtgtgcttgccaccttattcctgtggtccaaagcaaccacgttcatcaagaagagtccaccggatattccagtagtgcaggtatctgaggaccttgttgtgaatgtttcacgggcattacggaatgacatcaacagagcgcttcacttgttccgtgagatcgcaatggggcatgatctgaagaagtttttgggtgtgatcgtgggtctgtgggttctctccggagttggaagcagctgtgacttcctcacgttgacatacattgccgtcctgatgctccacacggtgccaatcttgtacgacaagtaccaggacaaggtggaccatgtcgctggaagggcacacaccgaggccctcaagcagtacaaggtgctggatgccaaggtcctgagcaaaatccccaggggtgcggtcaaatccaaaaagcagaactagttaggataagccgcagattgtgaatgcccgtatcatgagtatcgggcttgtggtttgcatggcatatgtaaatctgtctgttggcttcagcttggttcttctgcgactactttgttgatgttattatagtcctatgtatgtactgtgtacatgacagatgttcggacgtctcggctactgctgtagcttgtaaattccagtggtgcgttgctaagcacgatgctccccttgttttatgtggtgttggactaatgattactacactaaggtttaatgactcaattaggatcattttgtgaagaaacattttgtgaaaaaacatttggatcataatcttgaactaaaaactaaaatttatttagtattctatcattttgtgaataaatatttgatcataatctattatcacctataggtttaggtgtctataggtatccttgttttcacataaacactagttaccactggaaattattatttttatttgcatggt

SEQ ID NO: 135199 - DNA, 1407 bp, Zea Mays
gggaactagaattcgacgccgctgtggactggtcatggcgtgctaccgcgcatccacggcgccgacggcccaccgaggtctaggaaaaatagaatggttggtatggtagggtaggtgaaccggtgaagattagagggactgagggagagggaccgtgacaccgtgtctagccagccaacctgctgctctagcccacctgcatggcggtgtcagcgccggtcactctctgcccctcggattctcgctccctctcttccgcgctcgtttcttcccgatccaacaagccttcttcacttgatgctgttcggtcacggcggttgaatttgggagattcagctatgccaacgcagatctccacaaggcagtctcttcggtttgctttaccttcgaacaatgcacgtccaatatcgactgcagcaagaatgacatgttttgctaagaagcaacatattgctgccgtgcccttatgtactttggaggccaaaaggtatgaacctatagtcaaaatgtgtggcattacatctgccttcgatgctgagatggctttgaaggctggagctaaattaattgggatgattctttggcccaagtccaaacgctctatcccattgtctgaagctaaagagatatccagagtggccaaatcttacggggctgaatcagtgggtgtgtttgtggatgatgatagtagtactatcttgacagcatctgattcatgcaacctcgatcttatccagcttcatggagatagctcccgagaactacttcctctgctttggaagaacaacaggattatatatgtgctaaatgctgatgaggatggtaaacttatcaatgctcctccaagtgaggaatatgttcttgattggtttttggtggacagtgcaaaaggtggaagtggcaaagggttcaactgggaaaaattccaaatgccaactgttaaaagcaagaacgggtggttattagcaggaggccttcatgcagataatgttcacgaagccgcttctgctctaaagccaaatggcctggatgttagcagtggcatatgttttcctgacggtttacggaaagacccgaagagaatgtgttccttcatgagcagtgtaaaaactttgaatctcctctaacatactagtgctttattggtcgtagtttcttggtgcagtatgtggaaactgaataaatggcagtcctaataaaaataaaaataaaaataaaatgaccatcataggtaagctgtccagaacagaggcattgtcgatctttggcatcaaccagtaaaattcatgcaatgagcagctatatcattttcagcttctcgttaaggcagttcgacacatgtctgtttactgacgtgttgaatgagacatttgattggaatgtgaagagacaactgagtttttgttt

SEQ ID NO: 135200 - DNA, 634 bp, Zea Mays
ttagttttgattttatctatttgtgaatatcacatgttcttatttctttataggatttggtagttaaaatttgttgattgtggagaaagctggaactgataaaatctattcggatgcatttacagtggcaaagggttcaactgggaaaaattccaaatgccaactgttaaaagcaagaacgggtggttattagcaggaggccttcatgcagataatgttcacgaagccgcttctgctctaaagccaaatggcctggatgttagcagtggcatatgttttcctgacggtttacggaaagacccgaagagaatgtgttccttcatgagcagtgtaaaaactttgaatctcctctaacatactagtgctttattggtcgtagtttcttggtgcagtatgtggaaactgaataaatggcagtcctaataaaaataaaaataaaaataaaatgaccatcataggtaagctgtccagaacagaggcattgtcgatctttggcatcaaccagtaaaattcatgcaatgagcagctatatcattttcagcttctcgttaaggcagttcgacacatgtctgtttactgacgtgttgaatgagacatttgattggaatgtgaagagacaactgagtttttgttt

SEQ ID NO: 135201 - DNA, 2005 bp, Zea Mays
aatcagcccgtggcccaaatttactcggacttcacctctcccaatcctcctccatctccttcttaaattccacttcttcgatttgatccccacccgtcgccgctcttttttttctgcttatttttttttctgagccgaccagaaagaccagaaactcgagtttgttggctcctgatccaaactattctaatcgcacgaaagaggctgcaaatattgaattttgagtttctttgggagtggtttagtggataaatcggggaaaccataggggaattcctgaccgaaagtggtggaaagtttagtttggtgatggaggaggagaagcagcagatggagccgccggcgccggcgctggtgcgggaagcgggagccgagccaagggcgccacgacaaacgcaacagcagccgaatacggcggtccaggtgcagccttctatgccggtgctgaggccatggccaatggaaatcacgctttctatgaagcctgtggttgaaatgaagagtggcaccccagcaaagaagaagaagcactgtaattgcaaaaactcacaatgtttaaagctgtattgtgagtgttttgcagcaggtgattactgtgacggttgcaattgtaaacaatgtggaaacactgttgagaacgaaaagggtaggcaggaggctattaacaacacaaagctaagaaatccaaacgcctttcaacctaagattgaaaatggtccaattccttctagtgtttggaaggatgctggagcactaccttcacatccaaagcataataaaggttgtcactgcaagaagtcaggttgtctaaagaaatactgtgaatgttttcaagcgaatatcctttgctccaagaattgtaaatgtatggattgcaagaactatgaagggagtgaggagctacgtagtacaactcaaggggataattcatgtgatcgaaataacattcaacaagcagctaatgttgctctgaatggtgccattggatcttcagggtatagattttctccagtacgtagaaaaaggcccccagaagatccccactgtcagacattaaatgttgaaggaagtatgatgcagacacagtttcgagagacaaacaatgtggatgtttcccaaatgacctcatctactggacgtgatggttccactgtaaatttccagggtacatctaaactggtatataggtctccactagcaaatactatccatattactgatgtcaacgacctagccaaccatttggtgattgcatgcagaaaggcagcagagaggttcactacaatagttgataacaaagtggagatggaaatagataaggaaatttgcacaaatactgaccaaaagtttgatgagaacaagaaaggagtccagaaagctgcacttagtcaacttggcaaagtgactgatatagatcaacaaattgttgatgactccagattgcattgctctgatacccaagacgatgctagacctgcctctccaggaacacaagcgctgttgtgtgatgagcaggatctcacatttggtacagttcatagaagttcaattccagtagcaatgcatgatcaggtcatttcagagctacacgctgcacaagaaagtgcagtgttgaaggagttaagaaacaacctccggctaattatcgcacgtggaaaactaaatgcagaaggaaaatccgcatcagggacacggatggaattggatgctctaaggcatcatgaatcaagcaccagtttagccccagtacgagctgaagagaaatccaacactacagatggccctgaaataacacacgaactaaaatagatttagctcagtttggatttttcatgtcaagataagatatgtattgtaccatagccaatctctgtgtacatacggatagtatagtccttgttgctagaaaaggcaaccggcaatgtagcattaatcattcacgaggtgtaaagtaggaaacagatcacgtatttattttttttatcaataatgagttttaattgag

SEQ ID NO: 135202 - DNA, 478 bp, Zea Mays
gagaggagagggtgcgctatgggcgatacagggagcagctccattctggtgcacattctggtggtcgccctatgcctgaccgcctttggcttcgccgtcgccgccgagcgccgccgcagcacggtactaacatttccgcaagttgcctttttctctttgcctaccgcatccataaacaagcattcaccacggccccacccacccacccacaccacaccacacaccctgcgtcctaaagactctcagagatctgctgttgaatttaaatctttgttctaaggaattcctgctatttgattttaatattcattaatgttgaaataaacaaattgtataaaagcactctgcaagcccatatcctgatttcccactatctcagtcccaatacaatcacagcggtaggactaatcactcaagtaccatgcttcgtttccgcttttctgcaccatttgcttgttctacacgatataggaaggac

SEQ ID NO: 135203 - DNA, 1572 bp, Zea Mays
ggaggccatggatttcctataaacaaatagctccagtgagtaaaattataaatgggtagtcataagacgtgtaaacgtacctaaagcagagcatatagttcaggaatattctccacaagtgtctcaaataatcagatccaagcaaccatgagcatgacaaaattaagtattaggtatgtattgtttcatttgataattctaggatgtttgtacttcacatcagagttcagttgtttcaacatctttgtttctctatgcagctactactacatcctgaatctgatgattcggctcaactttcctagattgagactgaaaagctgctagcccagttagttgagactgagatgaacagacgtttgaaggaggacacttacaaaggaaagaagtttaatgcaatctgtcacttcttgggctaccaagctaggggagcactgccttcaaagtttgattgtgattatgcctactttttggggcatgtgtgctaccacatcatagctgccggattggatggataacggatacatggctacagtgagaaatcttaagaatccagtgaacaagtggcgatgtggtgtgactcctatttcgtattactactttattcgtttgatgggacacaaggcttctcatgtggcattggaatgtgctcttcaatcacatccaaacatggtcaaaattttcaccattgatccaacctctgctgcggcaatttccagcattggcggtgtgctctttgcaaagccttggagctgtctctcctgcaaagtctgaacttgtagagatagtcccacaagagaaatcaccaaaagcttccattcaaccaatgccaccgagtccaaggtattctacctcaagatgaagggcgactaccacagggcaggcagagagccttggaaccgaactcttggagatggtgcctagcagggaagaggagattaagttgaaagaatacagggaggatgctgtgtcgacttttgtagttgatgattatgtgagacttcagtttaagggcacaacttttaccggttcttggaagtcatttagtagccctaagatttcatcaacattcttagtagtaattgctatagtatcaaatgggattgtggtacgagttgcttgagtactaagtactaacgttgttgtacattgtgaagctaagtgggtaatatcaaaagggattaagatttatgtgtggtgcttattgtatttgtttttattattttattgtgctttgtacatgtaccgtcattcttactctggtgttcttttaatgtaaagtttgacacaatatatttttatacgagagaccgaaggttacttagtattgttttctgtttcttttatcgtctttgcagatctatgtttggatgatgaaaacagtgctactcgatgtgaagtccaccaatactatagttcaaattaagtataagatcggtgctttagagggaattggtaagagccagcaagcactttttttgctggaattatggtagcagtcaggtttcagatttctatgagttcggtgaataaaatgagcttatgggtgttgtcaatctttttaaatttcct

SEQ ID NO: 135204 - DNA, 2592 bp, Zea Mays
cactgcttctccctctctgttttacggaggacgaggaggaacaggaagcagcagggtgcaacaatggtgaagttctccaagcggttcgagggccagctggtgcccgaatggaaggacgccttcgtggactactggcagctcaagaaggacgtcaagaagctgcaggccgcggcaggagaggctgccgtggcggcgccggcgagggctccggctcactgggcgatgaggctgcccttcttccacccccttgggcagccgcctgccgccattcaggtgcacaggaagctggccacagacaggagcgtcgacggcgcggtggccggggaggtgtacgatacggcggtggcggatggcgccgggttcgcggacgccgaggcggccaaggccttcttccagaggctggaccagcagctcaacaaggtgaaccggttctacgagagggaggagcgggagttcctggagcgcggcgagtcgctccggcggcagctgcagatcctcctcgagctcaaggctgccgtcacccagcagcagcaggcacggcgcggggggagcgctgccgacacggatgacccctccgtttcttggtccattcagctcggaggccaatctctcagggtaattgcagagaaagaagaagagtgtgaagaaaagctcaacggcggcgatgctaccgccaagataagcagtggtgaaggacccgtgtctcaaggtctcagtgaatctgggagactttgcaagccgaatgaagaaatgacgaggacactctccggccagggcaggagtgtgaggatcaacatcccggtcaccacgccttccaggactgtcaccgccatacgcgaactgctgttcggggacatgccgagccagtccaagaagactggcgcgcatggtaccgacggcagtgagaagctgagcatcaacaagaggaaggtgcaccaggcggagaagatgatcagaggtgctctggttgagctgtacaaaggactgggctacctcaagacgtaccggagcttgaacatgatggcctttgtgaagatcctcaagaaatttgacaaggttacaggaaaggaagtgcagcaaatttacctcaaagcagtggagagctcctactacaacagctctgacaaggcagtcaggctaatggacgatgtggaggagctgttcttgagacatttcacagaaggtgacagacggaaagcaatggtgtatctgaagccaaatcagcgggaagagtcacactgtactacgtttttcattggagtatccactggcggcttcatagcattgttcataggttactgtatcatggcacgcgttgctggaatgtacactcagcagtcaaacaaggtgtacatgtcaacttcttatcctgttcttagcatgttcagcctcttcttcctgcatctcttcatctatgggtgtaacatcttcatgtggagaaagacacgcataaaccacacattcatatttgaattcacgcctactaaagagctcaagtaccgagacgtgttcttgatatgcactgcttccatgacaattgttgttggtgcaatgtttgcgcacctggcaataattgttaaaggaaattcatcaggcgttgtccaagcgataccagggtccttacttctggtgttcttgttcatattagtctgccctttcaacatcgtctaccaatcaagccgttaccaattccttagagttatcagaaacatcattctgacacccttttataaggttgtcatggttgatttctttatggctgatcagctctgcagccaggtaccactgctcaggagcctggagtatttggcatgttactacataacaggcagctacatgacacaagactatggatactgcacaagagttaaaaactttagagaccttgcttatgcagtatccttcctgccttattactggagagccatgcagtgcgcacggagatggtttgatgaaggggatataaaccatattgtcaaccttgggaagtatgtgtcagccatgcttgctgcaggaacaaaggtggcatatgagaataacaatagtactgggtggatgtcacttgttatcattgtatcaagtattgcaactatctatcaactgtactgggactttgtcaaggactggggtcttctacagttcaactccaagaatgcctggcttcgtaatgatttgatacttaaacaaaaatacatttatttcgtatccatgggcctgaaccttgtcttgaggcttgcttggcttcagactgtcatccaccctaatattggaagcctggattctagagtaactctgttctttttagcagcacttgaagtgatacgacgaggtcactggaacttctacaggctggagaatgaacacctaaacaatgcaggcaagttcagagcggtgaaggttgttccacttccttttcaagaagtggaagaggaataacaaaacagggccaccactggagcatgttgtaggttttaagaatacaaacagttcgtatgtaacacaccaactaatgctagaaagcatgcactacattaccataataagattcatttttgtatgagcaataaaaaccattccacgctgttagtatgg

SEQ ID NO: 135205 - DNA, 2058 bp, Zea Mays
gccgttaccctattccctccccgtcgctatccaccccatcgcgttgccggatcgagcttggctctctcgaaccttgcttcgccgcacggcaccaaaagcacggccgcgctctcatccccctccacacgtttccgcctcccgatccatagccgccgtgagccgccgccgacatagctcctccctctcgcagctctccagctctcggaggcccgcggctcatcaacccgcgcttcttcattctcgacatctcacccggcggcgcggacgcgcagtgcacatcacgagccgcacggcacagccgctcttgttttccttcgtgggttgcggttcgacgcggccacgggatggcggcgagcgctcgggacagcgctgatgcggcggagcgagtcgtggatgaccacgacggctgggcgtcggacggcgagatgggcatggagatggatgtggaaggcgagttccacgaccgcgatgccgaccggagggatggcggcatggatggtgatgatgagtacttgctgctcactaggataagggacacatcagcagctgaagcaagggcaggaaaggatatacaaggtataccatgggagaggatacacatagccaggcaagactaccgaaaagctaggttggaacagtataagaactatgaaaatttccctcaatcaggagagctcatggataagttgtgcaagcaagtggagaagagcagcaagtattatgagtttcagcataacactagatcagtgaagccatcaattctccattttcagcttaggaatttgttatgggcaacctcgaggcatgatgtatattttatgtcaaattccacagtaacccattggtcatcattgtctcacaaattatcagaggttcttgacttctctgggcacattgctccggtggagaagcatcctggcagtttgctagaaggtttctctggggttcaagttagcacacttgctgtgaatgagggtttgttggtagctggtggttttcaaggagaactgattggcaaggatttggaaggatgtaatataaaattctgtgcaaggacaactttgagtgacaatgctataacaaatgccatagatatacacagatcgacaagtggaagcttgcgcattacggtatctaataacgattgcggtgttcgtgaatacgatatggagagatttcagctcttgaaccactaccgatataactggccagttaatcacacatctgtgagcccggataagaaacttttggctgtggttggagatgatcgggatgctcttcttgtggattcacggaatggaaaggtaacctctaccctagttggccatctggactactcatttgctacggcatggcacccggatagccggacctttgcgaccgggaaccaggacaaaacctgccgtatctgggacacccgcaacttgtcgacctcgcttgcggtattgcggggcaacatcggcgcgatccggtgcatacgctactcctctgatggacggttcctggtgttttcggagcctgcggactttgttcatgtgtacagcgtggctgcggactacaagaaacggcaggaaatcgacttcttcggtgaggtgtccgggatcaccctcagccctgatgacgagtccctgttcgttggagtgtgcgaccgtgtctatgccagcctgttgcagtacaggatgatccatgcattcgactatcttgattcatacgtgtgaaatggagctttggtgttgacgtgttgtgctcggtgctggctgaatgtcacttgttctcggtgacggttctggtgcgcggttcagggaatgtatctgcctgctcttctgcgctagttaatggcgaatgatgattcgttgggactcggacgcgagcgaatctgccatgtaaatagttcagcaattgaagcatagagctgtggaccaatactgtctgaacatatgagctgagtaatgtatgttttgcgttgttagttccagactccagagtacaaatagttttagaccaaattcgtaaagcctctttctactgtggaatgcgccaagggcttagtttgacttc

SEQ ID NO: 135206 - DNA, 1976 bp, Zea Mays
tcagcggcagcaaagctcgctctgatttcgagctcgccaatggccgatgggccagtgaccgcgacctcctccatggcggtcccctccgcgcgccgtaaccgggcgctcctaccgacagtctccgtggctcgcgagccggcgcgcgcgtgggcagcggctggcgcggagggaagggcgcggagagggaaggaggctgaggtggaggacgagaaggaagcggggaggcggcggaaggaggaggtgaaccggaagatcgcgtcccggaaagcgctgtccgtcatcctccggcgcgaggccaccaaagcggttctcgacaagcgtaagcccggcaagggcacgcgccgcctcctccccggcaccgtcctcgaggccctgcacgaccgcgtcgcggccctcagatgggactccgccctcaaggtgttcgagctaatgcgggaccaggtgtggtacaagcctcacataggcatatacatcaagctcataaccatgctcggcaagtgcaagcagccggagaaggcgcaccagctcttccaggcgatgattgacgagggttgcgcgcccaacctccagtcctacaccgccctagtctccacgtatagcaggagcggccgcttccgtgaagcattcgacctgcttgaccggatgaaggacactccaggttgccagcctgatgtgcagacatactcgattctcattaagtcatgcttacatgcttatgattttgagaaggtgaagagtttgctggctgatatggcacgagcgggcattccgcctaacaccgtcacctataatacattgatcgatgcctatgggaaagcaggaaggtttgctgagatggaatcaactcttctgaagatgttgtcacaaaattgcaagcctgatgtgtggacaatgaattctactctcagagcttttggcagtagtggtcagattgagacaatggaaagctgctacgagaagttccaggcctctggtattgtcccaaacattaagacctacaatatcttactcgattcctatggcaaagccaaaatgtatgagaagatgggagctgtgatggaatacatgcagaagtactactattcttggacaatagtcacatacaatgtagtgattgatgcatttggaagggccggagacctcgagcagatggaatatatatttaggctaatgaaatctgagcgtataaagcccaattgtgttacactctgttcagtggttagagcatatggaagagctggggaagttaagaaaataaagacagcgttgagaatcattgagaattctgacataacattggatattgtgttcttcaactgtttggtggatgcatatgggagggtggggtgcttggcagagatgtgggatattcttgatttgatgaaggagcatagatgcaaaccagacaaggtaacctgcactaccatgatcaaatggtttctcatcaaaggaatcgacgatcatcgtgttcagtacctacgtgatcttaaagatgggcgagcaaaagatgatacataggagtgaaaacaagaaaaactcttggagcagtgactttcgtatatatttttttaaaggaacgaatggatctttcggagcctcggtttacaattacatacatgcatcgatctcactgacttactactgaatcaaacattactcagataccatgagtcacactgctcactgacttatgtgctgcaagagctatatagggacatcttaaaaaaaagctactaatggttgataaggttgaagcaaattttggtgagtggccaataatgaacaatactggaatataaagatgatactgggaaaagggacacgttttagacgcagaagagacaagacatgctggtgaaattgatcagattctgctatctgttctgacttgatgtatcgacacagctgaacatgacttgtactgttgactagtgcaaaggctttacagcctgtttggtatcgacaccccctcactc

SEQ ID NO: 135207 - DNA, 1396 bp, Zea Mays
atggcacgatccgcctctgctcctgccgtcccgtcctccaccgagtctcctctcctgctccgctcctcccctcatatactcccaagtctccaactccatcaaccgccgctctacctcctctccacaagtccagatctcccattcacacacactcgcgcgcgcacagagacctccacgcgcagccaaagcatccacccatggcgcctctcctcctgctcttcctcctcggcggcctctgcgccctcttgtcgctcgccacttcctcacgcgccagcgccaagaagtgcgatgacgtcaagagcaacggcaattgcggggactccggcgaggaggcaagatgcagggacgactgcgcgccagaggagacgcagcagcaggggaagatgcaggcgcggcccgacccggagaaggacctgggcatcgtattctccacgttcgaccacgacggcgacgggttcatcacggcggtcgagctcgaggagtcgctgcgccgcctcggcatcgcagtgtccgccgacgaggccgcggccatggtcacgcgcgtcgacgctaacagcgacgggctcatcgacatccacgagttccgcgagctctacgactccatacccaagaagaggaagcaccagcaccccgccgccggcggtttcagcggggcagcaatggaggtgccggtggagggcgacgacgaagaggccgaggaggagagggacctgcgggaggcgttcgacgtgttcgacggcaacaaggacgggctcatctccgccgaggagctcggcaccgtgctgggctcgctcggcctgcgccgccagggcaacgcccggaccgccgtcgccgattgccgcgacatgatacgcctcgtcgacagcgacggcgacggcatggtcagcttcgaggagttcaagcgcatgatggccgtcgtcaaggcctaggctgctcttcttcctcctcgcagatcaaatcaagtaccaaacttgagtagcgttatttcgttcttggatcggaaaagattaacacaccaggagctcgtatttgtttatggggggtttgaaagctgaagtagctttttgatctgtgtttctcccctgttcttcaatcttgataacttgctctgcttttacactctgattctctcctactttttttagtccttggtactgttttcactgacatatattgatcagacatgtatgtaaatattacttcttgctcgctgtcaggtcagtctgtggaaaaaattaacaattaagggctagtctgagaaccctattttctcatgagactttcattttttacaagagaaattagttcattttttcttgagaaaatagaaatctctttgaaaatggagttcccaaactaatcctaaatgaatcaacgagtgtttgtgtttgggacc

SEQ ID NO: 135208 - DNA, 651 bp, Zea Mays
tttcttcctcccttcttacagccgccgccgccgcatcccagcctccatcaccgtttccgtctcgttgccatgggtaaggtgcacggatcgttggcgcgcgccgggaaggtccgcgggcagacccccaaggtggcgaagcaggacaagaagaagaagccccgcggccgcgcgcacaagaggatgcagtacaaccgccgcttcgtcaccgccgtcgtcggcttcggcaagaagcgcgggcccaactcctccgagaagtaggcgccgctcggctcgtaccggttcctcatccttcctgctctccgtatgcttatgctcttgatggtactagtttcgttgttcgcaagcagaggaagaaccttctgtagattcggttttgttgtccatgtgctcagatgggaacttgagattgtatgaatttgagatatggtgatatgagctgatgatttttattatgcttattgttgctcctctgagctgttatttttgaacgctatccaaataaatttgaaaccagattgctgatgcgtatgtactaggttcaggtagttgtggatggaagtggaaccgatatgcttcagctattggctctatcgtgtatgccatgttctgtacgcgagcctgatatttgattgaaatgctggttctatgcta

SEQ ID NO: 135209 - DNA, 2855 bp, Zea Mays
caacccgacctggctcacggtcacggcctcacccatccgcttgccatccaatccgacccggccccatcgagaacgtgcgcgtgcgcgctgcctaggctgatacgagcagccagcaagcaagcaacagatttaaccgccgccgatgtccgtgatggcgcggaggctgagctccagctgcagcagggccgtcgcgtcctcgtgcccttccaaatcttctctgcggcgccgtatatatacccttccttcccgcccgctgctactcgcattctcgctgcgggcctcgcctctgtgtccggcgccgcctctccctcctcccaccccgcctcggtgttcgtttaggactctcgcggcggccaaggagtcgtcgccgccgtcgaccagcgtctcgccgacccagcagcagtcccggagtacgatagagggaggcgagatgacggtcgcctcgtccgtcaggctcgccggcggcaatctgacggtatgcgggcggacggtgctgtccggggtgccggacgcggtggtggccacgtcggcggcgacggagggagcggtcgacgggatcttcctcggcgccgacttcgccgagccggccgcccggcacgtcgtctccctcggcgacctgagggacgttcggttcatggcgtgcttccgattcaagctatggtggatggcgcagcggatgggggagaaaggcagcgacgtcccgcgcgagacccagttcctgctcgtcgagtccaggggcgtcggcgacgaggacgcggcgtacgtcgtgttcctcccgctcgtggagggcgcgttccgggccagcatccagggcggtgccggcgacgcgctggagctctgcgtcgagagcggggacgacgacacgcgcgcggcgtccttcgagcgatccctcttcgtgggcgccgcggagtccgaccccttcgcggccatctccggcgcagtcgccgccgccaagtccgcgctcaggacgttccgggtccgcgccgagaagaagctcccgggcatcgtcgactacttcggctggtgcacctgggacgccttttaccaggacgtcacccaggagggcgtcgaggccgggctccgcagcctcatcgccggcggcgcgccgcccaagttcgtcatcatcgacgacggctggcagtccgtcgccaccgacaccaacgaatcggccggagaggacaagccgcccctcctatctcggctcaccggcatcaaggagaacagcaagttccagaacgcggacgacccggccgccggcatcaagacggtggtgcgcttggcgaaggaggagtaccggctcaagtacgtctacgtgtggcacgccatcaccggctactggggcggcgtccggcccggcgaggagcactaccgctccagcatgcagttccccaaggtttcgccgggcgtcatggagaacgagcccggcatgaagaccgacgtgctcaccgtgcaggggctcggcctcgtgcacccgcgcgccgtgtaccgcttctacgacgagctccacgcgtacctcgccgccgccggagtcgacggcgtcaaggtggacgtgcagtgcatcctggagacgctcggcgccggccacggcggccgcgtgcagctcaccaggcagtaccaccaggcgctggacgcctccgtcgccaagaacttcccggagaacggcatcatcgcctgcatgagccacaacaccgacgccctttactgctccaagcagacggcggtggtgagggcgtcggatgatttctacccaagggaccccgcgtcgcacacgatccatatcgcctcggtggcgtacaacagcgtgttcctcggcgagttcatgctcccggactgggacatgttccactcgctccaccaggccggcgactaccacggctccgcccgcgccatcagcggaggccctgtctacgtcagtgacgcacccggcaagcacaacttcgagctgctgaagaagattgtcttgcccgacggttccattctccgcgcgcgtctgcctggccggccgaccaaggattgcctgttcacggacccggcacgggacggcgtaagcctgctcaagatctggaacatgaacaagttcaccggcgtgctgggcgtgtacaactgccagggcgcggcgtggaactccgtggagaagaagaacaccttccaccagaccggcaccgaggccctgacctgcggcgtcaagggcggcgacgtccacctcatctccgaggccgcgacggacaccgaatgggacggcgactgcgccatgtaccggcatgccgacggcgacctcgtcgtcctcccgcacgacgcggcgttgcccgtctccctcaaggtcctggaacatgacatcctcaccgtgtcacccatcaaggagttggcgcctggtttcaggttcgccccgatcgggctggtggacatgttcaatagcggcggggcggtggaaggcctgacctatcacctcctcggcggcgacggttccaccttgggctccgaggctgtcgcattggcgtgcatggaggtgaagggctgtggaaggttcggtgcctactcttcggtcaggccaaggaagtccacgctcggttcagctcagattgagctcaagtatgattcttcctcagggctgctgattctgcagctggatgcgatgcccaaggagagggttcacaagattgttattgagttgtagggtggtacaaagatttagtttcattggtaatcagagtaccctctgatgacgagtatgtagggactggagtggcgtatggtttgattgataggcaaatctgattcatgattcaagcttgtctggactatgaacagctggccttcagtatttgattacattcattcaaacacccgtttccaaa

SEQ ID NO: 135210 - DNA, 2986 bp, Zea Mays
gctcacggtcacggcctcacccatccgcttgccatccaatccgacccggccccatcgagaacgtgcgcgtgcgcgctgcctaggctgatacgagcagccagcaagcaagcaacagatttaaccgccgccgatgtccgtgatggcgcggaggctgagctccagctgcagcagggccgtcgcgtcctcgtgcccttccaaatcttctctgcggcgccgtatatatacccttccttcccgcccgctgctactcgcattctcgctgcgggcctcgcctctgtgtccggcgccgcctctccctcctcccaccccgcctcggtgcgtgcggatccgtccctaattcgtttgtcctctcgtctcgccggtgttcttgcgttatcgtttcagtctacccgttggtttggtattggttatgattttggcgtgtccgtcactccgttgtgctggattggatccgggagcaggtgttcgtttaggactctcgcggcggccaaggagtcgtcgccgccgtcgaccagcgtctcgccgacccagcagcagtcccggagtacgatagagggaggcgagatgacggtcgcctcgtccgtcaggctcgccggcggcaatctgacggtatgcgggcggacggtgctgtccggggtgccggacgcggtggtggccacgtcggcggcgacggagggagcggtcgacgggatcttcctcggcgccgacttcgccgagccggccgcccggcacgtcgtctccctcggcgacctgagggacgttcggttcatggcgtgcttccgattcaagctatggtggatggcgcagcggatgggggagaaaggcagcgacgtcccgcgcgagacccagttcctgctcgtcgagtccaggggcgtcggcgacgaggacgcggcgtacgtcgtgttcctcccgctcgtggagggcgcgttccgggccagcatccagggcggtgccggcgacgcgctggagctctgcgtcgagagcggggacgacgacacgcgcgcggcgtccttcgagcgatccctcttcgtgggcgccgcggagtccgaccccttcgcggccatctccggcgcagtcgccgccgccaagtccgcgctcaggacgttccgggtccgcgccgagaagaagctcccgggcatcgtcgactacttcggctggtgcacctgggacgccttttaccaggacgtcacccaggagggcgtcgaggccgggctccgcagcctcatcgccggcggcgcgccgcccaagttcgtcatcatcgacgacggctggcagtccgtcgccaccgacaccaacgaatcggccggagaggacaagccgcccctcctatctcggctcaccggcatcaaggagaacagcaagttccagaacgcggacgacccggccgccggcatcaagacggtggtgcgcttggcgaaggaggagtaccggctcaagtacgtctacgtgtggcacgccatcaccggctactggggcggcgtccggcccggcgaggagcactaccgctccagcatgcagttccccaaggtttcgccgggcgtcatggagaacgagcccggcatgaagaccgacgtgctcaccgtgcaggggctcggcctcgtgcacccgcgcgccgtgtaccgcttctacgacgagctccacgcgtacctcgccgccgccggagtcgacggcgtcaaggtggacgtgcagtgcatcctggagacgctcggcgccggccacggcggccgcgtgcagctcaccaggcagtaccaccaggcgctggacgcctccgtcgccaagaacttcccggagaacggcatcatcgcctgcatgagccacaacaccgacgccctttactgctccaagcagacggcggtggtgagggcgtcggatgatttctacccaagggaccccgcgtcgcacacgatccatatcgcctcggtggcgtacaacagcgtgttcctcggcgagttcatgctcccggactgggacatgttccactcgctccaccaggccggcgactaccacggctccgcccgcgccatcagcggaggccctgtctacgtcagtgacgcacccggcaagcacaacttcgagctgctgaagaagattgtcttgcccgacggttccattctccgcgcgcgtctgcctggccggccgaccaaggattgcctgttcacggacccggcacgggacggcgtaagcctgctcaagatctggaacatgaacaagttcaccggcgtgctgggcgtgtacaactgccagggcgcggcgtggaactccgtggagaagaagaacaccttccaccagaccggcaccgaggccctgacctgcggcgtcaagggcggcgacgtccacctcatctccgaggccgcgacggacaccgaatgggacggcgactgcgccatgtaccggcatgccgacggcgacctcgtcgtcctcccgcacgacgcggcgttgcccgtctccctcaaggtcctggaacatgacatcctcaccgtgtcacccatcaaggagttggcgcctggtttcaggttcgccccgatcgggctggtggacatgttcaatagcggcggggcggtggaaggcctgacctatcacctcctcggcggcgacggttccaccttgggctccgaggctgtcgcattggcgtgcatggaggtgaagggctgtggaaggttcggtgcctactcttcggtcaggccaaggaagtccacgctcggttcagctcagattgagctcaagtatgattcttcctcagggctgctgattctgcagctggatgcgatgcccaaggagagggttcacaagattgttattgagttgtagggtggtacaaagatttagtttcattggtaatcagagtaccctctgatgacgagtatgtagggactggagtggcgtatggtttgattgataggcaaatctgattcatgattcaagcttgtctggactatgaacagctggccttcagtatttgattacattcattcaaacacccgtttcc

SEQ ID NO: 135211 - DNA, 2576 bp, Zea Mays
atgtccgtgatggcgcggaggctgagctccagctgcagcagggccgtcgcgtcctcgtgcccttccaaatcttctctgcggcgccgtatatatacccttccttcccgcccgctgctacccaaggagtcgtcgccgccgtcgaccagcgtctcgccgacccagcagcagtcccggagtacgatagagggaggcgagatgacggtcgcctcgtccgtcaggctcgccggcggcaatctgacggtatgcgggcggacggtgctgtccggggtgccggacgcggtggtggccacgtcggcggcgacggagggagcggtcgacgggatcttcctcggcgccgacttcgccgagccggccgcccggcacgtcgtctccctcggcgacctgagggacgttcggttcatggcgtgcttccgattcaagctatggtggatggcgcagcggatgggggagaaaggcagcgacgtcccgcgcgagacccagttcctgctcgtcgagtccaggggcgtcggcgacgaggacgcggcgtacgtcgtgttcctcccgctcgtggagggcgcgttccgggccagcatccagggcggtgccggcgacgcgctggagctctgcgtcgagagcggggacgacgacacgcgcgcggcgtccttcgagcgatccctcttcgtgggcgccgcggagtccgaccccttcgcggccatctccggcgcagtcgccgccgccaagtccgcgctcaggacgttccgggtccgcgccgagaagaagctcccgggcatcgtcgactacttcggctggtgcacctgggacgccttttaccaggacgtcacccaggagggcgtcgaggccgggctccgcagcctcatcgccggcggcgcgccgcccaagttcgtcatcatcgacgacggctggcagtccgtcgccaccgacaccaacgaatcggccggagaggacaagccgcccctcctatctcggctcaccggcatcaaggagaacagcaagttccagaacgcggacgacccggccgccggcatcaagacggtggtgcgcttggcgaaggaggagtaccggctcaagtacgtctacgtgtggcacgccatcaccggctactggggcggcgtccggcccggcgaggagcactaccgctccagcatgcagttccccaaggtttcgccgggcgtcatggagaacgagcccggcatgaagaccgacgtgctcaccgtgcaggggctcggcctcgtgcacccgcgcgccgtgtaccgcttctacgacgagctccacgcgtacctcgccgccgccggagtcgacggcgtcaaggtggacgtgcagtgcatcctggagacgctcggcgccggccacggcggccgcgtgcagctcaccaggcagtaccaccaggcgctggacgcctccgtcgccaagaacttcccggagaacggcatcatcgcctgcatgagccacaacaccgacgccctttactgctccaagcagacggcggtggtgagggcgtcggatgatttctacccaagggaccccgcgtcgcacacgatccatatcgcctcggtggcgtacaacagcgtgttcctcggcgagttcatgctcccggactgggacatgttccactcgctccaccaggccggcgactaccacggctccgcccgcgccatcagcggaggccctgtctacgtcagtgacgcacccggcaagcacaacttcgagctgctgaagaagattgtcttgcccgacggttccattctccgcgcgcgtctgcctggccggccgaccaaggattgcctgttcacggacccggcacgggacggcgtaagcctgctcaagatctggaacatgaacaagttcaccggcgtgctgggcgtgtacaactgccagggcgcggcgtggaactccgtggagaagaagaacaccttccaccagaccggcaccgaggccctgacctgcggcgtcaagggcggcgacgtccacctcatctccgaggccgcgacggacaccgaatgggacggcgactgcgccatgtaccggcatgccgacggcgacctcgtcgtcctcccgcacgacgcggcgttgcccgtctccctcaaggtcctggaacatgacatcctcaccgtgtcacccatcaaggagttggcgcctggtttcaggttcgccccgatcgggctggtggacatgttcaatagcggcggggcggtggaaggcctgacctatcacctcctcggcggcgacggttccaccttgggctccgaggctgtcgcattggcgtgcatggaggtgaagggctgtggaaggttcggtgcctactcttcggtcaggccaaggaagtccacgctcggttcagctcagattgagctcaagtatgattcttcctcagggctgctgattctgcagctggatgcgatgcccaaggagagggttcacaagattgttattgagttgtagggtggtacaaagatttagtttcattggtaatcagagtaccctctgatgacgagtatgtagggactggagtggcgtatggtttgattgataggcaaatctgattcatgattcaagcttgtctggactatgaacagctg

SEQ ID NO: 135212 - DNA, 1449 bp, Zea Mays
tgggaaggaacaacgcagacaaaccgaactcgcacctcgcacctcgcatcgtcttgtcgacacacctccagctccgaaaccctactccgccggcgatgtcgtcatccggcgccccggccccggcggcggcaatggccgttgacgacgcggaggacgaccagctcgcctccatgtccacggaggatatcatccgggcctcccgccttcttgacaacgagatccgtgtcctcaaggacgagttgcagcggacgaacctggagttggagtcgttcaaggagaagattaaggaaaaccaagagaaaattaagctcaacaagcagctgccctacctcgttggcaacatcgttgagatcttggaaatgaaccctgaggatgaagctgaggaggatggtgctaacattgatttagactcacaaaggaaaggaaaatgtgttgttctgaagacctccacaagacaaattcaagagcttgtagaggcaattgtactgcccatgacacataaagaccggttccagaagttgggtattcgtcctccaaaaggggttcttttgtacggaccaccaggaactggcaagacactcatggctcgtgcatgtgctgcacagacgaatgcaacgtttcttaaattagctggtccacaacttgtgcagatgtttattggtgatggagcaaagcttgtccgggatgcattccagcttgccaaagagaaagctccttgtattatatttattgatgagatagatgccattggcaccaaacgttttgatagtgaagttagcggtgatagagaagttcagcggacaatgttggaattattgaatcaactggatggattcagcagcgatgagagaataaaggtcatagctgcaactaaccgtgctgacatccttgaccctgctctgatgcgatctggacggttggaccgaaagattgagttccctcacccatccgaagaagcaagagctagaatcttgcaaatccattcaaggaaaatgaatgtaaatcctgatgtcaactttgaagaattggctcgctcaactgatgacttcaacggagcacagctaaaggcagtttgtgtagaagctggtatgcttgccctacggcgggatgctacagaggtaactcacgaggatttcaatgaagggatcgtacaggtccaggcgaagaaaaagtcaagcttgaactactatgcttaagctgtttgtcaaaacatatggaccataaggtgtttgtaacactactgtatgaataatcgaagctatgtttttaatgcaagatttttacagcatataagaccccacgccagcacacctgatttttttttgtattttagctcttttcttgaaaagtattcacgtttagaccgttggatgatttaatctcatttttgtaccctttgctcggcgtcacagcctgtggcgccgaggtaacatagtttagcgccacaga

SEQ ID NO: 135213 - DNA, 1629 bp, Zea Mays
tgggaaggaacaacgcagacaaaccgaactcgcacctcgcacctcgcatcgtcttgtcgacacacctccagctccgaaaccctactccgccggcgatgtcgtcatccggcgccccggccccggcggcggcaatggccgttgacgacgcggaggacgaccagctcgcctccatgtccacggaggatatcatccgggcctcccgccttcttgacaacgagatccgtgtcctcaagcggacgaacctggagttggagtcgttcaaggagaagattaaggaaaaccaagagaaaattaagctcaacaagcagctgccctacctcgttggcaacatcgttgagatcttggaaatgaaccctgaggatgaagctgaggaggatggtgctaacattgatttagactcacaaaggaaaggaaaatgtgttgttctgaagacctccacaagacaaactatattccttcctgttgttgggctagtggaccctgacaagctaaagcctggtgatctggttggagtcaataaagatagctaccttatactagatacattgccatcagagtacgattcacgagtgaaggcaatggaagtggatgaaaagcccactgaagattataatgacattgggggtcttgaaaagcagattcaagagcttgtagaggcaattgtactgcccatgacacataaagaccggttccagaagttgggtattcgtcctccaaaaggggttcttttgtacggaccaccaggaactggcaagacactcatggctcgtgcatgtgctgcacagacgaatgcaacgtttcttaaattagctggtccacaacttgtgcagatgtttattggtgatggagcaaagcttgtccgggatgcattccagcttgccaaagagaaagctccttgtattatatttattgatgagatagatgccattggcaccaaacgttttgatagtgaagttagcggtgatagagaagttcagcggacaatgttggaattattgaatcaactggatggattcagcagcgatgagagaataaaggtcatagctgcaactaaccgtgctgacatccttgaccctgctctgatgcgatctggacggttggaccgaaagattgagttccctcacccatccgaagaagcaagagctagaatcttgcaaatccattcaaggaaaatgaatgtaaatcctgatgtcaactttgaagaattggctcgctcaactgatgacttcaacggagcacagctaaaggcagtttgtgtagaagctggtatgcttgccctacggcgggatgctacagaggtaactcacgaggatttcaatgaagggatcgtacaggtccaggcgaagaaaaagtcaagcttgaactactatgcttaagctgtttgtcaaaacatatggaccataaggtgtttgtaacactactgtatgaataatcgaagctatgtttttaatgcaagatttttacagcatataagaccccacgccagcacacctgatttttttttgtattttagctcttttcttgaaaagtattcacgtttagaccgttggatgatttaatctcatttttgtaccctttgctcggcgtcacagcctgtggcgccgaggtaacatagtttagcgccacaga

SEQ ID NO: 135214 - DNA, 1641 bp, Zea Mays
tgggaaggaacaacgcagacaaaccgaactcgcacctcgcacctcgcatcgtcttgtcgacacacctccagctccgaaaccctactccgccggcgatgtcgtcatccggcgccccggccccggcggcggcaatggccgttgacgacgcggaggacgaccagctcgcctccatgtccacggaggatatcatccgggcctcccgccttcttgacaacgagatccgtgtcctcaaggacgagttgcagcggacgaacctggagttggagtcgttcaaggagaagattaaggaaaaccaagagaaaattaagctcaacaagcagctgccctacctcgttggcaacatcgttgagatcttggaaatgaaccctgaggatgaagctgaggaggatggtgctaacattgatttagactcacaaaggaaaggaaaatgtgttgttctgaagacctccacaagacaaactatattccttcctgttgttgggctagtggaccctgacaagctaaagcctggtgatctggttggagtcaataaagatagctaccttatactagatacattgccatcagagtacgattcacgagtgaaggcaatggaagtggatgaaaagcccactgaagattataatgacattgggggtcttgaaaagcagattcaagagcttgtagaggcaattgtactgcccatgacacataaagaccggttccagaagttgggtattcgtcctccaaaaggggttcttttgtacggaccaccaggaactggcaagacactcatggctcgtgcatgtgctgcacagacgaatgcaacgtttcttaaattagctggtccacaacttgtgcagatgtttattggtgatggagcaaagcttgtccgggatgcattccagcttgccaaagagaaagctccttgtattatatttattgatgagatagatgccattggcaccaaacgttttgatagtgaagttagcggtgatagagaagttcagcggacaatgttggaattattgaatcaactggatggattcagcagcgatgagagaataaaggtcatagctgcaactaaccgtgctgacatccttgaccctgctctgatgcgatctggacggttggaccgaaagattgagttccctcacccatccgaagaagcaagagctagaatcttgcaaatccattcaaggaaaatgaatgtaaatcctgatgtcaactttgaagaattggctcgctcaactgatgacttcaacggagcacagctaaaggcagtttgtgtagaagctggtatgcttgccctacggcgggatgctacagaggtaactcacgaggatttcaatgaagggatcgtacaggtccaggcgaagaaaaagtcaagcttgaactactatgcttaagctgtttgtcaaaacatatggaccataaggtgtttgtaacactactgtatgaataatcgaagctatgtttttaatgcaagatttttacagcatataagaccccacgccagcacacctgatttttttttgtattttagctcttttcttgaaaagtattcacgtttagaccgttggatgatttaatctcatttttgtaccctttgctcggcgtcacagcctgtggcgccgaggtaacatagtttagcgccacaga

SEQ ID NO: 135215 - DNA, 1638 bp, Zea Mays
cgtttctgttagtagcatccttttctgttctatttcactctagaagtctagaaccatagcatccttttctattctatttcactccagaagtctagaaccaaacacaaaatagagccatttcgttgtagaaaaaaaaatatagagtggctgctgttctccgtccaactagcaggtctcaacctcgaggcactctcacgcccaacggccacaccaccgtcctctccgcgtgcccccgaaaccaccacacgcggccacgccacgccgcccactacgggcgggcctccttgcgcttggagtattggtcgacgtgctcctctcaccgcaccctctactgatactgggttggcgcgagaacggcgagcccacctgaacgcgggattcagtgattttggatggtgaaggtacagagtaaagagtctgcaacctttggtggtgcagtttttatgtgcaaccatctgaccaggaaggagtgctttgacaagaaaatatttggcctctctgatttctgtgctgattttgtagagaaagttaaagctggcacaactttattcttatatgatgttgatcagtgtaagctccatggtgttttcgaagcaacttcagatggggctgtgaacattattcctgatgcatatgtcgcatcaggaaaggggtatccttctcagatacgtttcaagaggatttggttttgcaagcctttgacgcttactgaatttcaagatgctgtccacaattattctgttaaaaacaagtttagttatggtttgtcacaccaacaggttgcaaagcttctccatttgttttcttcacggaacaggttgcagcttcctcaaaacccaatattacaagatgatgtcccaggggaccttgagacttcttcttctctggctagagtaactgacgtgcagtgcagtccatgtggttcattcaggagcacctgtcaaacatgttcctccacctctcttggggaacatatggcaccgatgggtgcaaaattaatcgatcccggggcattaatgcacagaggtctacaatcagacatctcaaaatctcccctgcaatctggagcggagatggccactatcaccatacctggcaaccaagaagcaatgcatgaccaacctactgatgactatatacctcttctccaggaggaaaatacttttgaaggtgttgatggtctatttgcgttgctaaaagatgtgtgccactcttctgaattatctaaacgtagcagtgactctgaaaaccataatacattccaccaagtttgtattaggaaggaagatgaatgctgcccacccatcttaggtcgttccaaactccgtgctgacagtgaagggcgaacaagtgtgttttctcggttagtgagaaagcacgatcgtggtcgtggggaggcaatgaaacagctgtgatgctgtgctcatcaccggatgcacaacctgcaaggacacactatccttgagctgccctcggtttgtgtttgagtgcctttcgttcgtttgttgttagggtaagaacggagtacgtgtcgtgaacctggatgtgttgtagttgcatgttgtattactatttcgggcctatgtttgctgtgtagacgagttatcacgtaattgctacatgtgtgtctgttgttct

SEQ ID NO: 135216 - DNA, 1080 bp, Zea Mays
ggacccattacaagtagtttttcgagttaattctacaaatttaactaataaatcccgcaaaaaaactcggaatcttaaataattctgcgcacgcgcgaaccgtctgcgccaccaccgtggattgctcggcctactatggcggaccgtccgcttcccaagtgggctcaacacaaagtataacatttttgtctgtaagttcagagatcttcggtgtccaattttgccattttggattctgaaaattggacgaagcaaacgaaggcaacatgatgaaacttttgcactccaggttctactgtaaattgagccgtgtccaacaagcgagcaccattcgttgcagttggcccaaaaatacttgcccggcccaatcgaatctctgaccgatataccgaaccctagcccagttgttccgccgagcgaacgatccagaagcagaagccaccgatcggcgtgccgcgtgcgtgaggcgatcggagcatcccgtcccgaggaggaagacaaccggcgacgcggggggaacatggggaagacgccggtgcggatgaaggcggtcgtgtacgcgctgtcgcccttccagcagaaggtaatgccggggctgtggaaggacatcaccaccaagatccaccacaaggtcaccgagaactggatctccgccacgctcctcctcacccccgtcgtcggcacctaccaatacgccatgtggtacaaggagcaggagaagctttcccacagatattaaatgcgctgcccttcacagacagcacttggatttaacatttgtttgatcaatttcagttcaacgccttttcatcgttccatatgcatgtatggtatccgtgtctggcaaacttattttgaggcttgttaaatatgtaccttttgtctctcaagatgttaaataaagcaaattaacttccagtttctcgtgtttgtgtttaagaattggtaactgggtttatttgttagttgtctcattttttgcaccaatgagatcagcacaatagaacgtctcttgagatccgtttccaacatcaagacggtccgaggacactggtcctaattgtgtaacgaaaaataaaa

SEQ ID NO: 135217 - DNA, 901 bp, Zea Mays
ctgacccttagtagtgtaagtctcatgtcatgtcctacggtgattcaggtgtaggcttgtttgtctcatgacccaaactacttccatcatggactcatgctgtgaattagtgaaaaaattcatggtcattaggataatttcacaccaattcagaaagtggaagcataatttcctttaaaataggtttgtcaaaactggatttaggctatcttactatctccgtacctatattcaaacttcactttatgaacatttcagtctacagtgcaaacaatgtaaaaataatgttttgggtgaccatacagtgaccatatctgtgtttatcctgttctatttggttgcccaaataaaatatactacaattctaaaaaatgcagcttgattcattgaatttccttttgttgtaggacagaaaatcgtgaacaactaatcttcctcgttagattagggggttgcagaattcatataattggcatgcatgattctgattcgtttcaatgcttctatgcagatacgccatgtggtacaaggagcaggagaagctttcccacagatattaaatgcgctgcccttcacagacagcacttggatttaacatttgtttgatcaatttcagttcaacgccttttcatcgttccatatgcatgtatggtatccgtgtctggcaaacttattttgaggcttgttaaatatgtaccttttgtctctcaagatgttaaataaagcaaattaacttccagtttctcgtgtttgtgtttaagaattggtaactgggtttatttgttagttgtctcattttttgcaccaatgagatcagcacaatagaacgtctcttgagatccgtttccaacatcaagacggtccgaggacactggtcctaattgtgtaacgaaaaataaaa

SEQ ID NO: 135218 - DNA, 1367 bp, Zea Mays
gcgaaggcccagtcaaacaaattgtttactagcctaagtgtaagagcagcacgatggtgcatcaggctcagggacagatggtgcaggaggtggccgccgccggcctccccgcgctgccgagccggtacgtgctgagggaggaggaccgcccaactggtgacgtcgcggcacccgagttggccttccccaccgtggacgtcaatgtcttgccgaccccggtgacgtggaggaggccagcaagctccggtcggcgctcgaatcctggggcctcttcaaggtgaccggccacggcatgccggtatccctgctggacggcatccgggacgccgggctggagttcttccacctgccagcggcggagaagctgaagcacgccaaccgggacgacgccggcgagttccagcccgagggttacggcatcgaccgcgtggacaccgacggtcaggtgctggactggtgcgaccggctgtacctgacggtgcagccggaggaggagcggcggatgcagttctggcccgcgcggccggcgtcgctcgtggggctcctgcacgagtacgccctgggcagcgagcaggtggccaggcgcgtgctccgggccatggcgcgggtgctggggttcggcgaggggttcttcctcgggcacgtgggcgagaagggcggcacgtacgcgcggttcacctactaccctccctgcccgcgcccggacctcgtgtacgggctgaagccccacacggacaactccgtcgtcaccgtgctcctcctcgaccgcgacgtcggcggcctccaggtgctgctcagggggcctggccccggccggtgggtggacgtgcccgtgctcgcccgcgacgagctgctcgtcgtcgtcggcgaggagatggagatcatgagcaacgcggtgttcagggcgcccacgcaccgcgtggtcaccagcggcagggagaggatgtcgctcgtgctcttctaccagccggagccgcacaaggacctgcagcccgcggaggagctggtgagcgaggaccggcccgcgatttacaggaggctcaaggccaagaccttcggcgacgggttctgggatgcgttcgcgctcggcgagcgcaccatcgacttcctcaacatcaaggtcgacgacaaggagcatggaggcggattagtaacctcagcgccagcttgacgccatgcatgtgaacgaactactgtacacgatgtatcactggtagtgtaatgtaataagagacatggagcggttttccatgcaatataatctagtttatcacaggatctggttggtgttgatgtgcaaaccgtaaggagccgttctgttgtgtagaaatggtgacctgaaactattccaaaacgaattacttttt

SEQ ID NO: 135219 - DNA, 924 bp, Zea Mays
atgaaacctctgccccggggctagggtttcctcccagccgtcatcgcttcacgtccgctacagaccggcgaggagacgaaaggagggagttttgagaagctcaaatggctcctaaagccgctcctgccaagaagggtgatgccaaggcccaggccttgaaggtggccaaggctgtgaagtctggggcaggcaagaagaagaccaagaagattcgcacatctgtaacatttcaccagcccaagaccctgaagaaggccagggacccgaagtacccaagaatcagcactactggaagaaacaagcttgatcagtaccaaattctcaagtaccccctcaccacagaatctgcaatgaagaagattgaagataacaacactctggtctttattgttgacctcaaggcagacaagaaaaagatcaaggctgcggtcaagaagatgtatgacattcaagcaaagaaggtcaacaccctgatcaggcctgatgggaagaagaaggcttatgtgaaactgacacccgactacgatgcccttgatgtggccaacaaaattggcatcatctaagttaataggcaactggattcgacatctgtgtcctactagttctgagcataccaacagatttttctatgttactagtaattttgtttgtcatatttggtttttttgcaactaagtcttgttcgcagttgcagactacatatgcctgtattgagatcctggttgccaaattaaccatcttgaactggcattattccactttacgtataatggctgaatctgttgtggcgttgtgcgaacatgattgatcaccctgcatagtttagtggactattgctaaatacaatatctctgtttatttgctatcagtaaccaacctgtatagattgtagctgaattttgtcgaaatttgcagtcaaccttg

SEQ ID NO: 135220 - DNA, 1055 bp, Zea Mays
ccagccgtcatcgcttcacgtccgctacagaccggcgaggagacgaaaggtaagccacccactgccgccgctctcgtttcaccccatttcgtccggccgtctaattcgttggccggcccgttctgttcgtggaagcgctcggatctgctctgtatatgcttgttctcgttcggttttgccggtcggagttgtctcgcgaggcgtagcttgagggagttttgagaagctcaaatggctcctaaagccgctcctgccaagaagggtgatgccaaggcccaggccttgaaggtggccaaggctgtgaagtctggggcaggcaagaagaagaccaagaagattcgcacatctgtaacatttcaccagcccaagaccctgaagaaggccagggacccgaagtacccaagaatcagcactactggaagaaacaagcttgatcagtaccaaattctcaagtaccccctcaccacagaatctgcaatgaagaagattgaagataacaacactctggtctttattgttgacctcaaggcagacaagaaaaagatcaaggctgcggtcaagaagatgtatgacattcaagcaaagaaggtcaacaccctgatcaggcctgatgggaagaagaaggcttatgtgaaactgacacccgactacgatgcccttgatgtggccaacaaaattggcatcatctaagttaataggcaactggattcgacatctgtgtcctactagttctgagcataccaacagatttttctatgttactagtaattttgtttgtcatatttggtttttttgcaactaagtcttgttcgcagttgcagactacatatgcctgtattgagatcctggttgccaaattaaccatcttgaactggcattattccactttacgtataatggctgaatctgttgtggcgttgtgcgaacatgattgatcaccctgcatagtttagtggactattgctaaatacaatatctctgtttatttgctatcagtaaccaacctgtatagattgtagctgaattttgtcgaaatttgcagtcaaccttgatct

SEQ ID NO: 135221 - DNA, 912 bp, Zea Mays
ctcatgattttatttcttttttgcatcttcatccgcctgacataatggtctttatctacttgcaattcaggagggagttttgagaagctcaaatggctcctaaagccgctcctgccaagaagggtgatgccaaggcccaggccttgaaggtggccaaggctgtgaagtctggggcaggcaagaagaagaccaagaagattcgcacatctgtaacatttcaccagcccaagaccctgaagaaggccagggacccgaagtacccaagaatcagcactactggaagaaacaagcttgatcagtaccaaattctcaagtaccccctcaccacagaatctgcaatgaagaagattgaagataacaacactctggtctttattgttgacctcaaggcagacaagaaaaagatcaaggctgcggtcaagaagatgtatgacattcaagcaaagaaggtcaacaccctgatcaggcctgatgggaagaagaaggcttatgtgaaactgacacccgactacgatgcccttgatgtggccaacaaaattggcatcatctaagttaataggcaactggattcgacatctgtgtcctactagttctgagcataccaacagatttttctatgttactagtaattttgtttgtcatatttggtttttttgcaactaagtcttgttcgcagttgcagactacatatgcctgtattgagatcctggttgccaaattaaccatcttgaactggcattattccactttacgtataatggctgaatctgttgtggcgttgtgcgaacatgattgatcaccctgcatagtttagtggactattgctaaatacaatatctctgtttatttgctatcagtaaccaacctgtatagattgtagctgaattttgtcgaaatttgcagtcaaccttg

SEQ ID NO: 135222 - DNA, 84 bp, Zea Mays
gttttgtattcagatcatgtcattccgcattctccgatcaaacacggaacataacgactccgctctgatgtgctctccaaccac

SEQ ID NO: 135223 - DNA, 705 bp, Zea Mays
atggtcatgcgcaccttcaccttcggcccgggccacgtcgccgcgatcaagaagagcatctcggcgcagcgtggcagcggcggcggcaaggccacgaccttcaagacgctcgcggcgttcgtctggcgcgcccgcacggtcgcgctggagatccccgcggacgaggacgcgcgcctggtcatcgccgccagcgtcaggggcgtgcgcgacctggggctccccacgggctactacaggatagatcctcaacttagcgacctggagctcggccttcttggccgcgagctcggcctccaggaacgagacgatggcgacagtctccttgagtatcttctgctccagcagctccacgcggaagcgcgactcccgctcctggagctactcgatggcgcgcagcagctctgcgacttgcagcggcgcgcgggcggcggggcgcacctgtgccgaagagcgcgggaagtacgcgtcgaaggaccgcgcgagcgccgacgccttggacggtgccgacccggcggtggacacggaccccgacgtaggcgcccgagatggagacgccgcctccggcacctgcgacttggggctgcgctagaagcccatggccgccttgacccggcctgtcaccatggcggtgttcttaacttcactaaaccaccgtggagagacctacgtaccgttaggactgcgtcggggcgcactcgcagatga

SEQ ID NO: 135224 - DNA, 2857 bp, Zea Mays
cacgcgccccgagctcagggaagagagctgcagagagcgtgacgcgtctcccacacggccgccgccctcgccttcgtgcgttccccgcgtagagtttagggttttgtcgccgccatggcgatcctctcggcgctcgccaccgaggtgttcatccccgtcgccgccgtcatcggcatcgccttcgccgtcgtgcagtgggtgctcgtgtcgcgggtgaagctctccccggctgcagccgcgtccggcggcagcaagaacggctacggcgactacctcatcgaggaggaggaggggctcaacgaccacaacgtcgtcgtcaagtgcgccgagatccagaccgctatctccgaaggagcaacatcgtttcttttcactgagtaccaatatgttggtatcttcatgtccatctttgctgttgtgatcttcctcttccttggttcggttgagggattcagcacgaagagccagccctgcacctatagcaaggacaagtactgcaagcctgcactgttcactgcactctttagcactgtgtccttcttgcttggagccatcacctctctggtctccggtttccttggcatgaagattgccacatatgcgaatgccagaactaccctggaagctaggaagggtgttggcaaggcttttatcaccgcttttcgctctggtgctgttatgggcttcctgcttgcatcaagtgggcttgtggttctgtacatcaccattaatgtatttaagttgtattacggtgatgactgggagggtctttttgagtctatcactggctatggccttggtgggtcgtccatggctctctttggaagagttggtggaggcatctacacaaaggctgctgacgttggtgctgatcttgttggaaaggtcgagaggaacattcctgaggatgatcctaggaacccagctgtgattgctgataatgtcggtgacaatgttggtgacattgctggaatgggatctgatctctttgggtcatatgcagagtcttcctgtgctgcccttgttgttgcgtctatttcatctttcggaatcaaccatgatttcactgggatgtgctacccactccttgttagctctgttggtatcattgtctgcttgatcaccaccctttttttgctactgattttctttgaagtcaaggctgtgaaagaaattgagcctgcacttaagaagcagctcatcatctccactgtcctgatgactgttggtattgctgtaatcagctggttggcccttccagctaagtttaccatcttcaactttggtactcagaaggatgtctccaactggggcttgttcttctgtgttgcaattggtctgtgggctggtctgattattggttttgtcacagaatactacactagcaatgcatacagtcctgtgcaagacgttgcagattcttgcagaactggtgctgccactaatgtcatttttggtcttgctcttggatacaagtcagttatcatcccgattttcgctatcgctgttagcatctatgtcagtttctccattgctgcaatgtacggcatcgcagttgccgctcttggtatgctgagcacaattgcaactggtcttgctattgatgcttatggtcccatcagtgacaatgctggtggtattgctgagatggctggaatgagtcacagaatccgtgagagaactgatgctcttgatgctgctggcaacaccactgccgctattggaaagggatttgccattggttcagctgctcttgtgtctctggcgctttttggtgccttcgtcagcagagctggagtgaaggttgtcgatgtcctctcccccaaggttttcattggtttgattgttggagccatgcttccctattggttctctgccatgaccatgaagagtgttggaagtgccgccctaaagatggtggaggaggtccgcagacagttcaacaccattcctgggttgatggagggaactgccaagcctgactatgcaacctgtgtgaagatctccactgatgcttccatcaaggagatgattcctcctggtgctctggtcatgctcactcccctcattgttggaaccctcttcggtgttgagactctctctggtgttcttgccggtgccctggtttctggagtgcagattgccatctctgcttccaacaccggtggtgcatgggacaatgctaagaagtacattgaggctggtgccagcgagcatgccaggaccctcggccccaagggatctgactgccacaaggctgctgtgataggtgacaccattggtgaccccctgaagggacacctcgggcccgtccctcaacatcctgatcaagctcatggcggtggagtcccttgtgtttgcccccttcttcgccacccacggtggcctgctgttcaagtacctgtaagggccacaccaatcatcacagcagaaatatacgaccgaccgaccgtggacatctcgaataactcctgccaaatcgccagttcatgtgtattgtgcgctagccgcctagctgcactgctgtttttttggtctcattgttcgtattttctccttggcccctccccctagaggcgttactgttagccttactcttactccctgtagctgcacgtagaagagaactgttgtcctgcaggtctggcaaattttcccagtctcttgatgatggcgatgatgttgaaatctttgaacaatgatacatgattgttgcattttactggtggtatggtatctcgtacatcgtattggactgcagatgcctcattcgtatcatctaatgttaatacgtaatgatgtgtctgctgccgacacgttctatagttgagtaaaatatattttaggtacttaaacc

SEQ ID NO: 135225 - DNA, 1148 bp, Zea Mays
atcggccacggccagtgccgctacacaccagagcacgcgcgcgcccgcacgtccagcgccacgggagcacgagacacggctaaccacaccgagggcagcctcacttactgccgccgccgtcgtcgccgctcgccgcgcacgctccgacgaggcggacgagcgaatggactggtacgcgtggctctgcagggcggggctgcacccggacgtggcgttcgagtacgcgctgctcttcgcgcgcaacgagctcggcgccacagacgtgcgccacctggaccacgacttcctcctcagcatgggcgttgccgtcgccaagcaccgcctcgagatcctcaagctcgcaaggaaggagacgtcctcccacggcagggccgccgccatcaccgtcctgccgtggcgtgccaccaggctgctcgccgcggccgtgcaccggtccgcaagctcggcgctcggccgcctccgcgcctcggtgtcacgcggccaggaccgggaccgggaccgggccagggcggcggcggccgtcctcgccacgccgcgcctgcctctgctgcggcaccgtggcgggagggtcgcgcacagctggagcaagatcgcgtcgcccgtggcgatccgtggcgggaagccgcgagcgctgccgatgttgacgcgcatcagcaagcccgtcgtgctcaccaacagctgcgccgataagtggaggggcgacggcgcggcggtcaagacgctgcccgcgcccgctgggtccatagccgcctgcctcgagagcacggacgtctgcagctgcgacgaatacgaggatggggaagtaagcgacgaggaggaggtggttgtgaagcacagcggcgacggcgaggagatgcggtgggagtccatgttccaggatctcaagcccaactagccgagacgcgcgcgctcgcgtgccaaatgcgccctgcactgcacctgtgacctgccggccggtgcgtacagcgagcgaagacaacgtgcccgattgccagtggagtggtcagtactcactagctacctacctctctacctgctgcctgttactgtaattgcaatttgcaaccgtgtaaatgagtgtgaaaaataatgcccatgtgtcattctctgaaattttgagctgggagccgatccaggttcgtgatgat

SEQ ID NO: 135226 - DNA, 2936 bp, Zea Mays
gctgcttgctcacctttccctttctcgggtagttcgccatttttttaaaataatcagcagtaagcaagagctcggcgagctgagccgagcagcactgcggcaaagaactcccacttccattgcctgcttgcttctgctctgctgcacctgcgaccgttccagcggccgccgccggcccggccgacttggcggcgactggcgaccatgaagggcgtcgacgatgggttcctcggcgctggcgacaagccagggctggatatttggtgcatctttgggagcagtgtggtcccagttgcaaaatctcagcacggaaagttctacaccggcagcacctacatcatactaaacacaactcagctgaaatccggggttcgcagacacgatgtgcattactgggttggggaggaggctaaagaggaagattgtttcatggcctcggacaaggctgttgagttggacgcagcactgggctccagcacggtccagtacagggaaacacagggtgaagaatctgacaagttcttgtcatacttcaaaccgtgtgtcatcccaatacaaggccgcttcttttcacacctgaaaggatctggtgatagatccagcgcgaccacgatgtttaggtgccaaggagagcacgttgctcgtgtcacacaagttccgttttcacggtcctctctggatcacaaatcggtttttatagtggacacgccgtcaaagcttttccttttcagtggctgtaattctcgtatgcaaacaagggctaaagcgttggatgttgttaagcatctgaaggagaatcgacacttgggaagatgtgagatcgcgacaatagaggatggaaagcttgttggtgattctgatgctggagagttctggaacttgtttggaggctatgcgcctattcctcgtgatctacctgacgcaatcaaggaagagccactaactgcaccatctaagaaacttttttggatcaataagaaaaaccttgttccactcgaggcacacccgttggatagagaaatgctgaactcagacagaagttacatgctggactgcagcactgaaatattcttatggatggggatgacaacactggtttcagagaggaagtcatctgttgctgtcttggaagattatgtgcactcccaaggcaggtcattcaacgttcacacatttataatgacagaaggccatgaaactgttgactttaagctgcactttcaacactggtccaggaatgttgagctaaagttatatgaggctggccgagagaaagtggcagctattttcaagcatcagggctatgatgtcacagaaattcctgaggataaacctcagcagttcatcaattgtaatggcagtctgaaggtttggttggtggaccatggttgtacaaaccttcttagtactgaggaccaggaaaaattgtacactggagactgttatatcatacggtatagctattttgaaaatggaaaaaattaccatctgttctttgcatggtctggtaagaatagtgtaaaggatgatagaatggcggcaacatcgttaatgtctagcatggttgattcagtcaaagggcatccagttgtggcacaagtttttgagggcggagaaccagaattatttctctcggtgttcaagtcactaatcatattcaaggggggcaggagtgctgcatataagagttctgttctacagaaaagtccgagaaatggatgtcatgagagtgaaggagtcgccctattccgtgttcaagggcttaaacattattgtgtgcaggccattcaagttgatctggttgcaagttcacttaattcctcgcactgttatattttgcaagacaacggtttgttccttacttggttaggaggcctgtcttcaccaagcgatcataatatacttgacatgatcatgagcaagttgtgtccaatggaacagtccttgctagtcagagaaggctctgaaccagatcacttctggaaagctttgggaggacgatcggagtactcgaaagaaaagcgtgtgaaaggttggcctgcagatccacatctgtatgcttgtagatttgaacaaggtttactcaaggtcaaggaggtattcagcttctgtaaggatgacctggcaactgaagagacgttgattctggactgcaatgaagaaatctacgtctgggttggcctacactcagatattacatccaaggagcaagctctcaatgttggcaagatgttccttaaggatgctgttcacggtggaaggtcaatggaaacgacagtgtatgctgtcacagaaggggacgagcctggatttttcaccagcttcttcgactgggacaattcgaagcaatcatatatggttggcaactcatttgagaggaagctcgccgtcctgaaaggggtctccccaaaactagagacaccggacagaagcctgcgcaggccgtctaggaggcccggggtatcgtcggagccgaccacgccggagcaccagcaaccgaccgcgagaagggccttcggctccacgtctgccgggcggtttgccagggagcgctctccggctgttgcaccgccaacgttgtcgccatctcccaaaagccgctcgtcgtcgtcgacgcccaccacggtggcacgacggctctttcctgcctcggtgcacgcatcggaggctgtgcacgtggtctccacggcgacagctcgacgacggtgagaggagaggtggctgtgtatgcatgcgtaatcgtgcacgattgaaatcatgtagagttgtactagacgatggatttatatgtccggcctacgtacgtgtctgtatacagaatttacctctcaaactgtcaaaccccgaaagtttcttgttttggagaacttgggagtgtgaatagtcgctactcgctactaataaatacgactgtcgttcaaaaacaaaagagtaaa

SEQ ID NO: 135227 - DNA, 780 bp, Zea Mays
atggcgtccaacagaaactgtgtctgcatggatggtcgagggggcgccgtgattgattacccacaagcttaccgtgcgggctggaattacagggaaaaacaggtccttgcgggtagcaaagcactcgatcacacaaacctaggccagtgctcagatcaaagccgacggaatcgtgtagtcaaggaagaggactggaacgaacagatggttgttgcaaatttcagcgcttcctggtgtgggccatgccgtgtcattgctcctgtctatgctgaaatgtcaaagacttatcctcaactcatgttcttgacaatagacgttgatgacctgatggacttcagctcttcatgggacatccgtgcaaccccgacattcttcttcctcaagaacgggcagcagatcgacaagctcgtgggcgcgaacaaacctgagctcgagaagaaagtgctagcagccgctgatgccagtacgtcctagtgacacaagtggaagtgggcaaacgatctgtgatggcttcccggtgtatagtttccatggttcatttgtgtgcttgtcccatgtttgcctggggacgatgacgttttacaattttggcccccatcgcgcgcactcgtctgtttctctcatggaagccgtgtgaacctgtgcgtgtgtgtgacgaatgaacggaactttatatggaccagtgcttaagagtcttcgcaacataattatgaaggtttgtttgcatgttcttggttgtaacctctttagttgtgcgtggtctttctctttcagcctttt

SEQ ID NO: 135228 - DNA, 2483 bp, Zea Mays
gggttctgggctttagcgctcgctcgccggtcggccccaccattccgcgcagttccgcgtgcgaggaacaggaaccgctgctgctctctgcctccgctccgatcctgcttgcgctcgagaaccgcgacgccgacgcccttccttgacgcgttgttgatctgcgagctcagctggaaactgatagctttatttgctgtttactcaatgaaactgatctcccagagataatgaccatcaccgtaggcttccatgtgccctcctaggcaagagtgcaagaccaactctgttggctagagtattgcatttatacagatctgcatattagagaagatttttcgtatattttggtgaacatgaagagaaaggcgcagtcaggaaaatctcgctcatggtggtgggacaatcatattagtccacaaaattctaagtggctctctaaaaatctagaagaaatggagaagcaggtgaaacaaatgttggggctcattggcgaaggagagttttctgcagaaaaagcggaggtgttctatgagaagcggcctttacttattactcatgtggagaacttctattgcatgtatcgtgctcttgctgcccgatatgacgatgtaactggacaactacgcaaaaacattccatcatctcttcaatcatatggctcggttggtgtctctgaatcagattctgagacacaatgtttcacatctccagagtttgatatgccacagcaaaagcaaaagcctggaccagatttccttgatttttccattggctctggtgttagctctgatgtatcaaagaagggtagtgaaaggtcttcatcatcttcagattctgattcagagcttgatgaggccaaagaggaaaatggcagtatgttttatgccttgagccaaaaaaatattgagctagaagatgagcttcaagaagtaaggggaaaacttgatgctttagaggaaaaacatgctcattgccaaagagatttgagtaccaactcaaaagatactgaacatgaagaaaacctgcacacttcagatgtggaatccaacacccttcagaaggatgcagaagaaacagattttgctttagagagctcaacagaagtcaacagcgaaaaggaagcattggaagctgtgctgtttgagcggaaaaatgagattgaaatgctgaaaggtgcaatggcctcagctgctaagcagtttgaagttgaattggcacatcgtgatcttgaaattggtaagtgcaagcatgaacttggagtactctcggagaagtatttgcatgataagtctactctcgaggatgagcttagaaggctccatggaataatcaagaatatggaaggtgacttagaaaaaatttcacaggagagattgcagctcaggtctcggattaaagagctcgagcaggcagctcacagcttagactattcagcttccgagatagttgagctacaagaagtaataaggaatacacaagcagaattagaaaaggtcacaaaggagaaagaagtgctcaaagaacacgctaacgaatttgagcaacttttaaagggccttgaggtctcaggtacagaggttgcaaagctaccagaaactatcaagaacctggaagcccagctagaaagatccttcgaagagaaatcagtactccaagaccagatcaagcagctggagcaggttatgtctgaatcttcggagaaacattcacatgagcagttctctcttactgcggatcttttgaagttatctgaagtgaacgcttctcttgaagacaaattgtccgatgtggcggcagagcttatccaagtttatgctgacaaggaagaagaatctctcgataatgagaagcaaatttctgtcctcagtaaagatattgctgatctcaggagaaagcttgaattgttgtcatctgagaaaaccacagttgatgatgagttggccaaactgctagctgatattatgattcgtgacgaaaagatgaagcaaatggatgaccacctaaatcagcttcagttagagcatgccaagctgatggcagaatttgacagtgcacacaggtccttgtcagagctgcatgcgcaggtttctgagctggaagacgaggtagagaagcagaagcttgtgatatccgagagtgcagagggaaagcgggaggccatcaggcagctgtgcttctccattgaacactaccgcagcgggtatcagcagctgaggcagctgctgcaaggccacaggaggccgttggtgatggcaacctgataaatgaacaaagtccgtttgccaacaaattgcgcagttgcttgtctctgggcgtgttctatttgtagctctgttctttcacaacttgtgccgtgtagtttatgttataaagaattctgtgtggtatgtgtgtagaatgtaatgggatgggatatttatgttgttccttcatactcctgtggctgttttctttttccttgctgtccgctgatgaatgttatg

SEQ ID NO: 135229 - DNA, 2385 bp, Zea Mays
gggttctgggctttagcgctcgctcgccggtcggccccaccattccgcgcagttccgcgtgcgaggaacaggaaccgctgctgctctctgcctccgctccgatcctgcttgcgctcgagaaccgcgacgccgacgcccttccttgacgcgttgttgatctgcgagctcagatctgcatattagagaagatttttcgtatattttggtgaacatgaagagaaaggcgcagtcaggaaaatctcgctcatggtggtgggacaatcatattagtccacaaaattctaagtggctctctaaaaatctagaagaaatggagaagcaggtgaaacaaatgttggggctcattggcgaaggagagttttctgcagaaaaagcggaggtgttctatgagaagcggcctttacttattactcatgtggagaacttctattgcatgtatcgtgctcttgctgcccgatatgacgatgtaactggacaactacgcaaaaacattccatcatctcttcaatcatatggctcggttggtgtctctgaatcagattctgagacacaatgtttcacatctccagagtttgatatgccacagcaaaagcaaaagcctggaccagatttccttgatttttccattggctctggtgttagctctgatgtatcaaagaagggtagtgaaaggtcttcatcatcttcagattctgattcagagcttgatgaggccaaagaggaaaatggcagtatgttttatgccttgagccaaaaaaatattgagctagaagatgagcttcaagaagtaaggggaaaacttgatgctttagaggaaaaacatgctcattgccaaagagatttgagtaccaactcaaaagatactgaacatgaagaaaacctgcacacttcagatgtggaatccaacacccttcagaaggatgcagaagaaacagattttgctttagagagctcaacagaagtcaacagcgaaaaggaagcattggaagctgtgctgtttgagcggaaaaatgagattgaaatgctgaaaggtgcaatggcctcagctgctaagcagtttgaagttgaattggcacatcgtgatcttgaaattggtaagtgcaagcatgaacttggagtactctcggagaagtatttgcatgataagtctactctcgaggatgagcttagaaggctccatggaataatcaagaatatggaaggtgacttagaaaaaatttcacaggagagattgcagctcaggtctcggattaaagagctcgagcaggcagctcacagcttagactattcagcttccgagatagttgagctacaagaagtaataaggaatacacaagcagaattagaaaaggtcacaaaggagaaagaagtgctcaaagaacacgctaacgaatttgagcaacttttaaagggccttgaggtctcaggtacagaggttgcaaagctaccagaaactatcaagaacctggaagcccagctagaaagatccttcgaagagaaatcagtactccaagaccagatcaagcagctggagcaggttatgtctgaatcttcggagaaacattcacatgagcagttctctcttactgcggatcttttgaagttatctgaagtgaacgcttctcttgaagacaaattgtccgatgtggcggcagagcttatccaagtttatgctgacaaggaagaagaatctctcgataatgagaagcaaatttctgtcctcagtaaagatattgctgatctcaggagaaagcttgaattgttgtcatctgagaaaaccacagttgatgatgagttggccaaactgctagctgatattatgattcgtgacgaaaagatgaagcaaatggatgaccacctaaatcagcttcagttagagcatgccaagctgatggcagaatttgacagtgcacacaggtccttgtcagagctgcatgcgcaggtttctgagctggaagacgaggtagagaagcagaagcttgtgatatccgagagtgcagagggaaagcgggaggccatcaggcagctgtgcttctccattgaacactaccgcagcgggtatcagcagctgaggcagctgctgcaaggccacaggaggccgttggtgatggcaacctgataaatgaacaaagtccgtttgccaacaaattgcgcagttgcttgtctctgggcgtgttctatttgtagctctgttctttcacaacttgtgccgtgtagtttatgttataaagaattctgtgtggtatgtgtgtagaatgtaatgggatgggatatttatgttgttccttcatactcctgtggctgttttctttttccttgctgtccgctgatgaatgttatgatatgcttgaaccttcgtcttttcagtcacgactttatgtggtc

SEQ ID NO: 135230 - DNA, 1808 bp, Zea Mays
aatgatgccctctctctaatcagctttctcaccgacggcgaccgaccgaccagccatataataaagaagcgaagctaagcgagaccggaggggcacgagcgccaccgccttgatcccgcccgctcctccccagatctcctcgccattgccgccgccctgccaggattcgcgccctactcgcccagatccgaccgcggctctgattttccaactgacgcaggagcggtgggtctgaccgggcgcgacccgtcttctcatgggcgagacagcgtgatccctgcggctcgattgtaaattcgtgatctttcggggcattccttggtttgtctgtcggtgctggtggtgctgcgtttggagggccgcggagatgggcgtcggcggggagaagttccagctggggacggtgggggcgctgagcctctccgtggtgtcctctgtctccattgtcatctgcaacaaggcgctcatgagctccctcggctttaacttcgccactaccttgacgagctggcatctgctggttacattctgctcccttcatgtagcattatggatgaagttctttgagcataagccttttgattcaagaactgtcatgggatttggagtacttaacggaatctccattgggctcctcaacttgagtcttggcttcaactctgttgggttttaccagatgactaagctggcaatcatcccgtgcactgtcattttagagacacttttcttcaggaagaagttcagtcggagtatccagatgtccctttctgtgcttcttcttggtgttggtgttgcaactgtcactgatctgcaactcaatgctgtgggatccatactgtccttgctggcaattatcacgacttgcattgctcaaattatgacaaacactatccagaagaagttcaaggtctcatcaacccaactgctttaccagtcttgcccttaccaatcactgaccctgtttctcattggccccttccttgatggctttttgactaaccaaaatgtctttgcttttaattatacatctcaagttgtgtttttcatcgtcctgtcatgcttgatatctgtttcagtgaacttcagcactttccttgtgatcggaaagacatctcctgttacttaccaagtcctgggccatcttaaaacatgccttgttcttgcttttggttatgttttgcttcacgatccgtttagctggagaaacatacttggaatcctaattgctgtagttggaatggtcttgtattcatacttctgcacagtggagacccagcaaaaaaatgttgaagtctccccacaacaggtgaaagaaagcgaggcaggccctttgatcgcagactctatgagcaaagttgaaaacgggggtggtggtgttgatgacgagcctttgaaggtacccatgtggagctcaaagtactcgcgggagtgaaaaggtcacgatggcatggcaccatacaggattcaatttagtaggcagatagtagggttggaagccaacccagagtgtaatgaacatttcagttacatttttgggcttctttagtgtcgcagtctactagcagttaaaggatctgtttcttggaaggatcctaccttcagggctctcagacctaccttgaaactagacagcaggtattgtatgattgtatctcgatatgctccacatcctcttactgtaacttccaactggtacatggcgtgcctatatccaaagatagacctcattctttttgtatcaagaagatccggataagaagacttgtgcaagatttgtagcgtttagtgaaatttgtgactgtcagtca

SEQ ID NO: 135231 - DNA, 1691 bp, Zea Mays
ataatttggctaaggcttgtgctgcctatcgtgactttgtatcacaaaatgctataagagttaaaacttcttgttttttcttaaaaagttttggactagggtagtggggttttaaattttgctgagatacttctacctgcctgtaaggactagggtagtggggttttaaattttgcccacaaatgtaaacttttggcctaatccacctgaatagacaggatttaacactattatttgcagcactgataaccttattttgcagtgtttacttgcacaatgtgcgcttttttcctccttgcccatgttatcctaaaaattgaggaagttcttacatttgtcgacggacagagtactagatcttatattatcaacatccactaccttgacgagctggcatctgctggttacattctgctcccttcatgtagcattatggatgaagttctttgagcataagccttttgattcaagaactgtcatgggatttggagtacttaacggaatctccattgggctcctcaacttgagtcttggcttcaactctgttgggttttaccagatgactaagctggcaatcatcccgtgcactgtcattttagagacacttttcttcaggaagaagttcagtcggagtatccagatgtccctttctgtgcttcttcttggtgttggtgttgcaactgtcactgatctgcaactcaatgctgtgggatccatactgtccttgctggcaattatcacgacttgcattgctcaaattatgacaaacactatccagaagaagttcaaggtctcatcaacccaactgctttaccagtcttgcccttaccaatcactgaccctgtttctcattggccccttccttgatggctttttgactaaccaaaatgtctttgcttttaattatacatctcaagttgtgtttttcatcgtcctgtcatgcttgatatctgtttcagtgaacttcagcactttccttgtgatcggaaagacatctcctgttacttaccaagtcctgggccatcttaaaacatgccttgttcttgcttttggttatgttttgcttcacgatccgtttagctggagaaacatacttggaatcctaattgctgtagttggaatggtcttgtattcatacttctgcacagtggagacccagcaaaaaaatgttgaagtctccccacaacaggtgaaagaaagcgaggcaggccctttgatcgcagactctatgagcaaagttgaaaacgggggtggtggtgttgatgacgagcctttgaaggtacccatgtggagctcaaagtactcgcgggagtgaaaaggtcacgatggcatggcaccatacaggattcaatttagtaggcagatagtagggttggaagccaacccagagtgtaatgaacatttcagttacatttttgggcttctttagtgtcgcagtctactagcagttaaaggatctgtttcttggaaggatcctaccttcagggctctcagacctaccttgaaactagacagcaggtattgtatgattgtatctcgatatgctccacatcctcttactgtaacttccaactggtacatggcgtgcctatatccaaagatagacctcattctttttgtatcaagaagatccggataagaagacttgtgcaagatttgtagcgtttagtgaaatttgtgactgtcagtca

SEQ ID NO: 135232 - DNA, 1773 bp, Zea Mays
ataatttggctaaggcttgtgctgcctatcgtgactttgtatcacaaaatgctataagagttaaaacttcttgttttttcttaaaaagttttggactagggtagtggggttttaaattttgctgagatacttctacctgcctgtaaggactagggtagtggggttttaaattttgcccacaaatgtaaacttttggcctaatccacctgaatagacaggatttaacactattatttgcagcactgataaccttattttgcagtgtttacttgcacaatgtgcgcttttttcctccttgcccatgttatcctaaaaattgaggaagttcttacatttgtcgacggacagagtactagatcttatattatcaacatgtatgtagtgaagtatgtaagtctgatttaaatgacttctaatatctgtgaaatatgtatgtcttttgcagccactaccttgacgagctggcatctgctggttacattctgctcccttcatgtagcattatggatgaagttctttgagcataagccttttgattcaagaactgtcatgggatttggagtacttaacggaatctccattgggctcctcaacttgagtcttggcttcaactctgttgggttttaccagatgactaagctggcaatcatcccgtgcactgtcattttagagacacttttcttcaggaagaagttcagtcggagtatccagatgtccctttctgtgcttcttcttggtgttggtgttgcaactgtcactgatctgcaactcaatgctgtgggatccatactgtccttgctggcaattatcacgacttgcattgctcaaattatgacaaacactatccagaagaagttcaaggtctcatcaacccaactgctttaccagtcttgcccttaccaatcactgaccctgtttctcattggccccttccttgatggctttttgactaaccaaaatgtctttgcttttaattatacatctcaagttgtgtttttcatcgtcctgtcatgcttgatatctgtttcagtgaacttcagcactttccttgtgatcggaaagacatctcctgttacttaccaagtcctgggccatcttaaaacatgccttgttcttgcttttggttatgttttgcttcacgatccgtttagctggagaaacatacttggaatcctaattgctgtagttggaatggtcttgtattcatacttctgcacagtggagacccagcaaaaaaatgttgaagtctccccacaacaggtgaaagaaagcgaggcaggccctttgatcgcagactctatgagcaaagttgaaaacgggggtggtggtgttgatgacgagcctttgaaggtacccatgtggagctcaaagtactcgcgggagtgaaaaggtcacgatggcatggcaccatacaggattcaatttagtaggcagatagtagggttggaagccaacccagagtgtaatgaacatttcagttacatttttgggcttctttagtgtcgcagtctactagcagttaaaggatctgtttcttggaaggatcctaccttcagggctctcagacctaccttgaaactagacagcaggtattgtatgattgtatctcgatatgctccacatcctcttactgtaacttccaactggtacatggcgtgcctatatccaaagatagacctcattctttttgtatcaagaagatccggataagaagacttgtgcaagatttgtagcgtttagtgaaatttgtgactgtcagtcatgttcgcttta

SEQ ID NO: 135233 - DNA, 1137 bp, Zea Mays
aatttggctaaggcttgtgctgcctatcgtgactttgtatcacaaaatgctataagagttaaaacttcttgttttttcttaaaaagttttggactagggtagtggggttttaaattttgctgagatacttctacctgcctccactaccttgacgagctggcatctgctggttacattctgctcccttcatgtagcattatggatgaagttctttgagcataagccttttgattcaagaactgtcatgggatttggagtacttaacggaatctccattgggctcctcaacttgagtcttggcttcaactctgttgggttttaccagatgactaagctggcaatcatcccgtgcactgtcattttagagacacttttcttcaggaagaagttcagtcggagtatccagatgtccctttctgtgcttcttcttggtgttggtgttgcaactgtcactgatctgcaactcaatgctgtgggatccatactgtccttgctggcaattatcacgacttgcattgctcaaattctggagaaacatacttggaatcctaattgctgtagttggaatggtcttgtattcatacttctgcacagtggagacccagcaaaaaaatgttgaagtctccccacaacaggtgaaagaaagcgaggcaggccctttgatcgcagactctatgagcaaagttgaaaacgggggtggtggtgttgatgacgagcctttgaaggtacccatgtggagctcaaagtactcgcgggagtgaaaaggtcacgatggcatggcaccatacaggattcaatttagtaggcagatagtagggttggaagccaacccagagtgtaatgaacatttcagttacatttttgggcttctttagtgtcgcagtctactagcagttaaaggatctgtttcttggaaggatcctaccttcagggctctcagacctaccttgaaactagacagcaggtattgtatgattgtatctcgatatgctccacatcctcttactgtaacttccaactggtacatggcgtgcctatatccaaagatagacctcattctttttgtatcaagaagatccggataagaagacttgtgcaagatttgtagcgtttagtgaaatttgtgactgtcagtca

SEQ ID NO: 135234 - DNA, 1511 bp, Zea Mays
ggtcgccacctaaacctaggcgcgccactctccctggcagccgccgtttgttgtcgcgagcgcgttcctgccccgccacagccgaagctcccagcgtcctcctgcaggccgagctgaaggttcagcgcgccggtggagttcgacgacgaaactccgtcacgtcatacctctccgcctcccgtcttccagacgtctccaatcagggctcccagcgtctcggagaagaggagcagcacggcacggcggctgtggcgaggaaggctcctgtcccatcccaacccagttagcagccgcccaaggaggaggagattcaatcggcgtgcgggcgtccgcggtccatccatcgatccaattccaatctgcaggtgagcagctcgttgagattcccaatcaacagctcgaatcgcctgctctcccatcctattgaatgaaactatggtatagtggtttgcctagttattatctcgaattaatttgtaaagatctccactttggttcgatttgattgtttcttcaactagtggcatattgttctgcttcttatgtgattccattaggtctctgcgtcacggcttgttcgtggaggagaggtcgagaatttactaagtcaacatcttgttttaggtcattactgcatttggaagactagggacaatgtttggatgtgatatgtataatattaaaccagatcttgtttccatagccaaggttagttcaatataaaatacttattaattacaagagaacttctttataaaattaatggtgaacttaatgcacttttccccctaataggctctttcttctgcatatatgccaattggagcaattctcgttagcccagaaataacggatgtaatttattctcagagcaataaacttggtaaatctaatcccatcatggtaaatctattctgcatatatgtgtctgattaatccttcatataatggccgttagggaaaggaatattgtagaacacgttaacaaaattgctccaaggttccaggagggaatcaaggccttctcaggcagcccaattgttggggagatacgcggtctgggactgatacttggaactgaatttgtcgacaacaaatctccaaatgatccatttccagctgaatggggtgttggttcgatatttggcacggagtgcgagaagcgtgggatgctcatcagggtggctggggacagcatcatgctgtcacccccgctgatcatgactcccaatgaagtcgaagaaatcataagcaaattcggcgatgctctaaaggctacagaggaacggattggagaactgaaatccaggaagaattagccgatgctgctggttgtaacgacggtgaggatggtgatggcagtgtccaatatacagtatattttcaaactttatttcagtaaagtgctgggctggaaccttgtagtcggttgcatagcgacagttgtttcttgatatggagcaataaggaatgcatctgcttaatcagagtagcatacccttggctttgtg

SEQ ID NO: 135235 - DNA, 1260 bp, Zea Mays
ggtcgccacctaaacctaggcgcgccactctccctggcagccgccgtttgttgtcgcgagcgcgttcctgccccgccacagccgaagctcccagcgtcctcctgcaggccgagctgaaggttcagcgcgccggtggagttcgacgacgaaactccgtcacgtcatacctctccgcctcccgtcttccagacgtctccaatcagggctcccagcgtctcggagaagaggagcagcacggcacggcggctgtggcgaggaaggctcctgtcccatcccaacccagttagcagccgcccaaggaggaggagattcaatcggcgtgcgggcgtccgcggtccatccatcgatccaattccaatctgcaggtcattactgcatttggaagactagggacaatgtttggatgtgatatgtataatattaaaccagatcttgtttccatagccaaggctctttcttctgcatatatgccaattggagcaattctcgttagcccagaaataacggatgtaatttattctcagagcaataaacttgggaaaggaatattgtagaacacgttaacaaaattgctccaaggttccaggagggaatcaaggccttctcaggcagcccaattgttggggagatacgcggtctgggactgatacttggaactgaatttgtcgacaacaaatctccaaatgatccatttccagctgaatggggttcattgttttattgatctcatgtccccttttcaaacatttcagaagtgttggttcgatatttggcacggagtgcgagaagcgtgggatgctcatcagggtggctggggacagcatcatgctgtcacccccgctgatcatgactcccaatgaagtcgaagaaatcataagcaaattcggcgatgctctaaaggctacagaggaacggattggagaactgaaatccaggaagaattagccgatgctgctggttgtaacgacgtgttgaagatggctttggtgaaggaaatgtcttgttagcatcaagtaagtggcgacatcacaacccctacaagcttgtgccttaaaacaagaggatacaagaagttggagtgcttttgtgaaggcttttgcgaatcacttaaagcgttagtacttttgtgaatgattttgtaaagtgtttgcaaatatgtgcaaaacataataacatgtgtaggttttgtgaatgattttgttgtggtgtctgttgatggtttatgtatgtggatctatcattgtgcaatactaattaaat

SEQ ID NO: 135236 - DNA, 1516 bp, Zea Mays
ggtcgccacctaaacctaggcgcgccactctccctggcagccgccgtttgttgtcgcgagcgcgttcctgccccgccacagccgaagctcccagcgtcctcctgcaggccgagctgaaggttcagcgcgccggtggagttcgacgacgaaactccgtcacgtcatacctctccgcctcccgtcttccagacgtctccaatcagggctcccagcgtctcggagaagaggagcagcacggcacggcggctgtggcgaggaaggctcctgtcccatcccaacccagttagcagccgcccaaggaggaggagattcaatcggcgtgcgggcgtccgcggtccatccatcgatccaattccaatctgcaggtcattactgcatttggaagactagggacaatgtttggatgtgatatgtataatattaaaccagatcttgtttccatagccaaggctctttcttctgcatatatgccaattggagcaattctcgttagcccagaaataacggatgtaatttattctcagagcaataaacttgggaaaggaatattgtagaacacgttaacaaaattgctccaaggttccaggagggaatcaaggccttctcaggcagcccaattgttggggagatacgcggtctgggactgatacttggaactgaatttgtcgacaacaaatctccaaatgatccatttccagctgaatggggttcattgttttattgatctcatgtccccttttcaaacatttcagaagtaatccaactttaaggcggcccaaaattgttctctgaagagttaacttaatgttatgaattagcgtagcatgtcgaggcaaaattcgtcactatccccagagttagaagaaaccttgccgagttgattaatggtgacagtatattgattttattacgactggtaactccaggtgttggttcgatatttggcacggagtgcgagaagcgtgggatgctcatcagggtggctggggacagcatcatgctgtcacccccgctgatcatgactcccaatgaagtcgaagaaatcataagcaaattcggcgatgctctaaaggctacagaggaacggattggagaactgaaatccaggaagaattagccgatgctgctggttgtaacgacgacatgcaattgaaaatgataattgatcttttttatgggcgaagtgttgaagatggctttggtgaaggaaatgtcttgttagcatcaagtaagtggcgacatcacaacccctacaagcttgtgccttaaaacaagaggatacaagaagttggagtgcttttgtgaaggcttttgcgaatcacttaaagcgttagtacttttgtgaatgattttgtaaagtgtttgcaaatatgtgcaaaacataataacatgtgtaggttttgtgaatgattttgttgtggtgtctgttgatggtttatgtatgtggatctatcattgtgcaatactaattaaatttgtatatctatgtgattatgtgtataaaaattggtgattt

SEQ ID NO: 135237 - DNA, 98 bp, Zea Mays
ttgagtggtggcgttcttatggtggtcgtgctattgagttacaaagatttgctagacgtttggtgctttgtgcgtcatcattaggttgggaacgcgat

SEQ ID NO: 135238 - DNA, 1497 bp, Zea Mays
acattttacggccacaaaaaatgtataaaataggaaatgggaaaaccccatcacagctccacgcctccactgctatccctctcttcctctctgctttccccttccaatggaatcctgtagcttccgtgccgcaaccgcgccttctccctttccctccgctccttcttcatcttcatccccgcgcgccccatgccccatactccgatttcccaggccaagaaaagggaggcagattggggtgcggaggagggcgtccggatttgatgccttcgcgtctttcgccggcaaggtcttcgtggatgaggcgattggagcggaatatggggagggcttcgaaacatttcgaatggatggaccactcaaggttgatgtggattatctgaatgaaaaattgcaagagtgcttccttcaaaggataaggcatgctatgaagccggatgaggcgtttggtctaattttttcgtgggacaatgttattgctgatacagactcgctaaagttgaatgcttggagacaacttgctttggaggaaggtaaggatatcccaagtggtgctcatgtccggaagagcattattcatggtgctgctgaccatgttcttagaaaggttttgtactgggcaaaagaggaagataaaatggaaaaattgaaggcacgccttatagagttgtactacgagaacctgttcaaactcgatacacctgtagaaggattgagagaatggctggatgctgttcagacagcagggataccttgtgctgtcgcatcaccccttgacaggagatgcatgatcgaagctttggatcggatggcgctaagcaaatatttcaaggcgatcgtgactgacgaagatgatatggagtcgatagcaaatcgatttctgtcagctgctatgaaggcatgctcctgccccacttctaatcgttgtacatcatgttaatatatataggtcacacatttgcggtttttcttttcttcctggcagttggatcgtaaaccctcgaagtgtgtggtgttcgaggatgacccaaggggcgtcacagccgcccacaactgtacaatgatggcagtcgcattgattggtgctcatccagcgtatgagttggtacaggcagaccttgccattgcaaagtacagcgagctctcagtgatcaacctcagaaggctgtttgcgaacaagggaatcagcttcatggacttgcagaagcagataatcgagaagtcacctcccaagaggaggctgacagtagacaccattttctgatagatacacttttatttggtgtctgcctgttgttcttgagtagccaacaaccttcggcattatggcggtggcgttgtatataagatagtgctgatgttaggtgatccgctgtgtacctccttgtgaatgcaatgcggtagttccatcaaggtaccatgaggaagactgctgcaacaatgttgttgctgatgtaagctgatattattcaaatttattcatatttcatggtcgat

SEQ ID NO: 135239 - DNA, 1609 bp, Zea Mays
acattttacggccacaaaaaatgtataaaataggaaatgggaaaaccccatcacagctccacgcctccactgctatccctctcttcctctctgctttccccttccaatggaatcctgtagcttccgtgccgcaaccgcgccttctccctttccctccgctccttcttcatcttcatccccgcgcgccccatgccccatactccgatttcccgccaagaaaagggaggcagattggggtgcggaggagggcgtccggatttgatgccttcgcgtctttcgccggcaaggtcttcgtggatgaggcgattggagcggaatatggggagggcttcgaaacatttcgaatggatggaccactcaaggttgatgtggattatctgaatgaaaaattgcaagagtgcttccttcaaaggataaggcatgctatgaagccggatgaggcgtttggtctaattttttcgtgggacaatgttattgctgatacagactcgctaaagttgaatgcttggagacaacttgctttggaggaaggtaaggatatcccaagtggtgctcatgtccggaagagcattattcatggtgctgctgaccatgttcttagaaaggttttgtactgggcaaaagaggaagataaaatggaaaaattgaaggcacgccttatagagttgtactacgagaacctgttcaaactcgatacacctgtagaaggattgagagaatggctggatgctgttcagacagcagggataccttgtgctgtcgcatcaccccttgacaggagatgcatgatcgaagctttggatcggatggcgctaagcaaatatttcaaggtgatttgagctaccgtttgagctttttaagtttattactgaattactagtgcttgaaaagcatgctgcttagcaaagttcatttgatccacttcagttgttgactgcaggcgatcgtgactgacgaagatgatatggagtcgatagcaaatcgatttctgtcagctgctatgaaggcatgctcctgccccacttctaatcgttgtacatcatgttaatatatataggtcacacatttgcggtttttcttttcttcctggcagttggatcgtaaaccctcgaagtgtgtggtgttcgaggatgacccaaggggcgtcacagccgcccacaactgtacaatgatggcagtcgcattgattggtgctcatccagcgtatgagttggtacaggcagaccttgccattgcaaagtacagcgagctctcagtgatcaacctcagaaggctgtttgcgaacaagggaatcagcttcatggacttgcagaagcagataatcgagaagtcacctcccaagaggaggctgacagtagacaccattttctgatagatacacttttatttggtgtctgcctgttgttcttgagtagccaacaaccttcggcattatggcggtggcgttgtatataagatagtgctgatgttaggtgatccgctgtgtacctccttgtgaatgcaatgcggtagttccatcaaggtaccatgaggaagactgctgcaacaatgttgttgctgatgtaagctgatattattcaaatttattcatatttcatggtcgatatct

SEQ ID NO: 135240 - DNA, 1414 bp, Zea Mays
acattttacggccacaaaaaatgtataaaataggaaatgggaaaaccccatcacagctccacgcctccactgctatccctctcttcctctctgctttccccttccaatggaatcctgtagcttccgtgccgcaaccgcgccttctccctttccctccgctccttcttcatcttcatccccgcgcgccccatgccccatactccgatttcccaggccaagaaaagggaggcagattggggtgcggaggagggcgtccggatttgatgccttcgcgtctttcgccggcaaggtcttcgtggatgaggcgattggagcggaatatggggagggcttcgaaacatttcgaatggatggaccactcaaggttgatgtggattatctgaatgaaaaattgcaagagtgcttccttcaaaggataaggcatgctatgaagccggatgaggcgtttggtctaattttttcgtgggacaatgttattgctgatacagactcgctaaagttgaatgcttggagacaacttgctttggaggaaggtaaggatatcccaagtggtgctcatgtccggaagagcattattcatggtgctgctgaccatgttcttagaaaggttttgtactgggcaaaagaggaagataaaatggaaaaattgaaggcacgccttatagagttgtactacgagaacctgttcaaactcgatacacctgtagaaggattgagagaatggctggatgctgttcagacagcagggataccttgtgctgtcgcatcaccccttgacaggagatgcatgatcgaagctttggatcggatggcgctaagcaaatatttcaaggcgatcgtgactgacgaagatgatatggagtcgatagcaaatcgatttctgtcagctgctatgaagttggatcgtaaaccctcgaagtgtgtggtgttcgaggatgacccaaggggcgtcacagccgcccacaactgtacaatgatggcagtcgcattgattggtgctcatccagcgtatgagttggtacaggcagaccttgccattgcaaagtacagcgagctctcagtgatcaacctcagaaggctgtttgcgaacaagggaatcagcttcatggacttgcagaagcagataatcgagaagtcacctcccaagaggaggctgacagtagacaccattttctgatagatacacttttatttggtgtctgcctgttgttcttgagtagccaacaaccttcggcattatggcggtggcgttgtatataagatagtgctgatgttaggtgatccgctgtgtacctccttgtgaatgcaatgcggtagttccatcaaggtaccatgaggaagactgctgcaacaatgttgttgctgatgtaagctgatattattcaaatttattcatatttcatggtcgatatct

SEQ ID NO: 135241 - DNA, 125 bp, Zea Mays
caacgtcaacctccaaaatcgattataggaaatgattaagcccatttccctttcacaaggcaactttcgatgtcaacatcgacaaaacctccaaagagttcagaaaaaatgtttgactaaaaata

SEQ ID NO: 135242 - DNA, 724 bp, Zea Mays
aaccccttcccaaactgtacaagcttcttccaaagcatacggctttctagatgtatatgacgatctctagacagatggatcttatatgaatcgtatgatgaagtaccacatgagtggatatatagaaaaggaatccaaatccggattaggtagaccctgttgttgtgagaattcttaattcatgagttgtagggagggacttatgtcaccacaaacagaaactaaagcaaatgttggatttgaagctggtgttaaggattataaattgacttactacaccccggagtacgaaaccaaggatagtgatatcttggcagcattccgagtaactcctcagctcggggttccgcctgaagaagcaggagctgcagtagctgtggaatcttctactggtacatggacaactgtttggactgatggacttaccagtcttgatcgttacaaaggacgatgctatcacatcgagcccgttcctggggacccagatcaatatatttgttatgtagcttatccattagacctatttgaagagggttctgttactaacatgtttacttccattgtgggtaacgtatttggtttcaaagcgttacgcgctctacgtttggaggatttacgaattccccttttgagtttttctggcggaccggtcgcgcaagatctttggtcttcccccggaaccgatgaaaaagtgggtcgcttcttatggactcgctcagaatga

SEQ ID NO: 135243 - DNA, 942 bp, Zea Mays
accttcttctcaactctcaagcggcaccttccttttctgtgtttcccctctctctctctctctctctctctctctctgtgctagctgctagcagagcagagtgtcagtcagtgagtgcgcagtgcatgttcgccatggcaagcgccggcggcaaggaggagcctggattgttggtgaagcaggggaccaagctccacgccaagatgctctccaaggaggcggcggcgcagctcgcggtaccgtcgttccgggtgtactactccgtggcgtcggccggcgcggtgccgttcctgtgggagtcgcagccgggcacgcccaagcacgactcgtcctccgcggccgagctcccgccgctcacgccgccgccgtcctactactccgcaggccggggcggcgccggcgccggccgctccaggagccgccggcccggcctcctcgccgccatcctccccaggatcaccctccaccggtggcccggcagcagccggacgacgtcggcgtgcccgtcctggtcctccacgtcctggtcgtcctcgagttccaacacgtcgtccacgatgtcgcccgtgttcaccgtccagtcgtcgcccgccgtgcacgtgggggcttcccgcggccaccacgggcgcgcgatctcggccggcggcgcctacgacgaggccacgccgcggtgcttctcggtggagcgtgagtgctacgagaggcgggtcgtgaaggggtgcggcgtcgcggtggccttaaggaacgcgctggccacggtcgtcgtcggcaagcccggtcggcgagctgccaccagcgccgcagcatagacaggatttgattgaaattgatatggctaagaagctcagggtgtgctttgcattttgccgcagcatgtgtcatgtaacgtactcccaccgtcctaaaataagtgcgtatcatgtttatgtacaagtttttttt

SEQ ID NO: 135244 - DNA, 2585 bp, Zea Mays
cgcagcgcagtaaataaaaggcaaaaaataaaaaaaaagcacccaaggaaacgccagaacatcaaccaggccgcggccgcggcacttacttcatccgagctccgcccacctcggagcaccgcagtcagctcaagcgcttgaagggacccacaatcttgcaatggaagcacttcagccaaacatccaggctgggatccatactcgtaacctcccagtaaaacagcttggagggatgatctttggttgcaagcctgatacaattgaagaatgcttcaaaaaacagctctttggtctgcctgcagtccattattcatatgtgaagaatgtaaaacctggtatgcctttgtttctattcaattatattgacagaagactccatggtatttttgaggctgcaagtcttggtcagatgtctattgatccatatgcttggagtaatgaggacttattaaagacaccttttcctgctcaggttcgtatttgcataaggactcggtatccaccaatgttagagagcagatacaaaacagtgcttggtgctaactattatgatcgtcatctattctactttgagctggaccatacacagacagaagctttaatttctttgttcaagttgctgccccttgttaataatcaagttccagctgctccaagagaaaggagtattgctgtgtctttaccaccaactaaaaggaaggcaccagttcttcctgacccaaagaaagtcaaagaaaattcaaaggatatcaatccatttagtgttttatcaaatgcaagtgatggtgctcaagaaaactgggttgattttgattctgacgtggaaaatgctagcatcaatgaaaattcacacagtgacactgatgagaaggaatttgaggagccagtttctgattgggaagatttggatgacaatgctcttcaataccaattcagtccttattcaaattcagatgaggtcagtcaaaactcctcatacaaaacagtttgccaagaagtggagcttgctgaatgcattcctccagttgtcaatcctgcgagtgaagaaaaactcaccatgcttgtacataatgagcataaagctgctgtgtgtattggcaaaatagagagtgaagttaacagtatcatggatggtgttgggctacagcctgaaagacacactatcctgaaaaagctgaaagagttattttccatgcgacagcaaggggtttcttcgcaggattgtgttgagtcaagcccagatcaatgtgtacctgaagaaaccctttcctgtgacccattagatgtcactgtggaagacaaaacctcttttcaggaacaccttggagaatttgatgagcttcgacaaatcattgctgatttatccaagagggctgaagcattggagaagaagcagaaaggatcagatcaagatctactttttttgagggaagttgttaaagattcaggaagaaaagtacagcaactggaatatcttgtagatgagttacaattccgatttgactcttcattgtctcttcctggaagcatgcacaatactttagccaagccatcgatatttctgatcggtggctacaatggtgtgacctggttatcatctcttgattctttttctcctgagaaagacacaatggtgggtctcacaccaatgagttttgcccgctcatatgcatctgctgctgcattggatggtcacatatttgcttttggtggtggaggtggcaagtcatcatggtataacacagttgcaaagcacctcaaagggttgaatagtcttgacaccaacatgctaccttattcacaatatatgttgcagcgatttgctcttgccgtggctgaattgaatggaacaatctacgccactggtgggtatgatggaagcatgtacttacaatcagcagaacggtatgaccaaagggagggtgtctgggtccgtcttcgaagcatgaacacaaagaggggatgtcatgcccttactgtccttggagaaagcctatatgcaatgggcggatacaatggagacaagatggtttctagcgttgagatcttcgaccctcggctcaacgcctggaggatgggagatcccatgagcgccccaagagggtacgccgctgcagttactctggatggaagcgcgtacttaatcggtggcctggagtccaatgtgcagatcctagctaccgttgaagtttacaacgcgagctccggctggtcagttctcggtttgagttcactcgggaagaggtcctttgcatctgccgtagtcatgtagttactgatcacgatgttaactactgtcgataacatcaggtttaacatagtcgctgcgttatgcaaggagtagttagggtaaggtgggtggggctagatcacccttccgatgtgtaatgtgttgagatcttcatcaggggaaattcgcatggtatgggagactacggcccgtatacctttgaaccctcgtaggaagtcttgagaacccttgcatgcattcgctgttgtatgcgtgccatgctgttgaatttagctgtactacaccagatagtgatacccgaactcacggagtttaatggaaccggatagaaagc

SEQ ID NO: 135245 - DNA, 2840 bp, Zea Mays
cgcagcgcagtaaataaaaggcaaaaaataaaaaaaaagcacccaaggaaacgccagaacatcaaccaggccgcggccgcggcacttacttcatccgagctccgcccacctcggagcaccgcagtcagctcaagcgcttgaagggacccacaatcttgcaatggaagcacttcagccaaacatccaggctgggatccatactcgtaacctcccagtaaaacagcttggagggatgatctttggttgcaagcctgatacaattgaagaatgcttcaaaaaacagctctttggtctgcctgcagtccattattcatatgtgaagaatgtaaaacctggtatgcctttgtttctattcaattatattgacagaagactccatggtatttttgaggctgcaagtcttggtcagatgtctattgatccatatgcttggagtaatgaggacttattaaagacaccttttcctgctcaggttcgtatttgcataaggactcggtatccaccaatgttagagagcagatacaaaacagtgcttggtgctaactattatgatcgtcatctattctactttgagctggaccatacacagacagaagctttaatttctttgttcaagttgctgccccttgttaataatcaagttccagctgctccaagagaaaggagtattgctgtgtctttaccaccaactaaaaggaaggcaccagttcttcctgacccaaagaaagtcaaagaaaattcaaaggatatcaatccatttagtgttttatcaaatgcaagtgatggtgctcaagaaaactgggttgattttgattctgacgtggaaaatgctagcatcaatgaaaattcacacagtgacactgatgagaaggaatttgaggagccagtttctgattgggaagatttggatgacaatgctcttcaataccaattcagtccttattcaaattcagatgaggtcagtcaaaactcctcatacaaaacagtttgccaagaagtggagcttgctgaatgcattcctccagttgtcaatcctgcgagtgaagaaaaactcaccatgcttgtacataatgagcataaagctgctgtgtgtattggcaaaatagagagtgaagttaacagtatcatggatggtgttgggctacagcctgaaagacacactatcctgaaaaagctgaaagagttattttccatgcgacagcaaggggtttcttcgcaggattgtgttgagtcaagcccagatcaatgtgtacctgaagaaaccctttcctgtgacccattagatgtcactgtggaagacaaaacctcttttcaggaacaccttggagaatttgatgagcttcgacaaatcattgctgatttatccaagagggctgaagcattggagaagaagcagaaaggatcagatcaagatctactttttttgagggaagttgttaaagattcaggaagaaaagtacagcaactggaatatcttgtagatgagttacaattccgatttgactcttcattgtctcttcctggaagcatgcacaatactttagccaagccatcgatatttctgatcggtggctacaatggtgtgacctggttatcatctcttgattctttttctcctgagaaagacacaatggtgggtctcacaccaatgagttttgcccgctcatatgcatctgctgctgcattggatggtcacatatttgcttttggtggtggaggtggcaagtcatcatggtataacacagtggaatgctatagttcgaggaataacgagtggatagaatgcccctcgttgaaccgcaagaaaggaagtctcgctggtatcagtcttaatagcaaaatatatgctattggtgggggagatggaaatgaaactttttcagaagttgagatgtttgatccataccttgggaaatggttatgtggtccatctatgctgattcctcgatttgctcttgccgtggctgaattgaatggaacaatctacgccactggtgggtatgatggaagcatgtacttacaatcagcagaacggtatgaccaaagggagggtgtctgggtccgtcttcgaagcatgaacacaaagaggggatgtcatgcccttactgtccttggagaaagcctatatgcaatgggcggatacaatggagacaagatggtttctagcgttgagatcttcgaccctcggctcaacgcctggaggatgggagatcccatgagcgccccaagagggtacgccgctgcagttactctggatggaagcgcgtacttaatcggtggcctggagtccaatgtgcagatcctagctaccgttgaagtttacaacgcgagctccggctggtcagttctcggtttgagttcactcgggaagaggtcctttgcatctgccgtagtcatgtagttactgatcacgatgttaactactgtcgataacatcaggtttaacatagtcgctgcgttatgcaaggagtagttagggtaaggtgggtggggctagatcacccttccgatgtgtaatgtgttgagatcttcatcaggggaaattcgcatggtatgggagactacggcccgtatacctttgaaccctcgtaggaagtcttgagaacccttgcatgcattcgctgttgtatgcgtgccatgctgttgaatttagctgtactacaccagatagtgatacccgaactcacggagtttaatggaaccggatagaaagctgcccatgtagtttggtgtttgttgcttacgttgtggattttactgtagtgacttgtctaatgctccgtttctccgtttggttatcgaccatattggagggcatggaattaaaataagttcaatac

SEQ ID NO: 135246 - DNA, 983 bp, Zea Mays
atgtagctaaatgatttatatcactgggagtaaggatatataatcaattagcagataatcggccttcctgtccagctctgcttggcggacagtcatgccggtggagggaaggaagaagggcgtgccggcgctggggtggtggctaatgctggtcggctccctccgcctcgcctccgtctggttcggcttctttgacatctgggcgctccgcgtcgccgtcttctcccagacggacatgactgatgttcatggccgtacttttggtgtctggactcttctgacctgcacgttgtgcttcctctgtgcactgaacctggaaaataggcctctgtatctggccaccttcctatcatttgtctacgctcttggccatttcctcacagagtacttgatatatcacaccatggctgcagcaaatctgagcacagttggcttctttgcaggaacgtcaatcatatggatgcttcttcagtggaattatcatgtgaatccccatggtgcccaagctgtgaagcagtcatgattgatgcttgggctgttagctttatgtggtccagggggaggaaggataccttagaaactgtcagaaaagctcatttcatacttcatttttcatcatgttattttgttgcatgagacatttgtccaactgagtagggaatgaaagttcaaattatttctgccactgattgggggatggaattccaaacattgtaaaaggcgactgtatctagtatgcaggaggcttaacatcgaatttgtgaatattcaggcataccacctgttgagagctgagatacggtagggatatcttcagcaactcttctatcacatctcctatttcaaattctactctataaacaatgttgtctaagtggaaaacagtgttttgtatgatcacacatgatctgttggacacaaccttaaggacaaccttagagagctatatccattttatcaaggtccttctagtcttccttata

SEQ ID NO: 135247 - DNA, 506 bp, Zea Mays
aacgaactacaagagcaacaaggacgacgagggggggaaacaaaccctagggtcccagtcccagggaccgtggcgcgggaccgaagggcgatggcgcgggcgcggagctcgtcggctcggagggtgtctccccgggaggcgtgcaggcccgcgaggtcgccgagcgccgtggcgaggcgaaggtcagtggcagggggagcagcggaggttgacaaatcggagacgacggactcaaggagggcgatggcgccgtcgacgtcgccggcgtcgaccaggtcgtccacctcttccgtccaacgcggcccgtccatggctggtgcggtttgagggtcgccggagctgagtcggtcttagtcggtagtcggactaggctgaagaaagaataaagtgtatttcggttgcaagtctataaaattttaaagtatgtctgtaaaagttttaattgctatctgggtctctcttagttcaaacaaacgatttatagttcgactctattgactagaact

SEQ ID NO: 135248 - DNA, 449 bp, Zea Mays
aatcataccaccagggagtaaaggttaggatgttgttgtggtgcttgaacctggaagcatgctccaccgggacctgggttcggtcgagcaacaactagtccgctaatgacgccagtcgccggctgctgttcggaggctagcaaaagggcgagagggtttgctagtacgtacagagcgtgcgcgagtaagtggctgggagcccgccgttgtcaagagagaagttgcgaggggcagaggatcatggcgctagaacttgtcgatgcgcagggagttcgccgaagggcgttaaagagcaccgaagccttggcgagtttcctccatactccgaaatttgtcgtcgtgccgttacagcgtgggtcgacgtcactgcggtctcgttgccggagtatgtcggcaccgcgtcatgaccagacagagcgccgccgtggccagcggtttcttccgtgcct

SEQ ID NO: 135249 - DNA, 863 bp, Zea Mays
aatcataccaccagggagtaaaggttaggatgttgttgtggtgcttgaacctggaagcatgctccaccgggacctgggttcggtcgagcaacaactagtccgctaatgacgccagtcgccggctgctgttcggaggctagcaaaagggcgagagggtttgctagtacgtacagagcgtgcgcgagtaagtggctgggagcccgccgttgtcaagagagaagttgcgaggggcagaggatcatggcgctagaacttgtcgatgcgcagggagttcgccgaagggcgttaaagagcaccgaagccttggcgagtttcctccatactccgaaatttgtcgtcgtgccgttacagcgtgggtcgacgtcactgcggtctcgttgccggtgagcatctttctctttgtgtcatcgttttctctgtttattttttttgtgcgactcggacggtttagtgctcaggagtatgtcggcaccgcgtcatgaccagacagagcgccgccgtggccagcggtttcttccgtgcctggttaatcggggagagcgtggtggagggattgccagcaatggcgccgccactgtccgttatcgaccgccgtgaccggttggttaggaggaagaagacacggggaggtcgttgatcgtggaacgaacgaccaggatttgatctggtattctggttcgcccgtggtgtggttaaccgtagatcttcgatcgtggggccgtgggtggtctgaagttctttaaatccggttcgtcggatcttgatccgatggcggtcctcgcataccgcttcagtgtcagagtgatttaatcctggcccttgaatctgatcgggtggctgagatcgactcgtaccccttcgtc

SEQ ID NO: 135250 - DNA, 420 bp, Zea Mays
aatcataccaccagggagtaaaggttaggatgttgttgtggtgcttgaacctggaagcatgctccaccgggacctgggttcggtcgagcaacaactagtccgctaatgacgccagtcgccggctgctgttcggaggctagcaaaagggcgagagggtttgctagtacgtacagagcgtgcgcgagtaagtggctgggagcccgccgttgtcaagagagaagttgcgaggggcagaggatcatggcgctagaacttgtcgatgcgcagggagttcgccgaagggcgttaaagagcaccgaagccttggcgagtttcctccatactccgaaatttgtcgtcgtgccgttacagcgtgggtcgacgtcactgcggtctcgttgccgcgtgaggtcacgagtcatctgaagatcatcctggtac

SEQ ID NO: 135251 - DNA, 228 bp, Zea Mays
ttttttctcgtgttgtcaggatttatcgtcggaaatgtctggagcgaccgaggatggcaaaaaaaatgggcggaacgtgatgctgccgcattatcacaagaggtaaatgctcaatttgctgctcgaataattgaacaggggcgaactatagcccgtgatgaggctgttaaagatgcgcaacagaaatctgctgaaatttctgccagggctgcttatctgtctgatagt

SEQ ID NO: 135252 - DNA, 2670 bp, Zea Mays
caacggttccctccattaaaagaccttcccctccatcaccaccccccgattccactcccacgtgctgctccacttgcgccgccacgttatacctctgggctgtagccatggggacgtcggggtccaagggcatcgacggcgtcggcgcagtttctggcgtcggcgctggcgcggcgggccttggcggcgtcggcgccggcggggacgggggcgagggcgccgccgcggaggcgtggcatggcggggcgcagctgtacgtgtcgctcaagatggagaacgcgttgatcagcggcgacctcgtcccgcacgtgtatggctccgagcccatcatcggcacctgggacccctcccgcgccctcgccatggaaagggagctcgcgtccatgtgggtgctcagcttcgtcgtgccgccggaccatgaaacactggacttcaagttcttgctgaagcccaaagacgctgaaaccccgtgcatcatcgaggaaggacccacacggctcctcaccggaggcatgctagagggtgatgtgagggttgcactgttcaagctcaatggagatgatgaggtgctcgagtttggggtggtcaacaaggcggaccttgtatcaccgcttgaacttgctgcaagctggagggtgtacaaggagaactttcagccttccaaagttcgggggatccctgatatcagtatcaatgtcacacccactaatggagctgaggaaggatcagcggctactttggaacttgacttggaacattatgttgttccgtccccgccaactgcaccaccaaatggatatgctgcaaaccttgctgcgactccagcatccgtgattcaaactgaggcattgttgacaaatgatatccttctaagtgatgggattcagagtccaagtagtgtttctgcaaaattagaagattgtactaaccacaagaatattgaggcctgggcaacagattcttctaagaaaattcagaattccggactcattgaatcaaaatcagttggcacctttacaccaatgcaaaagctagatggtcaaaaggggctgttcgttgacaggggtgttggctcttctatgcttccaaaatcagccagtgcatgctccttggcatctgggtttagttttggatcagcaaagacaatgccagaagcagcaggagctgttgcagctgcagctgtagctgatcgtttgcatgggtcaaaggaggaccggaagctggccattgttttggttggcctaccagctcgtggtaaaaccttcactgcagttaagcttacaaggtaccttcgttggttgggccatgaaactagacatttcaatgttgggaagtatcgccgtcttaagcttggagcaaatcagtctgcagattttttccgtgatgataatcctgaaggtattgaggcacgtaatgaggtggctgctttagcaatggaggacatgatagattggatgaatggtggaggtcaggttggtatatttgacgcaacaaacagcacaagaaagcgaagatatatgctaatgaaaatggctgaaggtaactgtaagattatatttttggagacaatatgtaatgatccaaacataattgaaagaaacatacggctgaagatccaacaaagtccagactatgctgaacagctagattatgaagctggactggaggacttcaaggaacgtttgattaattatgaaaaggtctacgagccagtaggggaaggttcttacatcaaaatgattgacatggtaaaggggcaagatggtcagttacaggtaaataatatcagcggttatctccctgggaggattgtcttcttcttggtgaactctcatcttacaccacgacctattttgcttaccaggcatggtgagagtttacataatgttagaggaagagtcggtggtgatacagttctaagtgaaactggcgaactttatgcaaagaaactagccaactttatagaaaagcggctcaaatgtgagaaaacagcaactatatggaccagtacccttcagagaacaattttgacagcaagtccaattgttggattccccaagatacaatggcgtgctcttgatgagatcaattctggagtgtgtgatgggatgacttatgaagagataaagaaaatcatgcccgaggaatttgagtcacgaaagaaggacaagctaagataccgctacccccgtggagaatcttacctcgatgtgatacagaggctggaacccgtcatcatcgagctagaacgccagcgtgcaccagtggttgtcatatctcatcaggctgtactgcgagcactgtatgcatatttcgcggaccgtcctttgagagaagttccagagatagagatgccactacacaccataatcgagatacaaatgggcgtcacgggtgtggaagagaagaggtacaaactcatggactgaatgaatacataaaagcagctggttggctgtttcatacagcaagtacacataacacagaagccttttcccttctctctctctctccacacggtgttcagtgtaatttctttggaaaaaagacatgttgaacattgtaaagaaaaaactaataaggaactgtaaaaatggcatgcttactgtaacgaataaggaatacagactgggggtctccaatgcttattcagaaacatattccgtcaaa

SEQ ID NO: 135253 - DNA, 2756 bp, Zea Mays
caacggttccctccattaaaagaccttcccctccatcaccaccccccgattccactcccacgtgctgctccacttgcgccgccacgttatacctctgggctgtagccatggggacgtcggggtccaagggcatcgacggcgtcggcgcagtttctggcgtcggcgctggcgcggcgggccttggcggcgtcggcgccggcggggacgggggcgagggcgccgccgcggaggcgtggcatggcggggcgcagctgtacgtgtcgctcaagatggagaacgcgttgatcagcggcgacctcgtcccgcacgtgtatggctccgagcccatcatcggcacctgggacccctcccgcgccctcgccatggaaagggagctcgcgtccatgtgggtgctcagcttcgtcgtgccgccggaccatgaaacactggacttcaagttcttgctgaagcccaaagacgctgaaaccccgtgcatcatcgaggaaggacccacacggctcctcaccggaggcatgctagagggtgatgtgagggttgcactgttcaagctcaatggagatgatgaggtgctcgagtttggggtggtcaacaaggcggaccttgtatcaccgcttgaacttgctgcaagctggagggtgtacaaggagaactttcagccttccaaagttcgggggatccctgatatcagtatcaatgtcacacccactaatggagctgaggaaggatcagcggctactttggaacttgacttggaacattatgttgttccgtccccgccaactgcaccaccaaatggatatgctgcaaaccttgctgcgactccagcatccgtgattcaaactgaggcattgttgacaaatgatatccttctaagtgatgggattcagagtccaagtagtgtttctgcaaaattagaagattgtactaaccacaagaatattgaggcctgggcaacagattcttctaagaaaattcagaattccggactcattgaatcaaaatcagttggcacctttacaccaatgcaaaagctagatggtcaaaaggggctgttcgttgacaggggtgttggctcttctatgcttccaaaatcagccagtgcatgctccttggcatctgggtttagttttggatcagcaaagacaatgccagaagcagcaggagctgttgcagctgcagctgtagctgatcgtttgcatgggtcaaaggaggaccggaagctggccattgttttggttggcctaccagctcgtggtaaaaccttcactgcagttaagcttacaaggtaccttcgttggttgggccatgaaactagacatttcaatgttgggaagtatcgccgtcttaagcttggagcaaatcagtctgcagattttttccgtgatgataatcctgaaggtattgaggcacgtaatgaggtggctgctttagcaatggaggacatgatagattggatgaatggtggaggtcaggttggtatatttgacgcaacaaacagcacaagaaagcgaagatatatgctaatgaaaatggctgaaggtaactgtaagattatatttttggagacaatatgtaatgatccaaacataattgaaagaaacatacggctgaagatccaacaaagtccagactatgctgaacagctagattatgaagctggactggaggacttcaaggaacgtttgattaattatgaaaaggtctacgagccagtaggggaaggttcttacatcaaaatgattgacatggtaaaggggcaagatggtcagttacaggtaaataatatcagcggttatctccctgggaggattgtcttcttcttggtgaactctcatcttacaccacgacctattttgcttaccaggcatggtgagagtttacataatgttagaggaagagtcggtggtgatacagttctaagtgaaactggcgaactttatgcaaagaaactagccaactttatagaaaagcggctcaaatgtgagaaaacagcaactatatggaccagtacccttcagagaacaattttgacagcaagtccaattgttggattccccaaggtatttggttacacgatttaggagtcttcttaaagaactgttgctatgtaagtacagcaagattgctcgacttgtgttatttgtagatacaatggcgtgctcttgatgagatcaattctggagtgtgtgatgggatgacttatgaagagataaagaaaatcatgcccgaggaatttgagtcacgaaagaaggacaagctaagataccgctacccccgtggagaatcttacctcgatgtgatacagaggctggaacccgtcatcatcgagctagaacgccagcgtgcaccagtggttgtcatatctcatcaggctgtactgcgagcactgtatgcatatttcgcggaccgtcctttgagagaagttccagagatagagatgccactacacaccataatcgagatacaaatgggcgtcacgggtgtggaagagaagaggtacaaactcatggactgaatgaatacataaaagcagctggttggctgtttcatacagcaagtacacataacacagaagccttttcccttctctctctctctccacacggtgttcagtgtaatttctttggaaaaaagacatgttgaacattgtaaagaaaaaactaataaggaactgtaaaaatggcatgcttactgtaacgaataaggaatacagactgggggtctccaatgcttattcagaaacatattccgtcaaa

SEQ ID NO: 135254 - DNA, 3636 bp, Zea Mays
caacggttccctccattaaaagaccttcccctccatcaccaccccccgattccactcccacgtgctgctccacttgcgccgccacgttatacctctgggctgtagccatggggacgtcggggtccaagggcatcgacggcgtcggcgcagtttctggcgtcggcgctggcgcggcgggccttggcggcgtcggcgccggcggggacgggggcgagggcgccgccgcggaggcgtggcatggcggggcgcagctgtacgtgtcgctcaagatggagaacgcgttgatcagcggcgacctcgtcccgcacgtgtatggctccgagcccatcatcggcacctgggacccctcccgcgccctcgccatggaaagggagctcgcgtccatgtgggtgctcagcttcgtcgtgccgccggaccatgaaacactggacttcaagttcttgctgaagcccaaagacgctgaaaccccgtgcatcatcgaggaaggacccacacggctcctcaccggaggcatgctagagggtgatgtgagggttgcactgttcaagctcaatggagatgatgaggtgctcgagtttggggtggtcaacaaggcggaccttgtatcaccgcttgaacttgctgcaagctggagggtgtacaaggagaactttcagccttccaaagttcgggggatccctgatatcagtatcaatgtcacacccactaatggagctgaggaaggatcagcggctactttggaacttgacttggaacattatgttgttccgtccccgccaactgcaccaccaaatggatatgctgcaaaccttgctgcgactccagcatccgtgattcaaactgaggcattgttgacaaatgatatccttctaagtgatgggattcagagtccaagtagtgtttctgcaaaattagaagattgtactaaccacaagaatattgaggcctgggcaacagattcttctaagaaaattcagaattccggactcattgaatcaaaatcagttggcacctttacaccaatgcaaaagctagatggtcaaaaggggctgttcgttgacaggggtgttggctcttctatgcttccaaaatcagccagtgcatgctccttggcatctgggtttagttttggatcagcaaagacaatgccagaagcagcaggagctgttgcagctgcagctgtagctgatcgtttgcatgggtcaaaggaggaccggaagctggccattgttttggttggcctaccagctcgtggtaaaaccttcactgcagttaagcttacaaggtaccttcgttggttgggccatgaaactagacatttcaatgttgggaagtatcgccgtcttaagcttggagcaaatcagtctgcagattttttccgtgatgataatcctgaaggtattgaggcacgtaatgaggtggctgctttagcaatggaggacatgatagattggatgaatggtggaggtcaggttggtatatttgacgcaacaaacagcacaagaaagcgaagatatatgctaatgaaaatggctgaaggtaactgtaagattatatttttggagacaatatgtaatgatccaaacataattgaaagaaacatacggctgaagatccaacaaagtccagactatgctgaacagctagattatgaagctggactggaggacttcaaggaacgtttgattaattatgaaaaggtctacgagccagtaggggaaggttcttacatcaaaatgattgacatggtaaaggggcaagatggtcagttacaggtaaataatatcagcggttatctccctgggaggattgtcttcttcttggtgaactctcatcttacaccacgacctattttgcttaccaggcatggtgagagtttacataatgttagaggaagagtcggtggtgatacagttctaagtgaaactggcgaactttatgcaaagaaactagccaactttatagaaaagcggctcaaatgtgagaaaacagcaactatatggaccagtacccttcagagaacaattttgacagcaagtccaattgttggattccccaagatacaatggcgtgctcttgatgagatcaattctggagtgtgtgatgggatgacttatgaagagataaagaaaatcatgcccgaggaatttgagtcacgaaagaaggacaagctaagataccgctacccccgtggagaatcttacctcgatgtgatacagaggctggaacccgtcatcatcgagctagaacgccagcgtgcaccagtggttgtcatatctcatcaggctgtactgcgagcactgtatgcatatttcgcggaccgtcctttgagagaagttccagagatagagatgccactacacaccataatcgagatacaaatgggcgtcacgggtgtggaagagaagaggtacaaactcatggactgaatgaatacataaaagcagctggttggctgtttcatacagcaagtacacataacacagaagccttttcccttctctctctctctccacacggtgttcagtgtaatttctttggaaaaaagacatgttgaacattgtaaagaaaaaactaataaggaactgtaaaaatggcatgcttactgtaacgaataaggaatacagactgggggtctccaatgcttattcagaaacatattccgtcaaatcggttgatcctgtggctgatgggaccaatgaaccgtaatgcctttgccttggttgtactagtagatctgtacacgacctgtgccaaactatgaactgtcatgtcctcctgtgcccatgtgaggacacaaggcaggccgttttcgtgctccagaagctctgctgaaattatggcgtggccctggactgggtgccaaattcccctcgattccatgcggcatccatgaacgccctcacgatgcccctgtctgccttcaaatatatagctcagtcgccgcttggtccggtacggcttcatgtgtgcgtgcgtgattgaagacggaggcccggaggtgcgctgtcggcactggccatgtcgctggctcgttacgacgccaacgtcctgctggccgcggtgaccgcgctctcggcggctgtcgctttcgtcgcggcgcttcacctctacgcgcggtgcctcctgcagcggcgcgtcgccctcgcggaaggcagccctcgcgtggtcgcgctgcagcggcagcgcccgccggacggctacgtggtggaggtcgtccgcatcgtcgaagacgcaagcgtgtgcggccagcaggctgcggggctggacgccaaggcgctgcgcgcgctgccggtgttcacgttggagtccgagcaggccaaggaagaaggcggcgtcgctgccgagctgcacgggcagtgcgtggtgtgcctcggggagatggaggatggcgagctggggaggctgctcccggggtgccgccacgtgttccacgttgagtgcatcgacacgtggctcggggtgagctcgacctgcccggtgtgccggacggcagctacgcctgccgctccgtcggccgtcggcgtggaccacggtggcggggaagagtccatagctgttgagtgctagtgtgatgtacaaaaaaaggaaggttaatcataaataaatggatgcaaggctgaaatcttttgtgct

SEQ ID NO: 135255 - DNA, 876 bp, Zea Mays
atgaactgtcatgtcctcctgtgcccatgtgaggacacaaggcaggccgttttcgtgctccagaagctctgctgaaattatggcgtggccctggactgggtgccaaattcccctcgattccatgcggcatccatgaacgccctcacgatgcccctgtctgccttcaaatatatagctcagtcgccgcttggtccggtacggcttcatgtgtgcgtgcgtgattgaagacggaggcccggaggtgcgctgtcggcactggccatgtcgctggctcgttacgacgccaacgtcctgctggccgcggtgaccgcgctctcggcggctgtcgctttcgtcgcggcgcttcacctctacgcgcggtgcctcctgcagcggcgcgtcgccctcgcggaaggcagccctcgcgtggtcgcgctgcagcggcagcgcccgccggacggctacgtggtggaggtcgtccgcatcgtcgaagacgcaagcgtgtgcggccagcaggctgcggggctggacgccaaggcgctgcgcgcgctgccggtgttcacgttggagtccgagcaggccaaggaagaaggcggcgtcgctgccgagctgcacgggcagtgcgtggtgtgcctcggggagatggaggatggcgagctggggaggctgctcccggggtgccgccacgtgttccacgttgagtgcatcgacacgtggctcggggtgagctcgacctgcccggtgtgccggacggcagctacgcctgccgctccgtcggccgtcggcgtggaccacggtggcggggaagagtccatagctgttgagtgctagtgtgatgtacaaaaaaaggaaggttaatcataaataaatggatgcaaggctgaaatcttttgtgct

SEQ ID NO: 135256 - DNA, 119 bp, Zea Mays
caaagtatcattttttctccaagttgcggagaacatttcttttcttacactataagggaatgggtaaatagtatactattttgtgatgattgagttttttcttttgaaacaagccaaca

SEQ ID NO: 135257 - DNA, 4779 bp, Zea Mays
cggaagaagccgcaccaggagcaaattcctcctctctcgagggcggttgcgtgctcgcgtgaagaaggccggggccctatctctccgatcgcggtagggcgttcgcagcgccgattcgagccgacgattggccgtccgcgaaggtttagtgagatctggcctctgcaatagtcacttccttgaaagcagatataaggattattatagttggagttcaatctttggggacatgaattgattctgttatttgtttgactccagtttggggcaatcacgggctttaggttgggtgaggtactatttgaacactgaactaaaaattggagtttcttttcttatttgacatcttgatgtgccaaaatcaagctctcgttaaaggtcaaacaaatgggcaaaatttgggctctttgattagttttttcagtgttaagtggtgaatctactgtggtaaatgggagagctgatccagttgatctatatgccttgtgaggactattttgtcctcaataagaatatatgttcaacatcactgttggacttgtgttgcccttagattgagatggtggcttctcttacaagattgtagcagccttttaactctcgaagagggggccccttcaattgtgagttttgagaagagccaattgctgctaccttcatatcattttgaggactggaaaaggtggaccagtgtcactcttagcatctaccacctagaactttagcccaatggtggtttatatgttgaaattcatcaagtataaaggcgagaagggtagtttcgttgcccacagttaacttgtagggagagaaatattgagatctgtggaaatattggctggagcagcagaatcactcaataattttgattttggatggtagaataggttggcgtaaatttggcaaaaagaacttaaacagttctttcacatcaaattagttgttctgaagattctttccaagtaaaaatcagcttatcatgtatgcttgggccatgaagtaacaattcttttgatcgctgaggatgtcatttgcagatagatattcaatgttgttggaaagagaaagatgctagttgaaaataggtgaattgatgatgttggaaacaagatgcatttattcataagacgaacaaagggacaacaatttcgaggaggaaccctttagctaggttgtgtgtgcatcattacatggacatgtgtgtacctgaaatgctagtgctatatctacctgccttcatattttctggggcttctggagctgatagatagtgtcatactttctgccttatgtccatttactttctgtttaacagaattatgtacaatttattattagtttctctcccaatgactaagcccgtttgacgggcttttcactccatgtaaagaattagaagattctagccaatcttcttatgttcaatataatgtatatgaactgtactgtttgataagtgctgccatataatttagttgcacactgtttcagcttctttggttattactgtattcctgttgttatagatgtttgtattgctgtcaataagttctttgccttcgaaaattggtcctttcacctggtgttgcacagagtcctggtgttgtgctgaactaatgttgtaaggcaactgtctttgttggttaggtattatgattttcatacttgatactggactactaaaatagcatctgtaatttgatcctaatcaatggattgtatagatgcttatctagtatttttctatcacatagagaaaagacaatgcagtctagatatgctgcttgtaattatcttttctaaagcttgtctaagttaaacgctatatatatctactagtctctttgttatcttcaaacaaacatcatcgtttgatactattacgacaataaatgatctccaatcctttatattggaggaataataatatgtaacattggttgggtgtagagattacattatatacgtctctaaccctaataggctacatgtgctaggctaggtccatgacacacaaccatgaagaggacccagatccttcatcacgaactttggttgaagtgtgtgtgtttgtgcatatataaaatcttaggcaccataataacatgacgtatacataatggttctcttcaacttgcatctacattattgacataacataggtatcgtctagctacttggtgaataaaacttcagagaatcatattttgttgttttcatatggtaaattcatatgttctttctcttcaacttgcatctacattattggcataacataggtatcgtctagctacttggtgactaaaacttcagaaagtcatatttcgttattttcatatggtaaaatcatatgttctatcattacttgtcaggccaagttactgccataaccaaagctataaaggtttctaattcttgtattgaggtctaaaagtcagatctccaccatatatattttattttgtagcagactattatgcaagtatgatgatgattccttctctagtttaattctgtaaactacatactgtagtcaaaaagttttatgtttactttgttaattacgtcggcatggtttctagtcttcttggatatatgacgaggacttcatttgtgttgtgtgttgcaccaaagttaaataagacactggatatgatggaatatttgggttttggcactggcagctctagcctgtgtgactgtaatctcacatcttgcggttctaaggtctgaatgattctttttagtttattacagaagtctaagtatttgtggttctctgtatatattttgtttctaaatctacaagtatatttgcagctgcaacttgcttttctagaatactaatgccaaccctatattttttcaggttaaacaaaatcaaatccccctgttcatgtgttatggcagggcatcatcataataacacacatgcctccaggatggatcatgtgaacaggttccagagtgaagcacagccttttggcccaaagttatttatgcattctagaactgatgcagcaaatggagctctaccatcaggttatgtgggcgcaccaataagaccaaatggcattccattctcaagtcacaccgggcaatctcatattcagcacagtgatgctcctggaaccatgcttgcatcctattctggctatcctcttgctggaagctccagtagcacctatgcaccacataatactcatcatctgcctgctttgagctatccacataggtctgatgataacttcattctgagttcccatatggatgacagaagggttgcactgaagcggagaaatccaattatttatccagtggatggagtcaataatgggagctgttatgctggcagttcatctaatcctcagttcccatgctacatgcctccaaatcctattcctgctcctgaaccctgccctcctcgaataacatcaaatatgggttcaagctactggactgatcagccctttggtagcaatggaggatctcagaggaatgtgagaggtcgccatgatcacaatcctatccatttgggacacaatccaggtgtagcttgcgcaacaagcagcactcatgggccaccacaccatgctaatgtaattggtcctcaaagtacagcagtgccacaaaatagagcatatttttctatacctccaagagtgactgccccaggcagcgatggaaactgtagcatggttttcagggaagggacatactactctgctccgcagaggaccaacataaatgccccccctgtcctagcacctcctggttcttctgatagtctacattttgtgcatggtgggtatgccccaagagcagcccctcctaacagcatcagcacatatcctgccccggcttttgcgactcctaacaactcagtgacagttacccatgagcctgatatcccttgctatcgacctgccgtccctggctatccgcctgctacctcagcagcagcagcagcagcaagtgttcatgctgaaggtgctgctgcatcttcgagacatctaggtcatgtggctctaggttccagtggtagtgcaaggagtagaaggctgagggattcataccatgcttttcgtccactggttattgaagaaaataacttgagaggaccagcaaccgagcgttttatgatgctaaatcagttatttatccatgaatcgagagaagattctgaccctcactgggacatgaggctggacattgatgatatgagttatgaggagctgctggctttgggagaacgaataggcaatgtcaacacgggcctagctgatgaaaaactttcaagctgtgtgacggagataccctgctgcagctctgcccgtactcatgatgataatgagagcgcaagatgtgtaatttgcctggaggattacaaattcgaggactctgtcgggaagctaaaatgcaatcacaagtatcacgcagactgcatcaagaaatggctgcaggtgaagaacgcttgcccagtctgcaaagcttctgcggcagatgacggcggaggcaccgaatgaagcgccctgccgcccccattcaccctatctcaggcgaagctgtactggctgatctggtttgctgtgtgtaaataatggtcctgaaacggattatttgtgagctgaattaaactcgacatgtaaatttaatcctcaagctagttgcaaattgatggcagcggttagccctacgtgtcagccgtctgacgtaactgcagagagaaaacgtttgcatgcatatgtacagctcgatccaatagaggttattaaatgt

SEQ ID NO: 135258 - DNA, 4628 bp, Zea Mays
cggaagaagccgcaccaggagcaaattcctcctctctcgagggcggttgcgtgctcgcgtgaagaaggccggggccctatctctccgatcgcggtagggcgttcgcagcgccgattcgagccgacgattggccgtccgcgaaggtactatttgaacactgaactaaaaattggagtttcttttcttatttgacatcttgatgtgccaaaatcaagctctcgttaaaggtcaaacaaatgggcaaaatttgggctctttgattagttttttcagtgttaagtggtgaatctactgtggtaaatgggagagctgatccagttgatctatatgccttgtgaggactattttgtcctcaataagaatatatgttcaacatcactgttggacttgtgttgcccttagattgagatggtggcttctcttacaagattgtagcagccttttaactctcgaagagggggccccttcaattgtgagttttgagaagagccaattgctgctaccttcatatcattttgaggactggaaaaggtggaccagtgtcactcttagcatctaccacctagaactttagcccaatggtggtttatatgttgaaattcatcaagtataaaggcgagaagggtagtttcgttgcccacagttaacttgtagggagagaaatattgagatctgtggaaatattggctggagcagcagaatcactcaataattttgattttggatggtagaataggttggcgtaaatttggcaaaaagaacttaaacagttctttcacatcaaattagttgttctgaagattctttccaagtaaaaatcagcttatcatgtatgcttgggccatgaagtaacaattcttttgatcgctgaggatgtcatttgcagatagatattcaatgttgttggaaagagaaagatgctagttgaaaataggtgaattgatgatgttggaaacaagatgcatttattcataagacgaacaaagggacaacaatttcgaggaggaaccctttagctaggttgtgtgtgcatcattacatggacatgtgtgtacctgaaatgctagtgctatatctacctgccttcatattttctggggcttctggagctgatagatagtgtcatactttctgccttatgtccatttactttctgtttaacagaattatgtacaatttattattagtttctctcccaatgactaagcccgtttgacgggcttttcactccatgtaaagaattagaagattctagccaatcttcttatgttcaatataatgtatatgaactgtactgtttgataagtgctgccatataatttagttgcacactgtttcagcttctttggttattactgtattcctgttgttatagatgtttgtattgctgtcaataagttctttgccttcgaaaattggtcctttcacctggtgttgcacagagtcctggtgttgtgctgaactaatgttgtaaggcaactgtctttgttggttaggtattatgattttcatacttgatactggactactaaaatagcatctgtaatttgatcctaatcaatggattgtatagatgcttatctagtatttttctatcacatagagaaaagacaatgcagtctagatatgctgcttgtaattatcttttctaaagcttgtctaagttaaacgctatatatatctactagtctctttgttatcttcaaacaaacatcatcgtttgatactattacgacaataaatgatctccaatcctttatattggaggaataataatatgtaacattggttgggtgtagagattacattatatacgtctctaaccctaataggctacatgtgctaggctaggtccatgacacacaaccatgaagaggacccagatccttcatcacgaactttggttgaagtgtgtgtgtttgtgcatatataaaatcttaggcaccataataacatgacgtatacataatggttctcttcaacttgcatctacattattgacataacataggtatcgtctagctacttggtgaataaaacttcagagaatcatattttgttgttttcatatggtaaattcatatgttctttctcttcaacttgcatctacattattggcataacataggtatcgtctagctacttggtgactaaaacttcagaaagtcatatttcgttattttcatatggtaaaatcatatgttctatcattacttgtcaggccaagttactgccataaccaaagctataaaggtttctaattcttgtattgaggtctaaaagtcagatctccaccatatatattttattttgtagcagactattatgcaagtatgatgatgattccttctctagtttaattctgtaaactacatactgtagtcaaaaagttttatgtttactttgttaattacgtcggcatggtttctagtcttcttggatatatgacgaggacttcatttgtgttgtgtgttgcaccaaagttaaataagacactggatatgatggaatatttgggttttggcactggcagctctagcctgtgtgactgtaatctcacatcttgcggttctaaggtctgaatgattctttttagtttattacagaagtctaagtatttgtggttctctgtatatattttgtttctaaatctacaagtatatttgcagctgcaacttgcttttctagaatactaatgccaaccctatattttttcaggttaaacaaaatcaaatccccctgttcatgtgttatggcagggcatcatcataataacacacatgcctccaggatggatcatgtgaacaggttccagagtgaagcacagccttttggcccaaagttatttatgcattctagaactgatgcagcaaatggagctctaccatcaggttatgtgggcgcaccaataagaccaaatggcattccattctcaagtcacaccgggcaatctcatattcagcacagtgatgctcctggaaccatgcttgcatcctattctggctatcctcttgctggaagctccagtagcacctatgcaccacataatactcatcatctgcctgctttgagctatccacataggtctgatgataacttcattctgagttcccatatggatgacagaagggttgcactgaagcggagaaatccaattatttatccagtggatggagtcaataatgggagctgttatgctggcagttcatctaatcctcagttcccatgctacatgcctccaaatcctattcctgctcctgaaccctgccctcctcgaataacatcaaatatgggttcaagctactggactgatcagccctttggtagcaatggaggatctcagaggaatgtgagaggtcgccatgatcacaatcctatccatttgggacacaatccaggtgtagcttgcgcaacaagcagcactcatgggccaccacaccatgctaatgtaattggtcctcaaagtacagcagtgccacaaaatagagcatatttttctatacctccaagagtgactgccccaggcagcgatggaaactgtagcatggttttcagggaagggacatactactctgctccgcagaggaccaacataaatgccccccctgtcctagcacctcctggttcttctgatagtctacattttgtgcatggtgggtatgccccaagagcagcccctcctaacagcatcagcacatatcctgccccggcttttgcgactcctaacaactcagtgacagttacccatgagcctgatatcccttgctatcgacctgccgtccctggctatccgcctgctacctcagcagcagcagcagcagcaagtgttcatgctgaaggtgctgctgcatcttcgagacatctaggtcatgtggctctaggttccagtggtagtgcaaggagtagaaggctgagggattcataccatgcttttcgtccactggttattgaagaaaataacttgagaggaccagcaaccgagcgttttatgatgctaaatcagttatttatccatgaatcgagagaagattctgaccctcactgggacatgaggctggacattgatgatatgagttatgaggagctgctggctttgggagaacgaataggcaatgtcaacacgggcctagctgatgaaaaactttcaagctgtgtgacggagataccctgctgcagctctgcccgtactcatgatgataatgagagcgcaagatgtgtaatttgcctggaggattacaaattcgaggactctgtcgggaagctaaaatgcaatcacaagtatcacgcagactgcatcaagaaatggctgcaggtgaagaacgcttgcccagtctgcaaagcttctgcggcagatgacggcggaggcaccgaatgaagcgccctgccgcccccattcaccctatctcaggcgaagctgtactggctgatctggtttgctgtgtgtaaataatggtcctgaaacggattatttgtgagctgaattaaactcgacatgtaaatttaatcctcaagctagttgcaaattgatggcagcggttagccctacgtgtcagccgtctgacgtaactgcagagagaaaacgtttgcatgcatatgtacagctcgatccaatagaggttattaaatgt

SEQ ID NO: 135259 - DNA, 3450 bp, Zea Mays
cggaagaagccgcaccaggagcaaattcctcctctctcgagggcggttgcgtgctcgcgtgaagaaggccggggccctatctctccgatcgcggtagggcgttcgcagcgccgattcgagccgacgattggccgtccgcgaaggtttagtgagatctggcctctgcaatagtcacttccttgaaagcagatataaggattattatagttggagttcaatctttggggacatgaattgattctgttatttgtttgactccagtttggggcaatcacgggctttaggttgggtgaggtattgttgtttcaatgaattcaggtactcaggttagtgatagtttcagaatattgtagttacattgtggcggtgagtaagctcttaagtcttaactcatgatgagaaccttaattcattgggtactacatttactccttttttagaaaaaatatacatttatgtttttctttcttcccttagagtccatagcctgatatgcgtatttccttctctgtagctcttccattgtccaactgaactttggaagttcttctagagaattatctagctctcagtttttttcagatatttgcatttattacttcaaaaatttgaattgttctattaatgacattgcaggtactatttgaacactgaactaaaaattggagtttcttttcttatttgacatcttgatgtgccaaaatcaagctctcgttaaaggtcaaacaaatgggcaaaatttgggctctttgattagttttttcagtgttaagtggtgaatctactgtggtaaatgggagagctgatccagttgatctatatgccttgtgaggactattttgtcctcaataagaatatatgttcaacatcactgttggacttgtgttgcccttagattgagatggtggcttctcttacaagattgtagcagccttttaactctcgaagagggggccccttcaattgtgagttttgagaagagccaattgctgctaccttcatatcattttgaggactggaaaaggtggaccagtgtcactcttagcatctaccacctagaactttagcccaatggtggtttatatgttgaaattcatcaagtataaaggcgagaagggtagtttcgttgcccacagttaacttgtagggagagaaatattgagatctgtggaaatattggctggagcagcagaatcactcaataattttgattttggatggtagaataggttggcgtaaatttggcaaaaagaacttaaacagttctttcacatcaaattagttgttctgaagattctttccaagtaaaaatcagcttatcatgtatgcttgggccatgaagtaacaattcttttgatcgctgaggatgtcatttgcagatagatattcaatgttgttggaaagagaaagatgctagttgaaaataggtgaattgatgatgttggaaacaagatgcatttattcataagacgaacaaagggacaacaatttcgaggaggaaccctttagctaggttgtgtgtgcatcattacatggacatgttaaacaaaatcaaatccccctgttcatgtgttatggcagggcatcatcataataacacacatgcctccaggatggatcatgtgaacaggttccagagtgaagcacagccttttggcccaaagttatttatgcattctagaactgatgcagcaaatggagctctaccatcaggttatgtgggcgcaccaataagaccaaatggcattccattctcaagtcacaccgggcaatctcatattcagcacagtgatgctcctggaaccatgcttgcatcctattctggctatcctcttgctggaagctccagtagcacctatgcaccacataatactcatcatctgcctgctttgagctatccacataggtctgatgataacttcattctgagttcccatatggatgacagaagggttgcactgaagcggagaaatccaattatttatccagtggatggagtcaataatgggagctgttatgctggcagttcatctaatcctcagttcccatgctacatgcctccaaatcctattcctgctcctgaaccctgccctcctcgaataacatcaaatatgggttcaagctactggactgatcagccctttggtagcaatggaggatctcagaggaatgtgagaggtcgccatgatcacaatcctatccatttgggacacaatccaggtgtagcttgcgcaacaagcagcactcatgggccaccacaccatgctaatgtaattggtcctcaaagtacagcagtgccacaaaatagagcatatttttctatacctccaagagtgactgccccaggcagcgatggaaactgtagcatggttttcagggaagggacatactactctgctccgcagaggaccaacataaatgccccccctgtcctagcacctcctggttcttctgatagtctacattttgtgcatggtgggtatgccccaagagcagcccctcctaacagcatcagcacatatcctgccccggcttttgcgactcctaacaactcagtgacagttacccatgagcctgatatcccttgctatcgacctgccgtccctggctatccgcctgctacctcagcagcagcagcagcagcaagtgttcatgctgaaggtgctgctgcatcttcgagacatctaggtcatgtggctctaggttccagtggtagtgcaaggagtagaaggctgagggattcataccatgcttttcgtccactggttattgaagaaaataacttgagaggaccagcaaccgagcgttttatgatgctaaatcagttatttatccatgaatcgagagaagattctgaccctcactgggacatgaggctggacattgatgatatgagttatgaggagctgctggctttgggagaacgaataggcaatgtcaacacgggcctagctgatgaaaaactttcaagctgtgtgacggagataccctgctgcagctctgcccgtactcatgatgataatgagagcgcaagatgtgtaatttgcctggaggattacaaattcgaggactctgtcgggaagctaaaatgcaatcacaagtatcacgcagactgcatcaagaaatggctgcaggtgaagaacgcttgcccagtctgcaaagcttctgcggcagatgacggcggaggcaccgaatgaagcgccctgccgcccccattcaccctatctcaggcgaagctgtactggctgatctggtttgctgtgtgtaaataatggtcctgaaacggattatttgtgagctgaattaaactcgacatgtaaatttaatcctcaagctagttgcaaattgatggcagcggttagccctacgtgtcagccgtctgacgtaactgcagagagaaaacgtttgcatgcatatgtacagctcgatccaatagaggttattaaatgt

SEQ ID NO: 135260 - DNA, 3132 bp, Zea Mays
cggaagaagccgcaccaggagcaaattcctcctctctcgagggcggttgcgtgctcgcgtgaagaaggccggggccctatctctccgatcgcggtagggcgttcgcagcgccgattcgagccgacgattggccgtccgcgaaggtttagtgagatctggcctctgcaatagtcacttccttgaaagcagatataaggattattatagttggagttcaatctttggggacatgaattgattctgttatttgtttgactccagtttggggcaatcacgggctttaggttgggtgaggtattgttgtttcaatgaattcaggtactatttgaacactgaactaaaaattggagtttcttttcttatttgacatcttgatgtgccaaaatcaagctctcgttaaaggtcaaacaaatgggcaaaatttgggctctttgattagttttttcagtgttaagtggtgaatctactgtggtaaatgggagagctgatccagttgatctatatgccttgtgaggactattttgtcctcaataagaatatatgttcaacatcactgttggacttgtgttgcccttagattgagatggtggcttctcttacaagattgtagcagccttttaactctcgaagagggggccccttcaattgtgagttttgagaagagccaattgctgctaccttcatatcattttgaggactggaaaaggtggaccagtgtcactcttagcatctaccacctagaactttagcccaatggtggtttatatgttgaaattcatcaagtataaaggcgagaagggtagtttcgttgcccacagttaacttgtagggagagaaatattgagatctgtggaaatattggctggagcagcagaatcactcaataattttgattttggatggtagaataggttggcgtaaatttggcaaaaagaacttaaacagttctttcacatcaaattagttgttctgaagattctttccaagtaaaaatcagcttatcatgtatgcttgggccatgaagtaacaattcttttgatcgctgaggatgtcatttgcagatagatattcaatgttgttggaaagagaaagatgctagttgaaaataggtgaattgatgatgttggaaacaagatgcatttattcataagacgaacaaagggacaacaatttcgaggaggaaccctttagctaggttgtgtgtgcatcattacatggacatgttaaacaaaatcaaatccccctgttcatgtgttatggcagggcatcatcataataacacacatgcctccaggatggatcatgtgaacaggttccagagtgaagcacagccttttggcccaaagttatttatgcattctagaactgatgcagcaaatggagctctaccatcaggttatgtgggcgcaccaataagaccaaatggcattccattctcaagtcacaccgggcaatctcatattcagcacagtgatgctcctggaaccatgcttgcatcctattctggctatcctcttgctggaagctccagtagcacctatgcaccacataatactcatcatctgcctgctttgagctatccacataggtctgatgataacttcattctgagttcccatatggatgacagaagggttgcactgaagcggagaaatccaattatttatccagtggatggagtcaataatgggagctgttatgctggcagttcatctaatcctcagttcccatgctacatgcctccaaatcctattcctgctcctgaaccctgccctcctcgaataacatcaaatatgggttcaagctactggactgatcagccctttggtagcaatggaggatctcagaggaatgtgagaggtcgccatgatcacaatcctatccatttgggacacaatccaggtgtagcttgcgcaacaagcagcactcatgggccaccacaccatgctaatgtaattggtcctcaaagtacagcagtgccacaaaatagagcatatttttctatacctccaagagtgactgccccaggcagcgatggaaactgtagcatggttttcagggaagggacatactactctgctccgcagaggaccaacataaatgccccccctgtcctagcacctcctggttcttctgatagtctacattttgtgcatggtgggtatgccccaagagcagcccctcctaacagcatcagcacatatcctgccccggcttttgcgactcctaacaactcagtgacagttacccatgagcctgatatcccttgctatcgacctgccgtccctggctatccgcctgctacctcagcagcagcagcagcagcaagtgttcatgctgaaggtgctgctgcatcttcgagacatctaggtcatgtggctctaggttccagtggtagtgcaaggagtagaaggctgagggattcataccatgcttttcgtccactggttattgaagaaaataacttgagaggaccagcaaccgagcgttttatgatgctaaatcagttatttatccatgaatcgagagaagattctgaccctcactgggacatgaggctggacattgatgatatgagttatgaggagctgctggctttgggagaacgaataggcaatgtcaacacgggcctagctgatgaaaaactttcaagctgtgtgacggagataccctgctgcagctctgcccgtactcatgatgataatgagagcgcaagatgtgtaatttgcctggaggattacaaattcgaggactctgtcgggaagctaaaatgcaatcacaagtatcacgcagactgcatcaagaaatggctgcaggtgaagaacgcttgcccagtctgcaaagcttctgcggcagatgacggcggaggcaccgaatgaagcgccctgccgcccccattcaccctatctcaggcgaagctgtactggctgatctggtttgctgtgtgtaaataatggtcctgaaacggattatttgtgagctgaattaaactcgacatgtaaatttaatcctcaagctagttgcaaattgatggcagcggttagccctacgtgtcagccgtctgacgtaactgcagagagaaaacgtttgcatgcatatgtacagctcgatccaatagaggttattaaatgt

SEQ ID NO: 135261 - DNA, 2192 bp, Zea Mays
gcaccaggagcaaattcctcctctctcgagggcggttgcgtgctcgcgtgaagaaggccggggccctatctctccgatcgcggtagggcgttcgcagcgccgattcgagccgacgattggccgtccgcgaagatagatattcaatgttgttggaaagagaaagatgctagttgaaaataggtgaattgatgatgttggaaacaagatgcatttattcataagacgaacaaagggacaacaatttcgaggaggaaccctttagctaggttaaacaaaatcaaatccccctgttcatgtgttatggcagggcatcatcataataacacacatgcctccaggatggatcatgtgaacaggttccagagtgaagcacagccttttggcccaaagttatttatgcattctagaactgatgcagcaaatggagctctaccatcaggttatgtgggcgcaccaataagaccaaatggcattccattctcaagtcacaccgggcaatctcatattcagcacagtgatgctcctggaaccatgcttgcatcctattctggctatcctcttgctggaagctccagtagcacctatgcaccacataatactcatcatctgcctgctttgagctatccacataggtctgatgataacttcattctgagttcccatatggatgacagaagggttgcactgaagcggagaaatccaattatttatccagtggatggagtcaataatgggagctgttatgctggcagttcatctaatcctcagttcccatgctacatgcctccaaatcctattcctgctcctgaaccctgccctcctcgaataacatcaaatatgggttcaagctactggactgatcagccctttggtagcaatggaggatctcagaggaatgtgagaggtcgccatgatcacaatcctatccatttgggacacaatccaggtgtagcttgcgcaacaagcagcactcatgggccaccacaccatgctaatgtaattggtcctcaaagtacagcagtgccacaaaatagagcatatttttctatacctccaagagtgactgccccaggcagcgatggaaactgtagcatggttttcagggaagggacatactactctgctccgcagaggaccaacataaatgccccccctgtcctagcacctcctggttcttctgatagtctacattttgtgcatggtgggtatgccccaagagcagcccctcctaacagcatcagcacatatcctgccccggcttttgcgactcctaacaactcagtgacagttacccatgagcctgatatcccttgctatcgacctgccgtccctggctatccgcctgctacctcagcagcagcagcagcagcaagtgttcatgctgaaggtgctgctgcatcttcgagacatctaggtcatgtggctctaggttccagtggtagtgcaaggagtagaaggctgagggattcataccatgcttttcgtccactggttattgaagaaaataacttgagaggaccagcaaccgagcgttttatgatgctaaatcagttatttatccatgaatcgagagaagattctgaccctcactgggacatgaggctggacattgatgatatgagttatgaggagctgctggctttgggagaacgaataggcaatgtcaacacgggcctagctgatgaaaaactttcaagctgtgtgacggagataccctgctgcagctctgcccgtactcatgatgataatgagagcgcaagatgtgtaatttgcctggaggattacaaattcgaggactctgtcgggaagctaaaatgcaatcacaagtatcacgcagactgcatcaagaaatggctgcaggtgaagaacgcttgcccagtctgcaaagcttctgcggcagatgacggcggaggcaccgaatgaagcgccctgccgcccccattcaccctatctcaggcgaagctgtactggctgatctggtttgctgtgtgtaaataatggtcctgaaacggattatttgtgagctgaattaaactcgacatgtaaatttaatcctcaagctagttgcaaattgatggcagcggttagccctacgtgtcagccgtctgacgtaactgcagagagaaaacgtttgcatgcatatgtacagctcgatccaatagaggttattaaatgttaacaatttattagtt

SEQ ID NO: 135262 - DNA, 1287 bp, Zea Mays
ctggggcccacacgaaaaaatagcccgcaagatcttgcacatcttccccttttgcccggcagcactcgtcctagtgtactatcatctcgtcgctcggctcccgaccgcatcgcgatcagtcatctcctgcgtctcgttctcgccggagatcagacgcgccaccgccgggcgatggatgcctcctaccgccgcgccggtgccggaagcggttctgctccccgctccgtcgaggacatctacaaggactaccgcgcccgccgctccgccgtcctccgcgccctcacccacgacgtcgaggagttctacgcgctgtgcgatccagagaaggagaacctgtgcctatacgggtacgcaaacgaagcgtgggaggtggcgctgccggcggaggaggtgcccacggagctgccggagcctgcgctcgggatcaacttcgcgcgcgacgggatgaaccgtcgcgactggctcgcgctcgtcgccgtccactccgactcgtggctcatatccgtcgcattctactacgccgcgcggctcaaccgaagtgatcggaagcgtttgtttggcatgatgaatgacctgccaactgtttttgaagtcgtctccggtggtgtgaagcaatctaaggaaagggacagatccggtactgacaacagtggtagaaataaactgtcagcaaagcaaacaagcgagccacggttagaaaataatgccagggagcctgacgagggctacgatgaagacgacggctaccacagcgaaaccttgtgcgggacatgtggtggaatatacagcgcagacgagttctggatcgggtgtgatgtgtgcgagaagtggtaccatggcaagtgcgtgaagatcactcccgcgaaggcggagagcataaagcagtacaagtgcccgagctgctgcaattcaaaaagacctaggccgctgtaggcctgtagcaccgccctcctcactggaggacggccatggatggaagactgaacaaacaggaggtcagagctactccttggcgcaaggccaataccaccttgccatgtttactgtatcttttcgattaagcttacatatgatggtgatgctaatgtgggcgggaagatcacacctagtatttattataacctttttgtggtttctccatgccatggagagttatggtagcctgtatgttgccggagaaggaataggggcagaggaagcctttgtaacgtttctaaaggtgaattgggcagcttatgccaagataataacccgtgaggtttatgttaatatattttatttgataca

SEQ ID NO: 135263 - DNA, 1282 bp, Zea Mays
ctggggcccacacgaaaaaatagcccgcaagatcttgcacatcttccccttttgcccggcagcactcgtcctagtgtactatcatctcgtcgctcggctcccgaccgcatcgcgatcagtcatctcctgcgtctcgttctcgccggagatcagacgcgccaccgccgggcgatggatgcctcctaccgccgcgccggtgccggaagcggttctgctccccgctccgtcgaggacatctacaaggactaccgcgcccgccgctccgccgtcctccgcgccctcacccacgacgtcgaggagttctacgcgctgtgcgatccaggagaacctgtgcctatacgggtacgcaaacgaagcgtgggaggtggcgctgccggcggaggaggtgcccacggagctgccggagcctgcgctcgggatcaacttcgcgcgcgacgggatgaaccgtcgcgactggctcgcgctcgtcgccgtccactccgactcgtggctcatatccgtcgcattctactacgccgcgcggctcaaccgaagtgatcggaagcgtttgtttggcatgatgaatgacctgccaactgtttttgaagtcgtctccggtggtgtgaagcaatctaaggaaagggacagatccggtactgacaacagtggtagaaataaactgtcagcaaagcaaacaagcgagccacggttagaaaataatgccagggagcctgacgagggctacgatgaagacgacggctaccacagcgaaaccttgtgcgggacatgtggtggaatatacagcgcagacgagttctggatcgggtgtgatgtgtgcgagaagtggtaccatggcaagtgcgtgaagatcactcccgcgaaggcggagagcataaagcagtacaagtgcccgagctgctgcaattcaaaaagacctaggccgctgtaggcctgtagcaccgccctcctcactggaggacggccatggatggaagactgaacaaacaggaggtcagagctactccttggcgcaaggccaataccaccttgccatgtttactgtatcttttcgattaagcttacatatgatggtgatgctaatgtgggcgggaagatcacacctagtatttattataacctttttgtggtttctccatgccatggagagttatggtagcctgtatgttgccggagaaggaataggggcagaggaagcctttgtaacgtttctaaaggtgaattgggcagcttatgccaagataataacccgtgaggtttatgttaatatattttatttgataca

SEQ ID NO: 135264 - DNA, 1318 bp, Zea Mays
actcgtcctagtgtactatcatctcgtcgctcggctcccgaccgcatcgcgatcagtcatctcctgcgtctcgttctcgccggagatcagacgcgccaccgccgggcgatggatgcctcctaccgccgcgccggtgccggaagcggttctgctccccgctccgtcgaggacatctacaaggactaccgcgcccgccgctccgccgtcctccgcgccctcacccacgacgtcgaggagttctacgcgctgtgcgatccaggtgagtctccttcccctcgcgatctctccgccgtggccttcgattcgatttgggtgcgagctgatggtctgtggttggggttggatgtcgctagagaaggagaacctgtgcctatacgggtacgcaaacgaagcgtgggaggtggcgctgccggcggaggaggtgcccacggagctgccggagcctgcgctcgggatcaacttcgcgcgcgacgggatgaaccgtcgcgactggctcgcgctcgtcgccgtccactccgactcgtggctcatatccgtcgcattctactacgccgcgcggctcaaccgaagtgatcggaagcgtttgtttggcatgatgaatgacctgccaactgtttttgaagtcgtctccggtggtgtgaagcaatctaaggaaagggacagatccggtactgacaacagtggtagaaataaactgtcagcaaagcaaacaagcgagccacggttagaaaataatgccagggagcctgacgagggctacgatgaagacgacggctaccacagcgaaaccttgtgcgggacatgtggtggaatatacagcgcagacgagttctggatcgggtgtgatgtgtgcgagaagtggtaccatggcaagtgcgtgaagatcactcccgcgaaggcggagagcataaagcagtacaagtgcccgagctgctgcaattcaaaaagacctaggccgctgtaggcctgtagcaccgccctcctcactggaggacggccatggatggaagactgaacaaacaggaggtcagagctactccttggcgcaaggccaataccaccttgccatgtttactgtatcttttcgattaagcttacatatgatggtgatgctaatgtgggcgggaagatcacacctagtatttattataacctttttgtggtttctccatgccatggagagttatggtagcctgtatgttgccggagaaggaataggggcagaggaagcctttgtaacgtttctaaaggtgaattgggcagcttatgccaagataataacccgtgaggtttatgttaatatattttatttgataca

SEQ ID NO: 135265 - DNA, 1177 bp, Zea Mays
actcgtcctagtgtactatcatctcgtcgctcggctcccgaccgcatcgcgatcagtcatctcctgcgtctcgttctcgccggagatcagacgcgccaccgccgggcgatggatgcctcctaccgccgcgccggtgccggaagcggttctgctccccgctccgtcgaggacatctacaaggactaccgcgcccgccgctccgccgtcctccgcgccctcacccacgacgtcgaggagttctacgcgctgtgcgatccagagaaggagaacctgtgcctatacgggtacgcaaacgaagcgtgggaggtggcgctgccggcggaggaggtgcccacggagctgccggagcctgcgctcgggatcaacttcgcgcgcgacgggatgaaccgtcgcgactggctcgcgctcgtcgccgtccactccgactcgtggctcatatccgtcgcattctactacgccgcgcggctcaaccgaagtgatcgtcgtctccggtggtgtgaagcaatctaaggaaagggacagatccggtactgacaacagtggtagaaataaactgtcagcaaagcaaacaagcgagccacggttagaaaataatgccagggagcctgacgagggctacgatgaagacgacggctaccacagcgaaaccttgtgcgggacatgtggtggaatatacagcgcagacgagttctggatcgggtgtgatgtgtgcgagaagtggtaccatggcaagtgcgtgaagatcactcccgcgaaggcggagagcataaagcagtacaagtgcccgagctgctgcaattcaaaaagacctaggccgctgtaggcctgtagcaccgccctcctcactggaggacggccatggatggaagactgaacaaacaggaggtcagagctactccttggcgcaaggccaataccaccttgccatgtttactgtatcttttcgattaagcttacatatgatggtgatgctaatgtgggcgggaagatcacacctagtatttattataacctttttgtggtttctccatgccatggagagttatggtagcctgtatgttgccggagaaggaataggggcagaggaagcctttgtaacgtttctaaaggtgaattgggcagcttatgccaagataataacccgtgaggtttatgttaatatattttatttgataca

SEQ ID NO: 135266 - DNA, 1317 bp, Zea Mays
cgtggcgcccttaacgatcatcctcatggatacgatatgatgtggcatgcagcgatccggatttgcccccggcatggcaggatacgtgaacataacgcagcaccgcggcggcaaggtgtcgttcatcgtggacgacgcggcggacagcgtcaagcccgtcacctacgtgaagcagatcgagagccaccgctacgactactcggtgctccaggtcagcggcgtcctgtcctccccggaggccgaggcacccgtcgccccgccggcgcccgtcaacctcaccgacatcctctccaagaagtactgcaagagcttcgcgggcctcctcgccgccgaccccaaggtcttcgacaccctcaacggcaccaaggacaccgcgctcaccgtcttctgccccgtcgacgcggcggtggccgccttcatgcccaagttcaagaacctcacggccaaggccaagacggccatcctgctgtaccacgccgtgccggactactactccatgcagttcctcaagtccaacaagggcaaggtcaccacgctcgccaccaccagcgtcgccaagaaggactacacctacgaagcggagagcaaggacgacaccgtcacgctcgacaccaccgtcgtcacctccaccatccaggccaccgtcagggacgacgacccgctcgccgtctacgcttgctccaagttcctgcagcctaaggagctgttcaaggccaaaaccgctgatctcgcgcctgcgccggctccacaagggcccaagaagaagagcaagaagaagcccaccggcacttcggcggcctccgcgccctcggacgatgaatctgcagatggcccgtctgccgacgacgactcgtccgatgatgccgcggacaaggctgccgccgcgccgtcgtacctgtccgctcgatgggtgaccgccgcagtgacgaccgccgtcgcgctggcgctggcggcgtaaggtgtgcgctcatgtgctatgttttttttataacttattggaccccctatcttcttttcttttgtccaagtcgtgtcccttccttgttggtgaacaaaataagaagggctatttttgttttttatatttattaccgcattccattaaaaaaaaattagaggtgtgtgtgagtgatgtaagtcttgattttgttcattgggttgtggtgatcattttgtaatggtagtggccaatggaattggagagtgggttaagttttcacatatgatactatatataaggcatcatatggagtttagaggtgcagcagtgtttgttgtttacacatgctttcaaatgttagactatataagatttta

SEQ ID NO: 135267 - DNA, 186 bp, Zea Mays
cagaagtgttccagttccgttctacgatggacccgtatttctgcaaggtacagctgcaatattgttttacagtattatgtatcgcaaattctacagattcataaggtcatactgttttgcatgttacatattcacatgacagaatactcaaacaaaacaaaaccaaacaaacgagaggaaaaaaaa

SEQ ID NO: 135268 - DNA, 1183 bp, Zea Mays
atgatgaagaagaaaaatgcgacaattgacattgacgatgcaaatgtagtcgaggttgataggagtgctaggaggctgcactggacacatgatgaagaagttggattggtcctgtttgggagagcttcacttcaaaaacttcagctttggttttccagtttcactataaaacagctccaacaaattgttaagcacataatgtctcgatacaatgaccgatatgaccataacaaccgatatgatcgtcatggtcgacatggaagtaacaccaagttgtacgtgggccaaatttctccatatacccggacacaggatcttgaggacattttcagaaaatatgggagattgcgcaatgtggatatgaagagggagtttggcttcgttgagtttactgatcctcgggatgcagatgatgcaagacatgaccttgatggccggatatttgatgggagtcacctcattgttgaatttgctagaggggcccaacgtggtccaggaggtgttcctctagatggcaaaggaccatcttttcctggccgctgttataactgtggaatggatgggcactgggttcgtgattgcaaagctggtgattggcgagataagtgctttcggtgtggagaactgggccatatagaaagaaactgcaagaacagttctaaggatctgaagcgtgggaggagctacttgaggtctgcatctcctcaccatgggaagggccgagggagaagctactcaaggtctctatctccttaccttggaaggggccgagggagaagctactcgaggtctccatctcattatcatcgcaggggcagaagctggagttacagtcggtcgcactcgccaaggaacaactctaaggcttatggtgaagaattgccatcaactagatctggttatagccgcggccccaggaggagctccccaccgatggagcgagctgaatgcaatggtggtagccccatgagaggtgaagctcgggggaagtgacagcgacctataaaatcactctgggattgtaaagtgtcaaacatttgttctgaactttttggtgactatgtgctgagactgaacttcgacaccagaagaatgtttagcggtgggttgtaaattctcagtaaagctctcctgaatgttgttggttatatgccgaggcatgtgacatgatgcctgaagagtt

SEQ ID NO: 135269 - DNA, 842 bp, Zea Mays
gaaccgccctcccgcccgccccaatctccgagatccacagggacgcaagacgctgctgatggcaaaaccaaggaaaactcgcacctcggctccagatccacccgtagccgcgttcggcttccggggtgtgctgtggtggggacagcggcgacgggtgacggggtggccgggtcggggtgggggtgcgggcagggcggtggtatggacggggtggacatcggcggcgggcttctcttctcgtggacttaccaccaccttgaccgcgacttgaattgctgatcagcgaccatgggaacccgcggcgtcgccctgctgctcctcacggtggtgttgctccaggcgctcctccccgcgtcgtcggagggcctggtgcgggtcgcgctgaagaaacagcccgtcgaccagaacggtcgcgtcgccacatgcctctccgtcgaggagaggcagcgcctcctcctccgcggcgccaacgccctgggctcaggcggtgaagacgactccgacgtcatcgcgctcaagaactacatgaacgcgcagtacgttggggagatcggcgtcggctcgccgcagcataagttcactgtcatcttcgacaccggcagttccaacctctgggtgccgtcctccaagtgctacttcttgatcgcttgctacttccactcgcgctacaagtcagggcagtcaagcacttacaagaagaacggtttgactcttcctttcttgtgttgttactgtattgttttcccgattttctcgttgtggactgagatctgcatcactttcgtcatacgtttgtatttcccagctggattttgattgttaggtacgcagtactgcacatc

SEQ ID NO: 135270 - DNA, 159 bp, Zea Mays
gacaatggcaactgaccacagaacattgttgaatgataacatctctgcaaatccaccagtgcaaacaaagactagaccatacatgtaggcaaaaacgaaatacttgtcgcagcacaagccagttgctacaccattgtcagtttgtcactaaacttggaa

SEQ ID NO: 135271 - DNA, 2143 bp, Zea Mays
acacgacatccaaatcgaagaacacgtcgctgacacaccacctctccctcgccgcattctccactctctggtcttcgccgtggtcggtgccttccaaatccaaaaaaccccaagccctagctgtagccgtcccccaaggtcgccgagatgtcttcgtggctgcgcagcgcggtgagccgggcagtggaggccggcggccgcagcggcgtcgcccgcgcggtcaaggggtacgccgataccgtcgcgcaccacgccggtcaggccgtcgcggacatcctccacgaccgcatgggcgttcagaactataaaagtttcaagaagacagtagcacgattggaagaggctgctgtatcatgccgtgggggtgaaagagttgaattgttgaaacgttggttaggagcattgcaagatgttgatgctgaaaatggaagttcagatttaaaggtgtctgaagctaatgacccttctggtgaaatggacactttgaaagcacaaactgttttgttctatgatgctgatattgatggtgcacctatgaatttttgtgatgtattcttgtacagccaagcacttgaaggtattacattgtccatgattctcgaacctccttctgaggaggaagtttcactgcttttggaaatattcagcatatgccttactggagggaaagaagtgaacaaagaaatcatgagtaatgtacaagacttggccaaggcattttcagaatacaaagatgaagtcctggtgaaacgtgaagagctgcttgagtatgcccaaagtatcatttcaggactgaagagaaatgctgacattgtgaggatagatgctgaaaccctagaattgcagagaaaactagacgagaagcagaaatcacgaggtcaatcacctgaatatcaagataaaacgtcagataagattgctgctgcaaatcttgaggtcttcaaagaagcacttggtgaactccgcttatgctctagagttgaagaacttctgctgaagaagaaatcaatcactcttggtgactccctggagattcattctcagaaggtagataaactaaaggttttagcagattccctggcatgttcatcctccaaagcagaacagcgtattttggagcacaggcgccagaaagaagatgctctcaactttcgtgtgaaaaaagagaatgaagtcagtgtttctgaaaaggaattgcttgatgagattactgaattggaaaagcaaagagatgagcttgaggcacagctgaagaaggttaatatatcactaaatgctgctgctggacggctcaaacaaactagggaagagagggaccaatttgacgaagcaaacaatcaaatcatatttagcttgaaaaaaaaggtgctggtgtttactttttgtggttgatccagtctaatttgaataatattctaagaactgtgtattactgtctttctcccatgatacttttcatcaacttgtggcctgtcgattctttcccatcatatttgttgctcaagatggtgcttgttgcatttcatttccaaatctatttaggaggatgacctctcaaaatccattgccttatgtaatgtggaatccaatgttgtcaagatctggatcggtttccttgaggactcgtggaagctgcagtcctcatacaatgaacagaaggataataaaacgtgtgatgagctggagaaatgtgtgagtgattttctaaagttgacaaaacatcatctttcagcattcaaggaagtcctaagccaattgattgagaatatcgaaacatatgtcggtaacttggctgtcttaacctcaaggtattttagttcttttcctaaagtcatgtactttgttgtccaatttgtttggtaggtttttacttgccttgtagggaagaggaaaaagaacatggggatgatgaggcatctgagaggacagatccacgtaaatcccttgaagaggaatatctagaaacagaaaagaaggttatactcagtcaccttactttaacttggtctcatacatggttcttaaagcggtaaggcgaggtaaggcattgaaccaccgctggacgcctaggcgccgccaaaggcgagcaaggcgacaccttatcaacatgagaaccagcaaaacagcagcatggaggaggaac

SEQ ID NO: 135272 - DNA, 2459 bp, Zea Mays
acacgacatccaaatcgaagaacacgtcgctgacacaccacctctccctcgccgcattctccactctctggtcttcgccgtggtcggtgccttccaaatccaaaaaaccccaagccctagctgtagccgtcccccaaggtcgccgagatgtcttcgtggctgcgcagcgcggtgagccgggcagtggaggccggcggccgcagcggcgtcgcccgcgcggtcaaggggtacgccgataccgtcgcgcaccacgccggtcaggccgtcgcggacatcctccacgaccgcatgggcgttcagaactataaaagtttcaagaagacagtagcacgattggaagaggctgctgtatcatgccgtgggggtgaaagagttgaattgttgaaacgttggttaggagcattgcaagatgttgatgctgaaaatggaagttcagatttaaaggtgtctgaagctaatgacccttctggtgaaatggacactttgaaagcacaaactgttttgttctatgatgctgatattgatggtgcacctatgaatttttgtgatgtattcttgtacagccaagcacttgaaggtattacattgtccatgattctcgaacctccttctgaggaggaagtttcactgcttttggaaatattcagcatatgccttactggagggaaagaagtgaacaaagaaatcatgagtaatgtacaagacttggccaaggcattttcagaatacaaagatgaagtcctggtgaaacgtgaagagctgcttgagtatgcccaaagtatcatttcaggactgaagagaaatgctgacattgtgaggatagatgctgaaaccctagaattgcagagaaaactagacgagaagcagaaatcacgaggtcaatcacctgaatatcaagataaaacgtcagataagattgctgctgcaaatcttgaggtcttcaaagaagcacttggtgaactccgcttatgctctagagttgaagaacttctgctgaagaagaaatcaatcactcttggtgactccctggagattcattctcagaaggtagataaactaaaggttttagcagattccctggcatgttcatcctccaaagcagaacagcgtattttggagcacaggcgccagaaagaagatgctctcaactttcgtgtgaaaaaagagaatgaagtcagtgtttctgaaaaggaattgcttgatgagattactgaattggaaaagcaaagagatgagcttgaggcacagctgaagaaggttaatatatcactaaatgctgctgctggacggctcaaacaaactagggaagagagggaccaatttgacgaagcaaacaatcaaatcatatttagcttgaaaaaaaaggaggatgacctctcaaaatccattgccttatgtaatgtggaatccaatgttgtcaagatctggatcggtttccttgaggactcgtggaagctgcagtcctcatacaatgaacagaaggataataaaacgtgtgatgagctggagaaatgtgtgagtgattttctaaagttgacaaaacatcatctttcagcattcaaggaagtcctaagccaattgattgagaatatcgaaacatatgtcggtaacttggctgtcttaacctcaagggaagaggaaaaagaacatggggatgatgaggcatctgagaggacagatccacgtaaatcccttgaagaggaatatctagaaacagaaaagaagattataattgcgttcagcatagttgatcacataaagaaattgttttattctggggaaggggctgattcaaggagagatgacccagaggtcaagagcttaattgaggagattgagaaaatgagggaatcgttcgagtctatagaaaggccaacactaagcatagaatctgagaaagcaaaaccactacctgttgagggatcgaaactgagtccttcacctcttcaggctcctgctaccccaaaagctgcacacgttgactcaccaaaatctcccatgaaacctgagcagcatttcgattcagatgcggagcttgcaaccctgggatcagagatcgggaaagaagacaaagagtactcagttgaggagataagcgggtgggagtttgacgagctcgaagaggaccttaagagctgacacaaagaatcgacaaacagaacacaattcgatttggttatcttcactgacatgtattatttgtctgggccttgcgtgggcaagaaatacacactggttgatatgtacatagtgctgtttgattgtgtattgtcgcgcactcgcgctgtcaatttgtcactgtcttaagatatacggactgagctggtgtaacttgggcgaggcatttgctatttgtttgctcttgccgcgaatatttttatcttacatgtataccgaaccctgttgtaacagttgtaaacgcggaaaacaaaattcgaacatttgacagaatttgctcc

SEQ ID NO: 135273 - DNA, 2450 bp, Zea Mays
acacgacatccaaatcgaagaacacgtcgctgacacaccacctctccctcgccgcattctccactctctggtcttcgccgtggtcggtgccttccaaatccaaaaaaccccaagccctagctgtagccgtcccccaaggtcgccgagatgtcttcgtggctgcgcagcgcggtgagccgggcagtggaggccggcggccgcagcggcgtcgcccgcgcggtcaaggggtacgccgataccgtcgcgcaccacgccggtcaggccgtcgcggacatcctccacgaccgcatgaactataaaagtttcaagaagacagtagcacgattggaagaggctgctgtatcatgccgtgggggtgaaagagttgaattgttgaaacgttggttaggagcattgcaagatgttgatgctgaaaatggaagttcagatttaaaggtgtctgaagctaatgacccttctggtgaaatggacactttgaaagcacaaactgttttgttctatgatgctgatattgatggtgcacctatgaatttttgtgatgtattcttgtacagccaagcacttgaaggtattacattgtccatgattctcgaacctccttctgaggaggaagtttcactgcttttggaaatattcagcatatgccttactggagggaaagaagtgaacaaagaaatcatgagtaatgtacaagacttggccaaggcattttcagaatacaaagatgaagtcctggtgaaacgtgaagagctgcttgagtatgcccaaagtatcatttcaggactgaagagaaatgctgacattgtgaggatagatgctgaaaccctagaattgcagagaaaactagacgagaagcagaaatcacgaggtcaatcacctgaatatcaagataaaacgtcagataagattgctgctgcaaatcttgaggtcttcaaagaagcacttggtgaactccgcttatgctctagagttgaagaacttctgctgaagaagaaatcaatcactcttggtgactccctggagattcattctcagaaggtagataaactaaaggttttagcagattccctggcatgttcatcctccaaagcagaacagcgtattttggagcacaggcgccagaaagaagatgctctcaactttcgtgtgaaaaaagagaatgaagtcagtgtttctgaaaaggaattgcttgatgagattactgaattggaaaagcaaagagatgagcttgaggcacagctgaagaaggttaatatatcactaaatgctgctgctggacggctcaaacaaactagggaagagagggaccaatttgacgaagcaaacaatcaaatcatatttagcttgaaaaaaaaggaggatgacctctcaaaatccattgccttatgtaatgtggaatccaatgttgtcaagatctggatcggtttccttgaggactcgtggaagctgcagtcctcatacaatgaacagaaggataataaaacgtgtgatgagctggagaaatgtgtgagtgattttctaaagttgacaaaacatcatctttcagcattcaaggaagtcctaagccaattgattgagaatatcgaaacatatgtcggtaacttggctgtcttaacctcaagggaagaggaaaaagaacatggggatgatgaggcatctgagaggacagatccacgtaaatcccttgaagaggaatatctagaaacagaaaagaagattataattgcgttcagcatagttgatcacataaagaaattgttttattctggggaaggggctgattcaaggagagatgacccagaggtcaagagcttaattgaggagattgagaaaatgagggaatcgttcgagtctatagaaaggccaacactaagcatagaatctgagaaagcaaaaccactacctgttgagggatcgaaactgagtccttcacctcttcaggctcctgctaccccaaaagctgcacacgttgactcaccaaaatctcccatgaaacctgagcagcatttcgattcagatgcggagcttgcaaccctgggatcagagatcgggaaagaagacaaagagtactcagttgaggagataagcgggtgggagtttgacgagctcgaagaggaccttaagagctgacacaaagaatcgacaaacagaacacaattcgatttggttatcttcactgacatgtattatttgtctgggccttgcgtgggcaagaaatacacactggttgatatgtacatagtgctgtttgattgtgtattgtcgcgcactcgcgctgtcaatttgtcactgtcttaagatatacggactgagctggtgtaacttgggcgaggcatttgctatttgtttgctcttgccgcgaatatttttatcttacatgtataccgaaccctgttgtaacagttgtaaacgcggaaaacaaaattcgaacatttgacagaatttgctcc

SEQ ID NO: 135274 - DNA, 1985 bp, Zea Mays
gtggacttcaggcttccatacgagatctgataataataggagtatgcagtctcctgctgatacttttattggttgcattatatgatgattcctacttttaataacatagttgtagtactttacaacaaaagattgacaaaaaaccacttgtgtctttgatggagctgtccctaatgtgatctcagtattgagttgagtggaggggtccctgctgctagctgcaggagagcttatggagaagctggctggaaaacatgttttggccctgttaggctgtgtttttgttgttcactataatgttttggtccggtttcttatggactagtgacctctactttctcttttctattgacctctactttctctcttctataatgaaatgaaactcagtgtcctgtgttctctagaaaaaagtatgtattcttaggtagtttcgcttggttagagtttatgtggcccatagctttgtctggttcttttattttgttattgttgattgctgtaggactttcaggcctacctaaatattctagttgatgctctgtaatgctaacagcactcacaaattaccaggtagataaactaaaggttttagcagattccctggcatgttcatcctccaaagcagaacagcgtattttggagcacaggcgccagaaagaagatgctctcaactttcgtgtgaaaaaagagaatgaagtcagtgtttctgaaaaggaattgcttgatgagattactgaattggaaaagcaaagagatgagcttgaggcacagctgaagaaggttaatatatcactaaatgctgctgctggacggctcaaacaaactagggaagagagggaccaatttgacgaagcaaacaatcaaatcatatttagcttgaaaaaaaaggaggatgacctctcaaaatccattgccttatgtaatgtggaatccaatgttgtcaagatctggatcggtttccttgaggactcgtggaagctgcagtcctcatacaatgaacagaaggataataaaacgtgtgatgagctggagaaatgtgtgagtgattttctaaagttgacaaaacatcatctttcagcattcaaggaagtcctaagccaattgattgagaatatcgaaacatatgtcggtaacttggctgtcttaacctcaagggaagaggaaaaagaacatggggatgatgaggcatctgagaggacagatccacgtaaatcccttgaagaggaatatctagaaacagaaaagaagattataattgcgttcagcatagttgatcacataaagaaattgttttattctggggaaggggctgattcaaggagagatgacccagaggtcaagagcttaattgaggagattgagaaaatgagggaatcgttcgagtctatagaaaggccaacactaagcatagaatctgagaaagcaaaaccactacctgttgagggatcgaaactgagtccttcacctcttcaggctcctgctaccccaaaagctgcacacgttgactcaccaaaatctcccatgaaacctgagcagcatttcgattcagatgcggagcttgcaaccctgggatcagagatcgggaaagaagacaaagagtactcagttgaggagataagcgggtgggagtttgacgagctcgaagaggaccttaagagctgacacaaagaatcgacaaacagaacacaattcgatttggttatcttcactgacatgtattatttgtctgggccttgcgtgggcaagaaatacacactggttgatatgtacatagtgctgtttgattgtgtattgtcgcgcactcgcgctgtcaatttgtcactgtcttaagatatacggactgagctggtgtaacttgggcgaggcatttgctatttgtttgctcttgccgcgaatatttttatcttacatgtataccgaaccctgttgtaacagttgtaaacgcggaaaacaaaattcgaacatttgacagaatttgctcc

SEQ ID NO: 135275 - DNA, 1388 bp, Zea Mays
atagcgatcacatattctacgggccggctagctagcatctaaacagcctataaaactccccgcgtcccagacaagacgagcagcaacagccatgacgacgacgaagcggcactgcttgcgcttcaccaccgtcctggcgacgacgcttctctccgccaccgccgcctgcctcgacgtcggcttctacgacaggacatgccccactgccgagaccatcgtgcagcagaccgtggcggccgcgttcaggaacaactccggcgtcgctccggcgctgatccgcatgcacttccatgactgctttgtcaggggctgcgatggctcggtgctgatcgacacggtaggcaacctgacggcggagaaggacgcgccacccaacaaccccagcctccggttcttcgacgtggtcgaccgtgccaaggcgtcactggaggctcagtgccccggcgtggtctcctgcgccgacgtgctcgccttcgcggccagggacagcgtcgtgctctccggtggcctcggctaccaggtgccggccggacgccgtgacgggcggatatccaatgacaccgaagccctcaacaacctgcctccgccgttcttcaacgccaccgagctggcagacaggttcgcctccaagaacctcactatcgaggacctggtcgtgctctccggcgcgcacaccatcggcgtctcgcactgcagcggcttcgccggcccgacagacctgaacggccccgttgaccggctctacaacttcagctcgcctgacgggattgacccgacgctgagcaaagcctacgcatttcttctcaagagcatctgcccggccaacaccagccagttcttcccgaacacgacggtgttcatggacctcatcacgccggaaaggtttgacaacaagtactacgtcggcctgaccaacaacctgggcctcttcaagtcagacgtggcgctgctgaccaacgcgacgatgaaggccctggtcgactccttcgtgcgcagcgaggcgactttcaggaccaagtttgccaggtccatgatcaagatggggcagatcgaggtgctgacggggacgcagggcgagatcaggcgcaactgcagggtcatcaaccccgttagtgccaccgatgatgtcgtcctcgcccgcccatcaggattcactggagtggctgcgagctagctaaccaactgtcggttcatgcacatgcgttgtgcacagtgtgtgatgtctagtgtgagttgatgtgtgaaattgtaataagtaatgagcagattatcttggtaagctcgcttgttactgtggcaaaagttgttttgttgcatgacaaaaatgtatactcatcggattattgaaaacaaaactgatatttgttcaggcaaatagttctacaaaa

SEQ ID NO: 135276 - DNA, 450 bp, Zea Mays
atggggttggattcagcgcgtgagcttgacgcgtgcagagaaacagcacgacatagtggagcatggaccaagcgccagccagcaaggaaatttcggacgcgcagggaggaaacaccagagagacacagggcaccgtgggaactgcgcgcggcaccgaatcgaaggagcagggagaagaccgagcttgaggacggcggtgacatggacgagatgggcagggccgagctcggcaaccacggcgaactgggcgagttccggcgtgcagggagaagcaccggaggagcaggacgcggctctgcgcaggggaggaagagaagcaagcgccgagcagagagccgcgccatgggacttcggctggggcaggagatggccgtgagagctccacggccggaggtggaagatgacccggcgaccggtgcgcacaagaagaagcagagaccgagcggctga

SEQ ID NO: 135277 - DNA, 1975 bp, Zea Mays
actgttttccctaaagaaagactggttaggtgtattagtaagtgtggtatactggtaacccatctttttggtcattcaacagtgctcatcgatctcatctcatcaatgtacactataattagctagtagtgggacggttaattagggctccaatgccgatcttatattagtctatatatatagaggagaagcctaccaaaacttctcctaaaatctaaaatatgtacatagtataaatttaatatatattttatggtttttatcgtttatagatattttaatataatactattatatatatatatatatgtctattgtaaatgatttattaacattatgttgtaatagtttagttcagtctcttctaaagtttttactaactccgtccctgtttagcaccgatggagttccttgttcaaagagaagaaaataaataaagatattaagccaatacgtacagtgtaaaaactcacctaatctcgtagaaaattcagagcctgtggccgcttccattttctagatgtcggcaagaatctgtctcagcgagctagctataaacccccttgtgcgatacccagccatgctcatcatgcatcagcagcagcagcacgaaaccctgtagtagcctgccatgactacgcgctgctgcctggtcgtcgccactctcctcgcggcgctgctctcggtcagtgccagcctcgagttcggtttctacaacaagacgtgccccagcgccgagaccatcgtgcagcagaccgtggccgccgcgttcaccaacaactccggcgtcgctccggcgctcctccgcatgcacttccatgactgcttcgtcagaggctgcgacggctcggtgctgatcgactccacggccaacaacaaggcggagaaggactcgatccccaacagcccgagcctgaggttcttcgacgtggtggaccgcgccaaggcgtccctggaggcgcggtgccccggcgtggtgtcctgcgccgacatcctcgccttcgcggccagggacagcgtcgtgctcaccggcggcctcggctacaaggtgccgtccggacgccgtgacggccggatatccaatgccacgcaggccctgaacgagctgcccccgcccttcttcaacgccacccaactcgtcgacaacttcgcctccaagaacctcagcctcgaggacatggttgtcctctccggcgcacacaccatcggcgtctcgcactgcagcagcttcgccggaattaacaacacaggcgaccggctctacaacttcagtggctcatccgacggggtaaatttcccctccgaccatcttccgttccctagatagttctcatgtgattattatccactgctactgctatatatatggcctactatacagattgatcctgcgctgagcaaagcctacgcgttcctcctcaagagcatttgcccgtcaaacagcggccggttcttccccaacacgacgacgttcatggacctcatcacgccggccaagttcgacaacaagtactacgtcggcctcaccaacaacctgggcctcttcgagtcggacgcggcgctgctgaccaacgcaaccatgaaggcgctggtcgactccttcgtgcgcagcgaggccacgtggaagaccaagttcgccaagtccatgctcaagatggggcagatcgaggtgctcacggggacgcagggcgagatcaggcgcaactgcagggtcatcaaccctgctaatgccgccgccgacgtcgtccttgcccgtcagccaggttcatcaggatccactggagtggctacaagctaaccatatctcggtgtgtctgcagtgtgtttggtgtgggatgtgatatagtatattgcaataatctagaaaactgaagaagaagcaggtgatgaccacactctgtagtgcatcacgcggtgcgtgttcatttaaccgtggcgtttgattgtgaggatgaaataaaacacatgtatgacc

SEQ ID NO: 135278 - DNA, 1877 bp, Zea Mays
actgttttccctaaagaaagactggttaggtgtattagtaagtgtggtatactggtaacccatctttttggtcattcaacagtgctcatcgatctcatctcatcaatgtacactataattagctagtagtgggacggttaattagggctccaatgccgatcttatattagtctatatatatagaggagaagcctaccaaaacttctcctaaaatctaaaatatgtacatagtataaatttaatatatattttatggtttttatcgtttatagatattttaatataatactattatatatatatatatatgtctattgtaaatgatttattaacattatgttgtaatagtttagttcagtctcttctaaagtttttactaactccgtccctgtttagcaccgatggagttccttgttcaaagagaagaaaataaataaagatattaagccaatacgtacagtgtaaaaactcacctaatctcgtagaaaattcagagcctgtggccgcttccattttctagatgtcggcaagaatctgtctcagcgagctagctataaacccccttgtgcgatacccagccatgctcatcatgcatcagcagcagcagcacgaaaccctgtagtagcctgccatgactacgcgctgctgcctggtcgtcgccactctcctcgcggcgctgctctcggtcagtgccagcctcgagttcggtttctacaacaagacgtgccccagcgccgagaccatcgtgcagcagaccgtggccgccgcgttcaccaacaactccggcgtcgctccggcgctcctccgcatgcacttccatgactgcttcgtcagaggctgcgacggctcggtgctgatcgactccacggccaacaacaaggcggagaaggactcgatccccaacagcccgagcctgaggttcttcgacgtggtggaccgcgccaaggcgtccctggaggcgcggtgccccggcgtggtgtcctgcgccgacatcctcgccttcgcggccagggacagcgtcgtgctcaccggcggcctcggctacaaggtgccgtccggacgccgtgacggccggatatccaatgccacgcaggccctgaacgagctgcccccgcccttcttcaacgccacccaactcgtcgacaacttcgcctccaagaacctcagcctcgaggacatggttgtcctctccggcgcacacaccatcggcgtctcgcactgcagcagcttcgccggaattaacaacacaggcgaccggctctacaacttcagtggctcatccgacgggagcatttgcccgtcaaacagcggccggttcttccccaacacgacgacgttcatggacctcatcacgccggccaagttcgacaacaagtactacgtcggcctcaccaacaacctgggcctcttcgagtcggacgcggcgctgctgaccaacgcaaccatgaaggcgctggtcgactccttcgtgcgcagcgaggccacgtggaagaccaagttcgccaagtccatgctcaagatggggcagatcgaggtgctcacggggacgcagggcgagatcaggcgcaactgcagggtcatcaaccctgctaatgccgccgccgacgtcgtccttgcccgtcagccaggttcatcaggatccactggagtggctacaagctaaccatatctcggtgtgtctgcagtgtgtttggtgtgggatgtgatatagtatattgcaataatctagaaaactgaagaagaagcaggtgatgaccacactctgtagtgcatcacgcggtgcgtgttcatttaaccgtggcgtttgattgtgaggatgaaataaaacacatgtatgaccacatctgattattagtgatacaaaaaaaacttgattg

SEQ ID NO: 135279 - DNA, 2213 bp, Zea Mays
actgttttccctaaagaaagactggttaggtgtattagtaagtgtggtatactggtaacccatctttttggtcattcaacagtgctcatcgatctcatctcatcaatgtacactataattagctagtagtgggacggttaattagggctccaatgccgatcttatattagtctatatatatagaggagaagcctaccaaaacttctcctaaaatctaaaatatgtacatagtataaatttaatatatattttatggtttttatcgtttatagatattttaatataatactattatatatatatatatatgtctattgtaaatgatttattaacattatgttgtaatagtttagttcagtctcttctaaagtttttactaactccgtccctgtttagcaccgatggagttccttgttcaaagagaagaaaataaataaagatattaagccaatacgtacagtgtaaaaactcacctaatctcgtagaaaattcagagcctgtggccgcttccattttctagatgtcggcaagaatctgtctcagcgagctagctataaacccccttgtgcgatacccagccatgctcatcatgcatcagcagcagcagcacgaaaccctgtagtagcctgccatgactacgcgctgctgcctggtcgtcgccactctcctcgcggcgctgctctcggtcagtgccagcctcgagttcggtttctacaacaagacgtgccccagcgccgagaccatcgtgcagcagaccgtggccgccgcgttcaccaacaactccggcgtcgctccggcgctcctccgcatgcacttccatgactgcttcgtcagagtaagcccgcacatgcatgtttattcgtcatcaaacaaaaagaaaagtatcgtctccagcctttttgcatgacctcacagactagatttatgatgatttccatgtcataacttttctcatctagaacaacacgacgtggccatttgcattattgcagggctgcgacggctcggtgctgatcgactccacggccaacaacaaggcggagaaggactcgatccccaacagcccgagcctgaggttcttcgacgtggtggaccgcgccaaggcgtccctggaggcgcggtgccccggcgtggtgtcctgcgccgacatcctcgccttcgcggccagggacagcgtcgtgctcaccggcggcctcggctacaaggtgccgtccggacgccgtgacggccggatatccaatgccacgcaggccctgaacgagctgcccccgcccttcttcaacgccacccaactcgtcgacaacttcgcctccaagaacctcagcctcgaggacatggttgtcctctccggcgcacacaccatcggcgtctcgcactgcagcagcttcgccggaattaacaacacaggcgaccggctctacaacttcagtggctcatccgacggggtaaatttcccctccgaccatcttccgttccctagatagttctcatgtgattattatccactgctactgctatatatatggcctactatacagattgatcctgcgctgagcaaagcctacgcgttcctcctcaagagcatttgcccgtcaaacagcggccggttcttccccaacacgacgacgttcatggacctcatcacgccggccaagttcgacaacaagtactacgtcggcctcaccaacaacctgggcctcttcgagtcggacgcggcgctgctgaccaacgcaaccatgaaggcgctggtcgactccttcgtgcgcagcgaggccacgtggaagaccaagttcgccaagtccatgctcaagatggggcagatcgaggtgctcacggggacgcagggcgagatcaggcgcaactgcagggtcatcaaccctgctaatgccgccgccgacgtcgtccttgcccgtcagccaggttcatcaggatccactggagtggctacaagctaaccatatctcggtgtgtctgcagtgtgtttggtgtgggatgtgatatagtatattgcaataatctagaaaactgaagaagaagcaggtgatgaccacactctgtagtgcatcacgcggtgcgtgttcatttaaccgtggcgtttgattgtgaggatgaaataaaacacatgtatgaccacatctgattattagtgatacaaaaaaaacttgattgaacatgtgctttgaccaaaagaatcgtcggcaaatcgttctacg

SEQ ID NO: 135280 - DNA, 2083 bp, Zea Mays
actgttttccctaaagaaagactggttaggtgtattagtaagtgtggtatactggtaacccatctttttggtcattcaacagtgctcatcgatctcatctcatcaatgtacactataattagctagtagtgggacggttaattagggctccaatgccgatcttatattagtctatatatatagaggagaagcctaccaaaacttctcctaaaatctaaaatatgtacatagtataaatttaatatatattttatggtttttatcgtttatagatattttaatataatactattatatatatatatatatgtctattgtaaatgatttattaacattatgttgtaatagtttagttcagtctcttctaaagtttttactaactccgtccctgtttagcaccgatggagttccttgttcaaagagaagaaaataaataaagatattaagccaatacgtacagtgtaaaaactcacctaatctcgtagaaaattcagagcctgtggccgcttccattttctagatgtcggcaagaatctgtctcagcgagctagctataaacccccttgtgcgatacccagccatgctcatcatgcatcagcagcagcagcacgaaaccctgtagtagcctgccatgactacgcgctgctgcctggtcgtcgccactctcctcgcggcgctgctctcggtcagtgccagcctcgagttcggtttctacaacaagacgtgccccagcgccgagaccatcgtgcagcagaccgtggccgccgcgttcaccaacaactccggcgtcgctccggcgctcctccgcatgcacttccatgactgcttcgtcagaggctgcgacggctcggtgctgatcgactccacggccaacaacaaggcggagaaggactcgatccccaacagcccgagcctgaggttcttcgacgtggtggaccgcgccaaggcgtccctggaggcgcggtgccccggcgtggtgtcctgcgccgacatcctcgccttcgcggccagggacagcgtcgtgctcaccggcggcctcggctacaaggtgccgtccggacgccgtgacggccggatatccaatgccacgcaggccctgaacgagctgcccccgcccttcttcaacgccacccaactcgtcgacaacttcgcctccaagaacctcagcctcgaggacatggttgtcctctccggcgcacacaccatcggcgtctcgcactgcagcagcttcgccggaattaacaacacaggcgaccggctctacaacttcagtggctcatccgacgggattgatcctgcgctgagcaaagcctacgcgttcctcctcaagagcatttgcccgtcaaacagcggccggttcttccccaacacgacgacgttcatggacctcatcacgccggccaagttcgacaacaagtactacgtcggcctcaccaacaacctgggcctcttcgagtcggacgcggcgctgctgaccaacgcaaccatgaaggcgctggtcgactccttcgtgcgcagcgaggccacgtggaagaccaagttcgccaagtccatgctcaagatggggcagatcgaggtgctcacggggacgcagggcgagatcaggcgcaactgcagggtcatcaaccctgctaatgccgccgccgacgtcgtccttgcccgtcagccaggttcatcaggatccactggagtggctacaagctaaccatatctcggtgtgtctgcagtgtgtttggtgtgggatgtgatatagtatattgcaataatctagaaaactgaagaagaagcaggtgatgaccacactctgtagtgcatcacgcggtgcgtgttcatttaaccgtggcgtttgattgtgaggatgaaataaaacacatgtatgaccacatctgattattagtgatacaaaaaaaacttgattgaacatgtgctttgaccaaaagaatcgtcggcaaatcgttctacgaagcccttgcagattggacgtcatactcaattcatcagttactatccaacctaagaccaagaaaaaatatctgcgcagcatatgacacccttatcctaaaagtatatgcaaaaaaaaaga

SEQ ID NO: 135281 - DNA, 620 bp, Zea Mays
agactttggatgccgcagagctttcagttctttgcttcttgttgctctgctctgctctgctttgaggggctcgcggtcgcggctgggaacagccggacaggagcggggcggcgccggagaaagatgggcgatgccacgacggagctggtggaggcattcttgcgagcagagtcttggcggttcggcggaggcgtttcgcttgtggctggagcaggaagaggcctgcgagcaggaagcgttagggttaggactagatttttttactgttgttaatttttggggcgtattgcccaagcaatactgagtaatattgggccctccgtccctaaggacttgatcgctatcaaggatgtcaaagggaaccctatggactttttcaggcgtgttggtcatggatcttcatatggtgttggtatcaagcttgggttggtaaggggagagtacattgttgaccacaatgctggtactggaactattttcttcagatttggtgagattttgagtatgcaacatttcgccattgtggaaggcacttttgaggcactctgtttagcgatgcttgtggagtgtcataggactcaatcggcaatggagctccgctgaaataatggatgctaccg

SEQ ID NO: 135282 - DNA, 1062 bp, Zea Mays
ctccacccacccctccccatcaaacggtgctgggcgtcctaggttgcctcgcccttcacccgtcgtgagtttgacactctccctcccggacctctcgtccctgccgttgcccctgctggcccaccttgccctggggcacgaccaccgactcactttgccgccgatccatacgccggttcatgtccgaccaacgaccgctaccctcctcggatcccgtccaccgccctccccgcatcctggccggccgctgctctcccgccgcaggctcccgttcggcggcccgcgctccccgcgaacggcggctggcagcaagccgctggcggcgcacgacatctccacgtccatgtggcacgacacacgtctctgggacgtgctgctccgatgcggtatcaagggtgccgcggacagcgtcaccaacgtgtgatttgtggcgccgaggacctccccggtggggtcgacgacaactgcaagtacgacaccagcctgcaacgcatctcggatctcggattttttgccaccaatcagcaagagcggcaggagggagcagagctggagatggggcggtgctggtgctgctgccggtgcctaaagctgctctgcttggttctcctcccaccgatcagcttgtgcctcggccgcagctgctgctccaatctgtccccattctcatcgtcgaagatctgctctgtcttctatggtgcctagagtcagccttcagggagagaccgctcccgcaggccaagaagtcgtggggctccgagattgccagtagcggtggccggagctcctccgatgtttccacaccatatgctacaacgttttgtgcttccacgccggatgccacaatagacaagctgaggtcgagatgtttctcttttctttactggagacttctaatcaactgagttgtgctcaagcatcgttccttaattttttctaaatcgtttgctgcatgcaacttattaagattgtcctgtctctcaatctctgtccatatttgaagccaatctggctgatcacaaaagacagtcatcaccctttaccgcacgtagtagcccaata

SEQ ID NO: 135283 - DNA, 759 bp, Zea Mays
tttcctttgtgttgaggattaatgcaaccacagtgttgtggtttgaacactaatcgagaaggcctctttactgttgtctagatctgttataattttcatttacatgcttccatacactttaatattagtaatacaattgtagttagcagattaaaaacttagttaaacatatgtgtactcacgtatttattgtttttctgtacatcaaggattcccatggacatgtggttgtccattgcacatatattgataggaatgttcagctcctttttaggtccaccacatatatatcaatggaaatgcaatgtagatatttaagtagtgagtacataaagcgcttaaaggtgccgttgctcaagttgcagccggaggttgcagctacacaggacacaaattcaggtgcattttacacctacatatcttcctacaaacatgttttttctcctaacattttgtatgttaccgtaaaattactttgtacactatagatataaacggtttcatctcagatgacacaacaactgaaatattttgctttgacaacattgctaaacatattcttggaaaaccttatgaaccctgatgttgtgaacacctttatgcagtagatagctaatgtatttttatgatattaattatgcccctaggacatgttgctacaacagacccttctgcgtgtaagtataggactataggtgataggttgatatctcaggctaccaaccaacaaactttctagaaacgtacttatgctggtga

SEQ ID NO: 135284 - DNA, 716 bp, Zea Mays
tttcctttgtgttgaggattaatgcaaccacagtgttgtggtttgaacactaatcgagaaggcctctttactgttgtctagatctgttataattttcatttacatgcttccatacactttaatattagtaatacaattgtagttagcagattaaaaacttagttaaacatatgtgtactcacgtatttattgtttttctgtacatcaaggattcccatggacatgtggttgtccattgcacatatattgataggaatgttcagctcctttttaggtccaccacatatatatcaatggaaatgcaatgtagatatttaagtagtgagtacataaagcgcttaaaggtgccgttgctcaagttgcagccggaggttgcagctacacaggacacaaattcagaaaaatggttgtggctcttatgtttcagtgtttctaagtagataaaagtagtaatggatgaacgaagagggacataacagatggtgtcctgatacgcacttatcttatcgaggaagaaaagattcaggacaggacgaatagaggagagcagtgtgaggtgagctcgaggatccaactctgtctccacgatcgctaggtgtgaaattctcgggggtgtggtgagagtgaggagcatccagctctttatctccacctgctgctggtgtgagtgtgacactgatgatgatggggtaactgttttcaagtcgttcgaataa

SEQ ID NO: 135285 - DNA, 1769 bp, Zea Mays
tttggtcgaaataaacaagcagagcagaaaaccccccacacgctttagttggccgtccgtccgtccgtctctgaggagcacacagcagtcgattttaaactgcagctacagaggtcaggtcaggggacacagcctgagcggctggctggcgggggctagcgagcggcgccacagcgcagcacgcagagagccagggcggcggccatggcgagcgcggcgagtggcggcggcgggtcgctgaagcggatgggcccgctccgggtacagtactacatcgtgatgggcgcggtggcagcggcggtggtgctggccacgctgcgctacatgccggggccagccgtcccggcgaccaccgcccgtaccagcggaggcggcgtcgtgcgctcggccccagcagccgcggccgtccctgtgcccgtgcccgccgtggaggtagaaacgggggaggatgagcaggcgcagaggaggaggaggaggaggaagaagaagggtgacggggtcgtgctcttcaacttcggcgactccaacagcgacacgggcggcgtggcggcggtcatggggatccgcatcgcgccgccggagggcagggcctacttccaccaccccacggggcggctctccgacggacgcgtcatcctcgacttcatctgtgagagcctgggcatgccgcacctgagtccgttcatgaagccgctgggctccaacttctccaacggcgtcaacttcgccattgcagggtccacggccatgccgggagtaaccaccttctcgctggacgtgcaggtggatcagttcgtcttcttcaaggagagatgcctcgactccatcgagagaggtgagagtgccccgattgttgagaaggcgttcccagatgctatatacaccatggacatcgggcacaacgatataaacggtgttctccacttgccctatcatacaatgctcgaaaatctccccccagtaattgctgaaatcaagaaagccatcgagaggttgcacgagaatggagccaggaagttctggatacatggaacgggagcattagggtgcatgcctcagaagctttctatgccgagggatgacgacagcgacctcgatgagcatggatgcatcgcaagcattaataatgtctgcaagaagttcaattccttgctgagtgaagccttggacgagctgcgtttgacactgaaaagttcgactatcgtctttgtggatatgttcgctatcaagtatgatcttgttgccaaccacacgaaatatgggattgagaagccattgatgacatgttgtggtcatggaggccccccttacaactatgaccccaaggagagctgcatgacttcggacaaatacctgtgcaagcttggcgaaaagttcataagctgggacggggttcacttcactgatgctgcaaatggcattgtggcttccaaagtactcagtggtgagtacaacattcccagggtcaagctggccagcctcgtccccgttccaaaatctgacgattaatggtgatgcagcaccttaattggcctttagtttggcctatcaaggatgatgaagatgaaactactaacaaaactgacaccaccgaagtttaattattttgaggttcttacgttacatccattgtagaagaagactttccttttgtttacttctctttttgtacaatcggcgcatatgtatatcctagggttaatatatggcgatgcaggtgtctgtaccatgtataattttctttttgaattttgggtctgttggtacga

SEQ ID NO: 135286 - DNA, 1305 bp, Zea Mays
cggaagccgctgcagtgctgccaaaacatcgcacgcagagctttcctgcctttctgaatgactgaataattccctcaacattcctctatatgcaatggaatctagcagtatatgccagctggctcggattattatttgaaaaaaaagcaaaactgacagaagcttttgatgacactccgattcaggtgagagcctgggcatgccgcacctgagtccgttcatgaagccgctgggctccaacttctccaacggcgtcaacttcgccattgcagggtccacggccatgccgggagtaaccaccttctcgctggacgtgcaggtggatcagttcgtcttcttcaaggagagatgcctcgactccatcgagagaggtgagagtgccccgattgttgagaaggcgttcccagatgctatatacaccatggacatcgggcacaacgatataaacggtgttctccacttgccctatcatacaatgctcgaaaatctccccccagtaattgctgaaatcaagaaagccatcgagaggttgcacgagaatggagccaggaagttctggatacatggaacgggagcattagggtgcatgcctcagaagctttctatgccgagggatgacgacagcgacctcgatgagcatggatgcatcgcaagcattaataatgtctgcaagaagttcaattccttgctgagtgaagccttggacgagctgcgtttgacactgaaaagttcgactatcgtctttgtggatatgttcgctatcaagtatgatcttgttgccaaccacacgaaatatgggattgagaagccattgatgacatgttgtggtcatggaggccccccttacaactatgaccccaaggagagctgcatgacttcggacaaatacctgtgcaagcttggcgaaaagttcataagctgggacggggttcacttcactgatgctgcaaatggcattgtggcttccaaagtactcagtggtgagtacaacattcccagggtcaagctggccagcctcgtccccgttccaaaatctgacgattaatggtgatgcagcaccttaattggcctttagtttggcctatcaaggatgatgaagatgaaactactaacaaaactgacaccaccgaagtttaattattttgaggttcttacgttacatccattgtagaagaagactttccttttgtttacttctctttttgtacaatcggcgcatatgtatatcctagggttaatatatggcgatgcaggtgtctgtaccatgtataattttctttttgaattttgggtctgttggtacga

SEQ ID NO: 135287 - DNA, 99 bp, Zea Mays
caccaatcctctcgggtacctaaggaaccctggtgttgttacatgacgacaatatctaactcccaagaagttgatcagctagcttagaatccaaatagg

SEQ ID NO: 135288 - DNA, 266 bp, Zea Mays
gttagcgcaaaaaaaggaatgcatgcattagtcaaacacgattcaatgcatgcgcataaatttagtaaagatatgtgcggcaatttctgtttttaaaatcctttatttcctccataaatttaggatcgctgcaacagtcatgccgctagacgcgtaaggaccattttatgatatatactgagactaaatatgctacactgtgttaataattatgcaattcgatatactgcgtaaaaatctgttaccagctgcatgcacacgaattt

SEQ ID NO: 135289 - DNA, 1785 bp, Zea Mays
agcagaaaccgtcgtggtacaatctgtgacaagtgtcctttggcttggcatccataggccaccgccatcagcagtccaatacagtgacctgacctccacgcgaagccaccaccacaactccacaagatctagaacctaagaacctgcagaggagaggaagaggagcttggggaggagatggccggcgccgagggcgagaggtgggtggggctagcaacggacttctcggaggggagccgggcggcgctgcggtgggcggcggccaacctgctgcgagccggcgaccacctgctgctgctgcacgtcatcaaggagcccgactacgagcagagcgaggccatcctctgggaatccaccggctccccgttgattcccctctcggaattctctgaccctatcattgcgaagaaatatggagcaaagccggacatagaaaccttggacatcctgaacactacagctacccagaaggatatcgtggtggttgtgaaagtcctgtggggtgatccgcgtgagaagctctgtcaagttatccatgataccccgctgagctgcttggttataggaagcaggggccttggcaagctcaagagggtgctcttgggaagtgtcagcgactatgttgtgaacaatgcaacctgccctgtcaccgtcgtcaagtcaacaagcaccgaaggttgatcttatcgccgagatgcctggatgtgatgttgtaataaagatggttggcctgatgaagaacatgcactagtttctagctatttgaaacatgttgaacgaggcaattctaatgtaataataatagacaaagtgccttatgaaggacatggttgacatgcctttgttgctgtatgagtgatgtttatagttttgagggtttgaagatgtggatcatttgcctattattcttccgctgtgctgtatgagcgatgtttatcaatatgcaatgcaaataaagaaacactacagatgcaaattcaaccactcaccagatcagggaacaccatgtaacgttaacttccaagcaagcatagaaaaggtacatccatgacaacgcttgttcatcatacaggtacactgatacgttcaaaccagagctaaatatcactggcaacagcatctagaaaacctaccatgtctcaggttctacaagaccaaaccactggtagcaaagtttaattctacacatcagatccaaccatccatccaccatctaacgagcaatgtacattagaacctgtttgacctgtggaagcagttcacagcggcccaaggaagtcaccagcgatcgtagcaaggagctggaattggcggtcagcctccatccagcggaaccctaggaccttgaagcgcacggcggtgtccttctccagcttcgagtggtcgttcatgaacatcgcattctccccacctatgtacttgtaattactcatcgacttctcagccaggaagatgctctccacgggtccggatttgaggaacacgccatgcttgaggatcctgtccacgtgcccaaccatgacctctcccttcataggcttctgtgtaatgcaagtaaatgaaactgggaacagaacatctccagttagctcacgcactttcccttcagatattgccttcagctgattaacagcaatgtagtagccatgctctttcgaagccctcctgtttgtgacatcctccagaagacgcacaatgatagccttgcggagcaggaggcccttgcggtccagctggctaggtgagatcaacacattccatgacatctctgcctcaagaaaaacc

SEQ ID NO: 135290 - DNA, 2611 bp, Zea Mays
aaacccccctgtttggtcatcactactcttcccaacatcttcccaacaactccctccatcgtcttgaggcgtgcgcagccatggctgtcctcggcaccgcggcggttgaggtgctcatcccggtagcggcattggttggcatcgctttcgcgttgttgcagtggtatgtggtggccagagtccccgtgccttcgcacgccggcgaggacggcggtggaggaggcaataagaacgtgagggaggaggaggagcatgtggaggaggacggcatggactaccttctcgtggaggcccggtgcgccgagatccagcgcgccatctccgtcggcgccacgtcgttcctgctaaccgagtacaagtacctggccgtgttcacggcggcgttcgcggtggtgatcttcgtgttcctgggttcggcgcagcggttcagcgcgcgccctgggccgtgcgcgtacgacccgtcgcgggagtgccggccggcgctggcgaacgcggccttcagcgcggtggcgttcctgctgggcgcggcgacgtccgtgctgtccgggtacctcggcatgcgcgtggcgacgttcgcgaacgcgcggacggcgctggaggcccgccacggcgtggggcgcgccttcgccgccgcgttccggtcgggcgccgccatggggttcctcctcgcctccagcgcgctgctcgtgctctacgccgccgtcaatctcttcggcctctactacggcgacgactggggcgggctctacgaatccatcaccggatacggcctcggcgggtcctccgtcgcgctgttcggccgcgtgggcggcggcatctacaccaaggccgctgacgtcggcgccgacctcgtcgggaaggtcgagcgcaacatccccgaggacgaccctcgcaaccccgcggtgatcgccgacaacgtgggggacaacgtcggcgacatcgccgggatggggtcggacctgttcgggtcgtacgcggagtcgtcctgcgcggcgctcttcgtggcttccatctcctccttcggggcggagcacaacctcacggcgatgatgtacccgctgctcatcagcgccgtgggcctgctcgtgtgcgcgatcaccaccgtcgtcgccaccgacgtcaccgaggtgaagggctccgacgaggttgggccggcgctcaagcggcagatcctcatctccaccgtgcttatgaccgccggcatcgccgccgtcaccttcctcgccctgccgcccagcttcaccctcttcgacttcggcaacgacaagcacgtcaagaactggcacctattcatctgcgtgtcggccggtctgtgggcggggctcgtgatcggctacgtcaccgagtacttcacgagcaacgcgtacggcccggtgcaggcggtggcgcggtcgtgcaggacgggcgcggcgacgaacgtcatcttcggcctggcggtgggttacaagtcggtgatcgtgcccatcatggccatcgcggcggccatctacgccagcttccgcctggcggccatgtacggcatcgcgctggcggcgctggggatgctgagcaccatcgccacggggctcgccatcgacgcctacgggcccatcagcgacaacgccggcggcatcgcggagatggccggcatgccgcaccgggtccgggagcggacggacgcgctcgacgccgcgggcaacaccacggccgccatcggcaaaggcttcgccatcggctccgcggcgctggtgtcgctggcgctgttcggcgcgtacgtcagccgcgccgggatcacggcggtggacgtgctgagcccgcgtgtgttcgtgggactcctcctcggcgccatgctcccctactggttctcggcgatgaccatgcggagcgtcggaagcgcggcgctgaggatggtggaggaggtgcgccgccagttcgacaccatcccgggcctcgccgagggcctcgccgtgccggactacgccacctgcgtcaggatctccaccgacgcctcgctcaagaagatgatggcgccgggcgcgctcgtcatgttcagcccgctcgtcgccggtacgctcttcggggtcgagacgctcgcggggctcctcgccggcgcactcgtctccggcgtccaggtcgccatctctgcctccaacagcgggggtgcatgggacaacgccaagaagtacatcgaggccggcttgtcggaggaggcgaggtcgctggggcccaagggatcggaggcgcacaaagcggcggtgatcggggacaccatcggcgacccgctcaaggacacctccggaccgtccctcaacatcctcatcaagcttatggccgtggagtcgctcgtcttcgcgcccttcttcgccgcgcacggtggcatcatcttcgaccacctctgatcaatgcatgctgctgacgttccatggcaaaggcgccggctgtcgccgcaagccgcctctttgaatttgccgtgatcagttagtaagaataatcgtcgtgtatgtagcctgtaacaagtaatgccagaccaccagagttggaggcttattcatgtctggccctcttatcttacccttgaatatgttgctcggtatgctgcaactgcaatacaaagcgcgaacactagtcggct

SEQ ID NO: 135291 - DNA, 111 bp, Zea Mays
atgcttttgtataatcatctaattttttatcttaagcaactaggaccaagttatgactccatgctaagttttactatttttgaccatatttggtactatttatttattttg

SEQ ID NO: 135292 - DNA, 1820 bp, Zea Mays
ggccgccacgcttcgtttgcttcccgctcccaccgccaccacccaccaatcgcactcgcagttggcgcgcgctcccgtcctaaccaagcaaaacccacaaccctagcctccgccggcgccgccatctgccgggcctccctccggtcccggccgaccgtagcctcgcagcaccctaaccctatccctcccccgctgccgcgggagcagggtaaaaaaatgccgcgtgagatcatcacgatccaggtggggcaatgtggaaaccagatcgggatggagttctggaagcagctctgtctcgagcacggtatcggcaaggacggcctgctcgaggacttcgccactcaggggggcgacaggaaggacgtcttcttttaccaggctgatgatcagcacttcatacccaggtctctgcttattgacctggagccgagagtgatcaatggaatccagaacagtgagtacaggaacctgtacaaccacgagaacatatttgtcgctgagcatggtggtggtgccgggaacaactgggccagtgggtatcatcagggtgaacaagttgttgatgatatcatggacatggttgacagagaagcagatggaagtgatagccttgagggttttgtcctttgtcattctattgctggtggaactggttcaggtatgggttcttatctgttggagacactgaatgatcgatacagtaaaaagcttgtgcagacatatagtgttttcccaaatcagatggaaacaagtgatgttgtcgtccaaccttacaactcacttttaactctgaagcgtctgacactgaatgctgactgtgtggtggttcttgacaatacggctcttaataggattgcggtcgagcgtcttcatttatcaaatcctacatttgcacaaacaaactctttggtctccacagttatgtctgcaagcacaactacattgcggtatcctggatatatgaacaatgatctggttggccttcttgcctccctgatccccactccaaggtgtcattttttgatgacaggctatactccactgactgttgagcgccaggttaacatgatacgcaaaacaacagtattggatgttatgagaagacttctgcagacaaagaatgtaatggtgtcatcatatgctcgaacaaaagaagccagccaggctaaatatatctccatattgaacatcattcaaggggaggtggaccctacacaggttcatgagagcctgcaaaggatacgtgaaaggaagcttgttaactttatagactgggcacctgcaagcattcaggttgccctgtcaagaaaatccccatatgttcaaacaacccacagggttagtggtctgatgttagctaatcatacgagcatccgccacctgttcggcaaatgcctgggacaatatgaaaagctaaggaaaaagcaggcttttcttgacaactataggaaattcccaatgtttgcagataatgatctctctgaatttgatgaatctcgagagataatagagagcctagttgatgaatacaaggcctgtgagtcgccagactacattaaatggggaatggaggaccctggagaggcaaacgttgcagcagatcttgactctaagttggtagtgtaaatataaaggtaccatttcatgaatcatgatcaggcactttatatgcggaaacaatttgatgtcctatcatattgattattgattgaattgacaatccacttgaacaccactctttcttttgatagccatgtggactacatcaattattataaatgatccacaatctctgctacatgttgaaaatgattgctaaa

SEQ ID NO: 135293 - DNA, 1177 bp, Zea Mays
cgtttgcttcccgctcccaccgccaccacccaccaatcgcactcgcagttggcgcgcgctcccgtcctaaccaagcaaaacccacaaccctagcctccgccggcgccgccatctgccgggcctccctccggtcccggccgaccgtagcctcgcagcaccctaaccctatccctcccccgctgccgcgggagcagggtaaaaaaatgccgcgtgagatcatcacgatccaggtggggcaatgtggaaaccagatcgggatggagttctggaagcagctctgtctcgagcacggtatcggcaaggacggcctgctcgaggacttcgccactcaggggggcgacaggaaggacgtcttcttttaccaggctgatgatcagcacttcatacccaggtctctgcttattgacctggagccgagagtgatcaatggaatccagaacagtgagtacaggaacctgtacaaccacgagaacatatttgtcgctgagcatggtggtggtgccgggaacaactgggccagtgggtatcatcagggtgaacaagttgttgatgatatcatggacatggttgacagagaagcagatggaagtgatagccttgagggttttgtcctttgtcattctattgctggtggaactggttcaggtatgggttcttatctgttggagacactgaatgatcgatacagtaaaaagcttgtgcagacatatagtgttttcccaaatcagatggaaacaagtgatgttgtcgtccaaccttacaactcacttttaactctgaagcgtctgacactgaatgctgactgtgtggtggttcttgacaatacggctcttaataggattgcggtcgagcgtcttcatttatcaaatcctacatttgcacaaacaaactctttggtctccacagttatgtctgcaagcacaactacattgcggtatcctggatatatgaacaatgatctggttggccttcttgcctccctgatccccactccaaggtgtcattttttgatgacaggctatactccactgactgttgagcgccaggttaacatgatacgcaaaacaacagtattggatgttatgagaagacttctgcaggtattacctgtctctataggaagggtggttaactcttaagtcttcatgaagtttgaatcctttattatgaaatattg

SEQ ID NO: 135294 - DNA, 457 bp, Zea Mays
ctttggtgggatttcagtcttttatttatttgaaaaaatggataatgctgtatcaagtgatgctgtgctacaggttagtggtctgatgttagctaatcatacgagcatccgccacctgttcggcaaatgcctgggacaatatgaaaagctaaggaaaaagcaggcttttcttgacaactataggaaattcccaatgtttgcagataatgatctctctgaatttgatgaatctcgagagataatagagagcctagttgatgaatacaaggcctgtgagtcgccagactacattaaatggggaatggaggaccctggagaggcaaacgttgcagcagatcttgactctaagttggtagtgtaaatataaaggtaccatttcatgaatcatgatcaggcactttatatgcggaaacaatttgatgtcctatcatattgattattgattgaattgacaatc

SEQ ID NO: 135295 - DNA, 543 bp, Zea Mays
atggccccaaacgagattattaaaccagggaatcccaccgctaatctgcgatggtctaaccaagtgattgatcagcttccagctgcagcccagggcatggaacaacatgcttggtggcccgtcagttggtatcccatgtgggcatcggggcggctgaacagatggcagggcatggatccctgcgtcagcgggtatttgggggagcgaggcagcagtcgcggatccaaggacaggcacgagttaaggtgggcaaccagacctgcggcggcggagtctggtgaggaggaggggagcacactggccccagaggacaggcatggagagcggggcgcgcacgacgcgtgggtagtccgccatggtcgtcgatggaagggcacggtgggggaggatttcggcgtggcgcaggggcgacgaagatgcaaggaggatgtgcggcgcttcggtagcgacctcatcgttggaagggcgcgggttagggcgacgaagaccggtgaagatgcggggaggatgcgcggcacttcggtagcgcccccgtcgttgtaa

SEQ ID NO: 135296 - DNA, 381 bp, Zea Mays
atttcctcaccgaagatcaaggaactgcatgagcttcctcgaccacctgttaacacaccaaaaaatacaacatcccccactttagttgcccactctgccccattggtaccaaatcatgcatctttgacactcaaggttcaagatcattttaggacaagacaaacgctccaaagaactgcttcacctttaccaactccaccacctagttctatagcccacattttttctataccttataggggtattcagacagtaaagagacagaagatcaacacaagggagctgccagaatgagtctttcttctcttccttcagcataaacattcttggaagatcgtcagccgttgtcagcagctgctggatcggtcagcaaaacatagg

SEQ ID NO: 135297 - DNA, 1798 bp, Zea Mays
ccaagtaactgcacttctccccgattttccattcgaactcgcatcatggcgttccctcagatctcccgcagagccctcggcctcctgctcgtcatcgccgcagcggccgcgatcgtctcgcccgccaccgccgacgaggtggtggccctgacggaagccgacttcgagaaggaggtcggccaggaccgcggcgccctcgtcgagttctacgcgccatggtgtggccactgcaaaaagcttgcccccgagtatgaaaaacttggcgccagcttcaagaaggctaaatctgtactgatagcaaaggttgactgtgatgagcacaagagtgtatgcagcaagtatggagtttctgggtaccccacaattcaatggtttcccaaaggttccctggagccaaagaagtatgagggtcaacgttctgtggaagcccttgcagaatttgttaacagcgaagcaggtaccaatgtcaagatagctgccattccttcaagcgtcgtggttctgacttcagagacctttgactcaattgtccttgatgaaaccaaagatgtccttgttgagttttatgccccatggtgtggtcactgcaagcatcttgctccgatttatgagaagctggcttcagttttcaagcaggacgacggtgttgtgattgccaatattgatgctgacaagcacactgacttggctgaaaagtatgcattctgacttgtctatttcagtggttgttatgcacattagctttctgcctttagtttaacaccactggattttcttatattgtgattgtgatgaaaaaatttcctcaggaatcacagaagtgattctctcgtcgtttgacagactgttagggataacacaacctatgacaatttataataactacgtttgtcctttcttccatgttcacagcatctttaataatatacctctgcagatatggtgtttctggtttccctacattgaagttcttccctaagggaaacaaagccggtgaagattatgatggtggccgggacttggatgactttgtcaagttcattaatgagaagtgtggcaccagccgggatccaaagggccacctgaatcaagaggctgggcttgtgccaagcttgaatcctcttgtgaaggagtttctcaatgctgctgatgacaagcggaaggaagtcctctctaaaatagaagaggatgttgctaagctcagcggttctgcagccaagcatggaaagatatatgtgacagctgcaaagaagatcatagacaagggctctgactacactaagaaggagactgagaggcttcaccgcatgctggagaagtcaatcagtccttccaaagctgatgaattcatcgttaagaagaacattctttcgatattctcttcgtgaaggtgatgatccacagccacggcctgccagtgacttgaactgatagcgaaccaccactttacggaaaacagaacaaatcggatgatgtgagagaaaggtggtagtgaagtccagtagtggcagagctacttcgtgcacgtagatctcttttgcattttctggttccagggattgacttcgtactcacagtttacttcacacagaaggtttatgtagccatcctgtgataacatctactttctttttgatccaataaattggttattcagcttccgtgaattattttgccctaatgtaatcttggtgcatcttgtttggattggtcactcttagctggcaacatgggaattacctaaattgttgttggctagagggtcactcgtagagatgtcaatgtaagggcttgttcg

SEQ ID NO: 135298 - DNA, 1630 bp, Zea Mays
ccaagtaactgcacttctccccgattttccattcgaactcgcatcatggcgttccctcagatctcccgcagagccctcggcctcctgctcgtcatcgccgcagcggccgcgatcgtctcgcccgccaccgccgacgaggtggtggccctgacggaagccgacttcgagaaggaggtcggccaggaccgcggcgccctcgtcgagttctacgcgccatggtgtggccactgcaaaaagcttgcccccgagtatgaaaaacttggcgccagcttcaagaaggctaaatctgtactgatagcaaaggttgactgtgatgagcacaagagtgtatgcagcaagtatggagtttctgggtaccccacaattcaatggtttcccaaaggttccctggagccaaagaagtatgagggtcaacgttctgtggaagcccttgcagaatttgttaacagcgaagcaggtaccaatgtcaagatagctgccattccttcaagcgtcgtggttctgacttcagagacctttgactcaattgtccttgatgaaaccaaagatgtccttgttgagttttatgccccatggtgtggtcactgcaagcatcttgctccgatttatgagaagctggcttcagttttcaagcaggacgacggtgttgtgattgccaatattgatgctgacaagcacactgacttggctgaaaaatatggtgtttctggtttccctacattgaagttcttccctaagggaaacaaagccggtgaagattatgatggtggccgggacttggatgactttgtcaagttcattaatgagaagtgtggcaccagccgggatccaaagggccacctgaatcaagaggctgggcttgtgccaagcttgaatcctcttgtgaaggagtttctcaatgctgctgatgacaagcggaaggaagtcctctctaaaatagaagaggatgttgctaagctcagcggttctgcagccaagcatggaaagatatatgtgacagctgcaaagaagatcatagacaagggctctgactacactaagaaggagactgagaggcttcaccgcatgctggagaagtcaatcagtccttccaaagctgatgaattcatcgttaagaagaacattctttcgatattctcttcgtgaaggtgatgatccacagccacggcctgccagtgacttgaactgatagcgaaccaccactttacggaaaacagaacaaatcggatgatgtgagagaaaggtggtagtgaagtccagtagtggcagagctacttcgtgcacgtagatctcttttgcattttctggttccagggattgacttcgtactcacagtttacttcacacagaaggtttatgtagccatcctgtgataacatctactttctttttgatccaataaattggttattcagcttccgtgaattattttgccctaatgtaatcttggtgcatcttgtttggattggtcactcttagctggcaacatgggaattacctaaattgttgttggctagagggtcactcgtagagatgtcaatgtaagggcttgttcggttagctctcaatccatgtggattgagtgggattgattgggtttaaatctcaaacaagtcaaatttcttcacaa

SEQ ID NO: 135299 - DNA, 166 bp, Zea Mays
caaagcttaaacttcacctctatcagctctcacatgcttattggttattattgcccactgtcacaaaagatgaactaaagttgagaacggatacaaaacatccaccgagaagtgaaacagagaaacagttcaaaggggagccaaattgcattacggaacagaaaag

SEQ ID NO: 135300 - DNA, 196 bp, Zea Mays
tttgagttcatgtaacttattttagaaacttgagctcacaaactttctcttatttggtctctgtatggtggaattatgttattttataatctctgttcgttcagtcagtcgttgtgaactctcttctaatcgctcacttcattggtcgtgtgtacaaagacatattggatggagtaaacaataacatcagttagcc

SEQ ID NO: 135301 - DNA, 443 bp, Zea Mays
atccggcgcgcgcgtttggccgctgggcctttatcttctccagccggatctctctgttcgctcgtacccagctcttctccatggccggcttctcctgctcagccttgctccttcccttggtgcctggcgaccttcccatggccggctgccagaccttgctctagctcggctcccatctccctgctcgttcctccttcaagctcccatagccgctgagctctgcccatggccgccgtcgcctgtctgcgctccacctcgcccccaagctgcaaccgaccgccatctcccatggaagctgtgaccagccaaactcctttgcacagcgctctgctcgtcgtggagcactgctatcgccgtcgcgtcgtagctcccttcccccagtttctctctcgtcccccatggcgctcgcccctgcgcaggtaaatccccatggtctgagctcc

SEQ ID NO: 135302 - DNA, 751 bp, Zea Mays
catctcgtcgtcaatccgtgcgtcagcaagaaatcccaagaatcgggtgaagacgaagctagcagcgcgatattccccaagcgctcgacaaattgcctggatcggaaaatcgctaccgatctcgcggattcgtgtcagctgctgaagcggtaagctgatgaattattcagaatagttcaatcgatgaataaattaatgttttattgcgatgctcattagatgctcgataaatcgcgtgagtcacgaaactctcgtcgacttcgcagttcttgcgattatcgagccagattcagctatagcgaattatttcgctattccggtcacttagctgaattagtggatcgagtagatttttagtaggcatgtgtgttgatgaaataagtttagtattcctattagctagttaatagaattttctagtgtcgttatatcaatttgattaattgatatggtcgatgccctgcataaatagttagtttattctagtcatgatatcctttgttaatgatcaattatatagatgatgaatcgtgtctaggctaattatgtttaaagtgtatgatttgtttgcgatgttgtgttaggttcgtttaatttagaggagcgtaattattgcgcgtagtcatatagtaataactagtgttttcgtgtaagattgtacaacgcctcgccgctaggtgtttaaattcgtcatcgcgtagcactatttagggtttttgatattcctgtctatatgcattcatatgcataa

SEQ ID NO: 135303 - DNA, 751 bp, Zea Mays
catctcgtcgtcaatccgtgcgtcagcaagaaatcccaagaatcgggtgaagacgaagctagcagcgcgatattccccaagcgctcgacaaattgcctggatcggaaaatcgctaccgatctcgtggattcgtgtcagctgctgaagcggtaagctgatgaattattcagaatagttcaatcgatgaataaattaatgttttattgcgatgctcattaggtgctcgataaatcgcgtgagtcacgaaactctcgtcgacttcgcagttcttgcgattatcgagccagattcagctatagcgaattatttcgctattccggtcacttagctgaattagtggatcgagtagaattttagtaggcatgtgtgttgataaaataagtttagtattcctattagctagttaatagaattttctagtgtcgttatatcaatttgattaattgatatggtcgatgccctgcataaatagttagtttattctagtcatgatatcctttgttaatgatcaattatatagatgatgaatcgtgtctaggctaattatgtttaaagtgtatgatttgtttgcgatgttgtgttaggttcgtttaatttagaggagcgtaattattgcgcgtagtcatatagtaataactagtgttttcgtgtaagattgtacaacgcctcaccgctaggtgtttaaattcgtcatcgcgtagcactatttagggtttttgatattcctgtctatatgcattcatatgcataa

SEQ ID NO: 135304 - DNA, 2675 bp, Zea Mays
gcagcctcccaggccccccaactctcttcctcctctccctccccacaccaattcccattcccaattcgccctcctcaaatccggcgcccgcattcccgaccaccccgcagatctgggatccgccaccgccggatccctcgctgcccgcggcgccccgggacgcgcgtgatcctacccacaaccgtcaagttggcgccccagcgaaggtcgcagcgcctctccggcggcggcgcgggctccgccgccgcgcagccgcccggagcctccggcgcacaggcagcgatgggtgactcaggcgacgccgtcatggcgcgctggctgcagtccgcggggctgcagcacctcgcgacctcctccgccgctggtgctggcggtgccgactaccgcggtgggatgcctgggcttgggggcgctggcgcggggagcatgctgtcgagcctgctcatgcagggctatgggccagaatcggttgaagaaaagcatagactttatactcttctaagaggtttaaattttaacggagagtctgcacccacatcaatgtctgagccttacacaccaacggctcagagctttggtggtgggaaccctgtggaggggttttattcacctgaacttagaggggaacttggtgctggacttctagaccttcacgctattgatgatactgagcttctgtctgaggatgtagcatcggaaccatttgagccatcaccttttatgccaaaggatattgatgatgatgatgaggacgtgatatcagggagtcaacaagcaccattagataattatggtttagtgaccagtgaaaaagagagcactactagagaaaataatgttgcaaagattaaagtagtggtaaggaaaagacctttgaacagaaaggagctatctcgaaaggaagaagacatcataaccgtgcatgattcatcatgtttgacagtatacgagcctaagctgaaggtggatttgacagcttatgtggagaagcatgaattttgtttcgatgctgtcctggacgaacatgtttccaatgatgaggtttaccgtgaaacagttgagcccataattccaattatatttcagagaacaaaagcaacatgttttgcttatggtcaaacaggcagtggcaagacatacacaatgcaacctttgcctctgagagctgcacaagacatggttcgtctattgcaccaacctgtctatcggaatcagaattttaagttgtggcttagctatttcgaaatatatggtgggaaactctttgatcttctatctgacagaaggcaactattgatgagggaagatggcaagaaacaagtttgcattgttggtctacaggaatttgaggtttctgatgttcagattgtcaaggaatatattgaaagagggaatgcagccaggagcacagggtcaacaggggccaatgaggaatcatcaaggtcacacgctattctgcaactggctgtgaagaagcatatcatagtaaaagataccaggagacagagagatcgtgatgctaatgaagctaaaaatacaaaggctgtggggaaaatatcatttattgatcttgctggaagtgagcgtggtgctgatactactgataatgatagacagacaaggattgagggagcagagataaataaaagtctgttagctcttaaggaatgcattcgagctcttgataatgatcagatacacattcctttcagaggaagcaaacttacagaggttcttcgtgattcatttgttggtaactctaggacggtgatgatttcttgcatttctccaaacgcaggctcatgtgaacacacactaaataccttgagatacgctgatagggtcaaaagtctttccaagggtggaaacacaagaaaagagcagcccacaggaccaactaccacttctagccgggagtcttcgtcagctccatcatattcattgcctgctgaagctgaagaaattcctaaccagattcaagagaagagaccagttgatacttatcggaaaggcactgaaaattttacctccaacccttccgcggagcctgatagaaattccttcagtatggttccaaattattctaataaagggagagaagacaatggtgcagcatctggtaatgatagggagaggtatgatttgaagtccacccaaactgcttacactagtaaggcacagttggttcagaattcaacaaacacacaggaggagaaagtcacaaaagtctcacctcctcggagaaaggcttataaagaagacaaatctgatcggcagggcaactacgtgaaaaaggataatggtcctgagacaggtcggactgggtataagatacaacaggcaaagcagctgcaacagcagcaaaggccaacatctgcttcagcttcgtcaaggcaatctgaaaaggaaagttcttgtgatgatgtagaaattgatgcaattcttgaggaagaggaggccctcattgcagctcacaggaaggagatcgagaatactatggagatcgtacgggaagaaatgaaccttttggcagaagttgatcaaccaggtagcctgattgacaactacgtgacccaactgagctttctgctgtcacgcaaggctgcaggcttggtcagcctccaagcacgcttggcacggttccagcaccggctcaaagagcaagagatccttag

SEQ ID NO: 135305 - DNA, 3191 bp, Zea Mays
gcagcctcccaggccccccaactctcttcctcctctccctccccacaccaattcccattcccaattcgccctcctcaaatccggcgcccgcattcccgaccaccccgcagatctgggatccgccaccgccggatccctcgctgcccgcggcgccccgggacgcgcgtgatcctacccacaaccgtcaagttggcgccccagcgaaggtcgcagcgcctctccggcggcggcgcgggctccgccgccgcgcagccgcccggagcctccggcgcacaggcagcgatgggtgactcaggcgacgccgtcatggcgcgctggctgcagtccgcggggctgcagcacctcgcgacctcctccgccgctggtgctggcggtgccgactaccgcggtgggatgcctgggcttgggggcgctggcgcggggagcatgctgtcgagcctgctcatgcagggctatgggccagaatcggttgaagaaaagcatagactttatactcttctaagaggtttaaattttaacggagagtctgcacccacatcaatgtctgagccttacacaccaacggctcagagctttggtggtgggaaccctgtggaggggttttattcacctgaacttagaggggaacttggtgctggacttctagaccttcacgctattgatgatactgagcttctgtctgaggatgtagcatcggaaccatttgagccatcaccttttatgccaaaggatattgatgatgatgatgaggacgtgatatcagggagtcaacaagcaccattagataattatggtttagtgaccagtgaaaaagagagcactactagagaaaataatgttgcaaagattaaagtagtggtaaggaaaagacctttgaacagaaaggagctatctcgaaaggaagaagacatcataaccgtgcatgattcatcatgtttgacagtatacgagcctaagctgaaggtggatttgacagcttatgtggagaagcatgaattttgtttcgatgctgtcctggacgaacatgtttccaatgatgaggtttaccgtgaaacagttgagcccataattccaattatatttcagagaacaaaagcaacatgttttgcttatggtcaaacaggcagtggcaagacatacacaatgcaacctttgcctctgagagctgcacaagacatggttcgtctattgcaccaacctgtctatcggaatcagaattttaagttgtggcttagctatttcgaaatatatggtgggaaactctttgatcttctatctgacagaaggcaactattgatgagggaagatggcaagaaacaagtttgcattgttggtctacaggaatttgaggtttctgatgttcagattgtcaaggaatatattgaaagagggaatgcagccaggagcacagggtcaacaggggccaatgaggaatcatcaaggtcacacgctattctgcaactggctgtgaagaagcatatcatagtaaaagataccaggagacagagagatcgtgatgctaatgaagctaaaaatacaaaggctgtggggaaaatatcatttattgatcttgctggaagtgagcgtggtgctgatactactgataatgatagacagacaaggattgagggagcagagataaataaaagtctgttagctcttaaggaatgcattcgagctcttgataatgatcagatacacattcctttcagaggaagcaaacttacagaggttcttcgtgattcatttgttggtaactctaggacggtgatgatttcttgcatttctccaaacgcaggctcatgtgaacacacactaaataccttgagatacgctgatagggtcaaaagtctttccaagggtggaaacacaagaaaagagcagcccacaggaccaactaccacttctagccgggagtcttcgtcagctccatcatattcattgcctgctgaagctgaagaaattcctaaccagattcaagagaagagaccagttgatacttatcggaaaggcactgaaaattttacctccaacccttccgcggagcctgatagaaattccttcagtatggttccaaattattctaataaagggagagaagacaatggtgcagcatctggtaatgatagggagaggtatgatttgaagtccacccaaactgcttacactagtaaggcacagttggttcagaattcaacaaacacacaggaggagaaagtcacaaaagtctcacctcctcggagaaaggcttataaagaagacaaatctgatcggcagggcaactacgtgaaaaaggataatggtcctgagacaggtcggactgggtataagatacaacaggcaaagcagctgcaacagcagcaaaggccaacatctgcttcagcttcgtcaaggcaatctgaaaaggaaagttcttgtgatgatgtagaaattgatgcaattcttgaggaagaggaggccctcattgcagctcacaggaaggagatcgagaatactatggagatcgtacgggaagaaatgaaccttttggcagaagttgatcaaccaggtagcctgattgacaactacgtgacccaactgagctttctgctgtcacgcaaggctgcaggcttggtcagcctccaagcacgcttggcacggttccagcaccggctcaaagagcaagagatccttagccgcaagaaacctcccagatagtatgatgatcagcaatgactctgtccttgtgccttgtaatctgattgcttggagctcagttgtggtccatcagctgttttttacgtgtgcgctccagtaaattctatagccccaagcaggccaagacatgtgggagtggcttagggcggtcttgatgtcgagggcgtggtcctggttgatatcacctgacactttttgtcagggccgataaccagtttggtaatagtcctttttctatacagtggggctgcttgggtgtggttgtttttggcttgcccacttttacctttgttttctttttcacatattgtacgagggaaagctggaactgggattttgcagatatcagtgggtcgattttcgctggaggggtctgcggaaacagatacattgttgtcgtatattcattactgatattatttgcattgcggaaggaaaaggatgtgtgaatggtgaaacacttgaaattgccttttccccatttccgagatact

SEQ ID NO: 135306 - DNA, 1554 bp, Zea Mays
aacctccatttgttccacaatccacattccccaccccccacggcccccgggcccacccaccctctccctcttcttcctcactcctctctccctctctctctctctctctctctctctcgtcctgcgccacacgccgcggccgtctccgggcaggaaggaagggggcgggaagatgatgatgacgcgggcaccgatggggccgatggagggcgcggcggtggacgagatggtgcgccgcctcgtggagggcggccgaggcgggcgccaggtgcagctgtccgaggcggagatccggcagctctgcgtagagggcaagcgggtgctcctctcccagcccaatctcctccgaatccacgccccagtcaagatctgcggtgatatccatggccagtttgtcgaccttctgagattattcgatttgggtggttatcctccagcttcaacttacgtattcctcggagactatgtcgatagaggcaaacagagcctggagactatatgcttgctgctggcgtacaaaatccggtaccccgaaaatattttcctgttgaggggtaaccacgaggatgcaaagatcaacagagtctatggtttttatgacgaatgtaagaggaggttcaatgttcggctgtggaagatattctctgattgcttcaactgcctgcccatcgcagcgctcatcgatgacaagatactgtgcatgcatggtggcctctcgcccgaattgactagtttggaccagataaaagatattgagcgacctgctgagattcctgattatggtctcctgtgtgatctgctttggtctgatcctagccccgatggagaagggtggggggagagtgacaggggtgtctcgtgtacgtttggtgcagataaacttgtagagtttttggagaagaatgatctcgatcttatatgccgagctcatcaggtggttgaagatggctatgagttctttgcacaacgaagattagtgacaatcttttcagctccaaattattgtggagagtttgataatgttggcgctcttttaagcatagatgagagcctaatgtgttcatttcagatcctgaagccaactgatatgggtccaccgcatgcaagaaaacaaattccaaataagccaacaagagggtgaagccttggaccagcatccaatacttccagttccagtatcatgatgatcgtcagtcagctcaaagggggtgatctgttgtttggatagttggatccaccagggcctgacattagacatccatcagccaattaatccctttagccaccctttactcgtgtcttgggaggcggcttggctgtaaaggatattctgtacagcatttagttggattcaacacatcatctgttttactgttcttcctgccggcaagggacctcattggcagcatgacatacaatagatgttagtagtctcaatttgttttccttagcttctgccttgcgtttttttttttttggtgcgggacttgatgtatggtgattttatatctttgtaatatgtagatgttgcaggaaataggtctgcacaaaccc

SEQ ID NO: 135307 - DNA, 475 bp, Zea Mays
atcgcgacaacgagcagagaggaagcgagaggcgaggagagagaaagttctcgagctagacgagcgccgtgcgaggagagaagcgagatgagcggtgaggcggcggccgtgggcggaggcgaaggagaggcgaatggcatcccgccgaacgtcaccatctatatcaacaacctcaacgagaagatcaagctcgaaggtctcctactcccccgctccgctccttcgctaaaccctagggatttatgtcgatttgtctttagtttttgcggctccgtcgggggatttgcatcttagaatgtcgatgtgggcgccgtgccctagtagttgggcaatggaaatctctggcgtttttccatgggtttggggtgggctggtgttagtccatggaatgtacgcgtgagtatattgtgcccgactagtctgtgcatgtgatggtcatagagtgcttcaggtagcggttgctgttgctgccttt

SEQ ID NO: 135308 - DNA, 1095 bp, Zea Mays
atcgcgacaacgagcagagaggaagcgagaggcgaggagagagaaagttctcgagctagacgagcgccgtgcgaggagagaagcgagatgagcggtgaggcggcggccgtgggcggaggcgaaggagaggcgaatggcatcccgccgaacgtcaccatctatatcaacaacctcaacgagaagatcaagctcgaagaacttaagaagtccctaacagccgttttttcccagtttgggaaaattcttgatgtgcttgctttcaagactttgaagcataaaggtcaagcttgggttgtcttcgaagatgtcgcatcagctactgaggctctgaagaggatgcagggctttcccttctatgacaaaactatgagaattcaatatgccaagaccaaatcagatattatagcaaaggctgatggcacctttgtacctcgagaaagaagaaagaggactgatgaaaaatctgaaaagaagcagaagcgcgagcatcaccatgatgctggtgctagtcaaattggcatgggtgtaactgcttaccctggtgtttatggggctccacagctcacccagatacctatagcaggaggacaaagggtcatgatgccagagattatcgtaccaaacaacatcttgtttgtccaaaacttgccacacgagacgacgcccatgatgctccagatgctcttctgccagtaccctggcttcaaggaggttcggatgatcgaggcgaagcctgggattgctttcgtggagtatggagacgagacccaggccactgctgccatgaacaaccttcaaagcttcaaaattacaaaagaaaaccagatggtcatcacatatgcgaagaagtaatgagctcccgagcaatgtttacctgatgtgtgagatgttgtattccgagttttacacaactggtaaatttccttcatgtgttaggtagacagcatcctgaacaacctgttaattgtacccactgggctgcagctatgtgcacttcaggaacggagatgaaatgcaaactgttattatttggtctgctcttgtattcacacgtagcaagtagcaactgcttcgcttaattgggcatttgtttgc

SEQ ID NO: 135309 - DNA, 216 bp, Zea Mays
atggcatcagacattgaggaattaccgacactagcgcatggcatgacagcagttccagcagctattttgggagtagcagatgacacaataggggttgtggctgctgcatcactggtagcatgtggtagccagttcttgttcgaggtgtccctttgtgaggatcaccggtgggttagcgttagtcactcaacaattaagccatccacaatcatataa

SEQ ID NO: 135310 - DNA, 832 bp, Zea Mays
aattcaaaaccctagcagcaccacccgtcttcctcttcacccacattataaagatcctccacttcgcactttcgccgccgcctctctccttcccgagcaggaggcggacaaggtaagcagcaatcgcaggaaccctagcgccgccgcacccgcaggaatgggtatcgacctcgtcgccggtgggaggaataagaagaccaagcgcactgcgcccaagtctgacgatgtctacctcaagctcctcgtcaagctctaccgtttcttggtcaggaggaccaagagcaatttcaacgctgtcattctcaagaggcttttcatgagtaaaaccaaccgaccaccaatctccatgcgccgccttgtcaagtttatggaaggaaaggagaagaacattgctgtcattgttggcacagtcacagatgacaaaaggatccaggaggttccagcaatgaaggttactgccctgaggttcacggagacagcaagggccaggattgtcaatgctggtggcgagtgcctcacatttgaccagcttgctcttcgtgctccacttggcgagaacacggtatgctttgttttttttatgttgaacggtacaagctgtgtgaacattagtctgcattttaaactattgtgtttctgaacagagttaagccttatgctcctaacaacaattaagtgttgtgtaagttaaccatgctataggcgctgattgtttagcgggatactttttaagattccttacagaagcaagtatttcaactctattttaatctatttctactggtcatttggtcttattttctggctcccagtgatggtctatattaaccat

SEQ ID NO: 135311 - DNA, 970 bp, Zea Mays
aattcaaaaccctagcagcaccacccgtcttcctcttcacccacattataaagatcctccacttcgcactttcgccgccgcctctctccttcccgagcaggaggcggacaaggtaagcagcaatcgcaggaaccctagcgccgccgcacccgcaggaatgggtatcgacctcgtcgccggtgggaggaataagaagaccaagcgcactgcgcccaagtctgacgatgtctacctcaagctcctcgtcaagctctaccgtttcttggtcaggaggaccaagagcaatttcaacgctgtcattctcaagaggcttttcatgagtaaaaccaaccgaccaccaatctccatgcgccgccttgtcaagtttatggaaggaaaggagaagaacattgctgtcattgttggcacagtcacagatgacaaaaggatccaggaggttccagcaatgaaggttactgccctgaggttcacggagacagcaagggccaggattgtcaatgctggtggcgagtgcctcacatttgaccagcttgctcttcgtgctccacttggcgagaacacggtcctcttgaggggccccaagaatgcccgtgaggcagtgaggcactttggcaaggctcctggagtgccgcacagccacaccaagccgtatgtgcgctccaagggaaggaagttcgagaaggctcgtggcaggaggaacagccgtggattcaaggtttaaaacaaattgtggccctccgtgttgccatcagcatagtgcaaccgttgtgtttgatcagtcgacagtaattagtcatcactctgtaccgagattagtagcacaatttgttgtcctggtttgaattttggaagatatttgatgtcgtctccttattatctactcgttactggttgagcacgaagattgttttgtgatactcctacatgatttaagacggttcccgacgttccatgtatcatttttgtggta

SEQ ID NO: 135312 - DNA, 742 bp, Zea Mays
ttttttttgttcacgtgctactttattgtcagattagttgtgtatgttaatagtagtggatgaaaaattgctgacaagcaaaatggttagtctagctggtttgcatttggccatggatatggtgctgaaatagtgtcttgtatgttaacaggagaagaacattgctgtcattgttggcacagtcacagatgacaaaaggatccaggaggttccagcaatgaaggttactgccctgaggttcacggagacagcaagggccaggattgtcaatgctggtggcgagtgcctcacatttgaccagcttgctcttcgtgctccacttggcgagaacacggtcctcttgaggggccccaagaatgcccgtgaggcagtgaggcactttggcaaggctcctggagtgccgcacagccacaccaagccgtatgtgcgctccaagggaaggaagttcgagaaggctcgtggcaggaggaacagccgtggattcaaggtttaaaacaaattgtggccctccgtgttgccatcagcatagtgcaaccgttgtgtttgatcagtcgacagtaattagtcatcactctgtaccgagattagtagcacaatttgttgtcctggtttgaattttggaagatatttgatgtcgtctccttattatctactcgttactggttgagcacgaagattgttttgtgatactcctacatgatttaagacggttcccgacgttccatgtatcatttttgtggta

SEQ ID NO: 135313 - DNA, 1506 bp, Zea Mays
ctcagcagcagcacaaaaagaagaattgacatgtgacgaatctcagaactttcggatcagctagcttttgagaaacctccacgaaggcttgcagaggtcgcaggccggatgtataaattgcagagcccggccggcacgccaaaaatattatccagacagacaggcacatcaacggacagacacacacaagcaaggcggctagcggtgcaagtagtgcgaagctagctaggtgctggtgcatgcaatggcggcttcgctgggtctgaaccctgaagctgtcttcacttcctacacctcctcgccgccgttcatgtcggactacgtggcggcgagcttcctgccgccggccgtcgtcgactccacggacttctctgcagagctcgatgatcttcaccaccacttggattactcatcgccggcgccgaccttggccggggctcggagcgatcgcagcgagaagcagatgatgtatgtactacctatgcacagcaaattttaccaaattaattgttacggtgtagctagttattattggttgctgttcctgttgcttactgtagtttattgctacggcgatttcatttcatccatcagcaggtggtgtgagggtggtggtggcgagaagagactcggtaggatcgggttcagaacgagatcagaggtggagatcttggacgatggattcaaatggaggaagtatggcaagaaggctgtcaagagtagcccaaatccaaggtacacccatatgttcacctggaatatagttaaaataaattcccagaacatgaaagcaacaagcagaaaagcaacgaagaagaaatagaaacgaaatggaatgtttactggatcgatgctgatggatatataattgtgcatgcacacgtacgtacgtgcaggaactactaccgctgctcgtcggagggctgcggcgtgaagaagcgggtggagagggaccgcgacgacccccgctacgtcatcaccacctacgacggcgtccacaaccacgcaagccccgcagccgccgccatcatccagtacggcggcggcggcggattctatagcccgccgcacagcggctcgccgtcggccgcctcctactcgggctccttcgtcctctgacttctccgggccttgacccagagtgatctgatctacctgctttatcccagtcgtaggatgagaagagtgttcagacttcagagacatcagttcagcggccggctaaattcggacctgattgtagatatttacacctcaattattggttacctcttgtgacgactgacgaggcatcataatcgtcactaggataattgatcacgcatgtttttcgcttaattagtttctgtgtatacatacgaagtttgccgtatagctgataggctgctgatttaacttgacttctctttgttcggtattagaccccaagatcaacatttacgctgaacagatgctttgtaacagtgaaggaatattttatggttttttcagatatatgccattatg

SEQ ID NO: 135314 - DNA, 1427 bp, Zea Mays
ctcagcagcagcacaaaaagaagaattgacatgtgacgaatctcagaactttcggatcagctagcttttgagaaacctccacgaaggcttgcagaggtcgcaggccggatgtataaattgcagagcccggccggcacgccaaaaatattatccagacagacaggcacatcaacggacagacacacacaagcaaggcggctagcggtgcaagtagtgcgaagctagctaggtgctggtgcatgcaatggcggcttcgctgggtctgaaccctgaagctgtcttcacttcctacacctcctcgccgccgttcatgtcggactacgtggcggcgagcttcctgccgccggccgtcgtcgactccacggacttctctgcagagctcgatgatcttcaccaccacttggattactcatcgccggcgccgaccttggccggggctcggagcgatcgcagcgagaagcagatgatcaggtggtgtgagggtggtggtggcgagaagagactcggtaggatcgggttcagaacgagatcagaggtggagatcttggacgatggattcaaatggaggaagtatggcaagaaggctgtcaagagtagcccaaatccaaggtacacccatatgttcacctggaatatagttaaaataaattcccagaacatgaaagcaacaagcagaaaagcaacgaagaagaaatagaaacgaaatggaatgtttactggatcgatgctgatggatatataattgtgcatgcacacgtacgtacgtgcaggaactactaccgctgctcgtcggagggctgcggcgtgaagaagcgggtggagagggaccgcgacgacccccgctacgtcatcaccacctacgacggcgtccacaaccacgcaagccccgcagccgccgccatcatccagtacggcggcggcggcggattctatagcccgccgcacagcggctcgccgtcggccgcctcctactcgggctccttcgtcctctgacttctccgggccttgacccagagtgatctgatctacctgctttatcccagtcgtaggatgagaagagtgttcagacttcagagacatcagttcagcggccggctaaattcggacctgattgtagatatttacacctcaattattggttacctcttgtgacgactgacgaggcatcataatcgtcactaggataattgatcacgcatgtttttcgcttaattagtttctgtgtatacatacgaagtttgccgtatagctgataggctgctgatttaacttgacttctctttgttcggtattagaccccaagatcaacatttacgctgaacagatgctttgtaacagtgaaggaatattttatggttttttcagatatatgccattatgaaaataagtattataaagatgtcatcataattcgtgatactatagtt

SEQ ID NO: 135315 - DNA, 1263 bp, Zea Mays
ctcagcagcagcacaaaaagaagaattgacatgtgacgaatctcagaactttcggatcagctagcttttgagaaacctccacgaaggcttgcagaggtcgcaggccggatgtataaattgcagagcccggccggcacgccaaaaatattatccagacagacaggcacatcaacggacagacacacacaagcaaggcggctagcggtgcaagtagtgcgaagctagctaggtgctggtgcatgcaatggcggcttcgctgggtctgaaccctgaagctgtcttcacttcctacacctcctcgccgccgttcatgtcggactacgtggcggcgagcttcctgccgccggccgtcgtcgactccacggacttctctgcagagctcgatgatcttcaccaccacttggattactcatcgccggcgccgaccttggccggggctcggagcgatcgcagcgagaagcagatgatgtggtgtgagggtggtggtggcgagaagagactcggtaggatcgggttcagaacgagatcagaggtggagatcttggacgatggattcaaatggaggaagtatggcaagaaggctgtcaagagtagcccaaatccaaggaactactaccgctgctcgtcggagggctgcggcgtgaagaagcgggtggagagggaccgcgacgacccccgctacgtcatcaccacctacgacggcgtccacaaccacgcaagccccgcagccgccgccatcatccagtacggcggcggcggcggattctatagcccgccgcacagcggctcgccgtcggccgcctcctactcgggctccttcgtcctctgacttctccgggccttgacccagagtgatctgatctacctgctttatcccagtcgtaggatgagaagagtgttcagacttcagagacatcagttcagcggccggctaaattcggacctgattgtagatatttacacctcaattattggttacctcttgtgacgactgacgaggcatcataatcgtcactaggataattgatcacgcatgtttttcgcttaattagtttctgtgtatacatacgaagtttgccgtatagctgataggctgctgatttaacttgacttctctttgttcggtattagaccccaagatcaacatttacgctgaacagatgctttgtaacagtgaaggaatattttatggttttttcagatatatgccattatgaaaataagtattataaagatgtcatcataattcgtgatactatagtt

SEQ ID NO: 135316 - DNA, 750 bp, Zea Mays
ctgaatttcacttgtacgtctcaactcgacgagaccaccacgatcgatctctcaccgccgctctctgcattcctactgaatctatctaccactcaggtacacgagctgcaccggctgtaccacgtacagaagcagctgatgcaggtgcggcaggcacacgcgcctgctcctgcgacccgtgctccagcagtgctcgacgacgccaagccaagaagaccgcagctagacatctggtgcagcgagacggcgcgaaacccccctcagcagcagttcatcagcttcaacacggccacggcaccggcgcctgctgccccggccgagaactgcaaccttgagctgacactcgcaacgggaccgagcagcagcggcagctgcgacgccggaaggtggcaggggaagcggctcaaggcgtcgcccaactcgggctccgccgccaccgcggtgtcttccacgtcgacggattcggagctggcgcggttcggggacatcgacgtcgtggcgacgccggtggccaggtttcacggcgaggttactaggaggatggacgaggtggcgcagggcccgtggatgtaccgctgcctgagcttgaagacggcgtgacgagtttgtgttgtatgtaggtaggaatggccccatggggatttggagttgtagagttcagacttcagagggagacagagcatttttctgtgatacatgcacacgactatacatcacattcatcgtggtgtttcagaagaccaaaatgag

SEQ ID NO: 135317 - DNA, 1346 bp, Zea Mays
gtccagtccaggttggagaatctccttcctcctcttcctcccctgcctcgctagatataacaaaccatgccggcctacttgccagctcgcagtcccagcagagaccagagcctccggaaaccgcagcctcttggcctttgcttcctcgcttatctggcgtacaggctaagctagagagggagggagggagagctcgccgtttccgacccatcggcagcgccggagatcctgaaaagagtgccagctgagtacctcctgctgctcgaattttctcgtgggacagacaattttcagataaggacgtcagggagcatcatggacgacagggagcagatgaggatgaccgtcctgaaccaagaacaggtcttcagacatcaggtaccgacgaaacgagcacctgcagtctgcgcacacgtacagtacgatgaatttcacttgtacatctgaactcgacgagggcgaggccaccacgatcgatctctcaccgctctctgcattcctactgaatctatctaccactcaggtacacgagctgcaccggctgtaccacgtccagaagcagctgatgatgcagcaggcacacacgcctgctccggcgacccgtgctccagcagtgctcgacgacgccaaggccaagccaagaagaccgcacctagacatctggtgcagcgagacggcgagaaacccccctcagcaacggatcatcagcttcaacacggccacagcaccggcaccggcaccggcaccggcgcctgcaagggccgaggactgcaaccttgagctgacactggcaacgggacgaccgagcagcagcagcggtagcagcagctgtgacgccggaaggcggcgggggaagcggctcaaggtgtcaaccaactcggactccggcgccaccgcggtgtcgtccacgtcgacggactcggagctggcgcagttcggggacatcgacgcggcgaatctgccggtggtcaggtttcagggcgaggttactaggaggatgggcgaggtggggcagggcccgtggatgtaccggtgcctgagcttgaagaccgcgtgacgagtttgtgctgtatgtagttgtaggtaggaaatggggagttgcggttgtagagttcagacttgagaggattgagaaggagacacatcacatgtcttgtgttttacatgcacggattgggatcctcggcagtcgactgctctcacgcatcaacaccggtagactccaactgtcagcctcctggcagtcaactgcgcgactgccgagtatccggatcctacatgcatatgcaccacagaggtgtttcagaagatcaaaaagagagaaaggaacaaaggtaaattgtggc

SEQ ID NO: 135318 - DNA, 291 bp, Zea Mays
atgacattcagcttaggtttttgggtattccagctttattctgacgactcaatcatccagccttgcaagttaactgtcgagacgattaaaccttcattccgatccagcaccagagccctgctgagcggctgcaccacggtaggctgcagactcttctgcatagcgttgcttgtcgacctgagactgctccacatatggctgcctctcctccgctgtcatcttttgccacctttctccgagcttctttgcaatctctgtggtcgccagttcaggattgctgctcttgatatt

SEQ ID NO: 135319 - DNA, 2188 bp, Zea Mays
aacgctcaacttgaaagtcacaggacagcacacaccccacccacaactaccaaccttctccggaaggccaaatccctccgggccaagggaaacgagggagagagaccctccgcccctctcctctccctctccttccggtgaggcggtgagctatggagtcggcagcggccgcgaagacggtggagcggctggcgcagcgcctggtgccgccggcggagcccacccccactgccccccaccgcctgtcgtggctggaccggtacccgacgcagatggcgctcatcgagtcgctgcacgtcttcaagcccgacccggcgcgtgacgggctcagccccgcggagaccatcgagcgggccctcgcacgggcgctggtcgactactacccgctcgccggccgcctcgccgtgtccgacagcgccgggggcctgcacgtcgactgcagcgctgagggcgtctggttcatcgaggccgccgtacggtgccgcctggaggacgtcgactacctcgagtacccgctccagatccccaaggacgagctgctcccgcacccgctgccgaggcccagccacgaggaggagagcaagctcatcctgctcgtccaggtgacggcgttcgcgtgcggcggcttcgtggtgggcttccgcttcagccacgcggtggcggacgggctcggcgcggccaagttcatgggcgcggtgggggagctggcgcgcggggcggaccaggtctccgtggcgcccacctgggcccgcgacgccatcccagacccgtcgggcgcgctggtcggcagcctccccgagcccacgggcgccaagcgcctcgagtacctggccatcgacatctccgccgactacatcgaccacttcaagtcccagttcgcggcggccacgggcgggggccgctgctcggccttcgaggtcctcatcgccaaggcgtggcagagccgcacccgcgccgcggggttcgaggaccccgacacccccgtgcagctctgcttcgccatgaacgcgcgcccgctcctcggcgcccgcctcccgcggggcggcgccggcttctacggcaactgctactacatcatgcgcgtcgcgtccacggccgacaaggtgtcctcgtcgtccgtcaccgacgtggtgaagatcatcagggaggggaagaagcggctgccgttggagttcgcgcggtgggcggcgggggaggagggcgccgacggcgtggacccctaccagatcacctccgactaccggacgctgctggtgtcggattggacgcgcctcggcttcgcggaggtggactacgggtggggcccgccagcccacgtggtaccgctgacgaacctggactacatcgccacgtgcatcctcgtcaagccatgggcccacaagccaggggcgaggctcatcacgcagtgcgtgacgcccgaccgcgtctcgcgcttccacgacgccatggtggacatgaactagcgccccgcctcgtcctgcgttcaccagccgccgtcgtctccgccggcctcccgtttgttcatgggtttcttgtttttttttctcctctcagttactgtggtaattattagttggtattacaattactaatcacattgctgccttaggacgagtggtcatctagaaaaaaaaaccgaagcaataaactactaatataaagagagaaaaagataagaaaggaaaaaacatgataataaagtgttgtacatactgcacaggcaggcaggcagccagctagagccaggtgaggtgaagaacagaaggagaggtatgggcgggggacagatagacacagctagatagtagttggcaatagtgggattggtattggattccttatttccgttggatgtcttgttctcttttgttggtgtcgggtgcaagtacatggcatttttcttttcttcttgcctgttgttctttgggggctttgatcggagaaaggatcaaaactggagtcggtgggaagccaccaactagtctgcccctaaataccataataagattgtatttgtaatatagtgttcagcattttttttctgtctagtatatacatgaactacaagacatgtgagcttaagtctcaaaggaagaaaaaaacgcagtaatggttacatactgcatacagagagccctctaattttagcgcgtgaagatgtggcttccgctttgatgttggacgctgg

SEQ ID NO: 135320 - DNA, 2298 bp, Zea Mays
gtcttccgtacgcccacccgacaccaagctgtaaactcgagctcccccacactgcgagtccgccgaaaactccaaaagctctgcgctttctgccccctcctccactcctcgagatcccatccatggtggcggccttcgcacctcgcccccggatctgagcccctccagctactgcgggatattttctccagcgcctccgcttcgctggtccgaccgccgcacggttctctgccgtgcaagattcgccgctcagttttcgtggagtcggtagttgtccgtggctcggccatgtgttcctgaaacgggcctttgatgccagtggtgggcgcccacgctctcctgccgctatgtggaagcagtttctcggcaaaatctcgcggaagtcccccaaatcaggcgggcgcgggggctcgcggccggcgaagtcgccgtcgtcgcgtggcgccgccaatggggcgccgccggagctgagcgcttcgtcgccggcggcggcggcgtcgcccttccccccgccgtccggggcggagaccagggaggacgtgttcctccgcaagctcaacgtctgctgcgtggtgttcgacttcgcggccgagcgggggaaggactcgccggaggtggaaaggaagcggcaggtgctcgtgtccctcgtcgactgcgtctctgaggcggaggagcccctcacggaggcgatgctctcggcctgcgtacgcatgttcgccatcaacctcttcagggtcttcccgcccaagctccggtccggtgccagtgccgccaccgacgaggacgagccgttctttgacccctcgtggtaccacctccaggtcgtgtatgaattgctcctacggttcgtcatgtccccggtcgtcgatgtcaaggttgctaggaagtacatggacaactccttcatctctaggcttcttgaccttttcgattctgatgatcctagggagagggaatgcttgaagacagtgctgcacaggatatacgggaaatttatgggcaatcgcccgttcattcgcaaggctgtgagcaacatcttctataggtttgtgtttgagacagatcaccacaatgggattgccgagctactggaggtgtttgggagtgtgattaccggctttgcgaagccattgaaggaggagcataagttgtttctatggaaggcattgattccacttcacaaaccaaagacggttggagtatatttaccacagttgacatactgcattacccagtttatcgagaaggaaccaaagctcacagggactgttatcagaggcctcctgaagtactggccggtgacgaacagtcagaaggagatgatgttcttaggagagttggaggaggtgctggagctgacagaaatggcagatttccagaagtgtgctgttcctttgtttcgcaggatcgcacagtgcctgaatagctctcattttcaggttgctgaaagggccttattcctgtggaataatgaacatttgttcgacctgatctcccaaaactgccaagttatcctgccaatcatctatccagctctggagaggaatgcccgttggcactggaaccagtcagttctaaatgttacaatgaatgtcaggaaaatgttctttgacatggatgagagattgctgctggcttgtcagaccaattttcaagaggaggaaaagaagcgggctgcatctgaggagcgaagaagacttgtgtgggagcatctcgagaggaatgccgcatttcatcctgtaaccggagacattggctttgcagttcctcctacatctgctcctctggttgctcccactatgacatgattaataatgggctcatatgtaattcataccgcctgattgttagctaggtttgggtgtttggtgttgccccaggaattttgttgcctttgtaagccccttgtgaagtctgtaattaatagatgctggtttgacaatgaatgcttgattctttggtgtactctcaagttatggtcatatctttgtatctcaagataatgcctagttctactttgctggaggggtgaaaaggtgtttccttagaaaatttccaggggagctgaacagctgatgctatgcacatattgatgcatttcttttatcttttgggttctcatggatctacacaaatgtcatgtttaatgggtgaacatgaaactgaggtaagttcatatcacttatcacgatttgataagtccaatgtttttttttcttttttactcgtaagggatcggaatttgcaactagaatttgtagttgttcatggaaattgtaagtcctgtcaggccatctt

SEQ ID NO: 135321 - DNA, 434 bp, Zea Mays
tggggaagcaatatgagtccaggatacaaaaaattattactctctggaatctcagctttattttggtctatttggcttagtcgaaatgaagttgcttttaatcataaaccaataccatcaattctgcaggtcattttcagaggtacttactggttcagattctggagacttctacagaaggaggaatcacatcaacaaatcctcgatgtctgtcaagcgttggaagtggtggcgatggaagtctttgcaaatcatggatggcgctcaaatgcaagaattgaggatgcctagagttacctacattctagtgattttgcttctttaagttagtttcattatctatgcaacgtttctcggatgtaataattgtcttgtgttggctgtacgcattaccatgctaaagccggaactcttgtttccattatcaaaaaaaa

SEQ ID NO: 135322 - DNA, 1620 bp, Zea Mays
tataccagtaccacacacaatagcaatagcagcagtactgacatgacagctacggctaatacgacggcaatggcggcggagctccacttcgtgctggtgccggttatggcgcagggccacttgctccccatgcttgacctggcgcgcctcatcgctggtcacggcgcgcgcgtcaccgtcgtgctgacgcccgtgaacgccgcgcgcagcaggcccttcctggagcacgccgcgcgggcggggcttgccgtcgagttcgtcgagttcgccttcccgggacccgcgctgggcctgccccagggctgcgagagcatcgacatggtgacggacttatccctcttcgtcccgttctacgaggccatgtggcttctcgccgcgccgctcgaggcgtacctccggtcgctgccccggcgccccgactgcctcgttgccgacacgttgggcccctggacggcgggcgtggcgcggcggctcggcgtcccgcgattggtgctccacgggccgtccgcgttcttcctcctcgctgtgcacaacctggccaggcacggcacgtacgaccgcgccgccggcgacatggagccgttcgaggtgccggacttcccagtgcacgtggttgtcaacagggcgacgtcgctcgggttctttcagtggccaggtatggagaagttccgtcgggagacgctcgaagcggaggctacagctgacggactgctcgtcaacacgtgctcggccttggagggcgcgttcgtcgagggctacgcggcggagctcggccggaaggtatgggctgtcgggccgctctgcctcatcgacactgacgcggacacgatggcgggtagaggcaaccgtgcggcgatggatgccgagcacatcgtgtcctggctcgacgcgcgaccggcggcgtctgtgctttacatcaacttcggcagcatcgctcgcctgtccgcaacgcaggtcgccgagctggccgccggtttggaggcgtcgcaccggccgttcatctggtctactaaagagaccgccggactggacgcggagtttgaggcccgtgtcaaggactacggcctcgtcatccgcgggtgggcgccgcagatgaccatcctatcgcacaccgccgtcggcggcttcttgacgcactgcgggtggaactcgacactggaggccatctccaacggtgtgccgctgctgacctggccgcacttcgccgaccagttcctgaacgaggcgctgatcgtggacgtgctcggcgtcggcgtccgcgccgacgtgaaggtaccggcctcgcacgtaatgctcctgaatgccgggaagcgggagcggctgctggtacaggtcgggagggacgatttggagaaggtggtggccgagctcatggacgaggggccagcgtgtgcggcgcggcgggcgaaggtgaaggagctcgcccacaatactgtggccgcggtgactgagggcggctcgtcggacatagacgtgaagaacatgctccgtcacgttgtggagttgtcgcgcaaggatgaagacttggttcttgatgcggcggaggttgcgatgaagagaaaggtggacatggacgactaggatggcatactcaaagtggcagtgacatctgaagtcgct

SEQ ID NO: 135323 - DNA, 871 bp, Zea Mays
catcctcccgcccattgctacaaattcccctcgccaccccaccggtcgcaaacccaagcttaaaccacaacgcaaacaaccaccaaagcaatcgaaaagcaaccctgcaagtgcaggcaaagagagggcgcgaccaaacagatccaatccaatggcgatggcaccgtccgcagcatgcgtcgtctcgttccccgcccgcccggcggcgtccacggccgggccccgcgccgccgcgggcgccggggcggtccacgctttcgcggggtcggcggagggcgccaagtggtgggcgccgctgctggggtggtcggggaaggccgactacctggaggccccggccccggcgccggcgggggcgcaggacgaggcgccgcggaggcagttcgtgggggtgatgacggaggagaaggcccgggagctgcgggcgcggatggcgcagacggagtccttccacgacgccatgtaccactccgccatcgcgtcgcgcctcgcacgctcctcctagggttggtgcgcgcgcggccagctcgccggtgggttgcgccgccgccgtagcccggtctctgtctggccgtctctgtgtacatatggtagatttgtcagtagctggctagctgctcccgctgttggtgaaggaggggggaacgaaagagcaaggagatctggatttttttttttagcgtgtgctccttgcttgttccatctccctccgccgcgttggttgctcttgctccccggcaggatcactcttcttttttccggttgtgattcgacatttccggtgtgaactggcattatgctccgcaccaagaacctgtaacccattgttgtagtctcaatttgctttcctcagttgcccgtgtccattaca

SEQ ID NO: 135324 - DNA, 845 bp, Zea Mays
tccgtccgtgtccgtctcctcccccatccgctccggctccctccctgctataaataccggaccgaccctaggcctccgacagcaatcagcaataatctcgccgtctcatcgcaaaacccagcgccccaaagcgaccccaccgaagcgtcccagcccgaccggaatggcgatggcaccgtgcgcacccgcctccgtctcctccttccccgcccgcccagtgcgggccccttccgctgtccggccgcgcgccgccgcgatccgcgccactgcggcggcggcggagggtggcaggtggtgggcgccgctgctggggtggtcggggaaggccgactaccttgaggccccggccccggtgccggcggtgctgcaggatgacgacgcggccgcggcgcgcaggcagttcgtgggggggctgacggaggagaaggcccgccagctgcgggcgcggatggcgcagacggagtccttccacgacgccatgtaccactccgccatcgcctcacgcctcgcccgctccgcctaaaccggccggccggccggccagctggccgccgccgtagatctagagctccgcccgcttttgtgtatactggtttcgccttcattttcggggatgtctttgtttccactaccccattgtcgtcgtcgtcgtcgtggagcaggaggggcagggatctgctggttttatgaggcgccctacccctccctcccattgtccaccgcggcggccgctccgggatgtgcccgatctgcgcagatccgcgaagcgttgctgcaacctactactatgtactagtactgttactcttcaaagttccctctcttattagttgttgctaaattaa

SEQ ID NO: 135325 - DNA, 496 bp, Zea Mays
acataaattatatagattcattaattatctaaaagaaattttaatttgggacggagagagtaatatactatatcatggatacaatcgaaattacaaaattagccaacacgagcatgtaaggaatcgtttggaagctagaggattgaacgggattgaagaggctaaaatcctcggatgatattaaccctttcaatcctctcacaatccttcggctctcccaaacaagcactaaatggaataccatcgctgaaaatatttctcaatctggaattactttatttgctcaaccattccatccttttgccaaacataatagcaagaccaaagaaaacatatgggtacatagcacactagttagtctgaattgccatgtcagctctcatccaacaatctggaatcccgatggaatcaaattttgctacctgaaaacttatcccctcatccttcgagggatgcccatcatttgctctccacatcatacagttccgatctgaaa

SEQ ID NO: 135326 - DNA, 3924 bp, Zea Mays
ggaaggtgcggagaggaagaggaagcgaagcagcagcagcaccaccactgcgcggcattgcagcgagcaagcgggagggatctggggcatggtggcggtcgctgccgctgccgctcggatctagagggccgcacgggctgattgccctccgccggcctcgtcggtgtcggtggagtgtgaatcggtgtgtgtaggaggagcgcggagatggcggccaacaaggggatggtggcaggctctcacaaccgcaacgagttcgtcatgatccgccacgacggcgacgcgcctgtcccggctaagcccacgaagagtgcgaatgggcaggtctgccagatttgtggcgacactgttggcgtttcagccactggtgatgtctttgttgcctgcaatgagtgtgccttccctgtctgccgcccttgctatgagtacgagcgcaaggaagggaaccaatgctgccctcagtgcaagactagatacaagagacagaaaggtagccctcgagttcatggtgatgatgaggaggaagatgttgatgacctggacaatgaattcaactataagcaaggcaatgggaagggcccagagtggcagcttcaaggagatgacgctgatctgtcttcatctgctcgccatgacccacaccatcggattccacgccttacaagtggacaacagatatctggagagatccctgatgcatcccctgaccgtcattctatccgcagtccaacatcgagctatgttgatccaagcgttccagttcctgtgaggattgtggacccctcgaaggacttgaattcctatgggcttaatagtgttgactggaaggaaagagttgagagctggagggttaaacaggacaaaaatatgttgcaagtgactaataaatatccagaggctagaggagacatggaggggactggctcaaatggagaagatatgcaaatggttgatgatgcacgcctacctttgagccgcattgtgccaatttcctcaaaccagctcaacctttaccggatagtaatcattctccgtcttatcatcctgtgcttcttcttccaatatcgtatcagtcatccagtgcgtaatgcttatggattgtggctagtatctgttatctgtgaggtctggtttgccttgtcctggcttctagatcagttcccaaaatggtatccaatcaaccgtgagacatatctcgacaggcttgcattgaggtatgatagagagggagagccatcacagctggctcccattgatgtctttgtcagtacagtggatccattgaaggaacctccactgatcacagccaacactgttttgtccattcttgctgtggattaccctgttgacaaagtgtcatgctatgtttctgatgatggctcagctatgctgacttttgagtctctctctgaaactgccgaatttgctagaaagtgggttcccttttgtaagaagcacaatattgaaccaagagctccagaattttactttgctcaaaaaatagattacctgaaggacaaaattcaaccttcatttgttaaggaaagacgagcaatgaagagagagtatgaagaattcaaaataagaatcaatgcccttgttgccaaagcacagaaagtgcctgaagaggggtggaccatggctgatggaactgcttggcctgggaataaccctagggaccatcctggcatgattcaggtgttcttggggcacagtggtgggcttgacactgatggaaatgaattaccacgtcttgtctatgtctctcgtgaaaagagaccaggctttcagcatcacaagaaggctggtgcaatgaatgcactgattcgtgtatctgctgtgctgacaaatggtgcctatcttctcaatgtggattgtgaccattacttcaatagcagcaaagctcttagagaagcaatgtgcttcatgatggatccagctctaggaaggaaaacttgttatgtacaatttccacaaagatttgatggcattgacttgcacgatcgatatgctaataggaacatagtcttctttgatatcaacatgaaaggtctagatggcattcagggtccagtctatgtgggaacaggatgctgtttcaataggcaggctttgtatggatatgatcctgttttgactgaagctgatctggaacctaacattgttgttaagagctgctgtggtagaaggaagagaaagaacaagagttatatggatagtcaaagccgtattatgaagagaacagaatcttcagctcccatctttaacatggaagacatcgaggagggtattgaaggttatgaggatgaaaggtcagtgcttatgtcccagaggaaattggagaaacgctttggtcagtctccaatcttcattgcatccacctttatgactcaaggtggcataccaccttcaacaaacccagcttctctactgaaggaagctatccatgttatcagctgtgggtacgaggacaaaactgaatggggaaaagagattggctggatctatggttcagttacagaggatattctgactgggtttaaaatgcatgcaagaggctggcaatcaatctactgcatgccaccacgaccttgtttcaagggttctgcaccaatcaatctttctgatcgtcttaatcaggtgctccgttgggctcttgggtcagtggaaattctgcttagcagacattgtcctatatggtatggctacaatgggcgattgaagcttttggagaggctggcttacattaacaccattgtttatccaatcacatctgttccgcttatcgcctattgtgtgcttcctgctatctgtcttcttaccaataaatttatcattcctgagattagtaattatgctggaatgttcttcattcttctttttgcctccattttcgcaactggtatattggagctcagatggagtggtgttggcattgaagattggtggagaaatgagcagttttgggttattggtggcacctctgcccatctcttcgcggtgttccagggtctgctgaaagtgttggctgggattgataccaacttcacagttacctcaaaggcatctgatgaggatggcgactttgctgagctatatgtgttcaagtggaccagtttgctcatccctccgaccactgttcttgtcattaacctggtcggaatggtggcaggaatttcgtatgccattaacagcggctaccaatcctggggtccgctctttggaaagctgttcttctcgatctgggtgatcctccatctctaccccttcctcaagggtctcatgggcaggcagaaccgcacgccaacaatcgtcatcgtttggtccatcctccttgcgtctatcttctccttgctgtgggtgaagatcgatcctttcatctccccgacacagaaagctgccgccttggggcaatgtggtgtgaactgctgatccagattgtgactcttatctgaagaggctcagccaaagatctgccccctcgtgtaaatacctgagggggctagatgggaattttttgttgtagatgaggatggatctgcatccaagttatgcctctgtttattagcttcttcggtgccggtgctgctgcagacaatcatggagcctttctaccttgcttgtagtgctggccagcagcgtaaattgtgaattctgcatttttttatacgtggtgtttattgttttagagtaaattatcatttgtttgaggtaactattcacacgaactatatggcaatgctgttatttatacgcaaagactgatacattcttcggattgtgagcaaacagtcagaacactgtaatctcttaggacaactatataaggcagctgttgtatcatctctattgtttctaatggccgagggatatgtagatgtaaatcacttgcaacatcgtattgttggcagtctgtaatgtttg

SEQ ID NO: 135327 - DNA, 2445 bp, Zea Mays
atggccggctctggagagtcgccggcgatggtaggagatggcgttcgtcttgatccagagacagagggaggagttgatggtaacttactggtcacaccacctcctgctctactgggacctataatcgatgaaatgagcataggggaagatggagaacaaagggttcaacctcctatgtcaaatattagctccagggagatggatacgcctcaaatactacattcacatattgttatgatcatattccatgatacaatcaacactgtcaatgaatttgtagaaaaaaacattgatccaactatagtgccgacagtagggatgactttcgagaatgttgatgatgcatataaattctataaaaggtatgcatatgaagttggatttccactgaagaaatatagggagaagacattcagtaagtggataaattgttcacttgaagctgcaaaaattgaactggtaaacttggagcataaccatgagttcataactgatgaagcagagaaacaacatttacgttgcaacaaaagtagggatgctgagttcataaattttgttgatgcaatgcatgatagccgagtgccgcagcattgcatagttgattttatatcagaaatgcatgatgggccggagaatgtaccggtaactgctcaagatctgaaaaacattagggcagcaaggagaagagaaaactgcgcaaatgatgtagccaaacttttgactttctttatagaatgcaagaaacagaatccacaatttttttgtgattttcagctagacaatgatgggaaaatatgtacagtgtttggttttgttttgttgggagatgaaacagtacagacttttgaatgggctttcaactcattcaaaacatgtatgagatgcgagggtccaagagttatgcttacagatcaagatcatgcaatgccaattgctctaagaactgtatttccaaaaacagttcacagactgtgtttatggcatgtccagaacagatttatgccattcctaaatgagatatatgcaaggtttgctgttaaggattttaaaacaacattccagtctattatacatcatccattaactcctcatgagtttgaatgtgcctgggaaatgatgctagaggagttcaatcttcgtgaagacatgactctacgcaagttatatgaaatgagaaaggaatggataccagcattttttaaaaatgacttatgtggggtaatggtatctacacaacgaagtgagagcatgaacagattagtgaagcaatcacatgtagatgcgaacaccccactacatgagttcgctaaacaaatgatgaaaatgttgcacagcaggaaaatgaaagaatcaaaggaggcattggtgagcaagggaccaaggacaacagatacattgtataagtttgaagtgagagtctctagagcgtacaccagagctgttatgaatagatttgagaaatcaatgaaatacgccactgcatacataatattaaaggacacagacggttgtgataaagattggatcgtacaacatacaaaaaggtctaataaaattgtgtggggacaacatcaattcaagataacagcggacatagaagctgaggagtatacatgcgagtgcaaacagtgggaacatacaggtctattctgtgttcatcttttaagagcttcatgcatcttcaagttgaaaagataccttcaaagtatatattgcaaagggtacgacaaggcgatggatgtgttggatgagctcgatggcgttctatgtcgattagagccagatattggatgtaatgagtcatgtgatgttagtgatgctgaggaagacaaggaaggagaattaaataaaaataatgctggcgatgggatggaagatgacaatacaattacatgccatataagggatgagcataacacaatgactggatgtgaacatgcgttaacattaataacagttggtaaccaggaggacaacatgagaattccacctgaggttggtgatacaagttctccgtgtcacgtagcacaggaacaaatggaacatatttctgcatcctcagaagctaaaaagaggttgaattttaatgtggatgttataaatctgagtatgccggatcgtgcaagaccaaaaggacggacaataaaaaatacaaaagataggattatgaaactaggtgcgaaaggagaaaaaaagaagaataggagatgccaattgtgtggtatagcagatggacataacagcagaacgtgtatgtctgtggaagagaacagggcaagactagcaaaattggcaaatcgaaagagaggacgacctgccggatcaagactaaacaataaaacaactgctccacagtggaatgaaacatcgactgctaaaaaacatcgtattgatgaagaagtggaaaatgaagaagccgatgagcatatggaattggacgaataa

SEQ ID NO: 135328 - DNA, 1824 bp, Zea Mays
atgccagtgaagccacgcgtcgctaaggacacggtgctgaaggaatttgatataggctctggcagaaagaagacccacgacatcttcaacggcaaacacttagctgttgaattatccatacaaaattatcgctttaatgccgtgtatgtttgtgtgtattggggactggttttgatggaaccggtcgtattgaaccgtgaaagagccgcagcggaccgcctaaaacggatgcctatgttgttcgacgactaccgtgatgaagatttttatgggctaccgcggaaatacagtattgtcgctcgggtagaagttaaattcctgattgaaccacgttttcgagacagacaacatttcgttttatctgacatcaatggagccaagatcgaggccataacatatatgtatgagacagtcaaacatttcgacaatttgctccatgaaaagcatgtttacaagatgcataatgtaaagttcaatcttcatccgggtgaatttaattttcgtcatctaaatggtcccatggaattgtgtcttgaccaacaagccatcgtggagccatacattgttccaattcagatggcgccattcccaaaacaaatactattgaaccttgctgatattgctgagttgccaaacaggactttagtcgacattatggctgttgtagtccacttggatacaatacatcgcacaatgtggggccctttcagaaagattgttataatggatgctaggtatattctgttaattgtcgagttatatatccagagtgcctcgagtcttcagatcataccgcaatacacttcaatccgttccatcataacacccatcattttcgacgtattcctggatagctctaatatttcgaatgtatttgggaaggtgtttgagaccatactggaagagactggcaaattgagggaaggaaccaatgaagatatgtctatcgcaaaagccattgcaattgttatggatagaaatccacagttgaggcaagaagggattgctcatgaagttcttcagtggtatttgtgccgtatggagggttggtttgccactgacgcagattcaatttcactacagggctgggatcaggaggtgctgcttccaggtggccatggcctcatggttcgtggatatcgtccagttataaatactcttgcaaaaggcttagatatacgtctcaaccataaggttttggaaattgttcgccaccggaacagggtagaggttactgtaagcagtggccaaacgttcgttgcggacactgcagtggtcactgttccgttgggtatctggtacggtttcttcaaagaaattgatgccaagaagaagcgtggtcagagtcgggcggcctgcaagatcaaggtgcatggtcgtcgaaggatggcgacggcgtatcctcgatcgggcaaggcgaatcaggcaagcatctatttggaggttggaggtcttgaagatctggaactgcaggtgcagaatgctattgcagcagcagcagctgcagctccacccaaggaaagcaatagtgtcagcagcaacgatcctggcagctcgtcctctgtgatttttccgtctggtccagctgatcaagtccctgttcctgctacctctccagaaattgagccccgttttgcaaaccaaatccctgctgcttcttcgaaggttaaggcaccatgcctggcagtagacaggaaaggcaccatgcctggcactggctgttctgcagcgaacaccgttgtcgagttttatgccaaatgtgtcgagttttattttggtatatgtaactttgtaattgggcctaagcgtattgaagcactctaa

SEQ ID NO: 135329 - DNA, 2835 bp, Zea Mays
tcagcgtgagcggggcaaagcagcatgcagcgcaggagcggcgatgtccggactccggacgctgggtttgcgctgctccccacgcggtttactattcctgatctccttccccttcctacgcatggctccccgtccattgctatgctccgccattgtccacacacctgcagccagccttctgcctttaaccccaccggcaatgtcagtagtcttgatttcctagcttccttccttccgctctctcactcctctgtaggtgcatccttgttcttcttgcatcgtatcgatctgtccatgccactggagtctgtacgtgacctgatatcgacgggagggatggcaaggatactgctccatggttcgcttcatgtcaccatctttgaggcagaggagctgtcgaactccagcaggcccagcagccaggctcccgggttcctccgcaagctggttgaggggatcgaggacactgtgggcgtgggcaagggcaccagcaagatctacgccaccatcgggctcggcaagacccgcgtcggccgcacccgcaagctcaccgacgagacggccagcccgcgctggtacgagtccttccacgtctactgcgcccaccttgcctccgacgtcgtcttcaccatccgggccaagaaccccatcggcgcctccaccgtcggtgtcgcctacctccccgtccgcgatatcttcgagggccacgaggtggaccgctggctccacctctgcgacggcggcggcgacgacaaggaccgcacgccgctcgagagcggcgggaaggtccacgtcaggctccagtacttcgacatctccaaggaccacagctggggcaagggcgtgcgcagtggaaagtaccccggcgtgccctacaccttcttctcgcagcggcaggggtgcagggtgacgctgtaccaggacgcgcacgtccccgacggctttgtcccgaggatcccactcgacggcggccggtgctacgaggcgcaccggtgctgggaggacatcttcgacgccatcagcggcgctaagcacctcatctacatcacgggttggtcggtgtacacggagatcacgctactcagggacggcgcccgcccacccaggcccggcagcggcgtcacgctcggcgagctgctcaagaagaaagccggcgagggcgtccgtgtgctcatgctcgtctgggacgaccgcacctccgtcggggcgctcaagaaggacgggctcatggccacccacgacgaggagacgatgaactacttcgagggcaccgacgtacactgcgtgctatgcccgcgaaaccccgacgactccgggagcatcgtgcaggacctgcagatctccaccatgttcacgcaccaccagaagatcgtcgtcgtcgaccacgacatgccggtgcagcggtcgcagcggcagcggaggatcctcagcttcgtgggcgggctggacctctgcgacggccgctacgacacgccatgccactcgctgttccggacgctggacggcgcgcaccacgacgacttccaccagccaaacttcgccacggccgccatcgccaagggcggaccgagggagccgtggcacgacatccactgtcgcctcgaaggccccgtggcgtgggacgtgctctacaacttcgagcagcggtggcggaagcagggcggcaaggacttgctcatccagctccgggacctcgccgacgagatcatcgccccgtcacccgtcacgttcccgaacgaccccgagacgtggaacgtgcagctctttcgctctatcgacggcggcgccgcgttcgggttcccggacacccccgacgacgccaccagggccgggctcgtcagtggcaaggaccagatcatcgatcggagcatccaggacgcctacatccacgccatccgccgcgccaggagcttcatctacattgagaaccagtacttcctcggcagctcctactgctggaagcccgacgggatcaagcccgaggacatcggtgcactgcacgtcatccccaaggagctgtccatgaaggtggtgagcaagatcgaggccggcgagcggttcgcggtctacgtcgtggtgcccatgtggcctgagggcatcccggagagcggctccgtgcaggccatcctcgactggcagaggaggaccatggagatgatgtacaccgacatcgcacaggcgatccaggccaaggggatcgacgccaaccccagggactacctcaccttcttctgcctcggcaaccgggaggcgaagaagccaggggagtacgtgcccacggaggaggctgagcctgacactggctacatcaaggcccagcaaaacagaaggttcatgatctatgtccacaccaagatgatgatggtggatgacgagtacatcatcgtggggtcggcgaacatcaaccagcgttccatggacggggcgcgggactcggagatcgcgatgggcgcgtaccagccgcaccacctggcggcggcgagcaggccggcgagagggcaggtgcacgggttccggatgtcgctgtggtacgagcacctgggcgcggtggacgacgcgttcacccggccggacagcgtcgagtgcatccgcaaggtgaacgccatggcagacaggtactgggacctgtacgccggcgacgggcctgagcgtgacctgccggggcacctgctcacctatcccgtcgccgtcggcactgacggctcggtcaatcagctgccggggatggagttcttcccggacacgcaggcgcgggtgcttggcgccaagtccgactacctgccgcccattctcaccacgtaggcgttctcttgtctgtctatcgggtggcctgcg

SEQ ID NO: 135330 - DNA, 1046 bp, Zea Mays
ttcctgtcatgtaccttgtgtcgcctctcccccgccaactaatcatctcctgtagcagcagccggcagcaggtggcggccgccggccatggagctggcggtgggcgcgtcggaggcaaccctcaagtcactgctgagcaagctcggcgccctcctcgcagaggagtatgccctgatccgtggcgtccggggcgacatccaattcatcaccgacgagctagccagcatgcaggccttcctcagcaacctgagcaagtacgaggagggccacgacgaccagacggaggactggatgaagcagatccgggacgtcgcctacgacatcgaagactgcatcgacgacttcgcccacagcctccgtccagaccccaggggcagcggctgggtgacggccgtccgcaagattctctacgagatccggacgtggtacccccgccgcaacatcgccacccagatcgtcgatctgaagaaccgcgcgcagcatatcggcgagcgccgaaccaggtacggcgtccgcgacccgcagcctgggaagaagaagagcaacttggggggcgctacggggtatctcgctgctgagaatcaggacgtgacccggcaactcgtccgcgcccagcagcctgtgggggtgaaggatatgccggatcttaagaagtggatccatgaagatggcaagagggagaaaaccggcgtgctgagcattgtcgggtttggtggtgtgggtaaaaccaccatcgcaatggatctctacacaaaatacgggcctgaattccagcgtcgagcaatggtcactgtgtcccagaactcagatcctgaggcggtcgtcagaaatatactgaaccaggtcaaaccactgtccaacaacgcggagaggcgaggcgaagatagctctggcgccgtctccttggggaagaagaatccagtcattgcaactatattaagccgaattaggctgccgttcccaaatcaaaagcaagataatggtggcggtcgtgacaagcatgaacaaataaaaaaggagttgaagaattgcctcgcagatacaag

SEQ ID NO: 135331 - DNA, 1607 bp, Zea Mays
ggaagcgtcaaaagttgtcgggtccatgacatggtacttgagtacatcatttccaaggcagcagaggagaatttcatcactgtggtcggtagccactggtccatgtcaacaagtagcaagaaagttcgtaggctcactatccatggcagtgaccccaaacgtgcaaagaatgttgacagtatgaacttgtcacatgtccgatcactgactgtgttcgagaacctggacaaactgcacttcaaatcatttaaaactggaatagtgcaagtgttagatctcgaaggctgcaaaggtttcagggagagcgatgccaacgtttcagacatatgcgaaatgattctacttaagtatctgagcctacggaaaacagacataaaaaatcttcccaataatatttccaagctcaagtacctagagactctcgatgttagggagacagaagttaaacagctgcctacgactgtagggcagttggaacggataactaacatccttggtggtgataagagaagacagagaaccctgaaacttcctaaggagctcaagggaacaatgaaatctttacgcatattgtcgggggttgagattgtggagggatcaacagctgcatcagacttcagttacttcactactctgaggaagctggcaatttacaggatccaccacaatgaagatatattcaaaaatttgctgtcctcgatccagtacctcagtggttattcactccaaactcttttaatcgttgatgagtcatctgaattcttcaagaccctggagtcaatgtcgccatcccatctaactgacctgagagctctggagctgtctggcaaattgctttaccttccaaagtggctcgacactcttcaacatcttgtgaagttaacgctttcagcaacagccctatgcactgataactttttggtcatcagaaaactgaactcgttgttttccctcaccttttcaatcagcgaaaagcaagaccctgctttggcagccattcttgagaaaaataagtcagcttcaagaggagaaatcgttgtgccagctggaggcttcagtaagctcaagctgcttcggatatttgttcctcttcttccatcccttaccttctcaaagaatgctacaccacatctggaaaggattgaactgcgttttaaaaagctggaaggatttcatggtgtggatgaacttggaaagctccaagatgtggtcttaacagttgacgggcatgcaagtgagaggacaaattcgatactagacggattgaagcagaggctagaaggaaagtgcaacctcattgtcaacaagtatcacgactgattgaaatggatgtaaacatatttctttgagtagaaagatcaccagctcattaggtaaataagctttgtggctgtacacaaacctaggtgtttgacatctggattcctttcgtgttatcttcatttattgttggctttatgtcggttcggttttgtaacatgtcagacaagagtgaattttttttagaccaaaggccaaactttagcaccatcttttgttgagtacatgttctatatgctcccgggcatctgttgtggattttttatatatataaatgccaccgtttt

SEQ ID NO: 135332 - DNA, 2521 bp, Zea Mays
ccaaaggtacggtagtagtttccctgctgcaacagcttggcatggcgcccaagcttcctgtgctacgacgagcaaggtcgctgccgctgctttttcttgccaactttgttgtgctgcagttacaatgctcctatgggcttccgctccagaatgaaccgagacaaatatacatcatctaccttggtgggcgacaaagtgacgatgctgatcttgtcactgcttcccaccatgatctccttgcgtctgttgtcggcagcaagcaagaagcggtagagtcgattatctacagctatagacatggattctccggcttcgctgctttgctcacgaaatcacagtctacaaagattgcaggtctgcctggcgtagttagtgtaacgaaaaaccgagtccaccacacacgcacaactcgaagctgggactttgtggggctgcactacaacgacgatcagccaaacggtttgctcgcaaaggcggctaaatacggagacgacgtcattgtcggcgtcatcgactcaggcttctggccagagtcgcctagctacgctgaccacggctacggcccccctccttcgcgatggaagggagtctgccagggcggcgacgacggctcgttcggcccgaacaactgcaaccgcaaggtcataggggcgcggtggtacgctgccggcgtgagcgacgacaaggagaggctcaagggcgagtacatgtcccccagggacgccgaaggccacggaacccacacctcctccacggcggccggcaacgtcgtcggcaacgtcagcttccacgggctggcggccggcgcggcgcgaggcggcgcgcctcgcgccaggctcgctatttacaaggcctgctggggcgcgcccccgttgtcgggctcgtgcgacgacgccgatgtgatgaaggccatggacgatgccgtccacgatggcgttgacgtcctctcggtctctatcggcgggccctctgagacgccgggcacgttgcatgtcgtcgcgagtggggtcacggttgtctacgccgctgggaatgatgggcctgtcgcccagatggtggagaactcgtccccgtggctgttcaccgtcgccgcaacgactgtggataggatgttccccacagccatcaccctgggaaacaaccagattgtgcatggtcaatccttatacgtggggacgcaagggagagaagatcatttccacgaggtcgtgcccttggtgaactcaggttgtgatccagagtacgtaaacagcagcgatgtgaaggggaagattgtcttctgcatcacaccggacagcttgtatccatctgctacagttactgctgttgcacagctagtgttggacaatggagggaaagggtttatattcacgggatataacagggacaatatcgttcggtgggaacctgttacaagcaaaatgataccattcattttaatcgatcttgaggtcgcctaccacatcttgcagtactgcatctcaactgacggtaccccaagagcaaagatctctttggctcaaacaacttttggaactggggttcctgcccccaaggtagcagtgttctcgtctagaggacctagtgccgtctatccaggcgttcttaagcctgatatagctgcacctggggtgaacatcttagctgccgccccacaaattccttattacaaagagcagctgggtggcgtcctgtaccattttgagtctggaacatccatggctacccctcatgtgtctggtatcgtcgccctgcttaaatcattgcatcctgactggtcacctgcggccctcaaatcggcgctcatgacaactgcacttaccaccgacaacaacgggatcccgatacaagcagatggaaacccagtaaagatcgccgacgctttcgattacggagcagggtttgtcaacccaaccaaggctgacgatcccggtctcatatacgacatccaaccgtcagattacctcaggttcttcgactgcacgggagggttgggtaccaacgacaactgcacggcacctagggcatctgttgtagacctcaaccttccgtcgatcgcaatccctagtctcaaggcgccccaaaccgtcacgcgcaccgtcaccaacgttgggcgccagactaacgcagtgtacagagcagtcctccagccgcctccgggcgtggagatgtccgttgaaccgtcggtcttggtcttcgatgccaagaggaaagcacagagcttcaaggtggccttcaaggcgacgcgtcggttccagggcgactacaccttcggtagcttggcatggcacgacggaggcagccactgggttcggatcccggttgcggtccgcatcgtaatccaggatctgtattcgaccgtctcttgaatcgatcccattgcggaactcgtctagaaaaagaaataatgttacatgaagctagcgagtgtttccataaggaaccctcgctcgtggtgccaagaccgtatttggtgcatatatatgaaaaatatatatccttaattttgcttgggttggtt

SEQ ID NO: 135333 - DNA, 801 bp, Zea Mays
atgccttatcctctccggctggccgtcactgcagcatgcgccatcattctgatgtgggtcgtcctggtggcgaacccgaccgacgccgccttggatgacatatgcaaggccaagtgcgagacgccgcagccggcggtatgcttgcgttgcaccggcggcgtgagaatcgaagacggcaaggtggtgacaacagaagttgtgccgtgcagcgacggctgcatccctgccaccacccgtctccagtgcgacctcgcctgccatttcgggggcctattgtcgtcgtcgccaaggaccggatgcgtgagatgccctggccctgtccccgaccctggcctgccggactgcgccgtgcaggccgcattgtgccggcctctcagcgcggcggagcggtgccaggagtgcctggacgcatgcgaccgtcactgcaactccaccgccgccgccttctgcaaggaccgctgcgagacgcgacaggaggtatgcctggcttgcagcaggagaattgtagacgcaagactgctcacaacagtcgtcgttccgtgtcgcgatgactgcgtccctgcttcctccgtcgccgagtgcgagggcgcctgttctttgttcggctccctactgtcgaattcgccgaccggatgcgcgaggtgccctgaggtcaggttcgatccactggactgcgaggcttgcaagtccaggttaatcaaggactgcaacgcacgagaggcagaatgcgtcaccaacgcctgcgtcctcgacaacgtatgccctgctcctcctcctcctcccgttgttcaggagccctga

SEQ ID NO: 135334 - DNA, 1218 bp, Zea Mays
gagaccagcagaaaacatagaacttgcgaattcggtattgagaatttgcgataccgatctgggagaagagaagggcgtcatgtcgtcgttcggacgcaattcatggtgtatcctcgtgctggcctccgtgctcctcctgtcctgcctcgccgacacggccgtggccaagcgaacaggcgagctcaccgtcttctggggccggaacaaggaggagggcacactgcgtgaggcctgcgacaccgggctctacaacaccgtcatcatctccttctacagcgtgttcggccacggccgctacgccctcgacctctccggccacccgctggacggcgtcggcgccgacatcaagcactgccagtccctgggcatcccggtcttcctctccatcggcggcgggggaaaccactactccatcccttcctccgcgtccgcggaggccgtcgcggacaacctgtggaacgcgttcctcggcggcggcaacagcgacgtgccccgccccttcggtgacgcggcggtcaacggcatcgacttctacatcgacgaccacagcgcaccgggcgaccactacgacgagctcgcgcgccgtctcgactacttcaacagcatgtactaccacgccacgacgaagtacgtacggctgacggcgacgccgcggtgcgcgttcccgcccgacgaccccatggcgcgggcgctgcggacggggctgttcgagcgcatccacgtccgcttctacggcgacgccgacaagtgctcgtacaagaacggcgacgtgtccggcgtcgtggaccagtggagcaagtggacggcgaggtaccccaagagccagctttacgtggggctcgccgcggccgagagcggcgtgccggaccacgcgccgccccccgttgaggtctacctcaaatacctctactacgatctgctgcccaaggtgcagaaggcgcccaactatggtggcgtcatggtctggaataggttcaccgacaacaggaccggatacagcggcgccgtcaagggctgggcggcttgcagctatgctggctgtgttaactaagtgcatagcgcatgtataaaccacgtaaataattcgtataaggtgcaagtataaataaacacaagagactttcgtgataatcgaatgtttctttatgtctaaaatacagttccacttatacaacataaatacattgaatgaagtttcttagatatatgtagtgcact

SEQ ID NO: 135335 - DNA, 109 bp, Zea Mays
cctagttattccacatgactcaacccaagacgctacccgttgacaatcactcatcgcaacccaaaccacatgggacaaatcaaccttgtgttcgcaatctcccccttaa

SEQ ID NO: 135336 - DNA, 183 bp, Zea Mays
accaagtcatgaacatcaagcctcaccgatgaggaacacaatatgtggactgcatacaagactggcggggtcgcggatgagaaacgacgacaatttcatggttctcccatttcgtcgaacacctagagcaccgaacgggatggacatcgtcactgtcggggctgcgcagacacggcgagctgc

SEQ ID NO: 135337 - DNA, 270 bp, Zea Mays
atgaggtgcttcaagatcctcctgctggtatccctcatccctctcgtgctcaggggggtctcgcttctgggcaacgtcatccctgcaccatcgccgcgcgggcagccgtcgtcgtccagcccccggacgaacggcgccgccaccgttccttctccgctttcttcggcctcctcgcgccggcggttcggcggcgacggcggcggcggcggcttcttcagggacgacaagaggttctccccgaccggctccaacccgttgcacaacttgtga

SEQ ID NO: 135338 - DNA, 1026 bp, Zea Mays
ggctttgcttttcccgtatgtttcaagtctagtttcccattatggcttttgcccccgtaaaccattaagggtggttttggtgattcataatagccattttggtaaattttttaaagcccgaccctaattctacttttatggtgtattatgatcaaatcccatgtatattacgcgctccggtgttttatatcaaaaaaaaggtttttacgctgatttatatgggtgcctatgctgcaacacatacaattctaactaaatatgcataaagcagcgcgccagcacctcatattttattctcatcttttctacttcgttaattcattgacccatgtctctgtcctggtatattctggagacagatccccacgtccagagttacaagatcaagcttggttgtggctgctgctgtgttgcctcctcttgttggaccgaagagagggaggggagaagcagctggcgtgcagacttctactcaggtggccttttattctctatggggcttctaggatacatcttctccagaagcaccataagtcttgtcttgggcattacaccagggctagccactctgctacttggcactctcagtctgaagttctggaggagcgacagatccagcttcctgcttatcttgtctcaggcaggcaaattgaacagggatttgtttggcttccaaatggtttgttggtcctaaaatagtcagaatcacatgacatctgtgctataggtaatctgatcttctaactcaagtttgcattcagtttagactttaggttatgttagtcataacaaacttgaaaagacatattaacaaggaaagatcatattaacagttcatgttacatttgcagatatggacctcggtggttttctccacattaggaaagctggaagagcctttttgaactcagtttttttgctaacagtggtgttatggtgaaacagagttttgtgtgtatgtaccaacagctaaaatgtaaacacgacattatcatagttgagtacaggaataattatctcttatat

SEQ ID NO: 135339 - DNA, 1126 bp, Zea Mays
ggctttgcttttcccgtatgtttcaagtctagtttcccattatggcttttgcccccgtaaaccattaagggtggttttggtgattcataatagccattttggtaaattttttaaagcccgaccctaattctacttttatggtgtattatgatcaaatcccatgtatattacgcgctccggtgttttatatcaaaaaaaaggtttttacgctgatttatatgggtgcctatgctgcaacacatacaattctaactaaatatgcataaagcagcgcgccagcacctcatattttattctcatcttttctacttcgttaattcattgacccatgtctctgtcctggtatattctggagacagatccccacgtccagagttacaagatcaagcttggttgtggctgctgctgtgttgcctcctcttgttggaccgaagagagggaggggagaagcagctggcgtgcagacttctactcaggtggccttttattctctatggggcttctaggatacatcttctccagaagcaccataagtcttgtcttgggcattacaccagggctagccactctgctacttggcactctcagtctgaagttctggaggagcgacagatccagcttcctgcttatcttgtctcaggcagaggtgatgctgatgtgcaagcatcttcaccttgagttctgccttgccagaatgaatcaagtttattttctcatcctgctccatttgagggatttgtttggcttccaaatggtttgttggtcctaaaatagtcagaatcacatgacatctgtgctatagatatggacctcggtggttttctccacattaggaaagctggaagagcctttttgaactcagtttttttgctaacagtggtgttatggtgaaacagagttttgtgtgtatgtaccaacagctaaaatgtaaacacgacattatcatagttgagtacaggaataattatctcttatatcttattgcaaaatctgaaacagttctcctgtagatggttagcttgcattttacgctacaattacctcagatcacttgtatcttacaccaatttacgaaatttgttgatgcgttttatgacaacctcatgcgttgagagatacattcgtt

SEQ ID NO: 135340 - DNA, 77 bp, Zea Mays
gagagctggcgggaagatcgaagccacgagagcttactagagctcgtagcgtagcttcccctttcactaaccaccag

SEQ ID NO: 135341 - DNA, 2267 bp, Zea Mays
ctggagagcaacgagacaagcacggcggtgtgcgtgcgcacaggcactagagtgagacagctctagaagagagcaagccgccgccgccgccgcatcatcgtcagaagcggccactcctacctctgatcctgatacaaaatccaggccagagggcaggagcctccaaaagagatccactcccccggatggcttcttgcctctgcttccgcagacgccgccgcccaatcattgcctcctctgtccccttcttcctcctcctcgtctccttcctcgcctcggcctcggcctcttccacgacgacgacgaagctgctaggcagcggcaataatgccacgcggcgggtgacgttcagctcggaggagctccgcgggttgcggagcatcacggcccggcttgcgcggctcagggacgcgtccgtcaagacgatccaggcacgtacgcgttcgctccttgtccctgcgacctccaaatgcagttagtaatgaggtgttctttgcttgctgggacgacctggctggccgattctggcttgcgctttctgcagagccccgacggcgacgtcatcgactgcgtgccggcgcacctgcagccggcgttcgagcaccccaagctgaggagccagaagccagaggaggagcccgaagagaggccgaggagcagcgctggccgcttctccgacgctgacctggacgaggacgacgacccgttgccgcaggtgtggcggcgctccggcgagcactgcccggaggggacggtaccggtgcggcgaaccacggaggacgacgtgctcagggccaccgcctcttccgccacccggttcgggatgaaggcccgcggtgcggggctcgggttcgcgcggcgcgactccaccggcggcggccacgaggtcagtgccaatcggcgatcactcagtcaccgccgcggtgacgacggtcgccggtcaacagtcaacactccaataatttacctttggctgtgcaagcgcagtgcaagaaatttgctcatcaatggcacaccgcacacgatgaaaagtggaaatgacaccaataattgcgtgattattgttgtgtgcttgcgacttgcgagtccgatccatccggcacaggtgacagtcacggtacagggggctgcactcgcaatggccagcacatgcacatgttgtcgactcgactgcatcgttaaacaatgggagaacgtcagtacgtcactgagcagctagacggcctctgtttgcagcacgcggtggggtacgtgaccggcgggcagttctacggcgccaaggcgagcctgaacgtgtggccggcgcaggtggcgtcgccggcggagttcagcctctcgcagatctgggtcatctccggcgccttcggcaacgacctcaacaccatcgaggccggctggcaggtcagccctcagctgtacggcgacaacagccccaggttcttcacctactggacagtaagagcagctccctcgatcatccctcgtcaccattttttccggccatcaatcaagtaaaaaaatggaaacgcaacgcaggacgacgcgtaccaggagacgggctgctacaacctccactgctcgggcttcgtgcagaccagcagccgcgtggccatcggcgccgccatctcgcccgtctcctcctacgccggccgccagttcgacgtcacgcttctcatctggaaggacccgcgccggggccactggtggctgcagctcggctccggcgcgctcgtcggctactggccctccgcgctcttcacgcacctcggctcgcgcgccgacatggtgcagttcgggggcgaggtcgtcaacgcgcgccccgccggcgcgccgcacacgcccacgcagatgggctccggccgcttccccgccgagggatacgcgcgcgccgcatacttccgaaacgtgcagctcgtcgactgggacaacaacctcgtaccggccgccgggctccgcctgctcgccgaccggccggggtgctatgacatcgccggcggcagcggcggcgcgtggggcacctacttctattacggtgggcccggcaggaatgcacggtgcccgtaactttactagtatattagctaggaacggaatcgaatgcatgggatgggtgttgtacttgtacgtgtgtttcgtacgtgcgcactcaagcacacattagcagaggctgattgctatatattactccaaatgagtctgctttcactttttttaatctctccatgtgaatatgatgccgttgtgatcatctaacaatttgctcattt

SEQ ID NO: 135342 - DNA, 1756 bp, Zea Mays
ctggagagcaacgagacaagcacggcggtgtgcgtgcgcacaggcactagagtgagacagctctagaagagagcaagccgccgccgccgccgcatcatcgtcagaagcggccactcctacctctgatcctgatacaaaatccaggccagagggcaggagcctccaaaagagatccactcccccggatggcttcttgcctctgcttccgcagacgccgccgcccaatcattgcctcctctgtccccttcttcctcctcctcgtctccttcctcgcctcggcctcggcctcttccacgacgacgacgaagctgctaggcagcggcaataatgccacgcggcgggtgacgttcagctcggaggagctccgcgggttgcggagcatcacggcccggcttgcgcggctcagggacgcgtccgtcaagacgatccagagccccgacggcgacgtcatcgactgcgtgccggcgcacctgcagccggcgttcgagcaccccaagctgaggagccagaagccagaggtaggaggagcccgaagagaggccgaggagcagcgctggccgcttctccgacgctgacctggacgaggacgacgacccgttgccgcaggtgtggcggcgctccggcgagcactgcccggaggggacggtaccggtgcggcgaaccacggaggacgacgtgctcagggccaccgcctcttccgccacccggttcgggatgaaggcccgcggtgcggggctcgggttcgcgcggcgcgactccaccggcggcggccacgagcacgcggtggggtacgtgaccggcgggcagttctacggcgccaaggcgagcctgaacgtgtggccggcgcaggtggcgtcgccggcggagttcagcctctcgcagatctgggtcatctccggcgccttcggcaacgacctcaacaccatcgaggccggctggcaggtcagccctcagctgtacggcgacaacagccccaggttcttcacctactggacagacgacgcgtaccaggagacgggctgctacaacctccactgctcgggcttcgtgcagaccagcagccgcgtggccatcggcgccgccatctcgcccgtctcctcctacgccggccgccagttcgacgtcacgcttctcatctggaaggacccgcgccggggccactggtggctgcagctcggctccggcgcgctcgtcggctactggccctccgcgctcttcacgcacctcggctcgcgcgccgacatggtgcagttcgggggcgaggtcgtcaacgcgcgccccgccggcgcgccgcacacgcccacgcagatgggctccggccgcttccccgccgagggatacgcgcgcgccgcatacttccgaaacgtgcagctcgtcgactgggacaacaacctcgtaccggccgccgggctccgcctgctcgccgaccggccggggtgctatgacatcgccggcggcagcggcggcgcgtggggcacctacttctattacggtgggcccggcaggaatgcacggtgcccgtaactttactagtatattagctaggaacggaatcgaatgcatgggatgggtgttgtacttgtacgtgtgtttcgtacgtgcgcactcaagcacacattagcagaggctgattgctatatattactccaaatgagtctgctttcactttttttaatctctccatgtgaatatgatgccgttgtgatcatctaacaatttgctcatttaatttagcattcttttttcctgtttcttt

SEQ ID NO: 135343 - DNA, 1733 bp, Zea Mays
ctggagagcaacgagacaagcacggcggtgtgcgtgcgcacaggcactagagtgagacagctctagaagagagcaagccgccgccgccgccgcatcatcgtcagaagcggccactcctacctctgatcctgatacaaaatccaggccagagggcaggagcctccaaaagagatccactcccccggatggcttcttgcctctgcttccgcagacgccgccgcccaatcattgcctcctctgtccccttcttcctcctcctcgtctccttcctcgcctcggcctcggcctcttccacgacgacgacgaagctgctaggcagcggcaataatgccacgcggcgggtgacgttcagctcggaggagctccgcgggttgcggagcatcacggcccggcttgcgcggctcagggacgcgtccgtcaagacgatccagagccccgacggcgacgtcatcgactgcgtgccggcgcacctgcagccggcgttcgagcaccccaagctgaggagccagaagccagaggaggagcccgaagagaggccgaggagcagcgctggccgcttctccgacgctgacctggacgaggacgacgacccgttgccgcaggtgtggcggcgctccggcgagcactgcccggaggggacggtaccggtgcggcgaaccacggaggacgacgtgctcagggccaccgcctcttccgccacccggttcgggatgaaggcccgcggtgcggggctcgggttcgcgcggcgcgactccaccggcggcggccacgagcacgcggtggggtacgtgaccggcgggcagttctacggcgccaaggcgagcctgaacgtgtggccggcgcaggtggcgtcgccggcggagttcagcctctcgcagatctgggtcatctccggcgccttcggcaacgacctcaacaccatcgaggccggctggcaggtcagccctcagctgtacggcgacaacagccccaggacgacgcgtaccaggagacgggctgctacaacctccactgctcgggcttcgtgcagaccagcagccgcgtggccatcggcgccgccatctcgcccgtctcctcctacgccggccgccagttcgacgtcacgcttctcatctggaaggacccgcgccggggccactggtggctgcagctcggctccggcgcgctcgtcggctactggccctccgcgctcttcacgcacctcggctcgcgcgccgacatggtgcagttcgggggcgaggtcgtcaacgcgcgccccgccggcgcgccgcacacgcccacgcagatgggctccggccgcttccccgccgagggatacgcgcgcgccgcatacttccgaaacgtgcagctcgtcgactgggacaacaacctcgtaccggccgccgggctccgcctgctcgccgaccggccggggtgctatgacatcgccggcggcagcggcggcgcgtggggcacctacttctattacggtgggcccggcaggaatgcacggtgcccgtaactttactagtatattagctaggaacggaatcgaatgcatgggatgggtgttgtacttgtacgtgtgtttcgtacgtgcgcactcaagcacacattagcagaggctgattgctatatattactccaaatgagtctgctttcactttttttaatctctccatgtgaatatgatgccgttgtgatcatctaacaatttgctcatttaatttagcattcttttttcctgtttcttt

SEQ ID NO: 135344 - DNA, 1752 bp, Zea Mays
ctggagagcaacgagacaagcacggcggtgtgcgtgcgcacaggcactagagtgagacagctctagaagagagcaagccgccgccgccgccgcatcatcgtcagaagcggccactcctacctctgatcctgatacaaaatccaggccagagggcaggagcctccaaaagagatccactcccccggatggcttcttgcctctgcttccgcagacgccgccgcccaatcattgcctcctctgtccccttcttcctcctcctcgtctccttcctcgcctcggcctcggcctcttccacgacgacgacgaagctgctaggcagcggcaataatgccacgcggcgggtgacgttcagctcggaggagctccgcgggttgcggagcatcacggcccggcttgcgcggctcagggacgcgtccgtcaagacgatccagagccccgacggcgacgtcatcgactgcgtgccggcgcacctgcagccggcgttcgagcaccccaagctgaggagccagaagccagaggaggagcccgaagagaggccgaggagcagcgctggccgcttctccgacgctgacctggacgaggacgacgacccgttgccgcaggtgtggcggcgctccggcgagcactgcccggaggggacggtaccggtgcggcgaaccacggaggacgacgtgctcagggccaccgcctcttccgccacccggttcgggatgaaggcccgcggtgcggggctcgggttcgcgcggcgcgactccaccggcggcggccacgagcacgcggtggggtacgtgaccggcgggcagttctacggcgccaaggcgagcctgaacgtgtggccggcgcaggtggcgtcgccggcggagttcagcctctcgcagatctgggtcatctccggcgccttcggcaacgacctcaacaccatcgaggccggctggcaggtcagccctcagctgtacggcgacaacagccccaggttcttcacctactggacagacgacgcgtaccaggagacgggctgctacaacctccactgctcgggcttcgtgcagaccagcagccgcgtggccatcggcgccgccatctcgcccgtctcctcctacgccggccgccagttcgacgtcacgcttctcatctggaaggacccgcgccggggccactggtggctgcagctcggctccggcgcgctcgtcggctactggccctccgcgctcttcacgcacctcggctcgcgcgccgacatggtgcagttcgggggcgaggtcgtcaacgcgcgccccgccggcgcgccgcacacgcccacgcagatgggctccggccgcttccccgccgagggatacgcgcgcgccgcatacttccgaaacgtgcagctcgtcgactgggacaacaacctcgtaccggccgccgggctccgcctgctcgccgaccggccggggtgctatgacatcgccggcggcagcggcggcgcgtggggcacctacttctattacggtgggcccggcaggaatgcacggtgcccgtaactttactagtatattagctaggaacggaatcgaatgcatgggatgggtgttgtacttgtacgtgtgtttcgtacgtgcgcactcaagcacacattagcagaggctgattgctatatattactccaaatgagtctgctttcactttttttaatctctccatgtgaatatgatgccgttgtgatcatctaacaatttgctcatttaatttagcattcttttttcctgtttcttt

SEQ ID NO: 135345 - DNA, 213 bp, Zea Mays
taaaccctagcaccctcctcgtcctatcgtccacaccacacacgcattcatgaattcagatggtgcctctctagctctcctctcgcgaaccttccgtcgcgcctccgtcctcggtatttccgccacaccggagcttcaccactccaccgcctccgtcgacctgtggtcctctactctcctccagtcctccaatcctcctccctctcggtacac

SEQ ID NO: 135346 - DNA, 98 bp, Zea Mays
gcgcgcgcgcgccgccgccgccgccggccgggccgggccgggcgtggcgtggcgtggcgaggcgaggcgaggcgaggcaggcaggcaggcaggcaggc

SEQ ID NO: 135347 - DNA, 579 bp, Zea Mays
aaattcacactgactccaaatataggtaggcgttgcatatgaaaaatgtgtctacgagataatcccaaatttaagtctgtcacggatcatgtatcatatagcaagataatacagggggtggagctggaggcattgaccgccgtcgatcattgcaaacaacagaatctagcagctaatggccccacggaatttgttgaggacttgaggtcgtgccctgtgaccccagtgttctatgatcattggaaaccgcgaagaacctcaaaacaagaagaagaagaaaaaaggaaaacgagaagcagaaatgaatcataaaaccaaaatgaaaacgatcaacgttcgatactctgaaaattgtaactttgaacagccaacagttaaacagcagtacaatacaagcaggtagtgatccaaggaacgaaaaccagagccaaggactcacgcgtcaagaacctcagattaaccttgcaagcatgccgtactcgcgcattttttttgcgctggatgcaggcatgcagcagcacatggtcatcgactcaccgttggtgtaaaatcaatagtaaattgggggctagagacaac

SEQ ID NO: 135348 - DNA, 1945 bp, Zea Mays
atgcccggccttgtgcttgtgcaccatcgacctatccaaagttagctgcccgaaagaaacctcctcgcgtctctcgtcgtcatcaaccggcggcagcgcgccgcatgcgcacgtcaccggcccggccgcatgcgatgcgcggccaacatgtcgttgacgccagccgtggcggctttaaatccgcgggacgcctcctcctcttggctcttgttcgccagccgtacgtcgtcgtcagtgtcgtgtactcgttttcccttccaaggcacccgttgcgagggcggaggcgccgatggccggggcgggagcgggggcgctggccgggctcgcagcgtgcgcgacgctggcgtgcaacgtcgcaggcgccgtgctcttcctcctcagccaagacgacgagcggctgcggcgcgggtgtgcggcgaggttgggcgctggcggcgtcgcgtcgcagccggtggaggagtgcggggatgaagaggcgctcgcgccggacgccgtcctcaacctcgagctcggcgacccgacgatgtaccgggcgttctggcgggaggttggggactgcggcgccaccgtgatccgcgggtgccaggggatgagctacttctccgacgacgacgccgtgctctgctggttcctcgagccggagctggagcgcgaggtgcgccgactccaccgcatcgttggaaacgccgtcgtcgacggctaccacctcgtggtcggcaccggcgccacccagctctaccaggccgccatgtacgcgctcagttcgccggcgcgccgggaccagcccgtacccgtcgtctcgccggcgccgtactactcttcctatccgccgcagacagacctcctgctgtcggacttctaccgctgggccggcgatgccaacacgttcaccggcgatgaatgcatcgagctggtctgctcgccgaacaaccccgacggcgccatccgcgaggccgtcgtgaggtccgccggcgccaaggcgatccatgacctggtgtactactggccacagtacacgcccatcaccgggcccgccgcccacgacatcatgctcttcagcgtgtccaagctcaccggccacgccggcacgaggctcgggtgggcgctggtgaaggaccgcgaagtggccaggaatatggtctacttcgtcgaccgcagcaccaccggcgtatgcaaggagtcgcagatgcgcgccaccgagatcctcggggtggtctccgacgcctacgaggccgtcccgccggccagggccagcggcgcggtgccccgcctcttcgacttcgcgcagcggcgcctggaggagcgctggcgcatcctgcgcgccaccgtggctgccaccggcgccttcagcctgcccgaggagacctccggctactgcaacttcgccaagcaaaccgtgacagcttgccctgcgttcgcgtggctgcgatgtgagaaggagggcgtcgaggactgcgccgagttgctcgccggccacaagatcgtgggtagcggcggggagcagttcggaggagacgcgcggtgcgtcaggatcaacatgctggacagggacaacgtgttcaacatgctcgtccagcgcctctcctctataaactgaacggagtgaatgcatggagtggcacagcagcctgcattgccacaaataaaatgaacccagaaggatctggtgtctttttcttttgtcagtttggtatcttgggtcctggtagagaaactttgtttcggtttgcttttgatgctttggactgaactgtgtgtcaactcagtagactgttatggattcaggaataaaataagagagagaagggtttctgtgctagaatcaataccatgaactattcagctatagcttcattgatggattgaaagaaatctggattagcaccagtggagcagattccaaaatgggctgtcactggtttagtccaactaaccggcacatcaa

SEQ ID NO: 135349 - DNA, 1352 bp, Zea Mays
taagttgttttgaaattatgggccctaaggccaaaattgggctggtttcttgtacacttccacgttcgaggcgcgcggcgagccgggttctcaccaattcgtcttcttccacaaactccaaaaccctagcgccgccgccgccatgtcctcgtctccgtccccggcgaaccgccgtccccggggcccgcttgcgctggggctggagtcctcggcgaacaagatcggcatcggcgtggtctccctctcgggtgacatcctctccaacccgcgccacacctacgtgacaccgccgggtcatggattccttccccgggagaccgcgcagcaccacctcgcgcacctcctccctctcctccgcgccgcgctcgctgagtccggtgtggcccccgctgacctcgcatgcgtctgctacactaaaggccccggcatgggcggccctctccaggtcgccgccgcagccgcccgcgcgctctccctgttatggaggaagcctctcgtggcggtcaaccactgcgttgcgcacatcgagatgggccgcgcggtcactggggccgtggaccccgttgtactctacgtctccggcggaaacacgcaggttatcgcctacagcgaggggaggtacaggatcttcggggaaacgattgatattgccgtcgggaactgccttgaccgattcgccagggtcctagagctctccaatgaccctagccccgggtataacatcgagcagggtatggatgtgtcattcagtggcatattgagctttattgaagctgcggcgattgaaaagcttaaaaataatgagtgcacacctgcggacctatgctactcattgcaggaaactatctttgccatgcttgtcgaaattactgaacgtgccatggcacactgtgattcaaaggacgttcttattgttggtggcgtcggttgcaacgaacgtttacaggagatgatgaagattatgtgctcagaaagagggggtaggctgtttgcaactgatgaccgctattgtatagacaatggggcaatgattgcatatactggtttactggcgtatgcacatggcatgaccactccccttgaggagtcgacatttacacaaagattccgaactgatgaagttcatgcaatttggagagagaaggagatgccggtgctaaataatacccattcagatgcaattgctgaagtttctaaagatgaagcctccatggcaacaccaatcgttatagattactgaggtacaattggcctttacaattttgtcttgctgctaatgttttttcatgatagctaatgcaatttggattgttggagacaatcgctaccaattactctccctctattccaaa

SEQ ID NO: 135350 - DNA, 1734 bp, Zea Mays
ttgttttgaaattatgggccctaaggccaaaattgggctggtttcttgtacacttccacgttcgaggcgcgcggcgagccgggttctcaccaattcgtcttcttccacaaactccaaaaccctagcgccgccgccgccatgtcctcgtctccgtccccggcgaaccgccgtccccggggcccgcttgcgctggggctggagtcctcggcgaacaagatcggcatcggcgtggtctccctctcgggtgacatcctctccaacccgcgccacacctacgtgacaccgccgggtcatggattccttccccgggagaccgcgcagcaccacctcgcgcacctcctccctctcctccgcgccgcgctcgctgagtccggtgtggcccccgctgacctcgcatgcgtctgctacactaaaggccccggcatgggcggccctctccaggtcgccgccgcagccgcccgcgcgctctccctgttatggaggaagcctctcgtggcggtcaaccactgcgttgcgcacatcgagatgggccgcgcggtcactggggccgtggaccccgttgtactctacgtctccggcggaaacacgcaggttatcgcctacagcgaggggaggtacaggatcttcggggaaacgattgatattgccgtcgggaactgccttgaccgattcgccagggtcctagagctctccaatgaccctagccccgggtataacatcgagcagcttgcaaagaagggagaaaaattcattgatgtcccttatgttgtgaagggtatggatgtgtcattcagtggcatattgagctttattgaagctgcggcgattgaaaagcttaaaaataatgagtgcacacctgcggacctatgctactcattgcaggaaactatctttgccatgcttgtcgaaattactgaacgtgccatggcacactgtgattcaaaggacgttcttattgttggtggcgtcggttgcaacgaacgtttacaggagatgatgaagattatgtgctcagaaagagggggtaggctgtttgcaactgatgaccgctattgtatagacaatggggcaatgattgcatatactggtttactggcgtatgcacatggcatgaccactccccttgaggagtcgacatttacacaaagattccgaactgatgaagttcatgcaatttggagagagaaggagatgccggtgctaaataatacccattcagatgcaattgctgaagtttctaaagatgaagcctccatggcaacaccaatcgttatagattactgagacagtaaagagtaaatgcttgtacggtaaagcctagaaccactcctaaggctatctccaactgatctcctatagtcctatctcatctcctatctcaaacttcactctacaaacagatagttccacatctaaatgtgatatctttgctctgtttgggagaagcctcctccaggcacatggcaggggctcagaatagttgtgctgttgtatgaactgcagcaggtaaaatgaacatgtcgtatgcctgacatacctgaagatagctgacatggatcaaacctcaccaatcgctgacatggatcaaacctcacctatcaccttaacattctagttagttacttcatcgagtgaacttattattgttgtaaactaatagacgcatttctgcaaagctagcttaactcttaagttactcttgtgatggtaatctgttaaggttctaaagcagcc

SEQ ID NO: 135351 - DNA, 1571 bp, Zea Mays
ttgttttgaaattatgggccctaaggccaaaattgggctggtttcttgtacacttccacgttcgaggcgcgcggcgagccgggttctcaccaattcgtcttcttccacaaactccaaaaccctagcgccgccgccgccatgtcctcgtctccgtccccggcgaaccgccgtccccggggcccgcttgcgctggggctggagtcctcggcgaacaagatcggcatcggcgtggtctccctctcgggtgacatcctctccaacccgcgccacacctacgtgacaccgccgggtcatggattccttccccgggagaccgcgcagcaccacctcgcgcacctcctccctctcctccgcgccgcgctcgctgagtccggtgtggcccccgctgacctcgcatgcgtctgctacactaaaggccccggcatgggcggccctctccaggtcgccgccgcagccgcccgcgcgctctccctgttatggaggaagcctctcgtggcggtcaaccactgcgttgcgcacatcgagatgggccgcgcggtcactggggccgtggaccccgttgtactctacgtctccggcggaaacacgcaggttatcgcctacagcgaggggaggtacaggatcttcggggaaacgattgatattgccgtcgggaactgccttgaccgattcgccagggtcctagagctctccaatgaccctagccccgggtataacatcgagcagcttgcaaagaagggagaaaaattcattgatgtcccttatgttgtgaagggtatggatgtgtcattcagtggcatattgagctttattgaagctgcggcgattgaaaagcttaaaaataatgagtgcacacctgcggacctatgctactcattgcaggaaactatctttgccatgcttgtcgaaattactgaacgtgccatggcacactgtgattcaaaggacgttcttattgttggtggcgtcggttgcaacgaacgtttacaggagatgatgaagattatgtgctcagaaagagggggtaggctgtttgcaactgatgaccgctattgtatagacaatggggcaatgattgcatatactggtttactggcgtatgcacatggcatgaccactccccttgaggagtcgacatttacacaaagattccgaactgatgaagttcatgcaatttggagagagaaggagatgccggtgctaaataatacccattcagatgcaattgctgaagtttctaaagatgaagcctccatggcaacaccaatcgttatagattactgagatcatggacactggatacacttcttgatgcaaatctgattcggcaaggatagatcttgttcgtaggtgtgttgtacgttgtctacggatcgggtgtcattcatgtaagacagacatgcgactggtaacgggccgttaatattttgtgacattctggtagaagatgcagatctgatttggaaagaaagtgggtcttgctaagtgtgttcggctgttgggtacgacttccgtatcatatatgttgtgacagtttgacagaagatttgaagagtgaagtttctgatttg

SEQ ID NO: 135352 - DNA, 521 bp, Zea Mays
ttgtctagggttcagagtttgttgtatgagcttgtattggagtaccaagatcctatggagggtgtggtaacaactgatggtgtaggtgcaagtactaagaatgttgccgttaatgaaggtgatgaccttatgcttggcatatttgataagttcatgtcagaggaaccggaaacatcttcaacctatatgcgcactgagttagatttgtatttggaagagccaatacttccaagaactcaagagcttgacattatttcttggtggcaacacgcgggaatcaaatacccaactcttagaaaaatcgctcgggatatcatggcaattcccgttacaatagtggcatcagaatctgtttttagtacggagggagggtaattagcccacatcgaagtagacttgctccaaaaacagttgaagacttgatgtgtatgtaagcttggtctcgtgcagacatgttaggtgattaatcttgttttataaatgcactaacaacttgtttggaggatgaagaggaacaaatg

SEQ ID NO: 135353 - DNA, 730 bp, Zea Mays
atgaccttgcctgcagaatcaattacagaacagaaatcttatcactttctcgaagccgacagcgtcatatccgaaagcactaagctatacaacgcgacgagcttcaacgagtacgtgctggaggggagcgcgccggtgctcccggagacgcagcggctgttcaagaagctcgtctcgctgggcatcaagccggtgttcctgacgggccgcaccgaggaccagagggccatcaccgtcaccaacctccgccgccaggggtactccggctggatgacgctgctgctcaagcccgtcggcctcaaggccaccgccatcgcctacaagtccggcgagcgccagaagctccaggacgccgggtacgtcatcgtcggcaacatcggcgaccagtggagcgacatcctcggcgcgccggagggcgcgcgcaccttcaagctgcctgaccccctctactacattggctaagcagcgatgccaacggcgcggcgcggctctccatcagcccatccatcaacccgtcacccggctccagtgcctgtgctcaactactctttgtttgttacccctcacttcttatcatcattaattcctaaggttaattccctgagctgagtggaaataaggccgactcggtggagagctgtcgacttctcaataaataattgctcatgaaaaccacgatggtttatgttattcaaagtcttatatatatataatggattagtaccgggaa

SEQ ID NO: 135354 - DNA, 107 bp, Zea Mays
tcatgcttagtttttcatttggtgaccctgatatgtataattttttacccactatggtatttttaacaacaacttacacacttgcaggtgatagactattgcataaa

SEQ ID NO: 135355 - DNA, 176 bp, Zea Mays
ttttctctttttcattcttcgatagagtgattttgttgtattctaggaaggaatacaatgggaagcaacgttcggctaatccgtcttaccgtctgatttatcgataatcggcaccggccggtaacaatatatcacgatctatgaatttgaatttgaagattttgtaaattttgaaa

SEQ ID NO: 135356 - DNA, 1345 bp, Zea Mays
cctccgatcagaaatcaacggtgcgtctctgctcttgtccggaaggttctcgcaggcgcggcgacctcggttttgaacacctgctcttcttcctccttccaatccaagcttcgtacgggacgaggagaaccgaagaaggaattggacgcgaggagactcgagtactcgacagggaaaagtcgaggcctcggatccatcgactcgtgaagatgtcctcgcccgccgagtactacaaatcacttccacctataagcaaggcatatgggacattgtgtttcttcaccactgtgctagttcggctccatatcctgaatccgctgtttctgtacttatattaccctcgggtgttcaagaagtttgaggtatggaggatatttacaagtttcttcttcctgggaccattttccataaactttggtattcgccttctgatgatagcaaggtatggtgtcatgttggaaaagggagcatttgataaacggactgcagatttcttgtggatgatgatatttggtgccatctcactattggtgttgtctgttattccccaattgaatacttatgtcttgggattacctatggtcagcatgcttgtttatgtctggagccgagagaatccaaatgcccagataaatatatacggcatcctccaattgaaggcgttttatcttccatgggttatgctcttattagatgtgatatttggatcaccattaatgccaggccttctgggtatcatggttggacatctatactactactttgcagtgttgcaccctctcgccaccggaaagaactacctcaagactccgaaatgggtacataagattgttgctcgattcagaataggtatgcaagccaacgctcctgtccgcgcaccagctaacggcaacgctgggactggtgccttcagaggaagaagctatagactcaatcaatagatcgaccaggagaagtacacaccttgtaacgctaacgcgattcctgttctgagtggcaatgtagagacagagcgcagattcctagggtcaatcaggattaagggttgcggatagggcagaggggtggtaatggatgacgatctaaatgttttttcataaaatggtagagtattaaataaattataaattttagtgtaaaatgaatataaataggatttgtttctaatccgatctttatatcttatagtgtaaaattatatcttatagtgtaaaatttagagtcactgttaccctattgcagtgccgcctttcatttactgatttagttcctaacaatgttcgtcgtccctgtttacgcatgagtatagttgtgtaatggcaatttgcgtgcacttacgtttgaa

SEQ ID NO: 135357 - DNA, 598 bp, Zea Mays
ttaataagagcaaggatttacatgccaagtgcagtatgaatcaaatttccgtcatacacttgttggccactgataaaaagaaaagaaacactagtcgcatgattgatcacattgcaaaaacaagaaaaagagaaagaaaaacgacgagaacactcgcaggaacacatgaaaacgttcttattctcaattactccctgaaagagcctctcgtcatcttgttggcatttccaatggagcttgctgatcggacggacctgaccagtcaccacctcctctgcaagaacgccagcctgtcgttctcactgcctgcaacctccaacgagcggtccatgcggccaacgacggccgtcctgaagctgaaggcctcctgcgcccgggggccgcacccgcgctgcatgcccatgacggcgctcaggctggcgcgggacgactccacgacaactacttcgctgagcggcacccgcttccgcggtccgccgccgcagcaggcgagctcggggcgctgcttgggcgcgctctgagaccgcaccttggcctcggacgcctgcgtgctcgacatgtagttcgggcaggcgttgagcgacggcgagtagcccgc

SEQ ID NO: 135358 - DNA, 1953 bp, Zea Mays
ctcccaaggtcgcgttccatcgattctccacgagcggatagcggcgtacagatcttttcgtgctcgtcttcgcgtcggtgtggctggcccgtgactgtgagaagtcaaaatctcacagcatattgattgggctgattccgtgggagggaatcggggatctggcattctcgcgcccaaaaggtcgcagctttctttcgtgtcgccagccggtgcgcggtcgacgcagagcgcgtggagggtgtcccgctagtagctcctcgacgacgacggtgacgggaggccgggggttgaccatggtggcggcggcggacctggaggcggcggagcgggtggtggcggagctccgcgaggcgtgcgcggcgcggctcgacgaggtggcggcggcgatggaggcggagatgcgcgccggactgcgcgaggagggcggcagcaagatcaagatgatcgtctccttcgtcgacaacctccccacggggaacgaagagggcgtcttctacgccttggaccttggcggaacgaacttccgcgtgctgcgcgtgcagctcgccgggaaagacaggcgtgtggccaagcgagactccaaggaggtgtccatccctcctcacctcatgtcaggcaacgcgtcggagctgtttggcttcatcgcctcggcgctagccaagtacgtcgccgcggcgggcgaaggggacggcaggcagagagagctcgggttcaccttctctttccccgtgcgccagacgtcgatcgcgtcaggcacgctcatcaagtggaccaaggcgttttcggtcgacgacgctgttggtgaggatgtcgtcgccgagctgcagacggccatggagaagcaaggcgtcgacatgcgtgtggcggcactgatcaacgatacggtcgggacgctggctgcgggccggtacaacgatgaggacgtcgtcgtcggtgtgatactaggcactggctccaacgccgcgtacgtcgaagaggccagtgccatacccaagctcaagctggagggcggcgaattgcccaagtcagggaacatggtgataaacacagaatggggtaacttctactcgccctgcctccccatcacggagtatgaccaggccttggatgaggagagcttaaacccaggggagcagatcttcgagaagctggtttcgggcatgtatctcggcgagattgtgaggcgggtgctgcttaaaatcgcgtcgcagtcttccatcttgggcgatgtcagccacacgaacctcaaaactcgcttcagtcttaggactccggacatctccgcgatgcaccatgacggcacgcctgacctgagagtcgtggcggagaagctggccgacaacctcagggtcagggacacgtccttggacacgaggaagatggtggtcgagatctgcgacatcgtcaccgggaggtctgcccggctggccgcggcggggatcgtcgggattctcaggaagatcggtcgagcggcgccaggcgacgagcgccggtcggtcgtcgccatcgacggcggcctgttcgagcactacgccgagttcaggaagcgcctggaggccacgctggtggagctgctcggggaggaggcgtctaggctggtggaggtcaagctcaccaaggacgggtctggcctcggagccgccctcattgcagctgcccactcgcagtactgaacgcccaacggccgtgtgtgtcggtgtgcaactcgtgctgaattcctgtacgttttcaagaacaagtttgctcggaatctgccaacaagcaagtgctctaatggaaagttgctatgcggaatcctagtgagttcagggtttccaatgtttttttttttctagagggatgggggatgtgacttcagctttccaggcagttgagacttaattgagatggagcagctgtgcctctggttcatttcccgaaaggctccaggagagaggcccagcggtccaaaac

SEQ ID NO: 135359 - DNA, 106 bp, Zea Mays
ctacctaaacacgctcgtgatcgcacccacacgggtgcattcggatcactcgcgagttttactcagtgcacacttttaaacaataatttagctataagcaattaaa

SEQ ID NO: 135360 - DNA, 2284 bp, Zea Mays
ctcgccgcggcgtttaccatccgctcgcgtccccgacctttcctcgcttccacacgcggcgggccccagccgtggcaaacctgggctgggagggggagcgactaggactactacttttcagggcccctgcccctgcccgtggagactactcagcgtctggagcgctataaatccgcgtcaccgtccgttgcttcttcttccacatccgtcttcctcctgtaaccagatctgaacccgcggcgacagaaacaaacgctcgctcgctcgttcgttgtccgttcattgtcttcgccggcgccgagggaccctgagagggcaggcgggcgagatggcgggcggcggcgttgaggacgtgtacggcgaggaccgcgctaccgaggagcagctgatcacgccgtgggccttctccgtcgcaagcggctacaccctgctgcgcgacccgcggcacaacaagggcctggccttctcggaggcggagcgcgacgcgcactacctccggggcctgctgccgccggcgctggcgtcgcaggagctgcaggagaagaagctcatgcagaacctgcgccggtacgagcagccgctgcaccgctacatcgccatgatggacctgcaggagcgcaacgagaggctcttctacaagctcctcatcgacaacgtcgaggagctgctccccgtcgtctacacgcccaccgtcggcgaggcatgccagaagtacggcagcatctaccgccgcccgcaggggctgtacatcagcctcagggacaagggcaagatcctcgaggtgctcaagaactggcccgagaggagcatccaggtcatcgtcgtcaccgacggcgagcgcatcctcggcctcggtgatctcggttgccaggggatgggaattcccgttggcaagctctccctctacactgccctcggaggtgttcgcccgtcagcttgcctgcccatcacaattgatgtcggcaccaacaacgaggccttgctcaaggacgagttctacatcggcctccgccagaggcgtgccaccggcgaggagtaccatgaacttcttgaagagttcatgaccgccgtcaagcaaaactacggcgagaaggtcctcacccagttcgaagacttcgccaaccacaacgcctttgacctgctcgagaagtacagggagagccatctcgtcttcaacgacgatatccagggaacagcatccgtggtcctcgctggcctcctggcggcgctcaaggtggtcggcgggacactggcggaccacacttacctgttcctcggcgccggcgaggccgggactggcattgccgagctcattgctctcgagatgtccaaacatactgggtctccgatcgaagagtgccgcccgaagatctggctgatggactccaagggcctgatcgtggcgtcacggaaggactcgctgcaggcgttcaagaagccatgggcgcacgagcacgagcccgtggcgaccctgctggaggccgtgcagtccctgaagccgacggtgctgatcggcacctcgggcaagggcggcaccttcaccaaggaggtggtggaggcgatggcgtcccagaacgagaagccggtcatcttcgcgctgtcgaacccgacctcgcactcggagtgcacggcggagcaggcctacacctggaccaagggccgcgcggtgttcgcgagcggcagccccttcgacagcgtggagctggacggcaaggtgctggtgccggggcagtccaacaacgcctacatcttcccggggttcggcctcggcgtcgtcatctccggcgccatccgcgtccgcgacgacatgctgctggccgcctcggaggcgctggcggagcaggtaaccgaggagcacttcgccaaggggctcatcttcccgcccttcaccaacatccgcgccatctccgcgcgcatcgccgccaaggtggctgccaaggcctacgagctcggcctcgccagccgcctgccacgccctgacgatctcgtcaagtacgctgagagctgcatgtacacccccatctaccgcagctaccggtaaggaaaggaccatggccggggcggcggcctgagcaaaaggaaaggaaacgggtaaattatgagtcagtgagtgaataaagggtcgatgcgatatttgttgcagctagaggagtgagtttacacatactttcatttctatacactgtatttctgtgtaccgtatacggcataccatacaacactactacatactcgtcagtcatttcaatacagttaatgtacctggttagaacgctatcactct

SEQ ID NO: 135361 - DNA, 1604 bp, Zea Mays
tgtccgacaaaaaggcgatatgtccatcaactgagtgtagcagagatgtgcatgttgcgttggttttgtggacacataagaagagataaagtccgaaatgaagatattcgggatagatacgaagtgatacctattgaagagaaattgattcaatgtcagttgagatggttcgaacatgtccaaatgagacctctcgatctcaaggcaccggtgcatagagagattttagagtgggtcgatagtgtaaaaagaggtaagagttgacctaaaatcacttaggacgagatggttaaaaggtatcttgaggtgtggaatatctataaagaattagctaaagataggtgagctattatatttaccattaactctattgtctatcttttactctttcgtgtttttttgtcctcgtatttttggattttatctctaacctaccttaacttacttgggacaaaagattatattgctgtagtatttttatacaagcttcttaacgaacaggttttagggtacaatggttctatatatacattactgtcgtgcagttccatgatattttgaagttcctcgctgtttacaccgtagccacacagaaaccttaggttgcagagaaatcttctattaggtttatcaagtaaagaactcagagcgcaacttgccgcaatttgtacttgagctatctagcttccaacagtttcaagggaaagaaaagaaaaaaaagaaagaaagaaaagttctccgtctttttgttatgctttattcacaggaggacattatcaatgtagaataaagattttgcatgtttttaaaattgtcctgtttccctctatatatagacccttgctcatttcgtgtctcggcgtgctcatctgagtcctctgtagtagtctgtacttgcctgcactctgcactctgactgagctagccgacatggacttgcggcgccagaccatctccatgaagaaaagcctcttcgatcagggttacctggatgaacagttcagtcagctggaagagctgcaggatgattcaagccccaattttgtcgaggaagttgtggctttgttcttcaaggattcatcaagattgatggcgaacatagagcaagcacttgagaagtaccctctggatttctacaggctggattctctggtgcaccagttcaaaggcagtggatcaagcattggtgcactgaggatgaagaatgagtgctccatgctgaaggcccactgcaacggcaggaatctggaaggatgccgccggtcgctccagaagatgaagcgggagcatgccactctgaagcagaagctggagacgtattttcagttgctgaggcaagtcggtcctccagaacgcgcggtgaactcatggaagtaacaagagtagctaagcatgggaggcagttccaagggaaacaagagggtgggctactacctctgctccattggaagagtatcgtatactcctcgaagttttgctcagttacttactgctggtgtgccggcccttttctttgctgctcatatgggggatgtgtctgtctctggtgtggtttctgtaccgtctactctgaaatgtgcaatggtatcatcaatatatttggt

SEQ ID NO: 135362 - DNA, 483 bp, Zea Mays
tttattcataacaccattttattatttgtaaacataaatattttcctttctacgagaaattaataatataatctaggttaccttaattgatggatttagggtgttacaattgtcttgtgtttgccattgaaatgtgccattttatggtacacatgacgagcccaggtagtaggagttggtattaaaggtaagtaaactacaccctatacgcaatggtacaaaaaaataaagtattgacaacttatattccagtaacatctcctataactccccccatcaagaactggcagaaatatacatccaggcagaggggtcagtagcagatgactcctatatcagtgtcggaaggatgccgatcttcttgatgacatggaacctgaccttgatgtgatcagcgcatcagcaaatttatggatctcaacatcctcaggtatggccttgctactatcaaggccaatgctgggaccgaatgcatttaccttt

SEQ ID NO: 135363 - DNA, 888 bp, Zea Mays
atggaccccaatggcttggtggattcacagagatttcttcggcttaagaagaagcgaagaagatcaaaaggaggcaagacaggagttggcgcgtctaggattgtttcccccggctcagctgatggtgttgatgctattcttcctatgcctcggctggtcgagcttggggatagtcgtccacccctagttgagtctcgggtattggctttctatgatgagctggcgcgagaagaaatcaagttacgtcgggccttgttcgttaccattgtggagacgaggcctgaggttcatggatcggatgttctggaagaggtggctcgcagttttgaagtcaatgtgagagatatgtcaattcatcaagcgaatcctgaagattttctactatttttgcctggtgaagatacggcaacacgcgtgctcaatggtggaagattttttgttgaccctcgtttcaacttgcttttcaagagctggtcgcgtttctcgcatgcttcctcatcggtcatgtatcaattggtggacgtcgtggtcagaggtcttccggagcatgcatggttccgctctacggcggaggtcattcttgaagactcatgcttcattgaggaggttcatttggatatagttcacaaaagggatttctcttcctttgctgttaggactcgatgttttgatccagagaggttgcagcggaatatgattctacatatctcggagccagggccacaatccaatgaagcaaggtttttgtcatacaatattagtgttcaagctatcccggtaaatgccaatgaagcttcaatgcgccctccggctgatccttcgacgaggacgggtggggatgatcggtctagtgcatcgaatgatgatgtctcagacccttcaccttga

SEQ ID NO: 135364 - DNA, 3133 bp, Zea Mays
agaagattcccgtctacattggccgaccccgcggcccacaccgtatatcaccgcctcctatccggcctctgcccttctcgccgaacggaaaaccctgcccggaccttcgttgcagcgctacgagcttcgacgggccgctcgatctccacctctgaagtggctgcttgtgatctagatctgaaagctgcagtggttgacagctgagtgtgaaactgtgaatcgaagatgagcgtggtgggcttcgacctcggcaatgagagctgcatcgtggcggtcgcgcggcagcgcggcatcgacgtggtcctcaacgaggagtccaagcgcgagacacccgccatcgtctgcttcggggacaagcagcggttcatcggcaccgccggcgccgcgtcctctaccatgaaccccaagaactccatttctcagatcaagcgcttgctaggccgcaagtactccgaccccgaggtacagagagatctcgcctccttcccgttccgtgtcacggagggccccgatggttttcccctggtccatgtacgatacctgggcgaggaacggacgttcacctctacccagctgcttgccatggtgctgtccaatttgaagggcattgctgagggtaacctgaatgctgcagttgttgattgttgcattggtattccagtctactttacggatctgcagcgcagggctgttcttgatgctgctactattgcgggtctccagccattgcgattgttccatgagacaacagccactgcactggcatatggtatttataagactgatctcccggagaatgaccagttgaacgttgcatttgttgatgtcggtcatgcaagcatgcaggtcagtgttgtcggttacaagaagggacagctcaagatgttgtcgcatacgtatgaccagtctcttggcgggagggactttgatgaggccctgtttaagcactttgcagctaaattcaaagaggaatataagattgatgtgtaccagaatgcgcgtgcatgcattaggttgcgtgtggcatgtgagaaacttaagaaggtactgagcgccaacccagaggccccactgaacattgagtgtttgatggatgagaaggatgtgcggggttttattaaaagggaggagttcgaacagatcagtgcctcggtgctggaacgcgtgaaaggaccactggaaaaggccttggctgaagctgggttgactactgaaaatgtgcactttgttgaggttgttggatctggttctcgtgttccggctataatcaagataataactgatttttttgggaaggagccaagacgaaccatgaatgcaagtgagtgtgttgcgcgaggatgtgctcttcagtgtgctattctcagccccactttcaaagtgcgagaattccaggttaatgatgggtttcctttctcaattgcattgtcatggaatggagactcccagaacaccccccaacaaacccttgtattcccaaaggggaatgcaattcctagcactaaagttcttaccttctttaaatccagtacatttgaagttgatgttttgtatgtcgacccaaacggcttacaaattccacaaaaaataagcacatacacaattggccctttccaaacctccaaaggagagaaggccaaactgaaagtgaaagtgcgtctcaacatccatgggaccgttacagttgattcagcaataatgctggaggatgatgtggaagttccagtttcatctgcaaatgaagctccaaatgatactatgaagatggacacagatgatgcaccaagtgatcctgctgttgcatctgatgtgaatatgcaggagcctaaaagcgctgataccgctgaggctgctcatgcagctgaaaatggaccacaagatactgaggaaaaatctgttccgatggaaactgatgcaaaggttgagccgtcaaaaaagaaagttaagaaaattactgttccggtccatgagttggtctatggggccttggctgcggctgacctgcagaaggctgtagagaaagagtatgagatggctcttcaagacagagtaatggaagaaacaaaggagaagaagaatgctgttgaagcttatgtgtatgacatgcgtaacaagctatatgacaagtacagtgattttgtcacgtctgaggacaaggaaggtttgattgctaagcttcaggaggttgaagactggctctatgaagatggcgaggatgaaactaagggggtttatattgctaagctagaagaacttaaaaaagttggtgatcctattgagctgcgcttcaaggaatgggagattagaagttctgctgttagccaactggtatactgcatcaatagcttcagagaagctgcacagtctaccgaccagaagtttgaacacatagacatgtcagaaaagcgaaaggtcattaatgagtgttcggaagcagagacttggctaatagagaaaaagcagcagcaggatgctctgccaaagcatgctaattcggtactccttgctgctgaccttaagaagaaagctgaaacacttgataggttctgcaagccgatcatgacgaaaccgaagccagctcctaagccgcagactccgcctgtggcagaaaaccaagctcctgagcctcagacaccagagcagcagcaatcaggtggcgaaagcacagccagcgagggagccgcagaggagcctcgagccgagcagatggagacagacaaacctgagggagccacagatccctcggcttagctttgccagtgatcaaacatttgtgtgattgaccctgttcacctgctgttatagtcggtaggggggagtgaactaagcgagaggttcgccacatttgatttgaggatgtgtgttgggacattcaaggtattctgtttcttgtccttgacaagggaggtggttgggtgtttgaaggataagagcagtggggtacactttctcacgtttttgtgccccacacgctcgatatctttattgatgatggtccgtaaaaccaaggtaaatggctattccaaaattttcgtgttttttactgtaacggtctacttaaaattttttttctgcaaaaacatcagtgtctgaacatttagttcgttggttagaccatattcaacagtttacc

SEQ ID NO: 135365 - DNA, 489 bp, Zea Mays
ttggtggtcttcgccgatcacctagaagctgagaagaaggcgttggagtggaggattgagcgtgttctctctgaccccgtcgatgagctgcatgtgcacaagtggctcatggcatactctgcattggtgtctcctaggggcaggttgaatgccctcacgcacgaaggctgttgccacttcgagcgctttgggtctttggattattgtactggctgtgacatctatgatattgaggagagcctaaagatgccgagtggagtgctgtttgaccggatgtggagcccttcagccctaatattgtgcgcgactgagcaaggtagagatgtaagagctagagaggccacagactcgtcatccgactccgatgaggctgcatcctgttgtccccgactgctaaccgctgtacgtgaaattgcaaacatgtgggatgtgtttgactgctacgaatacgacattctaatagtggcaagaatccagcagagcgtctag

SEQ ID NO: 135366 - DNA, 2174 bp, Zea Mays
acatgccacattgccaccaagccacagttccacctttcgattcatgcacgctcagtcatgggcgccctccggagtttagccatctcctacccggagttcctcgtggccgggctctgcttcgtctccctctcggccctgcgccacgcgatgcgtgagcggcggcaacgcgcccccctgagctggcctgtggtgggcatgctcccgttcgtgctcgcgaacctcgggcgcctctacgacgccatcaccgacgccctccacgggtccgggtgcacgctcatgttccgcgggccgtggctcgcccgcgcggacttcctgctgacgtgcgacccggcggccgtccagcactgcctggcgtccaaccacaggggctacgacaggggccgagactttgcggagatgttcgacctcctgggcgacgggctgctggttgcggacgccgcgtcgtgggcgcgccagcggcacgtcgccgccaccgtcttcggcaccccggcgttccggtccttcgtcctgtgcaccatggcgcgccagacggcgcggctgctcgtgccgttcctggactgcgccgccgcggatcaggaaggggacggtggcgtcgttgatctcgaggacgtgttcatgcggtactcgctcgatgtgacctacgcctccgtgttcgatgccgacctggacatgctgtgcgtcgccgccgcctcggcgccggtgccgccgttcggcctggcgaccagggtggccagcgagtctgtgctcttcaggcacatcgtgccggcctggtggtggaggctgctgaggtggctcaatgtcggctccgagaggaggctggccgaggccaaggcggtcctcaacgaattcgtctaccgcgagatcgccaaacgcaagtcacggctcgccaccacaagccaagcaggagaaggctacgacctcctgtcactgtacatggcgtggccgagggaacccggtatgagggagcggcagagggatcagttcctccgggattccgccgtcagttacttgtttgcggccaaggacctcatcgtcgccgcgctcacctggttcttctacatgctctgcacgcacccgcacgtcgaggccaagatcctcgacgagctgaggtccctgcatcccacagccacggtcgcggccaccggcggcggcgagcatgccgtgttcgactctgacgcgctccagcccgcgtcctacctccacgcggcggtcctcgagacgctgcggctgttcccgccggcgcctttcgaggagaaagaggcagttcgcagcgatgtgctgcctgacggcaccacggtggccaagggcaccagggtcatcttctgcatctacgccatgggcaggatggaggggctatggggtagcgactgccacgagttccgaccggagcggtggctgtccgatattggccgagtccggcacgagcccagccacaagttcgccgtgttcaactgcggccccagaagctgcctcgggaagaatctggggctcagcaacatcaaaattgccgccgccgcaatcttatacaactttcgggtggagctcatcgacggccatatcgttgagccacagaactcagtggtgcttctcaccaagaacgggatgagggttaggatcaagaggaggcacgcagcatgatgcactgtgctacttctaccttcacatcagttaaactccaaaaaatggtggggaaacgaacaaaaggtgatagggcttatagaataaaaacgcagcacaaattttattccagattaatctgctcatgtgatttcagccatattggatacaagttctgaactttgatgcttctgattcggaaaattaatcagacaaaattgttccatagtttcgagggagacaaggaacaaatagctttatgatttccacaagttcggcaatctgtaatgtacactcacagtcacaggtaatatctgacgctggtgataatattatgctaaacataattcattgatttcccttttgcaatccaacaataaatggaccaaagaatttaaagaatatttcagttagtagtttactgctcatggtttgcaaccggtgtattaaatcgcgggaggtttagcgcctgggttcgagaacagctaagcccagctataaccgactatagcggaagctaagccttttagcggatttgcaaaaaaaaaaaaaaaaca

SEQ ID NO: 135367 - DNA, 656 bp, Zea Mays
cctctctaggtaggctagctagcaaagctgcttgccgtgtgtgtccatctccagcaatggcttctggcgccggtgccgctgccgccgttgcggttttcgccattatggtcctgtcttcgctggggcacccaaggaccgggccgttatgcagcgactgtggatcgatgtgcacagcgaactgcaccggagaggtcgccacctcctgcaggagttactgtgagaaccccctggctgctaggcagtcgtgcgagaggcaggtccttcaggcgtgcacggtgtccttctgctgctacggcaactgcacccgtgactgcaatctggaagcccacaatgcctgccaatccgtccacgacaccactatcgattgccagtcttgcacgggcggtatattccagtcctgctttcccgcctgcaacagcaactgcaacagcacctgcgtgaataaagagcatggatgcttgaggacttgatccaagcttcgtctcattctgtgctgatttggtcatcggctccttgtgtgcatgtatgcgtggatgtagtatgtatgaagcccccttgaatccctgggtctgggatatgtctacaataaagtacctttgcactgtattttttttcagtgttttattatatggaattttgcttgtctggccctcgaa

SEQ ID NO: 135368 - DNA, 327 bp, Zea Mays
atggccgcgcccctgatcgagctcctgcgcgcccttgctccttttctccaggccgccagtgctcagttttctctctccctcagcactccatggcgctcctaccctctgctcggcgttcctctgctcgtccatcttccctgtgccaaccatggcgcttggcgcccaggtcccaagccgcgtagtcctctctggcgcgcaaagcttgctctactgcgcgctacgtgctcgccatggagcttctctcccctgccgagccccaaccccagccagccgagctcttcactgcccagctccatctcacgacgctatgtctgttcggttccatag

SEQ ID NO: 135369 - DNA, 727 bp, Zea Mays
ttgcagcggaaataaattctttattacaaaatgattacatgttacaataagtttacattatacaattatcggagtgattacaaaagaaaatgattaaaaagaattacaatttgaatgtataaaacatttataagttttaaaatacatgctagcttaagtgacagtcctcaataaagaagctaaagatgtgatatacttatataagaaggccgagcccaccggcacttagcaccatccacaacagaacaaacttataatcctgaaaaacaacagggaataaaaccttaagtatgcaattactcagcaagacttacccgactaaagaaaagactctcaagggtatgctggtttgttgggaatcaaggtaaagctcatcaaatttcaaagactcgtttttgcagaaaagcttactagtagtggatccttatgccaaacttttacttcacaaattaagtacttttcctgaatctagatttgcctaatctagagcattcacttgtcctacactaaattcattttagcatctttagtttcacttgttatctacgatgagggtcgaagatccagtcttcatatctgagaagttcggcgatccgaatcgattaatacccagctggggatcttcaaccacacgacatatgtagcacttaacccttgcatatgtcaactcgccaccgggtttctcaagaccagaacgggttcacgcgacccgagagcacagcactcc

SEQ ID NO: 135370 - DNA, 183 bp, Zea Mays
gccctttcaggaggaaattagctgaagttaatttgccaacagaggagggtgtaccgaatgttgtccctgacttggactttccttgtgcaacttctaaagaaagagctgttgatgttggaaacatggataaaggcagaagaaaatcaactccgagacccaagcagataaacatgcctgaagagg

SEQ ID NO: 135371 - DNA, 152 bp, Zea Mays
gcgtgtggaggttgcagtcagtacgcgtggaatgctcaaaggatgacgcccaataagctggagtgtcatcaggcacattgccttgtttgtgagcagctccacagcagattcccttacacaagggatgtttttttagacagaaccagggtcat

SEQ ID NO: 135372 - DNA, 555 bp, Zea Mays
ggtgcattagacggaaccgctatcaaggtaactgtgccaacacatctaaaaggaagatataggtcgaggaaagcggacattatgacaaatgtatttggtgtttgtgcacctgatatgcaattcatctatatgctgcctagttgggagggttcatcgcatgacgatcgtgtgttgtgtgatgctatctcgaggccaaacggattgtgtgtccctcaaggttgttattatcttgttgacgcgggttatacaaatgccaatggatttctagaaccttatcgaggtcgacagtaccatttgggtggttggacagtgcaaaatccaccacatagtgctggggagtatttcaatatgtgtcatgctcgagcaagaaatatcatagagagggcttttggaaggcttaaagggcaatgggtgattcttagatccgcttcatattttcctataaagatgcaatatcgtataataatggcatgtgcccttttgcacaatctaattttgcaaaaaatggctagagaccctatggaaagtgaggaacaatcggttgtagattctgaa

SEQ ID NO: 135373 - DNA, 459 bp, Zea Mays
atgttagatgctcttggtttttgtgcacatagaaggaaattcaatcaaatcccatcatgcaagaagattccagtgaactacatatcaaatcttcattcttcagatagtaaaagtttgcaagctctatcgacaaggtgttttggcaaaataggaagcattcctagaccaacaaccagaaatatcttagcaagagtcgttaaagccccggcacccttttcagaaagttgcacctgtgcaccttgttggacacggatatcgatgcctttgctatccatcgaaataacagctaggtcgtctacctctccttcatcagttgacaaatgctctttcacaggctttgagaacattgagttgagttccttcagattttgttcccctccatccatagcaatcttgtcaggttgcagagtctcatattcgttcacatctacccaagcaacagtaccaaaactcatataa

SEQ ID NO: 135374 - DNA, 195 bp, Zea Mays
atgatcaatgctaccaaatgctggaacttaacttacaaaaccagcaaaataatgatggcggcgaagatgaaaactgcgacaattgacattattgatcagctaccctggtttgccagattcagggtagtggacgtcaactggtgcagccaccacaaccatttcagccatgactacttcatcgttgaaggaagatga

SEQ ID NO: 135375 - DNA, 905 bp, Zea Mays
aacatgccctaagagggtttgggcctccagtccgtatatatatgctggcggttctgatcgcttccaggtccacacctctcttgcctctcccacgcccacgccaccccaccgcacgaagagagcgagcgcacgaacgggggagacatggcccactcgccgtcaggatcgcacgtagcggcgacgtcggtcgggaacgaggccttcaccgacgcggtggctgaggacggcggagactccaagctctccgcgctcctcttcgacgtgtcgcagcaggtgcaggacggtctccagagcatgctcaagacgagcagcgagatcgcgcggtgcgacggcgagatcgacgcggagctggagcgcgcgagggatgccgtggcggagaatgcccgagcgctgcacgacgaacgggagagagtccagaaggccgccctcgccgcgctcgacatcctcagcggcggccgttgcgtcatctgaagggatgcccgccgcatgccggcgccaccgacagtctgcccccgacctcagatcacgctcgattctcgcaagattcctgctccatttgtgaatgtcaccgtcggtgttacccttttgcagtagtagtaatattcgcactgatgctggcattactagtaacttgttgcctgttgaactgcaataatagagtttagaatttgagatgtgcacgatatgatcgatggagattggtctggactagtgcagaaatgacccataaatggtgacgttgagggtgtttaaggaactaaaactgttgattaagggtctgtttgattatagaagctaaagtaaaagtggctaaagcttagttagggtttgtttgacagagctctgacttgcttaaaaacaactctagctctagcttttttatagagctatagttatttcgtaaa

SEQ ID NO: 135376 - DNA, 318 bp, Zea Mays
gtgcctccggtcgactcgtcgacatcatcagatcagcaatcgaccctctggtccaggcggtggctagctagcgcaacgcccatggggtgggcgaagaaggcggcagtggcggagacgacggcgcgggtggtggacgacaggtcgacggtggaccaggcggtggcgtacgtgctcatggccgccgcgctcgccgtcacctacctcgtgcactgagttcttcttcaccatagatcgatggatcgagatggttgtacagctcgctactgcttgacatcgtttcttgtctcgattcgatgcatgactccatgtcctctcacc

SEQ ID NO: 135377 - DNA, 633 bp, Zea Mays
aattgccctctcaggtcggctcatcaacatcaggccatccaccaattcactccgacagctaacacgtttgccgccgatggggtcgtcggtgaagaaggcggcagtggcggagacgacggcgcgggcggtggaccaggcggtggcgtacgtgctcatggccgccgcgctcgccgtcacctacctcgtgcactgaccaccgcgcggtgaactcaagtgccaattttgatacatcctacggaaaggaggacagacaagctggagatgacgtactatgattcaatcgcagcggaggattcgactatctagggtcgccaccgtacttcttatcgatctcaaccaaacccttcgttattgtaaaaaagatgtactacagatcttctataacgaacagtgctcatgagggcaaacatgtcatgcactcatgctctaggataaaagaaaagaaatgtcgttggagatcttccatgcaatggatagtgttcgtgagtgctaacagtacgtgtgctcggtcatgaggcctggacagctatgttacccgtgtcaggatacggatacgcgatacgtcgataccccgatacgccatttctcaaaaaacaccgatacgtaaatatatattataaataaaaataaata

SEQ ID NO: 135378 - DNA, 581 bp, Zea Mays
ggacgagcgccttttcatgcccgctggccattgccgctgctcacgagcctcccgcctcgcgctgccctgccctctacggctctgccccaggagagccagacagccaggtaagggagccgtcaaaagcccccgccgaggagagcacgcaagggtaagcccacctaccaacgaagccccatctcttcgccttgcccttctgcttcgattagattggatcccggtcgccgtcgctgcaggtgggatttgcccccctttttttcttcatcgccgcagctccttccctcgggccgtgtgtagatctgcacgttccctggcgtctgctcggtgtcatgccttcattcatctccgtcgaattctcggtagatactacgttccatactctacggttattggattatgtaggcaatttgatctagctgggtaggtccataggttagttatggcaaataggaatgtcgttggcctcattttctcaagagttggcaagtcaggcatagacctgcgtctgctctgagttctgtccatatatactccatgaatgaactcagcaattctgttgaacgattcgcgttgttatatac

SEQ ID NO: 135379 - DNA, 1443 bp, Zea Mays
attcagcccgcagatttttgtacccgccggctgggcctcggcctcggcgtgcaagaaactagaaagaggagcagacaaacaaaatcgattagaaaattaaccccaggccagaaacccactctctctctcccccgattcctttcctcgtcctcatccgtccaggggagcaaacaagcaagcaagtaaacgggcgaggagctggatagaggccggcgacgcgaagcaaccgccgatcggagccgcggctgaggaggaggagcaagctcgagatggtgggtctcgtcggcggcagcacggcgcgggcggagcacgtcgtggccaacgccggaggagagacggagtacgtgcgccgcctgcaccgccacgcgccggccgagcaccagtgtacttccaccctcgtcaagcacatcaaggcgcccgtccacctcgtgtgggagctggtccggagcttcgaccagccgcagcggtacaagccgttcgtcagaaactgcgttgtgcgcggtgaccagctcgaggtcggtagcctgcgcgacgtcaacgtcaagaccggcctgccggcgacaacaagtaccgagcgcctcgagcagctagatgacgacctgcacatactcggcgtcaagttcgtcggcggggaccaccgcctccagaactactcatccatcataactgtccacccggagagcattgacgggaggccaggtaccctcgtgatcgagtcgtttgtggtcgatgtgcctgacggcaacacaaaggatgagacatgctacttcgttgaggctgtgatcaaatgcaacctcaagtctctcgcagaggtatctgagcagctagcagttgagtcacctacatcgccgatcgatcagtgagtcgcctgcatccctgatcgatcagtaacaccggtacaaagacatgaatcggcaacaaataagaagtttcaaaggctggctagagggttcaacctttttgagattggtggtttcgccatcgtcttctgcgtgtatgtctcttggaatatggaaggtttagtggtatgtaggtttaaatatcttgttgtagcttgtactacctccgttctcgaatatttgtcgttggctagtttatttttaaactaaaccgcgacaaataaaaaagaacggagggagtatgttagggatgatttagccttaggaactgcacctacatacctcatggcatctatgcacactgctagtatgtgtagaaatcagggaaagcatggagcggtttttgcatcattggtgcatggagatctatgccttttttctctccattttgcggcggctactatattggttggggtttatacttcaccgctgacacatagggtctggatcttggattttgtttaattctcgtgatgcgcagtattgtattctccagtgttactgggatttgagatttgaactgggtggtggatagtgcggcttt

SEQ ID NO: 135380 - DNA, 925 bp, Zea Mays
acggaccgggcgggaaggggaggagagtttcccgcgctcagacggcggccaccccatttccatcccccaaatcctaatctaggggtcttcggcccgtgaatcaccgtacctcatggcccccaagcgacgtcgcgcggatcagggctcgtcggtgcctgcgccacctcctcctttgcggaaagcaaaacttcagccggttgtcatcttcgcccacggcgccggtgccccttcctcctccgactggatggtccattggaagaagatggtgcaggacgcattagatgctgtagccgtggtgacctttgactacccatatatgtcgggtgggaagcgcagggcgccgccaaaggcagagaagcttgttgatcaccacctgggcatcgtgaaggatgctgctgtcaagtatcaggggcaccctcttattttgatggggaagtccatgggatcgagaaatgatagtttgttggaagaaactcttttggacatcatctataaactaaaagggggtgaagacacaccagtgtatacgaataaaggagtgaatggagcagtgagagatgagacactcttacagctgaaggtaccaacgatgtttgttcagggaagtaaagatgccctgtgccccttagataaacttctgtctactcaaaagaagatgacctgcaagaatgaactgcatatcattgatggcggtgatcactcttttaaggtcggcaaaaagtacctagaatctaaagggttaaatcaatatgatcttgaaatggaagctgtcacaaaaatttcacagtttttccaggattccttcactgagagttgtacctagccgttctgtatattttccttaacaccttcatggtgactaaacctaatctctgtcttcgaacaagattaatatgttagtgtaatattttggtgtaagatgcta

SEQ ID NO: 135381 - DNA, 252 bp, Zea Mays
tcctccgactgcttgtctagcagggtatcttggatgtgaaccaggtgatgacgtgcagcggcgccttgatgagctccaccgccgcctccagcaccaccgtcacgcagaggcagcacgggcagatgcacgatatgggcagcccgatgatccagatgatggcgccgacgacggagacgaggacggcgagcagcgcgaacggcagccccagcagccaacccagcggccggcactcgcggccgtcgccgccgcagc

SEQ ID NO: 135382 - DNA, 1030 bp, Zea Mays
gccgcgctgggcagcgactggtccgccacccacgccgaggtcgcccggcgctcgcggagttctgcgacaacgcggcaaggccggcctgcggcaggaggccgtggtcgcggacgccgtcccgcggctggtgtggatgctggaggccaagcccgcgggcgagcgcgacgccacaccaactgcttctgttctctgtcccaaacaagccagggcccaacgtatgcttctgtctggttcagctatttactttaaatctagagctagcagctgccctacttttcaatcttacatgattgtgctctgaaaattgaacccaggggtgagtggtggggtttgatgaatacaactcccaggtggatgtcgccgtgtccggtgaaatagccgcatctgtaaagcatatagacccaggcacagacagtgatgccgggattgggaattgggattaagtagcgccgtggccgctccggcccaaagtgtatcgaagtgtatgcgctgattggttgtctacctctgttgtgagtttgttcctgcgtggtaaaaatacgtaccttgttgttggtagatggctcgttgatggggtacattggattggtggtcctcctgaagactacattcctgactggttgtgtgtgatgagagatcttccagaacttgtgctgaagtatatgttcctgcataagacaaattagagttttggtcaggtaggtgcttacccaaggttttgtgtccattggtttcttcagaatgagctgagttgttgactgctatatgtgcggctattttcattatgaacttgcacaactgtccatgattttggaattgaatctcttgtcgttcctggctttccaaatgtaccgaatcatcaggagtatatggttggatcagagctgaaaaaatttcctggactccatcttgttcctgagggaggttagtagtacgtagaagagggatagaagaaagttagtaaaatgtatcagcggtacttggaacttttgaacctaagctaaactttccatcattattttattttctt

SEQ ID NO: 135383 - DNA, 91 bp, Zea Mays
ctgccgcgggctgcggcgccccacgccacgcggcgttcggcccttgcgcgcgacctgcgccagccaggcgggagatagagagagagagccg

SEQ ID NO: 135384 - DNA, 1547 bp, Zea Mays
gtagtacatcatacacacctctccgagactccgaccactcccttcccatgcctatataaacagaggccacctccttcgtccctcccgcccccatcaagattccgacccaaatccctctccgagctcgaccaaaaaccaccctcccagtacgtacattcccaccacctcccagtgcagcgccagtctgtaacccataaccataaccataccatggtggtcctcaccaagggcgagctggagcagatcgcgctgccggccgtgcagcgcgcatcgccgccgccgccggccgccgtgccggaggtcgacctggcagccggggacgccgccgccgccgcgcgcgcggtggccaaggcgtgcgaggaccacggcttcttcaaggtgacgggccacggcgtgccgccgcacctcctggcgcgcctcgaggccgccgcggccgcgttcttcgcgctcccgcagcgggagaaggacagggccgccggctgcccgttcggatacgccagcaagcggattggcgccaacggcgatctcggctgggtcgagtacctcctgcttgccgtcaccgccgccggcgcagcggccgcgccggggtctgcgtgcgagggcgcggagccgtcctgtttccgtgctgtgctggacgagtacgtggcggcggtgaggcgcatgacctgcacggtgctgcagctgatggcgcaggggctgggcctcgacgacagggacgtgttcagccggctggtgctggaccgggacagcgactccatgctgagggtgaaccactacccgccagcggcggagacgaggcggctgacggggttcggcgagcacaccgacccgcagatcatctccgtcctccgctccaacgacgcgtccggcctcgagatcacgctgcgggacggcacctgggtgtccgtgccctccgacacggaatccttcttcgtcaatgtcggcgacgcgttgcaggtgctgaccaacgggcggttccggagcgtgcggcaccgggtgatggtgagcagcgcgcggccgcgggtgtcggtgatcttcttcggcggcccgccgccgcgggagcgcctggcgccgctgccgggtctggtggaccgggagggcggccgacgccgctacagggagttcacgtggagggagtacaagaactcggcgtaccggaccaagctggcagacaacaggctctgctccttcgagaccatggcgacgagctagctaagccgccgcgctgacgccggacacggctcatcgccctcccttctcgatgtgtagtgtagcaagagacgtttttttgtgccatatagttttctgtttatacacgataaggctggtctcaacttcgtttcatggatttgtatctatcgtcgcaccacatcagttattcatccttctcgctagctacatcagtttttttctataaacttttagacttttagttaatatatgaaacatgccgttctatggaaaaaaatacatatgactacataattaaacaaataaaattacataatttataataataattacataacttaaacataaaataaaaa

SEQ ID NO: 135385 - DNA, 291 bp, Zea Mays
atgaatgattgcattgttcttttgtatgaggctgcatatggcgaggcgatgtctagtcagcacggaccagactatgactggaggacctcacctattgatcctcaggctatgtatgcaagtggtggaaaagctcatggaaggtacacaatgtttgctaatgtcatcgactcgagccaggtgacagttcagcgtggaggttcatcgaggtctactgctcgtagctctcgtcgctccactcaagatccagctgaagtggagcaactgcgagaagaacttattagtactggatga

SEQ ID NO: 135386 - DNA, 1879 bp, Zea Mays
ggaagtccacaactgcggtagttgcgcaaggagtggagtgacagagctcgctctgtgagcagagagcgaggtgggaggagcaatggagacgatggtagcggctcccgcgccgcagcagaggacagggcgcatcgctcggaggctggccaggctgctccgccacaagagctccccggcgggggcggggatggcgtactccgtcgccggggacgagttggacgactcgctcgacagctccatcaactcgctcagcaagctcaagctatccggcagcctgtcagctgcgtacacgctggacgtcttcttcaagaatgccacggagaagaacggggcgccgccgccgcagacacagccggcgccgtcgccggcgccagcgcagcacgccgcgaagcacgcgttcgtggcgaccctattcgcgagggcgtccgcggtgaaggcggcgtacgcgcagctgcagctggcgcagcacccctacgacgccgaggccatccaggccgcggacgccggcctggtggcggagctcaccaagctgtcaaatctcaagcggcggtactcgagggacccggccgccgcggcacggagcgccggcgccctcgcggcgcacgccgacgagcagcgccacctgctccggacctacgagatcacgtcgcgcaagctggaggccgagctccgtgcgcgggacgccgaggccgagcgcgcacgcgccgcgctggccgacgagctccgcgccgagcggggcctagaggagcgcgcccgcccgggccgcaccctggcggccctcgacggcctccacctctccggcctcaacgccacccacttccacaccgcgctgcgccacgccgtcaagtccgtccgcgccttcgcctcggcaatgctcgccgcgatgcggcgagccggctgggatcccgcggcggctgcggccgccgtgcacccggccgccaggctgctgaaccctgcaggcgacgccaggttcgcgctggagtcctacgtggcgctgaagatgttcgcgggcttccaccgcaaggacctcggcctcagctccctgtccctccacgggcggggctccggctccggctcccacgaccggcgccgcttcttcgaggagttcgcggaggcgaatgccgcgggtgcagcggagttccaggtccagcgcgcgagcgacgacgcgcggtggggagcggcgctccgcgagttcctgcgggagaggtacgtgtccgtggtgcacgagcggatggaggcggccttcttcgggcgcgggggcggggacgcccccccgcgcgccgcgtggtacggcgagttcgcggagatggcgcggcgcgtgtggctgctgcactgcctgttctgggcgttcggcggcacggcgtccgtcttccaggcgcgccccggggaacggttctcggaggtgttcatggagagcgttagcgacggcacggacggcggcgggccgacgccggcgccagcaccgagcgggcacgtcgccgtcgtcgggttcaccgtggtgccggggttcaagctgggccggacggtgatacggtgccgggtatacctttcccacccggagcaccggccatgaggaccgtgtcagcgtcagcgatgggcggccttgtcgcaacgcacacggggggaggcggcacggcacggcacgtctggcagcggcgaggtcgatcccctaccggcgggacggagcggggcagggcgtggcgtggggtttaagggtggcaggcggcaaggcaatggtcgctatgcagtttggtatgtatgtatggatggatccaagtatgtatgtttctacctaccagtacgaatgtattaaagcatccgatttgggaactaaaaatctttgcaaattcggtaacgacaagacaggcgtggtcgccgt

SEQ ID NO: 135387 - DNA, 709 bp, Zea Mays
atcatgccatcttcaaagaatggcatcatgttaacaaaaatgaatgagaaatcagtcatttctaatggaaaggctttcttgaaaaggtcacaagctcacacttgtttggctctatagcacttcttgcgaaaagtgggaatctttctctaactgaattaatgttagaatggagccgaacaagtttatgtttttatgcgacttcaagagttgacaaaggtttaagttctgagctccagaatcagaattggagagttctttctgtagctaatgaatgtagcatagaggttcctgtgttttaaatgttcaaaggcttcagcagttgcttctcaccttggctactctaataaaaaagggaactatgtgactcatctgttctggtgattggatatataatgaaaaatattctgtgaggaagacttcgcaaggagatgtggttctgtcacttatgtgactgttgccgtgtatggagacgaggacaagccagcgcttataatgtttacagagatgtggttctgtgactgttgtcgtgtactcaggctttatttcaacaggatttaaatatgagatgtagagtgattgatgtacatcacttcactaatcatgaaatctgtagaaggcgaaactactagccatatatgatatgcataatctgtgtggtaaacattatcaatatcacacaaattatttttaatgggttttgcattatcat

SEQ ID NO: 135388 - DNA, 1246 bp, Zea Mays
tgggcctgtagtggccgtgcgggcggctcggcccataacgaaggcgttagggtttcccctcgcagttgccgtgcggccgtgcctcatatacacaatctttcgcgctcctaccggctaccgccgcggcttccttctctacccttccctcgcgccgccgccaccgcaagagtatctcaactccgcctcgagacctccccccctcgctggtctcagccatggtgagatctctctcgtccttgctctagcgcttgttgcatcttcgctgcgctgcagccatggatttggcctcgcccttacgaacccctgacgtgcggcggctcttgttttgtggttccaggtgaaatattcgacggagccgtccaaccccaccaagtccgctaaggccatgggccgtgacctacgtgttcacttcaagaacacacgtgagacagcttttgcccttaggaagttgtcactcaccaaggccaaaagttaccttgaggatgtgatcgcccacaagcaggccatcccgttccgcaggtattgtggtggtgttgggcgcactgctcaggctaagtctcgccactcaaatggtcagggacgctggcctgtcaagtctgctaaattcattctagaccttctcaagaatgcagagagcaatgctgaggtgaaaggacttgatgtggataccctctatgtgtcgcacattcaagttaatcaggctcagaagcagcgacgcaggacataccgtgctcatggacgcatcaacccttacatgtcctccccatgccacatagagctcatcttgtcggagaaggaagaaccagtgaagaaagaggccgagtctcagatcgcaaccaggaaggcttagagaaggggctctatcttctgtgattggcttagtacaagttttggctgattatttgttgtctcatactgtttacctgagtattgtttgcaagtgctttatcactgtccgaactgtgcatgcaattcactggtctagagtattgttcgtggattgtttcatatttgtgcgtatggctcatgtctgttgctttgctttaatctgtaccgaacattaagtgtagcattaacaatctgaagcgaacatcaagagtagggctgtccttagcatatggtttgtggttgttgcatccttataactatctccgaacccatccttgcatcccatctatttctaaccccattgtgaacagtgtaaaaagtaaagttttttgagtgactgtaacctactggtcgccct

SEQ ID NO: 135389 - DNA, 1127 bp, Zea Mays
tgggcctgtagtggccgtgcgggcggctcggcccataacgaaggcgttagggtttcccctcgcagttgccgtgcggccgtgcctcatatacacaatctttcgcgctcctaccggctaccgccgcggcttccttctctacccttccctcgcgccgccgccaccgcaagagtatctcaactccgcctcgagacctccccccctcgctggtctcagccatggtgaaatattcgacggagccgtccaaccccaccaagtccgctaaggccatgggccgtgacctacgtgttcacttcaagaacacacgtgagacagcttttgcccttaggaagttgtcactcaccaaggccaaaagttaccttgaggatgtgatcgcccacaagcaggccatcccgttccgcaggtattgtggtggtgttgggcgcactgctcaggctaagtctcgccactcaaatggtcagggacgctggcctgtcaagtctgctaaattcattctagaccttctcaagaatgcagagagcaatgctgaggtgaaaggacttgatgtggataccctctatgtgtcgcacattcaagttaatcaggctcagaagcagcgacgcaggacataccgtgctcatggacgcatcaacccttacatgtcctccccatgccacatagagctcatcttgtcggagaaggaagaaccagtgaagaaagaggccgagtctcagatcgcaaccaggaaggcttagagaaggggctctatcttctgtgattggcttagtacaagttttggctgattatttgttgtctcatactgtttacctgagtattgtttgcaagtgctttatcactgtccgaactgtgcatgcaattcactggtctagagtattgttcgtggattgtttcatatttgtgcgtatggctcatgtctgttgctttgctttaatctgtaccgaacattaagtgtagcattaacaatctgaagcgaacatcaagagtagggctgtccttagcatatggtttgtggttgttgcatccttataactatctccgaacccatccttgcatcccatctatttctaaccccattgtgaacagtgtaaaaagtaaagttttttgagtgactgtaacctactggtcgccct

SEQ ID NO: 135390 - DNA, 1000 bp, Zea Mays
tgggcctgtagtggccgtgcgggcggctcggcccataacgaaggcgttagggtttcccctcgcagttgccgtgcggccgtgcctcatatacacaatctttcgcgctcctaccggctaccgccgcggcttccttctctacccttccctcgcgccgccgccaccgcaagagtatctcaactccgcctcgagacctccccccctcgctggtctcagccatggtgaaatattcgacggagccgtccaaccccaccaagtccgctaaggccatgggccgtgacctacgtgttcacttcaagaacacacgtgagacagcttttgcccttaggaagttgtcactcaccaaggccaaaagttaccttgaggatgtgatcgcccacaagcaggccatcccgttccgcaggtgaaaggacttgatgtggataccctctatgtgtcgcacattcaagttaatcaggctcagaagcagcgacgcaggacataccgtgctcatggacgcatcaacccttacatgtcctccccatgccacatagagctcatcttgtcggagaaggaagaaccagtgaagaaagaggccgagtctcagatcgcaaccaggaaggcttagagaaggggctctatcttctgtgattggcttagtacaagttttggctgattatttgttgtctcatactgtttacctgagtattgtttgcaagtgctttatcactgtccgaactgtgcatgcaattcactggtctagagtattgttcgtggattgtttcatatttgtgcgtatggctcatgtctgttgctttgctttaatctgtaccgaacattaagtgtagcattaacaatctgaagcgaacatcaagagtagggctgtccttagcatatggtttgtggttgttgcatccttataactatctccgaacccatccttgcatcccatctatttctaaccccattgtgaacagtgtaaaaagtaaagttttttgagtgactgtaacctactggtcgccct

SEQ ID NO: 135391 - DNA, 964 bp, Zea Mays
atatgatgtggatatattttttgtgtatgttaatgcacctatcatgcttgcagaacacacgtgagacagcttttgcccttaggaagttgtcactcaccaaggccaaaagttaccttgaggatgtgatcgcccacaagcaggccatcccgttccgcaggtattgtggtggtgttgggcgcactgctcaggctaagtctcgccactcaaatggtcagggacgctggcctgtcaagtctgctaaattcattctagaccttctcaagaatgcagagagcaatgctgaggtctacaattctactttgcgctgtcagagctatctttgcatctataatgtatgctaattatgtcaatttctctgctgcaggtgaaaggacttgatgtggataccctctatgtgtcgcacattcaagttaatcaggctcagaagcagcgacgcaggacataccgtgctcatggacgcatcaacccttacatgtcctccccatgccacatagagctcatcttgtcggagaaggaagaaccagtgaagaaagaggccgagtctcagatcgcaaccaggaaggcttagagaaggggctctatcttctgtgattggcttagtacaagttttggctgattatttgttgtctcatactgtttacctgagtattgtttgcaagtgctttatcactgtccgaactgtgcatgcaattcactggtctagagtattgttcgtggattgtttcatatttgtgcgtatggctcatgtctgttgctttgctttaatctgtaccgaacattaagtgtagcattaacaatctgaagcgaacatcaagagtagggctgtccttagcatatggtttgtggttgttgcatccttataactatctccgaacccatccttgcatcccatctatttctaaccccattgtgaacagtgtaaaaagtaaagttttttgagtgactgtaacctactggtcgccct

SEQ ID NO: 135392 - DNA, 1289 bp, Zea Mays
aatcaggataaatatactatccttttgcgagacacatggacacgcggtgcgcgtcgtcgtctagctggagctggcagaccccataaatagtgctttagaccaagctgcgccctcgtgctcgtcgtcgtcatcttcttcctcctcctcctccaagcagcacggagcgattagctgctgctgctgccgctgcagcgggcagagatggcaggagcagaggttgccaacggcgtgcacgacggcgccctggatttggaggaaggcagaggaggcggagtcgatggagcggggtgtgagagctcggagcaggacggagccggtcgccgccccatgttctccgtgccgttcgtgcagaagatcctggcggaggcgttggggacctacttcctgatcttcgccgggtgcgcggcggtggcggtgaacctgcggacgggcggcacggtgacgttcccgggcatctgcgccgtgtggggcctggccgtgatggtgatggtgtactccgtgggccacatctccggcgcgcacctcaacccggccgtctccctcgccttcgccacctgcggccgcttcccctggaggcaggtgccggcgtacgcggcggcgcaggtcacgggggccacggcggccagcctgacgctgcgcctcctgttcgggagcgcgcgggagcacttcttcggcacggtgcccgccggctcggacgcgcagtcgctcgtcgtcgagttcatcatctccttcaacctcatgttcgtcgtctccggcgtcgccacggacaacagagccatcggcgaactcgccggcctcgccgttggagccaccgtcctgctaaacgtgctctttgccgggcctatatcaggagcgtccatgaacccggcgaggaccctgggcccggcgctcgtcgtgggccgctacgccggcatctgggtgtacttcgcggggcccatctgcgggacggtggccggcgcatgggcctacaatctcatacgcttcaccgacaagcccctgcgagagatcacccagacctcctccttcttgcggagtgtcaggaggagctcgagctgaactactatatatatatatatatacctcgtagctgcctgccacccaaacgactctcacgatctaaagatagcagttagcagtgttgtttctttaattttgtagccaaacaactcctctttttaatttttactgtcatttgtttacatgctgtatatgcttgccttgtgttagtttaatcgccgccgcaagattaggccgcttaactgaaaattttgatttaatcttgtatattg

SEQ ID NO: 135393 - DNA, 1123 bp, Zea Mays
tgttaaccggcgtccaggtcggccaggagctcgagcctgacgacctctccctggagcagcgagaggcgtcgtctcccccgccggcgaagagcgagccgaccccgccgctctacagcgagagcgacttcggctgggcggccggcgccggcgctaccgggagcctcacggactggtcggccgtgcaggaggagttcggctcccctgccccccgcctcgcggaggcggcgcccagggccacgccgaagcggactccgcgggcgccggctttcggtgccgggcagggccgcatcgccggcggggtcatggattggccgctgggcgagttcttccgcggcgttagcgacttcaacggcggcttcagcttcggcgagagcggcaactccaaggccgacagcgggaagctcggggacagcgcgggtggctccccgtactaccgctcgtcggaggaggagcgggacgccaacgagctgttcggccaggtgccggagatccagtggtcggtgccggcgctgccctccccgccgaccgcgtccggcctccactggcaacacggcggccccgacagcggcgccttcgtgccggacatctgcaccccggacggcgccggccgctgcttcccgaccgccagtggcgccgcgaagcgccagaggaaccgctagctccgcgaggacaaaggaggttcatactaccggtcgctatgttccagatcgttcttgcagctaagctaagcaacaggagatcacagtgaatgctcctactagtgaggagtacgtcgcaccgcgtcgtcgatcacatccctgatccaaggtgaaggccttgagctcgtgcgcctgtttaacggatgcatcagatctggacgatgctagaaacaacttgtgctagtgctacctagcctttgacttccaatgacgctttgaaagattgaaactgatgcgctaaccgatagcttagacattggacagtagtatgatgctgatgcttcgttttcttgtccgttcaatcaatgtaacaaagagaagttggggatgctgctctgcttccagattaccatggtgatatgctaactaatcagtttgcctcactcgctgagtggtccacgttcttctctttttttaaaaaaaaa

SEQ ID NO: 135394 - DNA, 318 bp, Zea Mays
atggtggctgacacctgggacacgcactcgtgcgaggacgtggtggagtggaccgtgttgctagtgtggttgaggactggtggaacacacgtctggtcgtggaggacccacacgcggtgcggtactcacgatgggtttggtggtttgggcctcaaacctccagcgctacggatgatagtttttgctgagtttgtgcctcaaaacatggtggtggtggttctagagagaaccggtggcggcatgtggcgtgatcggggagggtgcgttaagacgaagcaactccgtgtgaaggacatggtcattggatcaaaaacctag

SEQ ID NO: 135395 - DNA, 748 bp, Zea Mays
gccagcaaatcgcaatgatttagttcatgttcttgcaaatatcaacacgcaaggttaatgctgtcactcatagaaacacagcaacgacaagttctttgttttctattgaaggaaaaatgctacaattttcatatgagaagggcgatgctactagtttaattcagtaactccatagtccatacctactgggcaccctcctccgggtgttgccctccagcgccggcatttggggtagcggcaccgccactgccgccggtcccttgagcagaggcgccgtgctggagctcgatgacgagccatcggacggccttgctcatctgctcgaggcggacggcgctgatgggcttgatgccgggggcggcaacggatccggcggaggcggaccccgtggcctcgtcgacgaggcactcggagccgatgcgctggcggatggactcgacgagctcttcggcgtggtcgcaggcgacgcggaagatctcccagcgctgcttgaaggcctcgagcgcggcgtccgtggccgccgtcttcttctcgccgcccgactgtacgcgggcctccaccacagccgccgccgccgccatgaagtcgtcgtacgccgcgctcaggtggtccacagtcgcctccatccctccctcacccccagcttctgacgatccaattcggcctcagcccccaattcgacacgacgaccccgaaaccgaaagcaaagcgtgaaaacaggaaatgccgaaatggcccaatcgatatc

SEQ ID NO: 135396 - DNA, 621 bp, Zea Mays
ggtagccaacactacgactagggtcttgtaggatcagaaacgatgtgttgactgatcgacatgatgttacctgaatggtgacctctgcaatcgtaccagctgcgctggagttgtcactggttgccttcttgtacctctcaatggtgcccttcacgctgtacatacaatataatactaggcggccgcggctggagaagacgatgagcgcgacctcggcgtcgcagagcacggagagctcgtacgccttcttgaggaggccgttgcggcgcttgcagaaggtgacctgcctgttggtcgtgttctcgatgcgcttgatctcagtcttgcccttgcccctgccgccgttgttcctctccgcagcggacccagcgaccgacgcggagccgccaccaggggatatgggctccttcagcttctgctgccccgccgaagtcagggtcgactgcacacaagagaaccacgctcaagaattgctaggagacgacaacgacacagagaggtggatctgctccaaattaaagaagccaatgggaagaacaagaaatcaccatgatgcctgttactgtggatggtgtagcctcctcttctcggatgtgcatgctcttgttcctatcagctagc

SEQ ID NO: 135397 - DNA, 803 bp, Zea Mays
attcagtccggccacgcactcaagcaatcatcgttctttcgaaacgcaacagcaagaagaacaaccacgcacatcgccgttccatcgattcatgggtcgcctcggcaccgcgacgacgctggtggccctcgcggcctgcctcctctactgctctgcttcgtcggcgacgctggcctacgccggcgctgcgccgacggaccttggggcgctgcggccgacgtgcgacgggacgcttgggcagtgcgcggtggggagcgacgaggagcaggaggtgggcggcagcgacgcgttcctgcggcgggcgctggcgcagcggcagcccaccaaccggtacatcagctacgcggcgctgcgcgcggatcaggtgccgtgcaaccagcgcggccgctcttactacagcaactgcgcgtcgcagaagcccgccaacccctaccgccgcggatgctccgccatcacccgatgcgcacgcaacaccaactgacccatccgatttatcattcctagctaaattctcatccatgacggttgacggcgtgaccgtatgatttgaggattatatataaatatattgggcgcatccaagagatccagccatggcagatgtggatccatccattgacgtgcaggtccatccagaggtagaggaggaagacagggaacacatgtccaagtgttgtttggattgacatggatgtttccacttttttgtgttaatttatctttttgtgatgaatgatcgacgtctacgtatgtaccataagtactagtagttccattattgttttgattttttatggcttttg

SEQ ID NO: 135398 - DNA, 270 bp, Zea Mays
caactagcccaacaagcgggcgtcccgatgcccacatatgggatgtcgcctccggactttgcactgccgatgccaatgctggcgcctccacctccttctccgtcacaattccctacgggatttcagacaccacccacttcagttgcagcaccagaagatgggtctggtcaagacgacgcatcacattcttgggtgaataaccttttcagcacgcatagtctagcaggaggaggtggctactcgaaccatccaagcgatggatatgagtga

SEQ ID NO: 135399 - DNA, 1330 bp, Zea Mays
gtaacccttccttccaaattaagttgtgtttttgtgggaccgatccttgccacctttccctccgttaaatacctctcccgctcctcccaaaccatcccatcccttccctggctaagatcatgcatcaccaaagaacaactggcagctcctcccagtgatctcttcctgcctgccagattgcattgatctctccaactgtgcaggcacatcgttgatccttgcaagctagtgttttgccacacagacttgcgctagcttccagcagcttgctagccatggatctcgcgacgaccccggcgcggcgggccatggagcctggcgtggcgcgtcgtgtgtggcacgtggtgctggccgtgtgccacatgctgcggcggggcctctccccgaagcgcatcatgatggacgtccacctcctcctcggccgtggcaagctggccgggaggacgctgcgcggccacctcgcgcacccgtcgagccaccaccgccacggccacggccacggccacctcaccacctacggcggcggcgcgtcccgcgcgtcgtcgtcgtcgtcgtcatccacgctggcctcgttctacggccacccgcgggaggtggagttcagctgcaccaccacgccgtcctacccgcagcagcactacgggctgttccccttcaagggcctccgcggccggggcggggcgcgatgcggcggcgagtacggcgggctcgacgcggccgccgtggcgcgcgcgttcgagatgctgagcgccgaggtggacaccgggggcggcggcacgcccgccgtcgcggcgacgaccgccaccccgtcgcccatgctggcctggatcctgggccgcagccccgccggggtccgcccgctgcgcgtcaccgactcgccgttcccggccgtgcccgaggacgggtgctgcaacgaccgcgtggacgccgacgccgacgacttcatccgcaagttctacgagcagctcaggctgcagcctaccgccgccacgccggacgcctacctgcgccgccgcggttagctagtttgcttggggataatctgtgacgtgcgcgtgtcgtttcgcgcctcgtcttattggccgtgctggcatgcatgcatgcatttggtcgatcgcgacgcgtgaatccattgtttaccaccaggatatatccacagctgcgtcctatttcgactgttggtttatacaagttccttcggtggtcatcaaaatccattccgggccgggcaatttagttcttttttttttgtagagtttgaatggcaatggaggagccggtagttcatcaacttgtttagatatctgcagcagtttttagttctcaataa

SEQ ID NO: 135400 - DNA, 93 bp, Zea Mays
gggacacaaggatccattattccagcatagcctttgtcttgatcctcacctgcgtctgcgtgcctcgttgccaccgcatataccttctattct

SEQ ID NO: 135401 - DNA, 3260 bp, Zea Mays
gtctgcggcaggaaccgaagaaggagatctccgtccagaatcttccagccgctctcgtttcctctgcttttgctttccattttgttctctctcatctcctccccgtcgccgaccagaacacagcctcctcctcctctccgtctcagactcgtcttcgagctctaggccttgccgcctcgagtccggctcctgcagggagcacccgccaccaccgccgcagaagcgaaagcggcgttcgcctcaaggaggagacttccgccgctggattagagaccgggaaagggaggggttccctccgcgccgggatggacgacggcgatagtgtggtccggagcgtcgagaaggctggcgccggcccgggcgacgacggcagcacgacaccgctcccggagacggttcaaattggcaattcacccagttacagaattgacagaaagcttggaaagggagggtttgggcaagtatatgttggtcgtcgcatttcctctcctagtgttagtgacaggacgcccggtgcgaatgctttagaggttgcaatcaaatttgaacatcgaaccagcaaaggttgcaactatggtgctccttatgagtggcaagtttacaacactcttagcggaattcatggcgtaccaagagtacactacaaagggaagctgggagagtattatatcatgattatggacatgttggggccaagcctatgggatgtttggaataataactctcactctatgcctgttgaaatggtggcttgcattgctatagaagcaatttccatactggagaagatgcactcaaaagggtacgtccatggagatgtgaagcctgaaaattttttgcttggacctccaggcaccctacaagagaagaaactttttctcgttgaccttggtttagctaccagatggaaagacactggtacaggagagcatgttgaatatgatcagaggcctgatgtcttcagaggaactgttcggtatgctagcgtgcatgctcatttggggagaactggaagcaggagggatgaccttgaatctcttgcctacacacttgtatttcttctgcgtggtcgccttccttggcaaggataccagggggagaataaaggtttccttgtctgcaagaaaaagatggcaacttctccagaatctttgtgttgcttttgcccacaacctttccgacaatttattgagtatgttgtgaacttaaagtttgatgaagaaccaaactatgcaaagtacatttctctttttgatggcattgttggtccaaacccagacataaggccaatcaatacagatggtgctcaaaagcttgtatttcaggtaggccagaagagaggtcgccttacgatggaggaagatgatgatgagcagcccaaaaagaagattcggatgggaatgcctgcgacccaatggattagtgtttacaatgcaaggcggcctatgaaacagaggtatcactacaatgttgcagactgtaggttagctcagcacatttcaaagggaaatgaagatggtttgtttataagctccgttgcctcttgttcaaatctgtgggctttgataatggatgctggcaccggatttacttctcaagtgtatgaactgtctccatattttcttcacaaggaatggataatggaacaatgggagaagaacttctatatcactgcgctagcaggggcaaacaatggtagttcactggtggtcatgtcgagaggaacacaatatgcccagcaatcttacaaagtaagcgactcattccctttcaagtggataaacaaaaaatggaaggagggtttttatgttactgctatggccacagcaggcagtcgttgggcagtggtcatgtcccggaattctggcttttcggcgcaggttgtggagcttgacttcttgtatccaagtgagggtatccatcgacgatgggataatggatttcgcatcacggctactgcagctacatgggatcaggcagcgtttatcttgagcatccccaaaaggaaacctgctgatgaaacacaggagactctaagaacgtctgctttccccagccagcatgtgaaggacaaatgggggaaaaatctctacttagcttccatttgctatggaagaacggtgtcatgaggtctgcccagtttggctggggcacactgtagagtttatttatatggactactgaattattagatttggaattttgaacgactataataatagttctaattttccctataattaaccaatctgatagatgcagaagcctgtctctgttcagttgatagttgcgctagctgcttagcatggctgtaaaaagaatcttgtggtgtttgggtgtagtacttgtttgttcatagattgttaaagttgttgtgttgtaatttgtaaacttgattatgtatcatgcatatagttttatactgatatttaaccctggaggcaggcatctaagttgtatctgcatcttgttctgttgctatttaggctttacaatggggatcttgtgccacatgtctcgggctctgtttgtttgttagacccatccttgcattggataatttggttatctgtgttaaataaatctatcatgtgattgttttcatttcacatgtggataactctagtgtgatttagttattgcttttcagcagttaagaattgtatattgtcagtattagcgttgctctttactcgttttcactgtgtatttgggcttctattccatttcaaattctgtctgaaggtcccgagtgaggattctattttatgttagatcacctgatctctacccacattgccagtaaattttttttgggtctattgcttcaagaggaaagagtggtgatgtcctaaagaattcatggttcggttggtttgatgtccatacttgttaatctgaacaagaatgatgccgtagcttcaattgctactatgctgtgcaagtttatttctgttggcgtgaattgctatgtgagtttcaaagggaggatgcactaactactattgctactctgctctaactcaagacttttgagctagtgtggaggataattctgttcccaaactgaatactctattgtaataccgtgtgagttgatgcagttgcatccatgatcaatattggttttctagatactccctctatcccaaaaactatagagtgatcatggaagacaagaagactatgtcagacgatgaacttttctcttgcacgtttgtttttcattgcaacctgatattataatacatcacgaccat

SEQ ID NO: 135402 - DNA, 630 bp, Zea Mays
atgtccatggcgcggccgacgcggcgctgcatgtccagggtgacctgcgccttgagctgcggcgacttgaagaaggcgcccgcgaggccgtgcacccggcgctggaggccgccgccgagcactaggatggacgattgccccatcagctccatgagcgatcgcgggtaccatggaacgaacgccgacgcgtcggcctgcagcaccgcgcggctcacctccgggtccgagctcaccaccgccggcgacccccacagacgcggcgtttctcgacgaaggactccgggcgaggcgagtacgcggcccggatgaacgccagcgtctcgccgaggagcggccacccgagcgagccggcagggagccgtgctcctccggcagcaccagcacctacctgccgccgccccttgataattcctgaagaacaggcacgggggacgaagagccgcacgatgacggcggcgaggagcagcgccgccgtggcagagccgacgacggacgctggccaagaacaaccaccacctctgatgggacacatcgcgcgcgttccggatggtgggtgggctcgtggtttctgatcgccgatctcgccggacgctgtgtgttgcaacttgcaacaccagggaaaagggtgag

SEQ ID NO: 135403 - DNA, 801 bp, Zea Mays
gtttctttcaatattgtctggttccaaacaaggcttgggtgttctcatttctcaccccttgcgttctacctcttgcattctcttctgttcactccgcgtgctctctctctctcacggcctcaccctccctatatcccactcgacggcgactgggcgacaaccgatgtctccctaaacctggtgcccaggtatctctgccggcgacgagcacctgctaggggtatgggaatggaggtcgttggtgctgaaacagcaccagcagaggtcaaagtatatgatgatgtgaatctatcccaatagaaggaaagtaaagcaactgcaaaagaacgtgaggaggcagctgttttcggttcagagataactaccaatgtcaccgatctggcacctccaaaggatgtgaaggatgggtggcctgaatctaagcagacttatgccttctatttcatcaaggtccgttcatttgaggatcttaaactgagggcaaaactcgagcagtctaacaaagaattccaaaagaagatccaagctcgttctaaacttatcgagacagtaatagccaatgaggtatttttcttacaggtcctcattgaagtaatcttcctaactgatgcaccacttttcatcaacgttgaatgctttgtaactcatttgtgtacatatgaacccgttgttgaagccttcccaaaactgtgtctatctatgagaggttgcatcacttttagtcataagactttttgtgtacatatgaacctactgttaaagtcttcccagaactgtattgtttatgcaatatttacaaac

SEQ ID NO: 135404 - DNA, 986 bp, Zea Mays
attttggatatctttccctgtccagctactccacgccacgtcaacctcaccccaccacccacctcgtcacatcgcgtagcatccggaattccggaccacttcgacgacttcgccggcgccgagcacaatccacgaccgccccccagccagccatgtccaagtacggtaccatcccgacaacctcgtctactccggcgcccgagggctcctcccagctcgacttcatctcccgcgccaaggcccgcggcgcgtccgcgctcgccacgcgccgtccctggcgcgagctcgcggacccgcgcgcgctctccgtcccgcgcggcttctcagacgcctaccgccgggcgcgcgccaacctcgcgcacttcgccgccaactacgcgctcgtcgtcctgctcgttgtctttgtctccctgctctggcggccggtctccatgctcgtcttcctcgcctgcttcgccgcctggctcgtgctctacttcctccgcgaccgcgacgtggacgggacgctcgtgatttgcgggcggggcgtcggggacggcgtggtcgtcgcggtcacgctcgtcctgctgctgctcaccggcgccacgggcttcatcctcacctcgctgctcgtcgggcttctgcttgtcctgctccacgcactgctgcaccgccccgccgacagcatcgacgacgaggccgggagatggtacacgccagtgccgccgtccaactactagctagtctgagcctctgaggtgctgctcctcctcctattgcttcttggttactggattgcagatcgatgttcttcagttcttgatccgttcgtgctcttgtccatagaaaatgtgcttaaatttgtgttcttcgttatctcggaagatttattactgaaattatgcttttgaagtgatcaatcatttattattgaaattatgcttttcaagtgatcaataaaatttgttctcacaccaaatggaaatctgaaatcagttggtgctcgg

SEQ ID NO: 135405 - DNA, 1331 bp, Zea Mays
atccaatccactggcccattcaccagtgacagtcttcaggactttctcgtgtagcatcatttccgctacccaaatctctccatccacggcgacgcccgacgccatccgtcagccagccccatctccaccacccctccccgtccccgacgtagcagcagagcggagaggcggccaagccaattcctcaccggtagcttctccgcgctcccgggctccgcctcgccgcactcggatgccccctgcgctggcgcctagagcggcggcggtctagcgggcgccgggagcggtgaaatccacccatggccgacgctctcctccttccgtgccgcttcctcgcgccgttgtcagtcacatccggcgcctcttcatcagcctcttcgtccccgccgtgtcgttgggtgctctcgtcgcccggctcgccgtggcggccgcgcttggctgccgggcaacggcaaccccgacctcgccggttcactcggcacaagatttgtgcagcagagcgtggtgagcaaccgaaatggtgggagaaaaatgctgggccaaacatgattgacatccactccacagtggagttcttggatgcactaagagatgctggagacaggcttgttattgttgagttctacggaacctggtgtggttcatgcagggctctctttccaaggctctgccggacagctttggagacccctgatgtattgtttctaaaagtgaattttgatgaaaacaaacccatgtgcaaacgactgaatgtcaaagtccttcctttcttccatttttaccgtggagctgatgggctactggaggctttctcctgttccttagctaagtttcagaagctgaaggatgccgttgcaatgcacaacacggctcgttgcagcattggtccacctgttggagttggcgatgttgacttgctggatagcacgagccctcaagagaaacctgcagaagctagcccacattagattaatgagaaggagctcctccccatccacgtctacatcctgctcattgttttcttcactatagaccttaatgtaatcagttcaggagaactaaagtaccctcaattcatgaatcagatgtatggattatcgtacgcattcttgaaagggaaaaaagtgtataatagtgataactatacgttttttggacagaagaaccatgtacttgtacatcattttaggtgaagacgtcatgagcatttaagcgcccttgtgggccgttttatcagtcagtccgttttttttcgcacgttcactgtcattctgacagactgtactttgttgtatttgttcaattgcgaagtttaagtgaaaaaatagaaa

SEQ ID NO: 135406 - DNA, 1683 bp, Zea Mays
gtcattaattaattatttaattgaaggaatggggacaacgccaatgggccaattagcaaagcgtagcaaatcatttggtgaggtcgagctatcgatccatcgcgcgcgtaaaggtgggtgacgcgtcgctctccttctcctcccctgcttggctgcttgccctattagatctctccatgtccatttaagagagagagccagacaggtccatccacaggaccaccagagagccacagcaccagcggcagccacccaaagcccaggaggccaggaccgcctcaccgccaatggccgaccgcgtgtaccccgccgccaagccgaacccgcctccaggcgcggcgggcaacagcaacggcgcgcaggcgtcgtcgttccctgcgcccaagtcgcagatgtaccagcggcccatctaccgtcctcaggcccccgcgaagcggcagcgcgggcggtcgtgccggtgcagcttgtgctgctgcttctgctgggcgctggtggtggtgatcctgctggcgttcgtggccgcggtgtgcggcggcgtcttctacctgctgtaccggccgcagcggccgtcgttcagcgtgtcgtcggtgcggctggcgtcgctgaacctgacgtcgtcggcgacggcgcccgtgctgagcgacgccatcacgctgaccgtgacggcccggaacccgaacaagaagatggtgtacctgtacgacgacctgaccctgctggtggccacggccgccaacgccgtgccgctggggagcgccacggtgcccgggttcgcgcacgcggccggcaacaccaccgtgctgaccgccaccgtctccgccagcgcggtgggcgtggaccccagcggcgccagctccgacatcaagcggtccggcggcgggtcgttctccgtggtggtggacgcggacaccagcgccggcgtccgggtgggcgggctcaagacgaagaagatcggcatccaggtgcactgcgagggcatcaagctgacggcaccgcctccgcctccgccggcgcccaagagggccaaggggaagaacagcaccgccgcgctcgcgcctgctctggcgccgtccgccgccgacgcgacgccggcgaagacggccacggtgagcacggcggcgcactcgtgcaaggttagggtccgcgtcaagatctggaagtggactttctaggtacgggcagcgggaggagaggagacacctttaggggctgcagcgcgcaaaaaaaaaagattttcgctttcattgctatttatttatctatatatataaatatatatacggcgataagtttgttatcaccatgattactatatatcggagcgggcaggagtatatgtattgtaggaccaagacatgcgtgcgtcggtgtaaattcattcgcccaggcattttcttttcctttttgcttcaaccatttttcacccctgtgattgatcagtggaacggatgatgtataattacgtgtgattgtagactgtgattcgattttatttgagcctgagagagaaggctgggccgctgaaccacagctggtggtgagagggacacgttgagtggcggcaattgtaaaactcatcacgagtgtcggcaccttgtcagaaaaagaagaaaagaaatagtgtcggtaggggtgtaatcggatcgaatacggacggatatcaatgaaatcatatttgttttc

SEQ ID NO: 135407 - DNA, 351 bp, Zea Mays
atgagcccgtccagcccgcccacgggcgcgccgcccacgaacagcgccggcacggcggcggcggcggcggccgacgccgtcgcgtgcgcgcccacggccgccagcagctgccgcatcacgtggcacatgcagcacccgcgccaggcgaagatcaccacggggctctcgcggaccaaccgccccacgcgctccgcgggggcctccccgtcgccagccgggtcgatggtcaggcccagccgcccgccgacgcagctcacacctccctgcatgtccagacgacgacggatgggatgggcacaaggctccttggttgggacttgggagactgggatttcagggggggggctatga

SEQ ID NO: 135408 - DNA, 2155 bp, Zea Mays
atgaccgaagagtctagcgtttcttggggaacggggaacgtctcgcaggctgctgctgctgcggctgccgttttctacatctctggggagaattgctgggccattcagcgtgtgggtcccgtcctagatttcgttatatatatgagagagcagtggcagctcgtcaggtcgcagtaacatcagcagagcgagagccaaatcgcaactccagcctcttcggaagcattctctccccaagatttcagagcagagaaggttgcgccgttcccacaccgagaccaccaggacgagtcttcaatttatgggattgtaccgcaacgaatgggctgaagctctgggcatagagatctccagcccgagggccaaggacggcaccatggtagtgaacaggaggaccggcttttccaacggcaagctgatgccgtcgctgagcttcaagctgtgggaggcagaggcggtagtcgcttccatggaccacgacggcagggccagcgagtgcctgcgggattccgttccggagttggtgttcatggcgtctccgactacgaccaccccgagcccgcgggtgtcgtccagccccaaatgcgagctggacgccgcggcggtgaagctccagaaggtgtacaagagctaccgcacgcggcggaacctcgccgactgcgccgtggtcatcgaggagctgtggtggaaggcgctggacttcgcgtccctcaagcacagctccgtctccttcttcaacggcggcaagcccgagacggcggcgtcgcgctgggcccgcgccaggactagggtggccaagcttggcaaggggctgtccaagaacggcaaggcgcagaagctggcgcggcagcactggctcgaagctattgacccgaggcatcggtatggccacaatctgcacatctattacgatgtctggtccaagagcgagagcacggagcccttcttttattggttggacattggggaaggcaaggaagtgaaccttgagaaatgccctaggagtaagcttcagagccagtgcatcaagtaccttggaccaaaagagagacaagagtatgaggttgttgtggagaggggaaagctcgtgtataagaaaaatggagctcttgtgcaaactctggacgattccaagtggattttcgtcctcagtaccaccaaggcactctatgtcgggcagaagaagaaaggctcgtttcagcactcgagtttcttagctggtggagccataacatctgccggaagattggtcgtcaaagaaggaatcctcaaggctatatggccgtacagcggccactaccttccaactgaagagaacttcaaagagttcatccgctacctcgaggagaacggtgtcgacctcactcatgtcaagaaatgcccagtcgacaaagacgacgagtaccccttggtgagcaagcctgaagctcaggccaacgccgccgtctcgaacggcactggcggagcagaacacagcacggcgtctgaagccatggttgaccatacgagtgactccgacgcggccgacggcgacggtcacggggcaaccggcggtcgagtgccggtggtcacgggaccaccgtcgagtgctgctgctgctgctgctcaggttggcaagaaccactcgacgtgccggtggtctacgggcacgggcccccgcatccggtgcgtccgcgactacccgcaggacctccagtccagggcgctcgagcacgtcaacctctcgccgaggctcaccggctcgccgtcgaggaagagggacccggtcccttcccctcgccccagcccggcgatgatcctgtctccgaggctcgcttccgtcggattccaccctcagacgacggtgtccctcacgctgcccgacttcaagaggagcagactgcactgaacaactctgttcttgtttcattgtttcgcttggcgatcagaagaataactcaactggtcagcctgtttactgacaggccagtgacctttttccctgctaggttgatcagtagattacttcgtttttttcttctgttcattgctttattgatggcaacaattttcggttgtagatactatttgtgattcttttgttagatgtatgtatgcaaggagtacatgtacattgcttaagattgaattgaaaaaatggcgattttgtttaggg

SEQ ID NO: 135409 - DNA, 807 bp, Zea Mays
agaataaactaaggttcaataaataacaagagtagcaacattagacaaattaagattcactaaataacaggacgggcatgacagtgtgaacacactgttatactcatctagactctaagtctccaacagcctcagacaacacaacacagcaagagcatactacacttccaccgatgatgcttaacaacgaataggcgaacccatctaaggccgtggatctatcatcgaccacgtaaccttcacacaaatcgtagcgtcacctaaagtgagtacaaattcctgtccaccgttccatctaggagtaaattcaatgcctgtagagacaccagcagcggtctttgcgaaaattttcagcttgtccatcacagaggctaatacaacaggtcccatcaattgaatcaaaccatgacagttatcacctcctacttggctatcaaacaacacaatcctcctcttgcttctggtggtgtgggcagtcattgctccatagaattccccctgtgtaacttcagctgcaacagttgcctccaccgcacattccacaacgtcatacgtcacatccacagtactgagcctggtagcaagggaaactctttcaggctcacatttgtcaaacacttgatttgctgtgccagggatcctcacgatccccttactgaattgtttgcaatgcccttaacgatccttgacccagagatcagtctgaacataatcagcattgtacgacaatgcaagtcctcgtcttgggccagtcaagatcaatgattcttcctgcgcatgaaaaaggtttaaaatgacaggctagtg

SEQ ID NO: 135410 - DNA, 1848 bp, Zea Mays
ctaatccaatcccaaacagttgggcctcggggcctgctgggttaggcggcagggtacgacgacccacccggtgagtttgacccctcgtcggttcgtcggtggccaaccgagcagccgagcaggagcgctagcatgcggcgccgtatatatacaggcgcccacgcgcggtggcggagaggcggtatgagccgaagaaggacgggtccggggggtcgcggaaggagcaatggcggaatcaagcggctccggttccgtgtcggtggacgtcgagcggatctccttcggcggcaaggatcatcttgtgaggacgagatgtggttctgtaaccgttgccgtgtacggagacgaggacaagccagcgcttataacgtacccggatgtagctctgaactacctgtcctgtttccaagcatttttcttctgcccggaagtggcgtctttgctgctacacaacttctgtgtctaccacatcaatccccagggacacgagatgggagcagctccaatgtcgtcagatgtgccggtgccatctgttgatgatctcgctgatcaagtcgcagatgtgcttgatttcttcagtttaggatctgtgatgtgccttggtgtcaccgctggtgcgtatgttctcactctctttgcgacgaaataccgggagagggtaataggattgatgctggtttcccctctgtgcaagtccccgtcgtggagcgagtggctgtataataaagtaacttacatctatcagtgacaacttaccgttttctctctaatgctaatgagtactaataatgacagatcatacaacaggtgttattaaatttgctttattactacgggaatcaaggcctggtcaaggagtgcttgcttcaacggtactttagcaaggttggttaagatctcaatattctcgtcttgttttcttgggacccgtagtctattgtttccattaactgacgcactgatatgagtctgcagaagctgcgtggggatgcacagtgtcctgaatccgacatagtgcgagccagtagaagtgttagcctccctctctttttttcagtttgtatattttcttggttgtataatactagtggttgcttactgttgatttttatatgcagttacttgatgacaagcagggcgaaaatatctggcggtttcttcactcaataaacgagaggcatgacttaacagattcgttaaagaagctgcaatgccgcacgctgatcttcgtcggggagagctcacagttccacgaggatgctatccacatggccacaaaactggaccgcagatactgcgcgttagttgaggtgcaggactgtggctcccttgtgaccgaggagcagccccacgcgatggtgatgccaatggagtacttcctcatgggatacgggctctacaggccgtatcagctaagcagcagccctcgcagtccactgagcccatgctgtatatcgcctgagctgctgtctcctgagagtatgggtgtgaagctgaagccgataaagacccgggttggtatcagtttgtagcactggcaagcaagccttttgaaccagaatgaaaggcaggctacctgtcttagaatcctcttgcagttgtataacatggcaaatggccattcctgttggagataacctatatatcatgtacatcacaaaaaaaagggtataagagggaccctgtagtggaggtaacgggtaaccaggatgtgtctttgttcaattagtttgtgtagtcgccggctttcagcacaaatgtaaatctcaaagtactttgacaggaacaataagaatccatctccagggtttcagatgttcaaatttcatggcgacaaaactttgtcat

SEQ ID NO: 135411 - DNA, 1566 bp, Zea Mays
ctaatccaatcccaaacagttgggcctcggggcctgctgggttaggcggcagggtacgacgacccacccggtgagtttgacccctcgtcggttcgtcggtggccaaccgagcagccgagcaggagcgctagcatgcggcgccgtatatatacaggcgcccacgcgcggtggcggagaggcggtatgagccgaagaaggacgggtccggggggtcgcggaaggagcaatggcggaatcaagcggctccggttccgtgtcggtggacgtcgagcggatctccttcggcggcaaggatcatcttgtgaggacgagatgtggttctgtaaccgttgccgtgtacggagacgaggacaagccagcgcttataacgtacccggatgtagctctgaactacctgtcctgtttccaagcatttttcttctgcccggaagtggcgtctttgctgctacacaacttctgtgtctaccacatcaatccccagggacacgagatgggagcagctccaatgtcgtcagatgtgccggtgccatctgttgatgatctcgctgatcaagtcgcagatgtgcttgatttcttcagtttaggatctgtgatgtgccttggtgtcaccgctgacgaaataccgggagagggtaataggattgatgctggtttcccctctgtgcaagtccccgtcgtggagcgagtggctgtataataaagtgttattaaatttgctttattactacgggaatcaaggcctggtcaaggagtgcttgcttcaacggtactttagcaagaagctgcgtggggatgcacagtgtcctgaatccgacatagtgcgagccagtagaagtttacttgatgacaagcagggcgaaaatatctggcggtttcttcactcaataaacgagaggcatgacttaacagattcgttaaagaagctgcaatgccgcacgctgatcttcgtcggggagagctcacagttccacgaggatgctatccacatggccacaaaactggaccgcagatactgcgcgttagttgaggtgcaggactgtggctcccttgtgaccgaggagcagccccacgcgatggtgatgccaatggagtacttcctcatgggatacgggctctacaggccgtatcagctaagcagcagccctcgcagtccactgagcccatgctgtatatcgcctgagctgctgtctcctgagagtatgggtgtgaagctgaagccgataaagacccgggttggtatcagtttgtagcactggcaagcaagccttttgaaccagaatgaaaggcaggctacctgtcttagaatcctcttgcagttgtataacatggcaaatggccattcctgttggagataacctatatatcatgtacatcacaaaaaaaagggtataagagggaccctgtagtggaggtaacgggtaaccaggatgtgtctttgttcaattagtttgtgtagtcgccggctttcagcacaaatgtaaatctcaaagtactttgacaggaacaataagaatccatctccagggtttcagatgttcaaatttcatggcgacaaaactttgtcat

SEQ ID NO: 135412 - DNA, 1592 bp, Zea Mays
ctaatccaatcccaaacagttgggcctcggggcctgctgggttaggcggcagggtacgacgacccacccggtgagtttgacccctcgtcggttcgtcggtggccaaccgagcagccgagcaggagcgctagcatgcggcgccgtatatatacaggcgcccacgcgcggtggcggagaggcggtatgagccgaagaaggacgggtccggggggtcgcggaaggagcaatggcggaatcaagcggctccggttccgtgtcggtggacgtcgagcggatctccttcggcggcaaggatcatcttgtgaggacgagatgtggttctgtaaccgttgccgtgtacggagacgaggacaagccagcgcttataacgtacccggatgtagctctgaactacctgtcctgtttccaagcatttttcttctgcccggaagtggcgtctttgctgctacacaacttctgtgtctaccacatcaatccccagggacacgagatgggagcagctccaatgtcgtcagatgtgccggtgccatctgttgatgatctcgctgatcaagtcgcagatgtgcttgatttcttcagtttaggatctgtgatgtgccttggtgtcaccgctggtgcgtatgttctcactctctttgcgacgaaataccgggagagggtaataggattgatgctggtttcccctctgtgcaagtccccgtcgtggagcgagtggctgtataataaagtgttattaaatttgctttattactacgggaatcaaggcctggtcaaggagtgcttgcttcaacggtactttagcaagaagctgcgtggggatgcacagtgtcctgaatccgacatagtgcgagccagtagaagtttacttgatgacaagcagggcgaaaatatctggcggtttcttcactcaataaacgagaggcatgacttaacagattcgttaaagaagctgcaatgccgcacgctgatcttcgtcggggagagctcacagttccacgaggatgctatccacatggccacaaaactggaccgcagatactgcgcgttagttgaggtgcaggactgtggctcccttgtgaccgaggagcagccccacgcgatggtgatgccaatggagtacttcctcatgggatacgggctctacaggccgtatcagctaagcagcagccctcgcagtccactgagcccatgctgtatatcgcctgagctgctgtctcctgagagtatgggtgtgaagctgaagccgataaagacccgggttggtatcagtttgtagcactggcaagcaagccttttgaaccagaatgaaaggcaggctacctgtcttagaatcctcttgcagttgtataacatggcaaatggccattcctgttggagataacctatatatcatgtacatcacaaaaaaaagggtataagagggaccctgtagtggaggtaacgggtaaccaggatgtgtctttgttcaattagtttgtgtagtcgccggctttcagcacaaatgtaaatctcaaagtactttgacaggaacaataagaatccatctccagggtttcagatgttcaaatttcatggcgacaaaactttgtcat

SEQ ID NO: 135413 - DNA, 1660 bp, Zea Mays
ccacgcctccacggccaagcgcctcgaaggcaaagcttccactagccacaggccaacgaaatcgcaaagcgaagctacggccaccgaccgacgttccaagaagcgaaacgaaacgaaaatgatgatgatgatgggagagagagcgcacgcgcctccgtggcagcgctcgccggcggccagcggcgtcacggacgcggacgacgcgtctccgtacgccctcctagcggcgctgcagcattacctgccgtcgaacgaggtggcggcgtacgacgaagacgacgaggaggcggccctggcggcggcgaccgccgccgtcgacgcgtacgcctgcgacgagttccggatgtacgagttcaaggtgcggcggtgctcgcgcgggcggaaccacgactggacggcctgcccctacgcgcacccgggggagaaggcccggcggcgcgaccccaggcggtaccactactccggcgccgcgtgcccggacttccgcaagggcgggtgcaagcgcggcgacgcgtgcgagttcgcgcacggggtgttcgagtgctggctccacccgtcgcgctaccggacgcagccctgcaaggacggcaccggctgccgccgccgcgtctgcttcttcgcgcacacgccggaccagctccgcgtgccgccgccgcggcagtccagccctaggggcgcggcggcggcggcgtcgccgctggccgagtcgtacgacggctcgccgctccgccgccaggcgttcgagagctacctcaccaagagcggcatcgtgtcgtcgccgccgccgaccagcacgctcgtctcgccgccgaggtcgccgccgtcggagtccccgccaatgtcgccagacgccgccgccgcgctccgccgcggctcgtggccgggcgtagggtcgcccgtcaacgaggtcctcgcgtcgatgcgccagctgcggctcggcggcggctcgccgaggtcggcgccttccggcgggtcgttcttgggcggaggctacccgttcgggtccccaaagtcaccggccgggctgtacagcctcccgtccacgccaaccaggccgtccccggtgaccgtgaccaccgcctccggcgccaccgtcctcaccgtggaacgcctcaacctcggactcatcggggacgaggagccggtgatggagagggtcgagtccgggagagccctccgcgagaaggtgttcgagcggctcagcaaagaagccgccgttcccagcgacaccgccgcatccgccaacgttgagggagcggcccccgccccggatgttggatgggtctccgacctcatcaactgagggaactcgtggaactaccagctcagaagttcaggggggaataacaaaaaaaaaatgatggcatgtcggtgaaggagacaaggtgcccagcaaaccatggtggaaaatggatcaagaagacatgtgcaggcgaccatgtatacgggttgtctagatgcacatggtgtcttccctgcctgtgaggtgggagcatgggaggcgatcatggcggcgatccaagaccgaacccataatttccgcgagcgattccagaacgaacggcgtcttgagttgatgttcattctgctatttgccttttaagattcgacgagttattactgctctgtgatttttctcaaagtatttccatattgatct

SEQ ID NO: 135414 - DNA, 1875 bp, Zea Mays
ccacgcctccacggccaagcgcctcgaaggcaaagcttccactagccacaggccaacgaaatcgcaaagcgaagctacggccaccgaccgacgttccaagaagcgaaacgaaacgaaaatgatgatgatgatgggagagagagcgcacgcgcctccgtggcagcgctcgccggcggccagcggcgtcacggacgcggacgacgcgtctccgtacgccctcctagcggcgctgcagcattacctgccgtcgaacgaggtggcggcgtacgacgaagacgacgaggaggcggccctggcggcggcgaccgccgccgtcgacgcgtacgcctgcgacgagttccggatgtacgagttcaaggtgcggcggtgctcgcgcgggcggaaccacgactggacggcctgcccctacgcgcacccgggggagaaggcccggcggcgcgaccccaggcggtaccactactccggcgccgcgtgcccggacttccgcaagggcgggtgcaagcgcggcgacgcgtgcgagttcgcgcacggggtgttcgagtgctggctccacccgtcgcgctaccggacgcagccctgcaaggacggcaccggctgccgccgccgcgtctgcttcttcgcgcacacgccggaccagctccgcgtgccgccgccgcggcagtccagccctaggggcgcggcggcggcggcgtcgccgctggccgagtcgtacgacggctcgccgctccgccgccaggcgttcgagagctacctcaccaagagcggcatcgtgtcgtcgccgccgccgaccagcacgctcgtctcgccgccgaggtcgccgccgtcggagtccccgccaatgtcgccagacgccgccgccgcgctccgccgcggctcgtggccgggcgtagggtcgcccgtcaacgaggtcctcgcgtcgatgcgccagctgcggctcggcggcggctcgccgaggtcggcgccttccggcgggtcgttcttgggcggaggctacccgttcgggtccccaaagtcaccggccgggctgtacagcctcccgtccacgccaaccaggccgtccccggtgaccgtgaccaccgcctccggcgccaccgtcctcaccgtggaacgcctcaacctcggactcatcggggacgaggagccggtgatggagagggtcgagtccgggagagccctccgcgagaaggtgttcgagcggctcagcaaagaagccgccgttcccagcgacaccgccgcatccgccaacgttgagggagcggcccccgccccggatgttggatgggtctccgacctcatcaactgagggaactcgtggaactaccagctcagaagttcaggggggaataacaaaaaaaaagtaggaagatttttaattttttagttctttacaaatattttcctggtccttgtacagatgttcctgctttgtgaatagtcttggatggttgtcgaagggaggggaggcagggaatggttgatttgttatgaggtttcagatgatggcatgtcggtgaaggagacaaggtgcccagcaaaccatggtggaaaatggatcaagaagacatgtgcaggcgaccatgtatacgggttgtctagatgcacatggtgtcttccctgcctgtgaggtgggagcatgggaggcgatcatggcggcgatccaagaccgaacccataatttccgcgagcgattccagaacgaacggcgtcttgagttgatgttcattctgctatttgccttttaagattcgacgagttattactgctctgtgatttttctcaaagtatttccatattgatctatgcatgcatgtacaatgtcagtactgctactttcgctgatactccgtaacaaaattaattaaaaccggcgttgct

SEQ ID NO: 135415 - DNA, 1566 bp, Zea Mays
cccaacaagcgccgccgccgccgcctcgtataccctcacgacacctcccctcgcgcctagagaggaggcatccgctttcggcgccgtcgccactcgccaccatctccaccgcctcctctcgacgcgcatcccctcccatacccatggccactgaccgtctcctccaccttctccgagcgccgacaggctctccggctgccgccaccacccgcgcggctggttggggtcgtccacggacacagcgcgtcgacgtctggcaggttgctgcggggattcgccgcgcgtccgtgtcctgctcgagcactagctctggcgggcaggggggattaacatataaggatgccggcgtggacatagacgccggcgccgagctcgtgcgccgcatcgccaggatggcacccgggattggcggcttcggcggtctcttcccctacaatgacgattatcttgttgctagcaccgatggggtggggacaaagctgaagcttgctttcgaaactggtattcatgatacaatcggcattgacctggtggcaatgagcgtcaatgacattgtaactctaggtgcaaaaccattgttcttcctagattactatgcaacgagcaagcttgatgttgatcttgcagagaaggttatcaaggggattagggatgggtgcgaacaatcagattgtgctctcctaggaggggagacagcagaaatgcctggtttctatgcagagggtgaatatgatctaagtggttttgctgtgggtgttgtgaagaaggataaagtcattgatggaaaaaacattgttaagggagatgtgcttataggtcttccttccagtggtgttcattctaacgggttctctcttgttagaagagtactggagaaaagtggactttctttggatgatcagctcccaagaaatgatggcataacaactacggttggtgaagctctaatggcaccaaccttcatctatgttaagcaggtgcttgagattattagcaaaggtggtgtgaaaggactagcccacatcactggtggtggctttactgacaatatcccaagagtattcccctccggatgcggggcaaaaatttttactgggtcatgggaaatacctccaatcttcagttgccttcaacaggctggaaacattgatgacgcagagatgcggcgaacattcaatatgggcattggaatggttcttgtggtaagtcgagagtcagcagacagaattattgaagacacccatggatccaatcctgcttatcgcattggagaggtgattgagggtgatggggttcagtatgtctgacctcgtatgccttttatagtggcttgagacttgttggtctgctctgcaaagcagcagagtttatgtaacaacataatcttgtggtgttaagttctgcaccactactcccgctagaaagtgaagggtaaccaaataattatttgattggatccacgggaacttctctaaaggcttaccagaggaggccattaggaggaaatacagttgatgagaatttttcatggagagcggtattgttttcgttgagtaaatttaaata

SEQ ID NO: 135416 - DNA, 1510 bp, Zea Mays
caggtcgagatctcctctctacaggcagccagagttctagctgagcagcaaaagattgcagcgatttgacgagcaaacaaagatatatataagattcgccacaccgacacctagatgtcacacgccagcccgcaggtggtatataataatagtgaaaaaaaagagaagctgcttctgggatggctgcatttatgcaggcacactgctgccggcagccacgactggttggaaggagggaggggtagtagtaaaaccaggtaggtgtggctggctcgtgcagcggcggcaggcggcagtgagagcgatgagcgcggcggcggcgagctcggtcaccaagttcatcaagtgcgtcacggtcggcgatggggccgtcgggaagacctgcatgctcatctgctacacctgcaacaagttccccacggattatatccccaccgtatttgacaacttcagcgccaatgtctccgtgggtgggagcatcgttaacttgggcctctgggacacggcaggccaggaggattacagcaggttgaggcctctcagctacaggggtgccgatgtgttcatcctctccttctccctggtcagcagggcgagctatgagaacgtcctcaagaaggtactgactactgagaatagttccggacgaaaatttatgattagggatctgtacagccgcaactaggagtttcttgactcactaaaatcctgcaaactccttacttcacaacattgttacatggatgtatcagtttggatttcacacagcaataactgagtactgatcatcagcgtccgtctgtacagtggatgccagagcttcgccgattttcacctactgttcctgtagttcttgttggaaccaaactagatctccgtgaagacagatcttaccttgctgaccattctgctgcttccatcatctctactgaacagggagaagagctcaggaagcagataggcgctgtggcgtacatagaatgcagctcaaagacacagaggaacgtaaaggctgtgttcgacactgcaattaaagtagtgctgcaaccaccgaggagaagagaagttaccaggaagaaaatgaaggcaaggtcgaatcagtctctgagaagatacctctgtggaagcggatgtttcacatcgtaaagcacaggctcttctgcgactgttgtactggactggctagatggttgcagctctatgaatgagtagtcccttccgcagccactgggaacttctggttctctgctaccttccgatagagtgctcttctgcgttcaccagctgtgcaaaatgaagtgaggtcctagtttctaaattccctacgaggtgtaccttctttagtatgaatggtaggctatttagcagttcagcaaagtgtgaagtgacccttctatgcatgttttgtttccaaaaactgatgtagctaaatctctaatgaatggttatggtcgcaccggaagaaaagaagttattgtagactattaattccagtttttactgttcctcg

SEQ ID NO: 135417 - DNA, 1324 bp, Zea Mays
caggtcgagatctcctctctacaggcagccagagttctagctgagcagcaaaagattgcagcgatttgacgagcaaacaaagatatatataagattcgccacaccgacacctagatgtcacacgccagcccgcaggtggtatataataatagtgaaaaaaaagagaagctgcttctgggatggctgcatttatgcaggcacactgctgccggcagccacgactggttggaaggagggaggggtagtagtaaaaccaggtaggtgtggctggctcgtgcagcggcggcaggcggcagtgagagcgatgagcgcggcggcggcgagctcggtcaccaagttcatcaagtgcgtcacggtcggcgatggggccgtcgggaagacctgcatgctcatctgctacacctgcaacaagttccccacggattatatccccaccgtatttgacaacttcagcgccaatgtctccgtgggtgggagcatcgttaacttgggcctctgggacacggcaggccaggaggattacagcaggttgaggcctctcagctacaggggtgccgatgtgttcatcctctccttctccctggtcagcagggcgagctatgagaacgtcctcaagaagtggatgccagagcttcgccgattttcacctactgttcctgtagttcttgttggaaccaaactagatctccgtgaagacagatcttaccttgctgaccattctgctgcttccatcatctctactgaacagggagaagagctcaggaagcagataggcgctgtggcgtacatagaatgcagctcaaagacacagaggaacgtaaaggctgtgttcgacactgcaattaaagtagtgctgcaaccaccgaggagaagagaagttaccaggaagaaaatgaaggcaaggtcgaatcagtctctgagaagatacctctgtggaagcggatgtttcacatcgtaaagcacaggctcttctgcgactgttgtactggactggctagatggttgcagctctatgaatgagtagtcccttccgcagccactgggaacttctggttctctgctaccttccgatagagtgctcttctgcgttcaccagctgtgcaaaatgaagtgaggtcctagtttctaaattccctacgaggtgtaccttctttagtatgaatggtaggctatttagcagttcagcaaagtgtgaagtgacccttctatgcatgttttgtttccaaaaactgatgtagctaaatctctaatgaatggttatggtcgcaccggaagaaaagaagttattgtagactattaattccagtttttactgttcctcgtc

SEQ ID NO: 135418 - DNA, 651 bp, Zea Mays
cccttaagaactgaaaggggcacctgcactgcacagcagtcactgcaactgataacattattctcttgtaatgctagggagaagagctcaggaagcagataggcgctgtggcgtacatagaatgcagctcaaagacacagaggaacgtaaaggctgtgttcgacactgcaattaaagtagtgctgcaaccaccgaggagaagagaagttaccaggaagaaaatgaaggcaaggtcgaatcagtctctgagaagatacctctgtggaagcggatgtttcacatcgtaaagcacaggctcttctgcgactgttgtactggactggctagatggttgcagctctatgaatgagtagtcccttccgcagccactgggaacttctggttctctgctaccttccgatagagtgctcttctgcgttcaccagctgtgcaaaatgaagtgaggtcctagtttctaaattccctacgaggtgtaccttctttagtatgaatggtaggctatttagcagttcagcaaagtgtgaagtgacccttctatgcatgttttgtttccaaaaactgatgtagctaaatctctaatgaatggttatggtcgcaccggaagaaaagaagttattgtagactattaattccagtttttactgttcctcg

SEQ ID NO: 135419 - DNA, 3704 bp, Zea Mays
tcgccccaacctcaaacagtgaacggcgccacctctccgccgccgtcagatcggagctcgactccgaaccccgcttttcagccgccatggcggcgccaccgcgccgctcgctccttgtcctcctcgcggggatcctagttttcggctccctcaccaccctcgccacagccatctacgaggaccaagtcggtctcgcggactggcaccagaagtacattggcaaagtaaagcaagcagtttaccacagccaaaagagtggaaggaggcgtgttgtagtcttgacagaggaaaatgtgatctcatctcttgatctacgttctggagatatattctggcgacatgtcattgacaagaacgaccccttggatcagcttagtctttcacttggaaaatatgttctaaccctttctttgggaggaactatattaagggcatggaatcttccagatggacatatgatctgggaaactaaccttcggatctctacagcatcaaatccacagttgcatgttatgtcaaacaataaagtggccaatgacaacttggttttagtttcagctgggcgatggatttatgctgtatcaagcactgatggggcaattttatgggaaaaggagttttctcttgatggcttagaaattaagcggattctccaatcacctgaaaatggtattgtatatgctttaggacttgctggttcctcaaagctagctttgtatcacttgagtgctaaaactggagagatactaaaagatatccaagagtcactccctggtggattattgggtgaaacagtacttgtttctgataatgtgttggtagcattagataaggccagatcaagtctgttagttattgaattcaagggtgagagaattagctacaacaaggtgcatgtttcagatcttgttcaagacttatcaggatcacttgagcttcaatctttgtccaatggtgtcatatctttgcaaacatcatcttctatttccctcctaaagctcaaaggtactgatggattggaagtacttcagagatttgaccagccagctgctgtcagtgattccctgacaatcacagaaaaagaagcagcttttgctgtcgtgcaacatttgggttctgaaattgagtttatcgtaaaatctacaagtgatctaagcagtgaaattattaaagaaaagcttgttatagaccaaaataggggcaatgttgagaaggtcttcttgaatagttatattcgaaccgacagatctcatggttttcgagctttggttgtaatggaggatcattcactcttgttaattcaacaaggtgaggttgtttggagcagagaggatgggctggcttcaattgttgatgtaacaacatcagaattgcctgttgagaaggatggtgtatcagttgccgatgtggaacacaatctctttgagtggcttaagggacacatgctgaaactcaaaggaagtctaatgcttgctaatgctgatgaagttgctgcaatccaagcaatgagactaaaaagctctgagaaaaataagatgacaagagaccataatggatttcgcaaactccttgttgtattgacaaaagcgggcaaagtgatggctctgcacactggagatggacgtgttatctggtcgaaattggtgccatctcttcgtgcctccagatgtggtggagtcccttctgcattaaggatataccaatggcaggtcccgcatcacagtgtcatgcgtgaaaatccatctgtacttgttgttggcaaatttggagcagaaccttcaattcctggtgtattctctattcttgattcatattctggagaagaactgaactctatgaaacttgaccattctgttgtccaaattattcccttgacactgaaggattcatcagagcaacaacttcatctgtttgttgattccgattccaatgcacatttatatccgaaatctccagatgctctcaatgtatttcttcatgaaatgtcaaacctgtatttctactctgtagatattcaggcaaatgttattaaagggtattcattacagaagtcatgtaatctcaatgtgggtgatgagtactgctttagtacgaaggagttatggttcatcatctttccttctgattctgaaaggattactatctctgaaacacgaaagatgaatgaggttgttcatacccaagctaagataagcggtgaccatgatgtgatgtacaagtacttgtcaaagaatttagtttttgttgctactttgtctcctaaagctgctgttgatattggatctgcactacctgaagaagcttcacttgttgcatatcttattgatgcagtcactggacgcatactccatcgtgtgactcatcatggtgcacaaggccctgtacatgcagttttgagcgagaactgggttgtctatcattattttaatcttcgagctcacagatttgaaatggcggtgatcgagatatatgatcaatctagggcgggcaataaagatgtcacgaagctcatactagggaagcataatcttttggcaccaattacatcttatgcccgccctgaggtggcagtaaaatcccagtcatactttttcacccattcagtaaaagcaatggcagttacacaaacggctaaggggatcacttccaagcagcttctgttgggtactattggtgaccaggttttggcacttgataagcgctatcttgatccacgccgttcagtgaacccgacacagcaagaaaaagaagagggcattataccattaacagattctttgcctataataccccagtcctttgtgacgcactctcatcaagtggaggccctgcgagccattgtttctattcctgcaaagttggagtccactattgttttcacatatggtgtcgatctattctacacccagcttgccccgtcaagaacctatgattccctaaccgacgaattcagctatgcgctgcttctaatcacgatcgcagtcctggttgccgccattattggtacatggatttggtctgagaaaaaggagttgagagacaagtggaggtgagcaaggtctcagtgttctgacgctgaggaaattttgggccctagtcagctaccttctcctcctctccccttttcattgtagtgctagagttcgtttcactttttgactaggactttatttatgtaaccgtttgacaacaaagcctatctgccgtgaattgtcacactgcggaggccttatagaaagccacttacgcaattaaagattcaggaaatgacatcgaagggttagcagagcgcagatggcgtgaatctgtaccactgcagccaaacacttcacagcagattttgtagctattgttgttggtagagggtttccgcttctcttgtgtaactgaaagctcgtctttatttcaatcactatacctttcttgacagaaactgtatatctcttccaatgcactgtcattacttctgctgttagcctgtgatagggtgggctacaagatgctctacgttggtgcggtttgcgcaacctcagtcctccagggcatatctttattctgaaggtgatgtaacaactacatcattgaaccaatgatggttattgctacttcctgatcggatcgttcatgtgttaatgatggcagtgatcaagtcaggtaccatttaaagatttgtagcatcttttgtcaaggttatctttcttttg

SEQ ID NO: 135420 - DNA, 1639 bp, Zea Mays
gtggactcacatgtaagtgagatagtaatggtatgaatccaaagtggtgatcttttaatggtatgaatccaaatttccccttttaaaaatagtatagattgaattctccccctcaaacaaaccactcttcgcttcgactcccactcccactctccctttccactctcaggctcccactccccccctaccggctaccctacccatcacacacaaacagccactcctcacctcccccgtcctccggttcatgtcctgctgctccccatgtcgcccccactcgacctcgactacataggcctctcgccggcggcggctgccgccgctgcccacgacgacctgaagggtaccgagctccgccttggtctgccggggtccggttcgccggaccgccgtgttgtggctgccaccgcaaccaccctggacctgctcccggctaagggcgccaagcgcgggttttctgacgaggcgccgacgccatcgcccggtgcagcttccgggaagggaaagaaggtagcggaagaggaggacgacaagaaggttgcagcgacgccgcagccggtcgcaaaagctcaggtggtgggatggccaccaatccgaagctaccgcaagaacacgatgtctaccacccagctgaagggcagcaaggaggatgctgaggccaagcaggaccaggggttcctgtacgtcaaggtcagcatggatggcgcgccgtacctcaggaagattgacctcaagacttacaagaactacaaggacctgtcgactgcgcttgagaagatgttcagtggcttcagtactggcaaggatggcttatctgagtaccgcaaggatggtgaatatgttctgacttacgaggacaaggatggagattggatgcttgttggcgatgtaccatgggagatgttcgctgactcttgccgcaggctcaggatcatgaaaggatcagatgcaattggacttgctccaagggcagctgataagtccaagaatcgcaactagaatggttgcttcttacagtccagagcaagagggagatatccagtgactgtagggatctttgtggaagccggaaaacgtctaacagtttcaagaagaattctgccttatggtctgtaccacatgtttttgctgctacgcaagtaaagaactccacgtctgtcaatgttagttttacaacatcgtctacggacaaaaaaaaaaccccccgctatttgattgttgctaagccttcgtacgacgtgtaaatggtttggtacaatgagtgctgcgactacgattgagcacccctctacctagtttgcaaaaaaacagtgtcccatggactgtctgttgtccctctatataaatgtccaatgaagcttgctaatgtgtggtcatcgtgttcatgttctggtccattcatctcgacagtgttgaaaccctgacgaagcaacttgtttcgaaagtgggcctcctctgtggagcagtttctttgtggaaactttgattcctctttttttttcttttttttgttaccagctttgatgcctaattgctggtggggcatgcagcgtatgcgattatttgtctgctgctgaaggtcatgatggttaccatctatgatcccacaccaaagtgtcattttttttaaaaaaaaaga

SEQ ID NO: 135421 - DNA, 84 bp, Zea Mays
cgaacacataggagatctgagcatcattatattaagaagaagaatgggcacaaaaagccccagttacaaacacacctataaaac

SEQ ID NO: 135422 - DNA, 539 bp, Zea Mays
ttctgcaacacgtgggtcagtcgaagcgggctcatctgcactgctgggttgtctaggacacgaccctacatcgcggctcgcgggcgtcagggcgcagatcagccatgccttccatcgagcagttccagcattggatggcaaccaacgtgtgtgctcttgtcttcgtttatccgtgcgtgggttctttcgtctggctggggactcctgcacgccggctctcgtacgaccgccgttctcccggacttcgtcggctcccacttttggaacttctagtctattgtcgccttctagcagagattggtggaagacgacgatgtctcgctaaaggagaggagtggaggaggcgggagcagcaagaatggcgtgctccaccaatctctgcttctcagtgtcgattcctcctctcccagcctcttgttcttctgactcctcccccttccgcacaatggagcgtgtgtcctgcactctgtccaggcattggtgaagcggttacggtgatggggatgggcaagatcgtgcggtggtgcgctgggaagtag

SEQ ID NO: 135423 - DNA, 1382 bp, Zea Mays
aaaaaaaaagttaggcaaagtgtagcaaattaagcagtgaaccaaacatgtccttaatctccctgcttccattatcttaatttaattacctgataataatgtgttgtcttgttcttgattcatagcggttgaaaataagtgaccaacaatattcgttccaaatttttaactacccgtatccgttcatgtatcctggagaaatatattacgttaggatacagaataactttgtatctagttcctgttttcatccctaagcagacagcactgtcgcaagccataatctgcaataacaacatataattgtgccatccaaaaaacgtaattattgtttgttcgagataatgcgctaataacgtgtggctagttctagcaactggatgtgggtgcctgcagtgtgggcccgagcaaatccatctcttgcgctcgcagacaacggccttcccgccgccggtacaatcagatgcagatgctaatgatacagtccgtccagaccccacccgccgccgcccacctccgcgctgctgcgcccgccagcacgccaccgctcctcgcgcgtaggctggccggttctcgtccagctcccgcctccgccggaacaatcagatgcagccgatgctaacgctacagtccgtccagcccccacccgccgctgcccacctccgcgccgctgcgtccgccaagacgccactgctcctcccgcgcagagcggccggtcctcctccagcttccgcctccgcctccgcctcggctgagttcccaggatccgttccagacagcgctcagatggcgccccgacggcggcggcgccggagcgtggccggcatcgaccaggacgaactcctcgatcccgaggccctcgcggaccccgacagcggcttctacgagatcaacggcgtgaggctgcaccacaaggtctgcagccacgaggatgaggactcgtccagcgaccagtccaccggtagtaccattgcctcagactcagacgctgtcctgaaaagccagattggcctgcccatactgctgctgcacggcttcggcgcgtcagtcttctcctggagcagtgtgatgcggcctctcgcccgcattgtccgtgccaaggttcttgcgttcgaccggccggcgtttgggctgacatcccgggccagtcgctctgccgatgacgccaagcctctcaatccttactccatggcgttctcggtcttggccacgttggcgttcatcgactaccttggcgctgagaaggccatacttgttgggtaatactagtcctcatcccaaatctgaattgcttgcttctctcgctagctctgtctatctgcattgctttcgtgtgattattattatatgtacgtgtgtgatgaccattgcccccaggcact

SEQ ID NO: 135424 - DNA, 1826 bp, Zea Mays
acggccttcccgccgccggtacaatcagatgcagatgctaatgatacagtccgtccagaccccacccgccgccgcccacctccgcgctgctgcgcccgccagcacgccaccgctcctcgcgcgtaggctggccggttctcgtccagctcccgcctccgccggaacaatcagatgcagccgatgctaacgctacagtccgtccagcccccacccgccgctgcccacctccgcgccgctgcgtccgccaagacgccactgctcctcccgcgcagagcggccggtcctcctccagcttccgcctccgcctccgcctcggctgagttcccaggatccgttccagacagcgctcagatggcgccccgacggcggcggcgccggagcgtggccggcatcgaccaggacgaactcctcgatcccgaggccctcgcggaccccgacagcggcttctacgagatcaacggcgtgaggctgcaccacaaggtctgcagccacgaggatgaggactcgtccagcgaccagtccaccggtagtaccattgcctcagactcagacgctgtcctgaaaagccagattggcctgcccatactgctgctgcacggcttcggcgcgtcagtcttctcctggagcagtgtgatgcggcctctcgcccgcattgtccgtgccaaggttcttgcgttcgaccggccggcgtttgggctgacatcccgggccagtcgctctgccgatgacgccaagcctctcaatccttactccatggcgttctcggtcttggccacgttggcgttcatcgactaccttggcgctgagaaggccatacttgttgggcactcagctggttgccttgtagcagtggatgcatactttgaggcaccggaacgggtggctgctctcgtgctagttgcgccggctatatttgcaccaaggaaggcggtgaaagagggccagtcaggggaagaagaaggagggcagcaagcacagagggttcccaacgatgaaaattcgcctccaaatttgttcgctaggatttcgggaggatttcttgagctatggaagcacgttgcggggcttgttctcaagatgatcacagcgatacgagatgtggtccgatctttgtgtcttaaagctgtcgttgcttttcttcggtcatcgttgggtgtggtgctgatgggtgatggataaatttggtatactgggcgtccggaatgcatggtatgacccgagcaaagtaactgatcatgtcatacaaggctacacaaagcctctaaaatccaagggttgggagacagctctgctggaacacaccgtatccatgatcatagattctgtgtctgcatcaagagtaccagtttcaaagaggctttctgagatctcatgcccagtgctagtggtgacaggtgacaccgatcgcattgttcctgcttggaatgccgagcgtgtggcacgcgctatacctggagcaacttttgaggcgatcaagagttgtggtcacttgccccacgaagaaaggcctgaggaattcctgtccgtcgttgaaaattttctacggacaacgtttgcaaatccaaatgaacaagtatttcaagcagctgtatcatgaattatgtgttgagtacgatctatttgctttataataaatcttaaagacccactcgtgtacaatgagagtggaatttggagtttaagcacatgagaagtaaaagaagttgaagaaaacttatatagtttgtctcctgcttttttttaaacaaagcaagagagggagaaaactaaagctacaagtgcgcacgttttatgttttcttttgcgtgataattcgtgcgacttgt

SEQ ID NO: 135425 - DNA, 1805 bp, Zea Mays
acggccttcccgccgccggtacaatcagatgcagatgctaatgatacagtccgtccagaccccacccgccgccgcccacctccgcgctgctgcgcccgccagcacgccaccgctcctcgcgcgtaggctggccggttctcgtccagctcccgcctccgccggaacaatcagatgcagccgatgctaacgctacagtccgtccagcccccacccgccgctgcccacctccgcgccgctgcgtccgccaagacgccactgctcctcccgcgcagagcggccggtcctcctccagcttccgcctccgcctccgcctcggctgagttcccaggatccgttccagacagcgctcagatggcgccccgacggcggcggcgccggagcgtggccggcatcgaccaggacgaactcctcgatcccgaggccctcgcggaccccgacagcggcttctacgagatcaacggcgtgaggctgcaccacaaggtctgcagccacgaggatgaggactcgtccagcgaccagtccaccggtagtaccattgcctcagactcagacgctgtcctgaaaagccagattggcctgcccatactgctgctgcacggcttcggcgcgtcagtcttctcctggagcagtgtgatgcggcctctcgcccgcattgtccgtgccaaggttcttgcgttcgaccggccggcgtttgggctgacatcccgggccagtcgctctgccgatgacgccaagcctctcaatccttactccatggcgttctcggtcttggccacgttggcgttcatcgactaccttggcgctgagaaggccatacttgttggtggatgcatactttgaggcaccggaacgggtggctgctctcgtgctagttgcgccggctatatttgcaccaaggaaggcggtgaaagagggccagtcaggggaagaagaaggagggcagcaagcacagagggttcccaacgatgaaaattcgcctccaaatttgttcgctaggatttcgggaggatttcttgagctatggaagcacgttgcggggcttgttctcaagatgatcacagcgatacgagatgtggtccgatctttgtgtcttaaagctgtcgttgcttttcttcggtcatcgttgggtgtggtgctggtaagatgggtgatggataaatttggtatactgggcgtccggaatgcatggtatgacccgagcaaagtaactgatcatgtcatacaaggctacacaaagcctctaaaatccaagggttgggagacagctctgctggaacacaccgtatccatgatcatagattctgtgtctgcatcaagagtaccagtttcaaagaggctttctgagatctcatgcccagtgctagtggtgacaggtgacaccgatcgcattgttcctgcttggaatgccgagcgtgtggcacgcgctatacctggagcaacttttgaggcgatcaagagttgtggtcacttgccccacgaagaaaggcctgaggaattcctgtccgtcgttgaaaattttctacggacaacgtttgcaaatccaaatgaacaagtatttcaagcagctgtatcatgaattatgtgttgagtacgatctatttgctttataataaatcttaaagacccactcgtgtacaatgagagtggaatttggagtttaagcacatgagaagtaaaagaagttgaagaaaacttatatagtttgtctcctgcttttttttaaacaaagcaagagagggagaaaactaaagctacaagtgcgcacgttttatgttttcttttgcgtgataattcgtgcgacttgt

SEQ ID NO: 135426 - DNA, 1878 bp, Zea Mays
acggccttcccgccgccggtacaatcagatgcagatgctaatgatacagtccgtccagaccccacccgccgccgcccacctccgcgctgctgcgcccgccagcacgccaccgctcctcgcgcgtaggctggccggttctcgtccagctcccgcctccgccggaacaatcagatgcagccgatgctaacgctacagtccgtccagcccccacccgccgctgcccacctccgcgccgctgcgtccgccaagacgccactgctcctcccgcgcagagcggccggtcctcctccagcttccgcctccgcctccgcctcggctgagttcccaggatccgttccagacagcgctcagatggcgccccgacggcggcggcgccggagcgtggccggcatcgaccaggacgaactcctcgatcccgaggccctcgcggaccccgacagcggcttctacgagatcaacggcgtgaggctgcaccacaaggtctgcagccacgaggatgaggactcgtccagcgaccagtccaccggtagtaccattgcctcagactcagacgctgtcctgaaaagccagattggcctgcccatactgctgctgcacggcttcggcgcgtcagtcttctcctggagcagtgtgatgcggcctctcgcccgcattgtccgtgccaaggttcttgcgttcgaccggccggcgtttgggctgacatcccgggccagtcgctctgccgatgacgccaagcctctcaatccttactccatggcgttctcggtcttggccacgttggcgttcatcgactaccttggcgctgagaaggccatacttgttgggcactcagctggttgccttgtagcagtggatgcatactttgaggcaccggaacgggtggctgctctcgtgctagttgcgccggctatatttgcaccaaggaaggcggtgaaagagggccagtcaggggaagaagaaggagggcagcaagcacagagggttcccaacgatgaaaattcgcctccaaatttgttcgctaggatttcgggaggatttcttgagctatggaagcacgttgcggggcttgttctcaagatgatcacagcgatacgagatgtggtccgatctttgtgtcttaaagctgtcgttgcttttcttcggtcatcgttgggtgtggtgctggtaagatgggtgatggataaatttggtatactgggcgtccggaatgcatggtatgacccgagcaaagtaactgatcatgtcatacaaggctacacaaagcctctaaaatccaagggttgggagacagctctgctggaacacaccgtatccatgatcatagattctgtgtctgcatcaagagtaccagtttcaaagaggctttctgagatctcatgcccagtgctagtggtgacaggtgacaccgatcgcattgttcctgcttggaatgccgagcgtgtggcacgcgctatacctggagcaacttttgaggcgatcaagagttgtggtcacttgccccacgaagaaaggcctgaggaattcctgtccgtcgttgaaaattttctacggacaacgtttgcaaatccaaatgaacaagtatttcaagcagctgtatcatgaattatgtgttgagtacgatctatttgctttataataaatcttaaagacccactcgtgtacaatgagagtggaatttggagtttaagcacatgagaagtaaaagaagttgaagaaaacttatatagtttgtctcctgcttttttttaaacaaagcaagagagggagaaaactaaagctacaagtgcgcacgttttatgttttcttttgcgtgataattcgtgcgacttgtgacttacgatgtgatgattcatgctaattttatttctatcttttgtt

SEQ ID NO: 135427 - DNA, 1304 bp, Zea Mays
cgtcccacccctcctgcatttcaaaataatatctccctgcgcttttcctagccctttgtcatccaaggatacaataaacaaccggcgcttttacacccccgccaagaacaggagcaacaacaataaggctcctcgcaacaatccattctcatccatggcgaagctcatgaacaagctggtcgattcgttcgagcacgacgagatactggacgtcggctgcgtgcgcgccgtgctggccgagctcgtcctcaccttcctcttcgtcttcaccggcgtctccgccgccatggccgccggatccgacgggaagcccggcgacgctatgccgatggcgacgctggcggcggtggcaatcgcgcacgcgctggccgctggcgtcctggtgacggccgggttccacgtctccggcggccacctgaaccccgcggtgacggtggggctcatggtgcgcggccacatcaccaagctccgggcggtgctgtacgtcgccgcccagctgctggcctcctccgccgcctgcgtcctcctccgcttcctcagcggcggcatggtgaccccggtgcacgccctgggcaggggcatcagcccgatgcagggcctggtgatggaggtcatcctcaccttctccctgctcttcgtcacctacgccatgatcctggacccgcggagccaggtccgcgccatcggcccgctgctgacgggcctcatcgtcggcgccaacagcctcgccggcggcaacttcaccggcgcgtccatgaacccggcacgctccttcggcccggccctggccaccggggactggacaaaccactgggtctactggatcggcccgctgctcggcgggcccctggcaggcttcgtgtacgagtcgctgttcctggtgcagaagatgcacgagccgctgctcaatggggaagtctgacgaccatcagcccctgtgttgtggcgcatgcttcatgcttgtttctgtaaaacaggtcattctctgcaagcatggtacatacattggccaaggtaattagagaggcttgctgtaaagcagtaggattgctggctgtagaaattgttgatgggctttttttgggggtttcctgccaaggaattctttcttttatataatctcaaaaaagttttttttttttggtatgggctgggttctatcaagggtttgttaaggctattagtttaccatgtagcagaaaaactagtgggacgtgaagttttttcacgtacattgtaatactttggtatttttgtctaccagatgaaactggaagtacagagcaaaaacttctctatcaaac

SEQ ID NO: 135428 - DNA, 1462 bp, Zea Mays
cgtcccacccctcctgcatttcaaaataatatctccctgcgcttttcctagccctttgtcatccaaggatacaataaacaaccggcgcttttacacccccgccaagaacaggagcaacaacaataaggctcctcgcaacaatccattctcatccatggcgaagctcatgaacaagctggtcgattcgttcgagcacgacgagatactggacgtcggctgcgtgcgcgccgtgctggccgagctcgtcctcaccttcctcttcgtcttcaccggcgtctccgccgccatggccgccggtacgtcatacgaccatgcgcccaccgcgcctctatcagaccgtctcctctccactcgatcgccctcctatttgttatttatccctctgggctctggccaggaaaagacaggtccttttccccctttatgaaacgtacgtggctctgcacgcgcgcaggatccgacgggaagcccggcgacgctatgccgatggcgacgctggcggcggtggcaatcgcgcacgcgctggccgctggcgtcctggtgacggccgggttccacgtctccggcggccacctgaaccccgcggtgacggtggggctcatggtgcgcggccacatcaccaagctccgggcggtgctgtacgtcgccgcccagctgctggcctcctccgccgcctgcgtcctcctccgcttcctcagcggcggcatggtgaccccggtgcacgccctgggcaggggcatcagcccgatgcagggcctggtgatggaggtcatcctcaccttctccctgctcttcgtcacctacgccatgatcctggacccgcggagccaggtccgcgccatcggcccgctgctgacgggcctcatcgtcggcgccaacagcctcgccggcggcaacttcaccggcgcgtccatgaacccggcacgctccttcggcccggccctggccaccggggactggacaaaccactgggtctactggatcggcccgctgctcggcgggcccctggcaggcttcgtgtacgagtcgctgttcctggtgcagaagatgcacgagccgctgctcaatggggaagtctgacgaccatcagcccctgtgttgtggcgcatgcttcatgcttgtttctgtaaaacaggtcattctctgcaagcatggtacatacattggccaaggtaattagagaggcttgctgtaaagcagtaggattgctggctgtagaaattgttgatgggctttttttgggggtttcctgccaaggaattctttcttttatataatctcaaaaaagttttttttttttggtatgggctgggttctatcaagggtttgttaaggctattagtttaccatgtagcagaaaaactagtgggacgtgaagttttttcacgtacattgtaatactttggtatttttgtctaccagatgaaactggaagtacagagcaaaaacttctctatcaaac

SEQ ID NO: 135429 - DNA, 835 bp, Zea Mays
gcccttttgatcacgaaaattaacaacggaacggaagctggtgaaaacgactagcagtgctgaccaagatgtgcgatgcaggtgaccccggtgcacgccctgggcaggggcatcagcccgatgcagggcctggtgatggaggtcatcctcaccttctccctgctcttcgtcacctacgccatgatcctggacccgcggagccaggtccgcgccatcggcccgctgctgacgggcctcatcgtcggcgccaacagcctcgccggcggcaacttcaccggcgcgtccatgaacccggcacgctccttcggcccggccctggccaccggggactggacaaaccactgggtctactggatcggcccgctgctcggcgggcccctggcaggcttcgtgtacgagtcgctgttcctggtgcagaagatgcacgagccgctgctcaatggggaagtctgacgaccatcagcccctgtgttgtggcgcatgcttcatgcttgtttctgtaaaacaggtcattctctgcaagcatggtacatacattggccaaggtaattagagaggcttgctgtaaagcagtaggattgctggctgtagaaattgttgatgggctttttttgggggtttcctgccaaggaattctttcttttatataatctcaaaaaagttttttttttttggtatgggctgggttctatcaagggtttgttaaggctattagtttaccatgtagcagaaaaactagtgggacgtgaagttttttcacgtacattgtaatactttggtatttttgtctaccagatgaaactggaagtacagagcaaaaacttctctatcaaac

SEQ ID NO: 135430 - DNA, 2864 bp, Zea Mays
cgccgcctccttcccgtcaagaccactcccccggccccacccgccgcccccttcttcttccctagaggcctagacctattccagccgagagtgacaatctccagtccaaagctctattgcagacctcgaatcttccacaaggggcattcgttagtgatggaggcgttcggtgggttcttcgtggacgagaaggcagtgcgagtggagaacatcttccttgagttcctgaagcgattcaaggagtcggatggcgcgggggagccgttctacgaggccgagatggaggctatgcggtcgcgggagtccaccaccatgtacgtagactttgcgcacgtcatgcgcttcaacgacgtcctccagaaggccatctccgaggagtacctcaggtttgaaccatacttatggaatgcatgcaagagatttgtgttggaacaccgggctggcgagaaccgtgccccaatcatctcagatgatagccccaacaaagatatcaacattgccttctataacatcccgatgcttaaaaaactgagagagcttgggacagccgaaatcggtaagctcacagcagtaatgggtgttgtcacacggacaagtgaagtgcggcctgaactattgcaaggcaccttcaaatgcctcgactgcggcaatgttgtaaagaatgtggagcagcagttcaagtacactgagccaataatatgcgttaatgcaacatgccagaaccgaacaaaatgggcccttctccgccaggaaagcaaattcacagattggcagagggtcagaatgcaggagacatcaaaagagatacctgctggatcacttcctcgttcccttgatgtcattctgcggcatgagattgttgagaaggctagagctggggacacggttatatttactggaactgttgttgcagttcctgatgttatggcactaacttcacctggcgaacgagcagagtgtcgcagggaagctcctcagcgaaaaatgggaggtgttcaagaaggtgtaaagggcttgaagtcccttggagttagggatctctcttatcgcctcgcttttgtagcaaattcagtgcaggtcgcagatggcaggagggaaggggacatcagggatcgggacacagatggtgatgacagcgggagacagaaattcacagaagaagaggaagatgaggttgttaggatgaggaacactcctgatttctttaataagatagttgatagcatatgtcctaccgtctttggtcatcaagaaattaagagggcagtgcttcttatgcttttgggtggtgttcataagataacacatgaagggatcaaccttagaggtgacatcaatgtctgtattgttggtgacccaagctgcgcaaagtctcagttcctaaaatatactgctggtattgttccaagatctgtttacacgtcagggaagtcatcatctgctgctggtctgacagcaactgttgctaaagaaccggagactggtgaattctgtattgaggctggtgccctgatgttagctgataatggcatttgttgtatcgatgaatttgataaaatggacatcaaggatcaggtcgctatacatgaagcaatggaacagcaaacaattagcataaccaaagcaggaatacaggcaactttgaatgcacgaacatcaattttagctgcagcaaatccgaccgggggccgttatgacaagtcaaaaccacttaagtacaacgtggcattgcccccagctatcctttcaagatttgatctcgtctacatcatgattgatgaacctgatgaaaacaccgactaccacattgctcatcacattgtaagagtccatcagaaacgtgaagaagcacttgcccctgcatttagcactgcacaactgaagcgttatatatcttttgcgaagtctttgaaacctcagctgagttcagaagcaaagaaagttctggtggagtcgtatgttaccctccgtagaggggacagtactcctggaactagggttgcttacaggatgacagttcggcaattggaagcattgattcggctgtcagaagctattgctcgaagccatttagaaagagttgttctcccagctcatgtccgcctggcagttaaattgctcaagacatcaatcatcagtgttgagtcaagtgaagttgatctctctgactttcaagatgctgaagatggaacaaacgtaccttctgagaatgatgctggacagccagctgaagaaggtgctgctcctcaacagcaggatgcagaaaatgaccaagcagcgggataacggtaagaagaaattggtaataactgaagaacacttccagagagttactcaagctttggttatgagactaaggcagcatgaagagtcagtcaagaaagatggagatggtatggctggcatgaaacaaggggatcttatcatttggtatgttgagcagcagaatgccaaaggcgcatatagttctaccgcggaggtgaaggaagaagtgaagtgtatcaaggccattatagagagactcatacagcgggaaggccatcttatagtcattgacgaaggcacagcggctactgccgaagatggcagtcgctcaagaacatcagagagcagaatattggcagttaacccgaactatgttattgattagcaacagcatcgtaacatgctactaactcaattcagctgatctgtttaactaacagaagctataatttgggtgatgtgtctgttgtgccctagcattgttgtatcatctccgtgactgatgtcattgcaagggatcacatgatctccaaaactatataattcgtacagtattttgctttcttaagttcacccttttgggtccatttaagggcttt

SEQ ID NO: 135431 - DNA, 1883 bp, Zea Mays
gaagtttcagatagattgttcaagtcaccggagcacggcatggacttcagccctcaaagaaagagcggcgaacgcgatcccgtcagcttcgtcgaacacgatgacagtgatgacgacttcggagctgaatccaccgcctctaataagccgtctgcgcattcgcacgacaggaccaaatccaagcccaagacgagccatggcagttcaacccacgcgacgacggcgacgccgttgcctccccaaagtagctccgagccaacagcggcgactgcgacggcgacggcgggcaacaatgccgacgccaacagcgtggacagcggcggcccgaggagcaacagcatggagagcagcagcagcagcaccgcctcaggcgccacgccggccaacgtccgccggcacaccggcggcgacagccagtgggaggccatccagctggccacgtccctggacgcgccgctgaacctgggccacttccggctgctcaagcgcctgggatacggcgacatcggcagcgtgtacctggtggagctccgcgccacgccagccttcttcgccatgaaggtgatggacaaggcgtccatcatcagccggaacaagatggcccgcgcgcagacggagcgcgagatcctcggcctcctcgatcaccctttcctccccacgctctacacgcacttcgagaccgacaagttctactgcctcgtcatggagtactgcagcggcggcaacctccactccctccgacagaagcagcccggcaagcatttcaccgagcccgcggccaggttctacgtcgccgaggtgctgctggccatggagtacctgcacatgctggggatcgtgtacagggacctcaagccggagaacgtgctggtccggaccgacggtcacatcatgctttccgacttcgacctgtcgctgcgctgcaccgtgtgcccgacgctggtcaagtcgtcgtctgtgcactccaccgggagcggcggcggcggaggcgtcggcagcgtcggcagaggaggagtggacgtcgcggacagcgacgtcattaccgccaaccaggggtgcatccagccgtcgtccttcttcccgcgcatcctgccccggcgtagccggaagccgtccaagagcgacctggggctcggcggcccgcccgcggtggagttcaacgcggagccgacggacgcgcggtccatgtcgttcgtcggcacgcacgagtacctggcgccggagatcatccgcggcgagggccacggcagcgccgtggactggtggacgctgggcatcttcctctacgagctgctgcacggctccacgcccttcaagggagccggcaaccgcgccacgctgtgcaacgtcatcgagcagccgctgcgcttcccctccgatggcggcgccgggggaccggcggtcagctccgtcgccaaggacctcatccgcggccttctcgtcaaggacccgcagaagcggatcgccttcaccaggggcgccacggagatcaagcagcacccgttcttcgagggtgtcaactgggcgctggtcaggagcatggtcccgccgtcggtgccggacccggtggacttccggcagtacggagctgccaaagacaagaaggcgcccgacagcagtacaacggcggccgtggaggcgccgccggttggaaagcaaaactccggcgagtcatacacggatttcgagtacttctaggacatactgtcgacatactacataatcttacgacttataaccatatatatacaagattagattaccttgatcgaggtttgccaacttctagaagcttgcgatattcattaaatatcatgcaatatcttgtaatacgattcttccatgtaccatttgactgcaaactaaattttgtaaatttagcc

SEQ ID NO: 135432 - DNA, 2843 bp, Zea Mays
atctcagcaacgatgcctcgtcctcttgcagctctcctctctaccgcttgcatcctctccttcttcatcgctctgtttccaagagctgcatcatcccgagacatcctaccactgggttcctctctcgtagtcgagtcctacgaatccagcaccttacaatcatcagacgggacattctcctctggcttctacgaagtctacacccatgccttcacattctcagtatggtactcaaagacggaggcggcggcggccaacaacaagaccatcgtgtggagcgcaaaccctgaccgccctgtccatgccaggaggtcggctctaaccctgcaaaaggacggcaacatggtgctcaccgactacgacggcgcagccgtgtggcgagctgatggcaacaacttcaccggcgtccagcgtgctcggctcctggacaccgggaacctcgtcatcgaggactcaggaggtaacactgtatggcagagtttcgattccccaacggacactttcctgccgacgcagctcatcactgctgcgaccagattagtccccacaacccaatcgcgtagtcctggtaactacatcttccgcttcagcgacctctcagtgctgtcgcttatataccacgtgcctcaagtctcagacatatactggccagaccctgaccagaacctctaccaggatggccggaaccagtataacagtacgaggttaggaatgcttactgatagcggggtgcttgcctcgagcgacttcgctgatggtcaggcgcttgtggcctccgacgtagggccgggcgtcaagagaaggctaactcttgaccctgatggcaatctccgtctgtacagcatgaacgattcagatgggtcatggtcagtttcaatggtagcaatgacccagccttgcaatattcacggtttgtgtggtcctaatggcatctgccactactcacccacacctacatgttcgtgcccaccaggttatgcgacgaggaacccgggtaactggactgaaggctgtatggctattgtcaacacaacctgtgaccgctatgacaagaggtctatgagatttgtgcgacttcccaatacggatttttgggggtcggatcagcaacatcttctgtcggtttctcttcgaacttgtagggatatctgcatcagtgactgcacctgtaaaggctttcagtatcaggaaggcacaggatcatgctatccaaaagcttatcttttcagtggaagaacctacccaacatctgacgtgcgaacgatatatctcaagcttccaacaggggtcagtgtttcaaatgcccttattccacgttccgacgtgttcgattccgtgccccgtcgtctcgactgcgatcggatgaacaaaagcatcagagaaccgtttccagatgtgcacaagaccggcggaggagaatcgaaatggttttacttctatgggttcatagctgcattttttgtcgttgaagtttccttcatttcgtttgcgtggttctttgttttgaagagagaactcaggccatctgaactatgggcgtctgagaaaggttacaaagcaatgactagtaattttagaaggtacagctacagggaacttgtgaaggcgaccagaaaattcaaggttgagctagggaggggagaatcaggcactgtgtacaaaggtgtcctagaagatgataggcatgtggctgtgaagaagctggagaatgtaaggcaaggcaaggaagtgtttcaggctgagctaagtgtaattgggaggatcaaccacatgaaccttgtgaggatatggggcttctgttcagagggatctcataggttgttggtctccgaatatgttgagaatggatcactggctaacattttgttcagtgaaggaggcaacatcttattggactgggagggaaggttcaacattgcgttaggtgttgcaaaagggttagcctatctccaccatgagtgcttagagtgggtcatccactgtgatgtgaaacctgagaacatactgttagaccaagcttttgagcccaagatcactgactttgggttggtgaagttgctgaacagaggagggtccacccagaacgtatcccatgtcagaggaacgctaggttacattgcacctgagtgggtttccagcctcccgatcacagcaaaagtcgatgtatacagttatggggttgtgctactggagctattgacaggcaccagagtttcagagttggtgggaggcacagatgaggtgcatagtatgcttagaaagcttgtcaggatgctttctgccaaacttgaaggggaggaacaatcgtggattgatgggtatctggattcaaaactgaatcgtccagtcaactatgtgcaagcaagaacactgatcaaattggcggtctcctgcttggaggaagacagaagcaaaagaccgactatggaacatgcagtccagaccctcctgtcagctgatgactgaatgggcaaataaaacatatgctacaacaacttcattgagttgacaattcacatcttgatggaaaaaaagaagaagaagcaaaaggccaacactccaggccatcctgtcagttggttttgggtgtttacccctgatataaattacctgtaaacagtgctcgttccaatttgtcactatatgatgtaagttgtagcatgtaatgtattgaacttgaacagttagatgtaaccatattcaagttaccggtagtgaaacgccatcgacctacgtgtgctcccttatctgaaattctgaatacctcttgtgtgtggtctcacgatggtgaaaaatatggaatccaattgacgtacctagcgcaagagtaaggatgtgtttgg

SEQ ID NO: 135433 - DNA, 2434 bp, Zea Mays
acctcccctccccagcgacatctcgtgtctctgttgggagctccttcaacatctcgtctctctcatcctccgacgccatccgctcccggcccggccgagccgcgcgttgtgtatggattccaaaagcaatcatacaggggctatggcgaggccttacaaacctaagaatatcctcattacaggagctgctggttttatcgcctcccatgtcgcaatccgcattaccaagaagtaccccgattacaagattatcgtccttgacaaacttgactactgctctaatctgaagaacctgcttcctgtgagctcatcaccaaacttcaagtttgtgaagggtgatattgcaagtgttgatcttgtcaacttccttcttgtcacagagaacattgataccataatgcacttcgcggcccagacacatgtcgacaattcatttgggaattctttcgaatttaccaagaacaatatttatggtacacatgtacttcttgaggcctgcaggattagtggccagatcaagaggttcatccatgtcagcactgatgaggtctatggggagactgacgaggatgcagttgttggcaaccatgaagcatcacagctgcttcctacaaacccatatgcagccaccaaagcgggagcggagatgcttgtaatggcatatgggagatcctatggactgccagttatcactactcggggaaacaatgtctatggcccaaatcagttccctgagaagcttatcccaaagttcattctcttggccatgagaggggagcccctccctatccatggtgatggagtcaatgtccgtagctacctctattgtgaggatgttgcggaggcatttgaggtcattcttcatcatggagaagttggacatgtttataatattggaacaaaaagggagaggacagtgcttgatgtggcaaaagatgtttgcagactcttcaatcttgaacctgacaaagtcatcatgtttgtcgagaacagaccttttaatgaccagaggtatttcttggacgatgagaagctcaagagccttggatgggctgagcgcaccccatgggaagaaggcttaaaaaagacaatggagtggtatgtagcaaattctgattattggggtgatgtttctggggccttactgcctcatccaaggacattgatgatgccagggtgcgaggggtctgaggagattaaaggaatactcagccggtttaataacattcaaacaaaggtcggttcaacatcagataatgctccagaaccgcatgccttcaagttcttgatatatggcaggacaggatggatcggcggacttcttgggaaaatatgtgagaagaaaggaattccatatgaatatggaaatggccgcttgcaagagcgttcttcactcgtcctagacatccaaactattaagccaacacatgtcttcaatgccgctggtgtgactggaaggcccaatgttgattggtgtgaatcgcacaagccggacaccatccgtaccaatgttgtgggcaccttgaatctagcagatgtatgtaggaagcatggcttattgatgatgaactatgccactgggtgcatatttgaatacgatgcacatcatcctgaagggtcaggtatcggcttcaaagaggaagatacaccaaattttactggttcgttctactcgaagacgaaggcaatggtaagtcggtaaatgcttgttacccttgcaactgttacttttgtctcaactcctaagttgacatatttcatgtttcgaatagtgaaagaaacaagtggctattctttcttgaaaaatgcaggtcgaggagttattgaaggagtatgagaacgtctgcactctgcgagttcggatgccgatatcctctgacctcagcaacccgcggaacttcgtgacaaagatcagccgttacaacaaggtggtgaacatccccaacagcatgacgatattggacgaactcctgcccatctcagtggagatggcgaagaggaacctgcggggcatctataacttcaccaaccccggcgtcgtcagccacaacgagatcctagagatgtacaagcagtacatcgaccctagcttcaagtggacaaacttcaccctcgaggagcaggcgaaggtcatcgttgctccgcgaagcaacaacgagatggacgcaaccaagctgaagaacgagttccccgagctgctgtcgatcaaggactcgttgatcaagtacgtctttgagcccaacagaaaggtgcccacagactgaagcccgaagggctggcacagctgataccgtacaacacagcaaccattagtgttagactatgtgtgtgggccagcactactttacttttgggctgtcggtctattagggttagagtcctgtgagtctatatattgtacctcatctcttatacaatacatttttgggctgtg

SEQ ID NO: 135434 - DNA, 2418 bp, Zea Mays
cgacatctcgtgtctctgttgggagctccttcaacatctcgtctctctcatcctccgacgccatccgctcccggcccggccgagccgcgcgttgtgtatggattccaaaagcaatcatacaggggctatggcgaggccttacaaacctaagaatatcctcattacaggagctgctggttttatcgcctcccatgtcgcaatccgcattaccaagaagtaccccgattacaagattatcgtccttgacaaacttgactactgctctaatctgaagaacctgcttcctgtgagctcatcaccaaacttcaagtttgtgaagggtgatattgcaagtgttgatcttgtcaacttccttcttgtcacagagaacattgataccataatgcacttcgcggcccagacacatgtcgacaattcatttgggaattctttcgaatttaccaagaacaatatttatggtacacatgtacttcttgaggcctgcaggattagtggccagatcaagaggttcatccatgtcagcactgatgaggtctatggggagactgacgaggatgcagttgttggcaaccatgaagcatcacagctgcttcctacaaacccatatgcagccaccaaagcgggagcggagatgcttgtaatggcatatgggagatcctatggactgccagttatcactactcggggaaacaatgtctatggcccaaatcagttccctgagaagcttatcccaaagttcattctcttggccatgagaggggagcccctccctatccatggtgatggagtcaatgtccgtagctacctctattgtgaggatgttgcggaggcatttgaggtcattcttcatcatggagaagttggacatgtttataatattggaacaaaaagggagaggacagtgcttgatgtggcaaaagatgtttgcagactcttcaatcttgaacctgacaaagtcatcatgtttgtcgagaacagaccttttaatgaccagaggtatttcttggacgatgagaagctcaagagccttggatgggctgagcgcaccccatgggaagaaggcttaaaaaagacaatggagtggtatgtagcaaattctgattattggggtgatgtttctggggccttactgcctcatccaaggacattgatgatgccagggtgcgaggggtctgaggagattaaaggaatactcagccggtttaataacattcaaacaaaggtcggttcaacatcagataatgctccagaaccgcatgccttcaagttcttgatatatggcaggacaggatggatcggcggacttcttgggaaaatatgtgagaagaaaggaattccatatgaatatggaaatggccgcttgcaagagcgttcttcactcgtcctagacatccaaactattaagccaacacatgtcttcaatgccgctggtgtgactggaaggcccaatgttgattggtgtgaatcgcacaagccggacaccatccgtaccaatgttgtgggcaccttgaatctagcagatgtatgtaggaagcatggcttattgatgatgaactatgccactgggtgcatatttgaatacgatgcacatcatcctgaagggtcaggtatcggcttcaaagaggaagatacaccaaattttactggttcgttctactcgaagacgaaggcaatggtcgaggagttattgaaggagtatgagaacgtctgcactctgcgagttcggatgccgatatcctctgacctcagcaacccgcggaacttcgtgacaaagatcagccgttacaacaaggtggtgaacatccccaacagcatgacgatattggacgaactcctgcccatctcagtggagatggcgaagaggaacctgcggggcatctataacttcaccaaccccggcgtcgtcagccacaacgagatcctagagatgtacaagcagtacatcgaccctagcttcaagtggacaaacttcaccctcgaggagcaggcgaaggtcatcgttgctccgcgaagcaacaacgagatggacgcaaccaagctgaagaacgagttccccgagctgctgtcgatcaaggactcgttgatcaagtacgtctttgagcccaacagaaaggtgcccacagactgaagcccgaagggctggcacagctgataccgtacaacacagcaaccattagtgttagactatgtgtgtgggccagcactactttacttttgggctgtcggtctattagggttagagtcctgtgagtctatatattgtacctcatctcttatacaatacatttttgggctgtgagtctatatattgtcgaacagcagaggaggtcgagggcggggctgtccgcccagatccacaccgccgccgcttctagggcaggtcgtcgtgacctggacctcccccgcacggacatcgct

SEQ ID NO: 135435 - DNA, 384 bp, Zea Mays
atggccacgttcccagttactaagcccgtgacaaagacgacgatcttctggactgtcagaagattcggtggagaagccaggcctgctgaagcgaggaatgcccaaactggcggacgtgccaacatcgcctacaatggaggaaatggccccatgcttgtggagcagtatgggcctggaataggtgaaggtgaatgtgggaaggctatctggtggatgggaacggaaggtgcttgtgtggtggcagaggctggcaatggcagcgtggtgaggatctttgtggcggtggtgatggggacggaggtggttttgatgcactctatgcttggcggtagcgagggtggcgctgcaattgagtttgtgatgagggaagggatgtcgtcgtag

SEQ ID NO: 135436 - DNA, 258 bp, Zea Mays
atggagcttcttgcaccctatggtgattggttggagaagagggatggagactcagggagcacaacaacagtttacatgagccagaagcagaaaaagatgcatacctatcctggcagctttccaaaagaaaccacggaatctgccattagagattatggggcgactggtgatatgggctgggctcttctcctcacgcacggtttggatgggtggaattgctccgacctttccattcttaggcccgtttggctcaagtag

SEQ ID NO: 135437 - DNA, 1059 bp, Zea Mays
atgacccaaccactgctatttcccactctaagtcccttgggaccgacattgactcggttattgccaattgtgaagggcacagacgaaggtgagcagacctcgataactttgaaaggcaagaatgatttatctaaagaagaagaagtggacaacccgtgtattcaaagtcttggaggcgccgcttttgagtattcatcatccttagaggaaaaggataaaaggaaaactgccgaaggtggcagaacttcggggcatgaaaaaactgcgggagagccaagttttgtccttaaaacagacacagtcgaacccactcagtctactggtgaagagatgaatgaacttggatttttcttgagacatcttggtggagaagagttgagcgaagagaaagctttagagctagaggacaaggccgaagccatgggctacgatcctagagctatgctttttgattatgaggaacatcaccctaagcatcaggttctcaaaaatcaaggaccagctcagcaaagtgaagaaacaaaaacttctacacagtctggcttacacaagtatcaagaggcttgcttctctacatcttcttgggattcttttgtcggcgtgaacacacgtcagagatgttacgtagggactggcatcaagacgagacgacgaaacaaagagtgcagtaaggagctagagaacgacgacgggccaaatagaggagttcgcgcgcgtacagggaagaacgacaaactgggagagttgcacgcgtcctcggcgcgcaggtacgagctcggcgagaaagtagagcgcgcacaagggagcaggccgggcgcggcagtaggcgtggctggggaaaaactcgaccggcgcagggcacatggccaggggatctggcaactatcaacgtgccccggaaaaattcgtcgaggcagaggaagtgccgcgcgcagggagatgctccatgtcgaggagactcagccggcagaggaaaacggagcgccggccatgggaatgggaggacagcagggcgcgacgctgggagatctggccgggctgggagagcgacggccgtaa

SEQ ID NO: 135438 - DNA, 2305 bp, Zea Mays
ctttcattctctccagccgaaacatctggccggtggcgtttctctttgccgcacagccgccctatggcatgctgttgtccttcgctccctcgtttgtttttggttctagcatctacagtcgaccatcttttctcggttggtactttacgcatggccatctttgctttggtgttgcacctactctctgtttctattttctttcacttcttcaacaattttctagccaacgtgttctctgtacacgtccgcttgcaatggaggtgcgtgctgcatacatgcgcatgctccttttctctctgtttgtgtttttttttcttttttttcttttcttttctttttcttcagctgcgcaagacataccggccgccagggagatttgctcctggccgaacgcgcccgagtgcctcggtacggccgttcctgcgcggcagggcgggaccccgcggactctcccgccggcgagtgcgtcccctaggttgggcacgccgccgtcggtggtccctgccagccggtaagaaaaaaaaaaaacttcgactgtaccaaccttttcaagaactaatgtacccggatctagcctccaaatcgaatgcctctgtgaatgaatggatgttttgtaacgggatccgtaaagaatcgcagatccgggcccccgcgatatttctgttattttctgtgatgattttagtgcatctatgcacattcacgcggtttaaaaaaaattagggttctaaccgtaattttattctgtggctttttcttatctgttcttgaccgtggttcataatcacgagtctcttttgtctctgttgacagatgtaccgattagggttaggtcataaaccctaaccctagacagttatgtgagagctctctcgtttgaggccgagacacactgtgtcttttacagtggccagacctaaaatcttagggttagagaaaaccctaatccgagagcatcaaccatttctttctattctaatctctgttctaggggtgatgaatgatgataaaaaaaaatgagttcatcacatatatcctagacctttctgtgatctcataaaacgatgcggattaggagatctagggttcttaggtgcctctgataccattgttagattttctggtgcttaggatcgtttcctaagtccctagaataccaatccgtgtctaaaatacctcgatgatgagtagatctattctactgaggggtataggttaacataccgtcgttgttgttcctagccatcattgcggcggcgtcttgcagcgaagacccgcctcctccttcttgtcgatctccctgctggtgtcgaggagattggttcccgtcgttgatcggcggtggatcagctcctccaatgttgcctgcagggggaatctcagatcccgatgggataacggggatctgagacatagtcacagcgattcaagtcactccgagcgcctaggggatcggttcctctcaaagtgttgattagggtttgtggtcgagcgattagcgttggctaaacccgtcggcccccttaatctatttatatggcgtcgtgtgaccgggggctgcaaccaacggttaggatagccccccgatcaggggcgcggttagacggttaggattaaccctaccccggttactgttaaccggctagtgtagaggacacatcctaacagctccatgtcgaggagactcagccggcagaggaaaacggagcgccgaccatgggaatgggaggacagcagggcgcgacgctgggagatccggccgggctgggagagcgacggccgtaaataacagaggcacggcgaacttgagagagccgagggagatgggcgaactgggaagaagctgcgcgacgcagagctggaggaacagagggcacggcggccagggcagggagctcagggaaaagctcggcacccatgggagacagggaagaacgcgatgcgctggggaggaaataaagtcatccgttcgctggaagataagaaaactcgagcatatcatcccgcacggcggccgcggactgcgtgtcccaccacctgtccacgcgccgcgggagacgtgcactgcgtgcgtgaggaagccaggcactgggagctacgcgatggaagctgaagtagatacgtggaggagataagattgtgatgagcgtgaaggagtaggagatatttttctttttctttttaatttatttaaccgaaaaatcacagatattttggatcccaattgtcttagcgatgtatacgatgtagacagtaattttgacacggtttaatttgatttaaacccgataaatctttaacggct

SEQ ID NO: 135439 - DNA, 2924 bp, Zea Mays
tgctcgtctctcgtgcggcgccgagtctagcctcattctcaacaatccatctccacagccaccgccgcgcctgccctggcaaatggagttcgacttcgactcccatggcggcgacgcttggctgctcgacgccatgtccacgtcgctccacttttcggccgtttcgcccccggtgccgtcgccgtggccgtgcggcgacccgcatcatccttccatgtggctggacacggttgccctgcaagacgacggcccgagcgtccccgccggaaaagctcacagtagctctcatgtacttcaaggagtctaccaagcagcatttgttggttcaagtttgggtgcctatcaggaaaggggaccactacatgctaagcacttcagggcagccctttgtgcttgacgaacagagcatcggacttcttgattatagggctgtgtccatgatgtatacgttcgctgtggatggggatagtgtcgaagaattgggtctacctggacgcgtatacaagcagaggctacctgaatggacgcccgatgtgcagtactacagcagtattgaatatgcacggcttaaccatgcaataagttacgacgtacatggtactgttgccttgcctgtgtttgattcttccatgaagtcatgcatcgctgttgttgaacttataatgacatcaaagaaagtaaactatgcaagagaggttggtgaagtctccaaagctcttgaggccgtgaatcttaaaagcactgaagttatcgaacatccatatgtccagatatttaatgaaggacatcaaaatgttcttgtagagatgttggaaatcataacagtaatttgtgaagagctcaaactacccatagctcagacttgggtgccatgcaaataccaaaatttattgatacattgtggtggtgaaaataagagttgcttcgatattcatgaaagttgtgcccaagaactatgcatgtcaacaagtgctgttatgtttcatattatcgatgctcatatgtggggcttccgagatgcctgtgtagagcaccacctgaagaagggacaaggggtttctggaaaggcttttatcctacgtaggccttgctttacgaaagatgttactagattctctaaaatggagtacccccttgttcactatgctcgtatgtttggattagctggctgtttttcgatatgcttgcaaagtgcttataatagaaatgaggactatgtattggagttcttcttgccacctgattgtagagaagatggtgagcaaaaggttcttttggactccatcttagctctgctgagacagtatcttaatagattgcaggtagccactgacgaaggctcaaatgaagtttaccttcaagtcgatgctattactataattgaaaatggagatataaagaatgcacatgtacaacatatgaactgtgaaggtggcattcatgcatcagatgagagaaatatgcatgtaatccatgagtctgacagccagaaaagaatatccccaacagaatctgaaacatgtccatcgcctgataacaccaaatgcaatgacaaattatttgctagacaaaatggtggatgtatctcagattctttattgcttgaaaacaatagcaagcatagtggaaggagacaaggaaaagaagaaaaaacattcagtttagaggttattcaacagtattttactggaagcttgaagaatgcagcaaaaagtcttggagtatgtcctacaacaatgaagcgcatttgtaggcaacatggtatttctcgctggccatctcgacaaatcagcaaggttaaccgtactgtttcaaaattaaagaaggtaattgaatctgttgaagggcatgagggtgcatttactctcacatctgtcacaggtcctcttcctgttgcttttggtccatccaatcctatcagtataaagaaccaaagccaaattaatgtttctggacttcccattccttctgttcaagaaaacagagactcatcctcacagagtaagttactagaaaatgatattcaccgaagcactcttgttccccagaaaagctttctagctaatatcaacagacagattgaagcagagaaagcttccaactcgagaaattcatcgaaagattgtagaacacattctgggagatcagaagaatcctaccctgttagccctgcaaacatgacatttgtttcaacactcctagaaccgcaacaaaacatgtacatacaagatggcttcacaaaagagtcttttcagaaagaggacctgcggtttcatgggatgtttgttaacggatcaggaagcttgaaagattgcatgaaccacatcacttctgcagttaacggaacgattatagggcatccaggaagtctcacgactgcacaaaattcagggataataacatgtccaggcagtctcatcagtgcgcagaattcaaggatagtaacagtaaaggcacgctacaaggaagacttgttaaggtttcggttcccatgttctggaagctttatcactttgaaagatgaggtggccaaaagaatacaaatggatggtgttctttttgacatcaagtatcttgatgatgatcatgaatgggtgaagttgacatgcgacaccgacttagaagagtgcatggagatctctcgggcatctggtagcaacgttttgaggctgctggtcactgacattgctccagtccttgggagttcttgtggtagcactggatgattttgaatgtttatgaatcggcatagtagtataatgcagtggccaaatctagctagctgatatttaggctagccgcttcggttcttaggtacatcaccatcttttacaggtatttctcattttgtgtagggaaatctcaggtataaatcatttcctttgaaacaatggaggtatttggtttgaggaatcacttcattc

SEQ ID NO: 135440 - DNA, 869 bp, Zea Mays
taataaatagttagttacgattggtaattttacatttttatggtttaaatcttccttatggacatattacattggagatccaatatatgatttggttataatcccctgtaacagaaggtatatttgttgaatgttgagttgtgcaatgaatgaatcagatatctgaaggggatctctatggcgtgttgttttttaaaattggaaataccatgttggttatgatccatgaattcttaagtttgtgtagctgaaagtttacatacaacctttttcctttttccagagcagagcaagagggaacacaactttcagctcttgatatgcaaccactcctggactttgtcaagaggggtaatctgcagactgaattgttctctgttgggctgaaccaacatttggtcacctcaatccatgaaaactggttttgcgcccgctgcattaacagcacaaaaccagaaggtgaaggagtaatagttatgcagattggagcttgcttattagtcactatgtatgctggttctcttgctgcagcttcgcaagcaatggtggctgctgatcagtttgcaatacagtttaaccggaggagtcactaatttccagtatagtttcatgagtgatgttgatcgcaatttgttagtgtttgggatgatagtgctggaatgccgtagatgaccttatgtaacttgtaatgttacgatattctcggccgtagttatgctaatataatagcgaatattgactaatactgatgttcctagtgtgaggttgaagaagctcatgttgaatttgtggaaagtttccaaagcatccaaaagcttaaaagggacattagtttttcatcatttctcaatgtgagctcatgcaaaaca

SEQ ID NO: 135441 - DNA, 1622 bp, Zea Mays
ctaatccccaatcccagttcccgttctattcccgggaggagacggcgtcgtctctcgctgtctccgcgttcgtgccaatccaagcgaaacaaacggcgtgacgggagccaagagcccgagagcgccctccgcggccgccgcaccgcgtcgtcgttgtccccagccaacccaacccagcgcaatcccaaacgaatccagccccacctcagccgctgcgcggacctccgaatcccggcgccggtgcgcgcagggcaccgcagggcgcggcgcggccatggacatggacagcgtggagtgcctctccctcccggacgctgccatggacgtggacgacatcgaaggccgcccgcaccacggccatctcggcctcccgctccaccccgcccacctcccatcctcaggtgccggccgcgcgttccccaaggtgaatgccgggggcgccgtggcgggcccggcgggagcggcgggcacagcaggagcaggcgtggggccgccggcgaccagcgtgcacgagctgctcgagtgccccgtctgcaccaactccatgttcccgccaatccatcagtgtcaaaatggacatactttgtgttcgacatgcaaggccagggtgcacaacaggtgccctacatgcagacaagagcttggtgatatcaggtgcttagcattggaaaaagtagcagagtcacttgagcttccctgtaagtactgctctttagggtgcccagagatcttcccatactacagcaagataaagcacgaagcacagtgcagcttcaggccatatacctgcccctatgctggttctgaatgtgctgtggctggtgatattccattccttgttgcacatttgagggatgatcacaaagtcgatatgcacagcggctgcacgttcaaccatagatatgtcaagtccaacccgcgagaggttgaaaacgccacctggatgcttacggtattccattgttttgggcagtacttctgcctgcacttcgaggcattccagctcggaatggctccagtctacatggctttcctccggttcatgggtgatgagaatgatgcgaggaactacacatatagcctagaggttggtggtaacgggaggaagatggtgtgggaaggtactcctagaagcatccgtgacagccaccgcaaggtccgtgacagccatgatggcctcatcatccagaggaacatggcgctgttcttctcgggcggtgacaggaaggagctgaagctgagggtgactgggcggatctggaaggagcagaccaacccggacggggcctgcattcctaacctttgcagctgagcaagggagacgtttggaaagcaaaaaagaaagaaaatacggtgctgtttggctggcttgtctcaaaattgccacgttatgctttcatcatagtgtctgccgttgaaatgttgtagtagtaaaatcgtagggtgtaaaatgttttcttgtaaagtcattgtgtataccaaccaaattcaagaaagcttacaagttggcccataaatgcatgtgctacgttcttgtgtagtttgagttctgttatcaaggtattgggctcaggaaatgctcagtgttcatgtttatttgatagactattagtgttatcgcg

SEQ ID NO: 135442 - DNA, 1347 bp, Zea Mays
gtccccagccaacccaacccagcgcaatcccaaacgaatccagccccacctcagccgctgcgcggacctccgaatcccggcgccggtgcgcgcagggcaccgcagggcgcggcgcggccatggacatggacagcgtggagtgcctctccctcccggacgctgccatggacgtggacgacatcgaaggccgcccgcaccacggccatctcggcctcccgctccaccccgcccacctcccatcctcaggtgccgcggcgggcacagcaggagcaggcgtggggccgccggcgaccagcgtgcacgagctgctcgagtgccccgtctgcaccaactccatgttcccgccaatccatcagtgtcaaaatggacatactttgtgttcgacatgcaaggccagggtgcacaacaggtgccctacatgcagacaagagcttggtgatatcaggtgcttagcattggaaaaagtagcagagtcacttgagcttccctgtaagtactgctctttagggtgcccagagatcttcccatactacagcaagataaagcacgaagcacagtgcagcttcaggccatatacctgcccctatgctggttctgaatgtgctgtggctggtgatattccattccttgttgcacatttgagggatgatcacaaagtcgatatgcacagcggctgcacgttcaaccatagatatgtcaagtccaacccgcgagaggttgaaaacgccacctggatgcttacggtattccattgttttgggcagtacttctgcctgcacttcgaggcattccagctcggaatggctccagtctacatggctttcctccggttcatgggtgatgagaatgatgcgaggaactacacatatagcctagaggttggtggtaacgggaggaagatggtgtgggaaggtactcctagaagcatccgtgacagccaccgcaaggtccgtgacagccatgatggcctcatcatccagaggaacatggcgctgttcttctcgggcggtgacaggaaggagctgaagctgagggtgactgggcggatctggaaggagcagaccaacccggacggggcctgcattcctaacctttgcagctgagcaagggagacgtttggaaagcaaaaaagaaagaaaatacggtgctgtttggctggcttgtctcaaaattgccacgttatgctttcatcatagtgtctgccgttgaaatgttgtagtagtaaaatcgtagggtgtaaaatgttttcttgtaaagtcattgtgtataccaaccaaattcaagaaagcttacaagttggcccataaatgcatgtgctacgttcttgtgtagtttgagttctgttat

SEQ ID NO: 135443 - DNA, 713 bp, Zea Mays
ctaaacatcatcatatatttaaaagtggagagatctattttctattgctggtcttatgatccatggttaacaagtaaaatgtgtattctcaaataacttgtcggttcaggtattccattgttttgggcagtacttctgcctgcacttcgaggcattccagctcggaatggctccagtctacatggctttcctccggttcatgggtgatgagaatgatgcgaggaactacacatatagcctagaggttggtggtaacgggaggaagatggtgtgggaaggtactcctagaagcatccgtgacagccaccgcaaggtccgtgacagccatgatggcctcatcatccagaggaacatggcgctgttcttctcgggcggtgacaggaaggagctgaagctgagggtgactgggcggatctggaaggagcagaccaacccggacggggcctgcattcctaacctttgcagctgagcaagggagacgtttggaaagcaaaaaagaaagaaaatacggtgctgtttggctggcttgtctcaaaattgccacgttatgctttcatcatagtgtctgccgttgaaatgttgtagtagtaaaatcgtagggtgtaaaatgttttcttgtaaagtcattgtgtataccaaccaaattcaagaaagcttacaagttggcccataaatgcatgtgctacgttcttgtgtagtttgagttctgttat

SEQ ID NO: 135444 - DNA, 2687 bp, Zea Mays
cttctccacccagatttccaggctcccatcctcacctctgacactacgccccgtacctcgtgcccactgccaccaactttgctctcggtgctccgtggcttcgccttggcacgcgccggtcgtgcccgcggcctcgctcctccactagcataggcacaggtgaacccgcacagcgacataggcggcgcttcgcgcctggctttgcctcggcacacgccgagtcgtgccttagcccccaacccccctcttgcacaggtgcacgagatatctccaacctcgcctccctgctgattagtcgtcttgtgtcttcaacattacgaagtgatgatggccttctttttcctgaaaggatgatgactatcttgctcctatccaagctgatcgagaaaaagagttgaagtttgtgcagtaggttgaactccacagggtagaggaagctgcagcaagagaggctgctcttgaaaatcaaaagaaagaaaagaagctaaaaaagaacacaagggagaggttagattccccaacatgtccagtttgtccgcaaggtttttgtggggatttcaaacaaacattaaccccttccgggttggattggaaaatggactgcggactgccttataatccttgggggcatgctgtgcacgacatggccaccgagagccgatggatgccagatgagaagaagctggcttctgctgccactgagaaattcgaagaggaagataatacctcctattgtcaacagtgatgtgtcaatggagtgtgtatagcatgaaaaaaccaaacatgacagttcaagagagacatttcagaactgcttagtttgtatatcccatgagttatctcctaacatcttttaactgcttcaacattgcatcgaaagcaatataggcatgcctgatgatggagagatagatattttcatcgaagctgtcggtgacatgctatttgagttgcagaaacatttcatattttctattattatatacataggtttttgtatggagaaccataaaatatctgtttggaagggacgagatttgaaggtgatgaggctccttaaagaaggtttaatggaacaaatattagcataaggagtttgctggccatgtcaaaatctctatgggcagattctaactagagacctctaaaggttcaatgagatgaacattcatcaagtcttcgtctagatagaatctcatggtttcaagactgccttcaggttttggatccttggaactcattcgctgcacccagtcactgcctcccagatcctcaacatatggatttccccaattttagtgttgacaatcctcacttctaggaggtccattgtgatatctactttgaagtgcatgccatcaacaatactttgacgccactatttgtggcactaaactttgaaggggttgtagctaactgattgcaatcaattgaactcagggccactcactatttggaaacgtcagcagctaatttggacaacttgcaccttctatctatcttcaacaactaatttcgacaatttctgactttcatttagaacaatcatctactatttcggaattggaagaagagcgcacatccctcctaaacctcatttcttactcgctgtttcgaatcaagaacaaccgttttggacagcttgcagcttctatacagaacaggtcatttgtacatcttgcaacctgtacatactccagatacgctttgtccgataagcacaaatattacctttatagtatgcatcttcaggtttttccactcacgcctcaaattttattccagcctttgtatctcatttcaataagtagctgtgctcagctgcttaccacacatcaaaaaggtaactcctatctatatacctcccagattttacccacttgcaaaatgtttgcttacacgcataatatttactcaacttataatgaaactaacattaaaaaaagtaaatgttatattcagaagatgtactccccatttgtatttgcaaactcaaatgaacatattttacccttatttactgctttgtaaaaggatacgtagactccacaaataaagttcactcatatactcaattagaacataatgaactgacactttatgattacaaccaacatactctcaaatctgattctaaataacatgcttccaaatctgatactgaagaagaaactacaaaggtacaattcgtccaccttattttaaaaattgataaacacaagtacatttgtaaaatgagcgtataaaaatgctccttttcccttttataggaccaaacaacgatcgatggacaactcaaaaggaaaaaaaataatatgccctcaatggaagctcctccaaaaagaattggagcatgcacatacgagtagcagagtagcgacattacattatgggggagaagatctcccataggtggggagctgggaggtacagttgttgatggcgcccacgacgcacaggcccttgacaccatccttgtccttgtagtcccctgacaaaacagaaaaaacgacgcatgatgaccatgagcacaagattgcgtgtcagattcatcttggaacgaggggcgtggtcgcttaccgtcgtagttgtaggtgcagaggaagtaagaagaattcgttaattactgttatagagaataaaatgaagtagatggcttaatctaggctgtcgaatgtcattatcat

SEQ ID NO: 135445 - DNA, 342 bp, Zea Mays
atgggaaaccttaacctcaattctcagtatgctacattccccttccttggctcatactctggattacttcaacccgaagcagacataactaaccaggtactttctcctatggccccaacatgtagatatcgacatggctccttcattcctcatagactgaacgctgatggaagccggtttatgcatgacattaaacacccagctagtagacatgatactacgctaaactttggagctaggtctagtaggcagactccttcatcctacccagaagacactgctctagggattggaggtgctcgtccattacaaggttctattgtgcattctcctcttccttag

SEQ ID NO: 135446 - DNA, 373 bp, Zea Mays
attttggagttacacaaatccaaattgcaacctgcatcacatgtataggtagctcggtatggaaatttgtgcatatttttggaggaaactgaatcatttcttgccaatttgagattcagtactggtgctttgcatagagatgtattaatgcaagatatgtacttccatggcaaatggactttgcacaatatgagatgctacttactgagaatgttgaacaacatgaaccaaagtaagagccttataaaacatccagctatgaggatactgcagtacacatttatgtttagggctagtttgggaactctattttttcaagggattactatttttccaagggaaaatgaactaattttctttgcgaaaatgagaa

SEQ ID NO: 135447 - DNA, 387 bp, Zea Mays
attttggagttacacaaatccaaattgcaacctgcatcacatgtataggtagctcggtatggaaatttgtgcatatttttggaggaaactgaatcatttcttgccaatttgagattcagtactggtgctttgcatagagatgtattaatgcaagatatgtacttccatggcaaatggactttgcacaatatgagatgctacttactgagaatgttgaacaacatgaaccaaagtaagagccttataaaacatccagctatgaggatactgcagtacacatttatgtttagggctagtttgggaactctattttttcaagggattactatttttccaagggaaaatgaactaattttctttgcgaaaatgagaattccgtggaaaaat

SEQ ID NO: 135448 - DNA, 380 bp, Zea Mays
cgtagctctccccggcgatgtagaagtcgcggtacttgtactgcgggaacctctcgaaccacctcgccagaaacttgtacgaatcatgagctgttctcctgtcgccggagtcgtagaggtcggaggtggtgttggtgtaggagaacccgacgccggcgggcgagtccaagaacaggatgttcgccgctctgttccagcggtacgcgttgaggaagagcgtggcgccgtcgggccggatgcggaacgcgcccagctcctcggacgcgccgtacgccaccgacgagcacccgggcccgccgttcagccacagcaccagcggcgccggctgcgcctccgcggccgcctcctgcagccagtagaacagcgcccgccccgcgccc

SEQ ID NO: 135449 - DNA, 3204 bp, Zea Mays
acatgtggaaagtggcgtccggatgaatcacggagacctgaaattgatgacgcccccgttttcactccgactgaagaggaatttaaggatgcaaccgaatacattgctagcattcgcccgcaagcagaaagatatggaatttgtcgtattattccaccatcttcttggaaacctccgtgtcctctgaaggagaagagtttctggaaatgtacagagttcaatactcgagttcaacaagttgacaagcttcaaaacagggagcccacaaagaaaagaacacaacctcgagttcagaggaaaagaaagagaagaaagagactgaggtttgggatgacacatagacgtcctacttcaagtgcggactctgaagagaaatttggctttcaatctgggtctgacttcacatttgaggagtttcagaaatatgctgatgagttcaagcaggaatattttggaatgaaaacgagtgatgaaatttctatttgtgaaattaagaaccacataaaaacatgggaaccatcagtggaggagattgagggggaatattggcggatagtcataggccctgctgatgaagttgaggtggattatggtgctgatttggacactgcaacctttggtagtggttttgttaaattatcttcttcagatggaaataagcaagatccatatggtgtgtcttgttggaacttgaataatctgccacggctgcctggatctgttatctcatttgaggaagacgatatatctggtgttgttgtcccgtggctttatgtaggaatgtgcttctcttcattttgctggcatgtggaagaccattttctttattctttaaattatatgcattttggtgaaccaaaagtttggtatggtgttcctggtggtgaggcagtaaagctggaagaatctatgagaaaaaacttacccaaactgtttgaagagcagcctgacctacttcatgagctggttacacagttatctccatctgttctgaaagcagaaggagtttctgtttaccgtgctgttcagaagtcaggtgagtttgttctgacactaccacgagcataccattctggattcaactgtggtttcaactgtgcggaagcagtaaatgtcgctcctgtggattggctgcctcatggacagtgtgctgttgagctctatagagatcagcatcgcaagacatcaatatcacatgacaagttattactgaaggctgcaaaagaagctatcagacaactttggatgaacgttttgaattgcagaagtggtaaaggagaatacagatggctgaacacatgtggaaaggatggagtcctgacaagtgcaattaagacaagagttaagatggaggttgctgcatgggaggcaaatgttcctttgaaaagtaagaagatggacaaggattacgattccaatgaccgagagtgcttttcatgcttttatgatctgcacttgtctgctgtcagttgccagtgcacacctgaccgctttgcttgcttaaaccatacaaatcttctttgttcatgcggaatggacaggaaaatcacattctttcgatatagcatggaggagcttaatactcttgtagcagctctggagggtgatctggctgcagtttgttgctgggtacaggaccacctaggcttagtttgccaatcaggttctctgaagcacagcaaaatggactcatgtaaaagcacagaattttcaggattagctattgatgccaatcatgtttctgtatttggtggtattcaaaatcagtgccatgaccttcaaaagccagcaggattccagcaagagaaaggaatccaggataattgtcttaatctcaacatagaagatccaccatgcagttccagaataaaagaagagcatggcaaggataggatgtttcttgatcataggcctttacagaaaactgacagtccatttagaatgagctctgagtgcagttcttcattgtctttatattgttcaggcaacttagtctctccttcaagaaatcaagctagcaattctggcctagcttgcaacactactaagaaactatttggcgttgacattggaaatttagcaaagcattctaatggtcaagttggtcaaatggtaatggcttcagggcaatctgatgcatcgtctaggccaatgtccgggcaccaggttgagccactagactatggaatggtaatgattgacaaaaggtggttcaataatcaagctattttccctaaaggtttcagaagtcgagttacattttacaatatacaagatccgacagcgtggtgcttttatgtttcagaagtcctggatgctggacctcttggaccattgtttaaggtgaccttagagcaagttcctgatgtctctttcactcatacctcaccgatgagttgttgggatagtgttagagacaaggtgaatgaagaaatagaaaacctacaaggaattggaaaatgtggcgttcctaattttttaccacctgattctgtaaacgggctcgaaatgtttgggttcttgtccccacaaatcgtccaggaaatcgaggctctagatccccatcaccagtgtttagactactggttatcgaagtctgcagtagttcctgcgtcaatgaggacacttgagaagctgccaaagaaggctaaactgccagatggacagaaactatctagcatataggagcaacgagcaaggacctgagaaggtaggcgcattctgcaggatgaaatgaagtaatagaataggtaaattaggcctgaatagatagaacatgtcaagtgtcgcctcagaatgactagactaaactggtcaccattgatttacagcttgttcgctgcggcttgctgcggctgcaatccggctgcggctgcggcttctacagtatttttctctctatggattgcagctgcagcagtccaaacagctgcaacagtgtcggcttgtagccagccgaacacgcccttacttttttacagacagcttccaatgaccgtactcattttacattcttttattcataaggatggcaggatggctgatttgtccactgattgtttccctgattagtcaatttcatggcaatcaatatatgggctatttttttttttgtctcagacatagtttgcatgtacaaaacattcggtgctggaaatccgaaagatgtgaagtttattgattatggttaacctaattgtatta

SEQ ID NO: 135450 - DNA, 1310 bp, Zea Mays
gggcaaagaaaaatcagccgccgctctgcttcagcagaatctcgccgccgaagcgctcctatccttatcccctgcgcgccgtcgttatcccgtcggccgccgctgttctcgccttcatctgctcggtcgcgcgctctccctggtactttcctggcgcgcgcttctctagctcgtggagctcctcctctgccgagcgattttccactgcgggcgcagctccagctcgtccccatggcggtcgccgtcgagctccctcgcggcgactttcccctgccagctctttgcccattcctggtcgcgtctccctcctctgctcgcgtcccgccatggccgctgtccggccgagccctgccccagccggatctcgcctctccctacagttcgctctctcccccctccatctctctccagtcgtgcgcccctccgctctgcgtggagtttccccgtcgtgcccctgctcatcttcccttggccgcgggcccttgccatgctcgccgagctccctctggtcttctctgctcgccgagattctccctggtgccgcgtcgtgccctcccctcggttttcaacgttgaacgccgccatctttctggtgttctgcgctggccgcagatcgaagctttgctgtgcgcccagtcgagcgatcccctgcgcgcgcgttccctgcacttgccccagccgcgctctggccgtcccagctccactcggcgccccctcggctcgcccccatggtgctggtcgtgtccctcggcgccggtcgcttcttcttgctattccatgccgcggcaatcgccctgctgctccagtgcgcccagccgagcgattctctgttccgtgcgcgcggtatttctcgagcatgccgcgcccagtccctgctccttgtttttctctgcgacgtggagtctcctcgccgcgcggatctctctccttcctaccatgttcggattgtgccgcgcttcctgtcgcgttcggcctgctccggatccgaagttggtcgcctcggtgcgaaatcgccgtcacgtccggggttttgacatgtctccctgctcgccgtcaaacttgggttccctgctcagcctttagcgctagcgcgtcgccgtgatgttaccgtctcgccgtgattccctgatggttcgtgtctctgcatgttcaaatcgtcgttccgcgcgtcagcaagaaattccaagaatcgggtgaagacgaagctagcagcgcgatattccctaagcgctcgacaaattgcctggatcggaaaatcgctaccgatctcgcggattcgtgtcagctgttgaaacggtaagttgatgaat

SEQ ID NO: 135451 - DNA, 1754 bp, Zea Mays
ccctctgctgcaagtctgcaaccgcagcagcacgtccatttcacgtgccctttcctccctccctttcccctgcccccacgccacctccgttcgccgccgcccgccgcgccggcgatggcgatgaccgaagggcttgtgcctattacgcggacctacctcgcgcgctactacgacaagtacccgctgcccccgctgcccgacgccactacggacctcgccgcccggctccgtgctctctccgccgacctcgctgccgttgctcccatcgccccagatgaggagctcttggaacaagaagcagctggcatacctgcccacaaaattgatgagaatttgtggaagaaccgagaacaaatggaagaaattcttttcttgattaacacatcccatcgtcctgtggctcttcaacagaagtccaccccagaagatgctgagatagtttgtacacttgatgatatagaagctaaattgaaggatatgttgaagaacttagaacaatttcagttgaaaaatgctgacaatgttttcaatacagttatgacatacatgccccaagattttcggggtactctaatcaggcaacagcgagaacgctcagagagaaataagcaagcagaggtagatgctctggttagtgctggtggaagcattcatgatcgatatgcattgttatggaaacagcaaatggaaaggagggtgcaattagcacagcttggttctgcaacaggtgtatataagactcttgttaggtatttggtcggtgttccacaggttttattggattttattcgacaaataaatgacgataatgggcctatggaagaacaaagagaacgttatggtccagccctttacacccttacaaaactggtgcttgcaattcggttgtatttgcatgtctctttggcacgatatggacaaaggaaaattgaggtctttgtgaatgcaccattctttatatctgctgaggatgcaggtgccgtggatgcaaggaaaagtgatgagtacaaagaaactattattccagctggaaagacacatgaggtcattttgagtgttgaagctgtaaactcatacatcgcatgggacttttccttgcaacaaggggccctcaacatggtattggacattggctttcatgtggagtacattagcccttcaggggagaaaactttaattcttccataccgacgatatgaagctgaccaaggtaatttttgcactgtttcatcgggatcatacaaacttgtgtgggacaattcatattcttcattcttcaaaaaggtccttcggtacaaggtggatgctgtgccaccggttgttgagccggccttgtcagccacggaactctgaagaggtctgtcttaatataatgatgtaacgagggccgatgcatgcccgagtatagctgtacaaatgtttctgaaggccccacacggtgctgttactgattattccatcgaatgctttgcggtgttctgatcgcagcattccctgatagctcgctgtcagagcgcatggatatgtactttgtgtgcacatggctgcggccacttgtcaccgacgaatgcctgaatataacagaaatgtattatatcgaccaataagagcatgtctgattggaagctgtcgtggtttgtttttattttttttctcgaatacggagagctgtgtgtcattgcaccaggaagaggaagagctgtggacgtgctccctggaaagagcatcccctttggctaccaattgttgaattt

SEQ ID NO: 135452 - DNA, 1035 bp, Zea Mays
attttctacgatgtgttgcaaatcttataggttaataactacctttcgtgacgtggaagcatttcctaatttccgttcccatgctagttggttgcctactgtttcttttttgtaggaaacgaaggagagctgcgctttattattatattaagaagaaaatggacaagaattcagttagaacgcacaccttccatcacaaatgccacacttagtagttacaattacaaccgtgccgactaaaaagaagacaaagaacgacacatctaagggcatgcacaaccctgagactctggccataccatggaggcagtcaagaaggagatttctctagcccctgccttaggccaaagtcgacgctcttcccctgccacgattagggcttgagaaacactaggagtcataacgtcaaaaaaaaaacagttttggtggatccaagtgctcagtatgatctgagagttgatcccacattggatcataccactgattgaatattggtttcctctttcaactgcatagtagtgttattatccaagtaacgattcttctaatttttgcctattgacaggtccttcggtacaaggtggatgctgtgccaccggttgttgagccggccttgtcagccacggaactctgaagaggtctgtcttaatataatgatgtaacgagggccgatgcatgcccgagtatagctgtacaaatgtttctgaaggccccacacggtgctgttactgattattccatcgaatgctttgcggtgttctgatcgcagcattccctgatagctcgctgtcagagcgcatggatatgtactttgtgtgcacatggctgcggccacttgtcaccgacgaatgcctgaatataacagaaatgtattatatcgaccaataagagcatgtctgattggaagctgtcgtggtttgtttttattttttttctcgaatacggagagctgtgtgtcattgcaccaggaagaggaagagctgtggacgtgctccctggaaagagcatcccctttggctaccaattgttgaattt

SEQ ID NO: 135453 - DNA, 593 bp, Zea Mays
ccaaaccccatcctcgatgccgaggtgtagctgaagaagaccatggcgcgtttcccgctcggcccggaccccgtccttgccattatgtcctcgatggcaaggtggagtagctggagaaaaccatggagtgccgcccgttcgacccggaccccatcctcaccatgccgtcctcaactgcgaggtgtagtagctggaggactacaggaagacatggtcctcgccatggcgtcctcggtaatcggtatcgtcggtacagggagacgaggtgcagcacctaggactgggcccatcctcatctcccatcacgagctcgcgtccatgcgtgaaggggacagcagccacggccaccggacctgcgccgacgtcctcgacaaggtgggagaacactgttgtgcgacgacgcgtgcatggtgtttgaggaaatgccaaatcggcgcccagaatacttgaacgcaaagcgatggtttctgttacgtttttgaaacattttactaattgctagtacatgtttggtggttgatgccgacgtagcgaagctaaccctttgttaaattagttgttgtttaaataaaagaataaattcggtgaattaa

SEQ ID NO: 135454 - DNA, 174 bp, Zea Mays
ctgtacggggaaatgagaatgggaatgagctttgcgaggagggggatgtgcgcggggaggagggaatcgaaaaggcagaacacggaataggcagaacacggaatgacagactactattgcagacttaataagtagtagagaatgtatttatacgtgtacacacatgtacgttac

SEQ ID NO: 135455 - DNA, 198 bp, Zea Mays
ttttgtaaatatgcatcaggagcatgttacattggtacatgcgagagtggactcaaggatgggcatggtatgttttataaaccaagaagtaaaatgccttgtaaccttgaagtgtctaagtgtgtaacagaccacgatgtttcaagtaccctcagcaaaacaatttgtcacaagattcatctagcttactcttggcaa

SEQ ID NO: 135456 - DNA, 723 bp, Zea Mays
atgccgccgacgaccacgcccacgacgagcgacgtggacggcccggagctgccgccgccctcgcccccgggcgagtgtgacttgggcggcgagtgggacgacggcgtggatcgctcacctccggacgacggcgtcgacggcggggacctgccccctccaccggatgacggcggagaaggggtgtccgatggcggagaaggggtgtccgatggcggcgacggggtgtccgatggtggagaaggggtgtccgatggcggcgacggggtgtcagatggcggcgacggggtggcgggcgtcgccggagaggaaggtgaggagggcgagggcgcagagggagtcgccggggtggaagacggcgagggcggggacgcggcaggggtcgccgggggagggacggagggggacgacggcggcggcgcggaggggcccggcgggggcggggtgggcttgggaggggtgggcgtcgggggcgacgcggacggggtcgccggtggcggggttgtcgcattggccggcggggccggtggcgcggtcggcgctggcgcggccgtcggcgacgacatcgcgccccctcgctccggctttggagctgggttgttgttagttggcgcgttagaagaattggccggaggaaaagaacactcctcacgacaaaaaggaaagacttcgagaccgaccagtggatttgagatagagaattcagaacctttagagctagtttga

SEQ ID NO: 135457 - DNA, 1874 bp, Zea Mays
gggtctggaccgtccgtttggcgatatatgggcagcagtgagaggcacacccgctgaaaaaccctgcttctctcaagtctcaacgccgtcattctcatgtcttcctggtcgccggccgccgccgccgccgccgccgtagcgaaggcggctaagccactgcaccggagcgtgtcctcaactcctgtatccccccacctctctatgtcctcttctcaccgcactccacctctcgcgatggcggccggtggaagcggcgcggtggccccttcctcacttctcgtcgccgaccagggccaccgcgagtccgtgctgcttgctgcacgcgcctccatggggaactgcctcggagagacccgcctcgacctctcggtgtcagggctccgccttgctgccaagggcaaggtgagggacgtgtacgagagcgggcagcacctggtgctggtgaccaccgacaggcagagcgcgttcgatcgcgtgcttgcttccatcccgtttaaagggcaggttcttaatgagacaagcctttggtggttcaatcagacacggcacattactccaaatgcagtagtgtcttctcctgataagaatgtaacaatcgccaaaagatgcacagtttttccagttgaatttgttgttaggggatttgttacaggaagcactgatacatctttatggacagtttataataagggtgtaagaaattattgtggaaatgttcttcctgacggtatggtaaagaatgagaagctatcttcaaatatattgacaccaactactaaagctgcagaccatgatgtccctgtcactccagatgagataatcgagtcagggttgatgtcgaaggaagattttcatgaggcaggaagcaaagccttaagcttgtttgcatatggacagaaagtggccttagagaatggattaattctggttgacactaagtatgagtttggaaaaacacctgatggaacaattgtgttgattgatgaggttcatactcctgactctagcagatattggattgctaattcatacgaagatagattcaaatctggccttgaacctgaaaatgttgataaggagtttttaaggctttggttcaagaacaactgcaacccatatgaagacgcggttctgccagaagctccagaagagttggtttgtgagctggcctggcgatacattttcctgtttgaaacaatcacgaagacaaaattcgagatcctagaagcgcaggaaccaattcatgaaaggatatcaaggaatgtcgctcaagccttacgggacctatgattgctgatagaggatctggggcagagtttgagtgcatttctggaaccaattcatgaaaccatctgatagggttttgggtgcatttctggcactaatattcccgtgcgaatagcaagtagtctgcgcagatgccatatatccgtcctgtgagggttgccattgcgtcttgatgaagcagaactatccaccacatttcttcatgatctgtgatataatgtggtaataaactcaaccgccatgctccgctggtgagatttgccgtgtttggagcagggggggagacaaactgagaaatttaacaagcatgagaccgacagatgctgtattcatacaggccttcctcagatttctttgtgttagtgtaacgttgtcaggtggtttgagtcgggcagccatcacacgctgtcttctgaaacgaaaaggataaatttgcaaataacaagttcattatgttctagcgtaattgggcttttcctctaagagcaactccaagaggccaaatcgttttgtaaaagtaaatttgggtattgctagaagaaaaacaactccaatagactctataaatgactcctccccattcctcc

SEQ ID NO: 135458 - DNA, 1728 bp, Zea Mays
atggctctcgtgcagctccatgatgggcttcatcttgtggtccgtgatggcgatgcagatgtcgttggggaagagcttccggagcacgaacgcgtgcaccagcgtggtgacgaacagcgccgtcaccgtgagcacggcgatcacggacagcgccacgcagagcgccttggtgaaggtgttgtccacctcggtggagtagcggatggacgcgatggcggcgccggtcatcgggaacgtgtacgcccaccacgccagcgagaagcggaacccccggaagaagttgatccgcaccgccagcgacgcgtacaggaacatggcgatgaagtaggccaccctgggcccgtagccgaactcgcccgtgatcttggcccacgccatgctcgccacgctgggcgccgccacgaagaggaagaagaccgggtggagctccttaggcagcgtctcgttggtggggagccgctggtacaacgtgacgaacagcacgctgtagtgcgccagccccacggagaagaagaagacggggccctccctgagccccatgttggcgcccagcagcgcgcccacgaagttgcccaccacggacaggtggttggacgggttggccaccttggacaggcgcctctggccgccggacatccactggccgtagatcttgagctccatgaagagcacgggcgccatgagcgcgtaccagagccacctcggcaggggctcagtggccacggacggcggcacgccgatggcgaggaagaggcaggcgatccacggcgcgaagaagaagttgacccggatggggtggtagtactcgcgcctcacggcctcgaagaagaaggcgagcttgagcgcgtagacggccgtgatggcgcacatgagcagcacggagatgcaccagagcaccaggttcaccttgtgggatacgtgcaggaacgtggtcggcgacgacgacgcgatcgtcttccacaggatcgcctggctgctcacgcccaggcagataccgaacgccgacacggggaaccggagcaggaacggccacgtcttgtccgacggcagcaccagttcctcagacgtcttgagcttgtcgagttcggggccttccagtgcggcgaagaagcgatcgactttgggcatggacgtggtgcgggaggtggcggcgtcgacggcgtcatctcctcgcacctcttggacctccggggcgccggccaggtgggtgagctggcgctcgagcttcccggagaaggtcttgaacgtgtcatagcgcctgtcccggctgatggccctgcaggcccgggcggctcggctgccggcgcgctgtggctggccgccgggaatgggctgcgagcggaacaccagcttgtccggctggtgcatgaaccggacgccccctcctccattctcccgcgcgggcggcggcgtcggcgccggcgcctgctgcgggtcgccggccgcggcgttggcctggagggcctgcctccggaggccgtcgtcgtccgagtcggcggcggcggcgttggccggcgcggggatgacgggcacgccgaagccgaagccgatgggcgacgccgggaggctgatggagacgggctgcacggagcggtagcccggcgcctggaacggcgagtccagcggcgggaacaccacctcgctgcggcacggcacgcggtccagcggcggcaccccggggcgggacgacggcttcgtgggcgggcgcgggctcggcgtggtggcgtc

SEQ ID NO: 135459 - DNA, 641 bp, Zea Mays
gggtcccagaccacgcaccacgcatgcagcagtacgtggttcctttttccagtcgaaaacgagtgcgggcggcagaggccacgtggtaggggcaggggcgcagggcaggcccggccggcaacaaaggatcgccggggatcttgtcagccgtgcctctgtccgtccgtcgtcagcctgcccagcccaactggctgccatagtggctgtggcatgggcgcatggccacaagggacatttaagttgtactactaggtgcagattccagacaggtaaggtacaaagtggttcccaagtccaaaaaaaatatgcaatttttactcgtggatagtaataatttagtcgtccgtcgatcccctatgttgtgccacagaccctacgcagaagcttgaattttttccccctccatcttttacttgcccagaagataggagtcggatcacatgacccgaccaagtacggtacaggcaatgctgcgttccatttgttcatgtgcagtaagtggagagcgagatggatggactcacctggctctgatgatgatgccccgcgacgaacgccacgccaggccgggactcactcactcaccgacgagtcgacgacgcggcgcgcggcagtgctcctggtcttgaggggcaccggag

SEQ ID NO: 135460 - DNA, 1326 bp, Zea Mays
ggatggcccaaaggatatggtttcgtgcgttttggagatctgaatgagcatgcacgtgctatgactgagatgaatggaatgttgttatctacaaggcaaatgagtattggtgttgcagctaacaagaagaatagggatgctcagcagacatatgcaactgaccgtatgtacttgtcgaacatcttcatataggtttttaatgttctccttcttcacctcgctgggtgggttcgggggcagctcggacggcgcgaggggcctcaccagcgtcgacctgtccaattccgagtccaggccagacagtgtggcacaacgtggcttggaccacgacactgaagagagggtggaggagctcacattgaagaactgcatcaacactggtatccagcctgaggtttctgctggtgggagcacaagcagcagggataggcctacccgtattaagggcctgtggggtaattttacacggagaactagcaatttggtcagcagggaaaacgctgcactgagttctggcgacattgcaaacttgagggctcgtgatgtttcagcaaaggtgaggtttctattgtctcaaggatggtacctgcacttgtcaaacataaaagctcgctacctattttatttagacacaattaaggcaataaggcctactagagtttttgcatactcaagggttcatgggcatcccaggctcccagcaatggaatctgcaaggtatctccagctcgctacctatttttgtcattatggaatctgcaaggtatggctccacattgatacaattgatggtttgtctgcatatctagcaagtgtgcaggaggatgttgcatcagttatcattggtaaaaaaactatattgcatgtgcggactgcctctgatgctattgatatgaggatctcagttgatgaaagagtaaaggacaagctctcaaatttggtaaccaggctccaaaatgaaagctttaccgcttcccgaaagaactagcatcactctcagagtgcttgtttcatctgaaaaggagaccacttttaggtggcataatccgacatgaagatgaaagatctgtacttaggaatttgttcttgaatgctttgtttgacctttcacttcgtatgctaccacttcagtgtataatgcattgtgaagatgtacatttgtgcttgtttgatctgaaaaggggaccacttttagatagcataataggatatgaagatgaaagatctgtacttaggaatttgttcatgaatgctttgtttgacctttcacttcgtatgctggcacctcagtgtattaagtgttaatgttacggttattcttggatc

SEQ ID NO: 135461 - DNA, 650 bp, Zea Mays
atggcgcctactagagacgcagcggccgcacaggcgccggcaccgaagaagcagtcggcgaagccgaggaggatctcgattgaggggctgcagcgcgccatgtccgacctggccctggagctggccagggacagcaagaagcaggccgccacgcccgccgacgccgacgccgccaagctgcagcagctgccggcaatcgcggagcagcagcagcagcagcagacggaggaggaggaggagctggcgcggtgcgagtgctgcggcatgcaggaggagtgcacgccccagtacgtgcgccgcgtccgcgaccgctactgcgggcgctgggtttgcgggctgtgcgcggcggccgtcagcgccgaggccgagggcggccgcgcgacgacggaggccgcgctcgcggcgcacatggccgtgtgcgggcggttcaaccgcttgggtcgcgccaaccccgtgctcctgcagacggaggccatgcggcagatcctcaggaagcggggcgccaggtgcgacagcccccgggtccgggaccgcggcgcccgccccgccgccgccgccgcgctcgccaggagctccagctgcatccccgccataaccaaggacttcaactgacgagctagatgagaggaccacaccgacactggccttct

SEQ ID NO: 135462 - DNA, 1067 bp, Zea Mays
aggcagtagtgttttctgttctttttcgatgtctcagtttacagactgaagccatacatatggcacaacgactgggccacactattacagtcaacgaacccactctggaccggacaccttgctattgggcttaagcttcctttttaatcttggctgtagcagcacaccatcttcttcgcttccagtctctggcgcaggttcacttgtcttggcatccttgcgtgtgctaacagaagctttccatcagcatattcaggccgggtttagacactgacccctacttctctgggccctgtgaacgaacggataccctgacggccgggcagagaaatggtgcaaaacgttagcgaagtagcctggtcgttgaaacctgaaaaaaatggtctggctgctgctgctgcatggttgcataagctcgttttttacatgcctgatggctgtattctcctggtttgctgtgctcattccactggcatttacaacttggcaggcatctctgtaccctcacatcagggagaaactggaaggcatcgttctgacatcgcccgcgctgcgtgtgaagcctgcgcatcctattgttggggctgtggcgccgatcttctctctggaaggcatcgttcaagggcgccaacaagaggggcatcccggtgtcccgcgaccccacggcgctgctggccaagtactcggacccgctggtgtacacggggccgatcagggtgcggacggggcacgagatcctgcgcatctatctcctcccacctgctgcaccgcctggagaaggtcaccgtcccgttcctggtgctgcacggcaccgccgaccgggtgacggacccgctggcgtcgcgcgagctctacggcgcggcggcgtccgcgcacaaggacctgcgcctgtacgacgggttcctgcacgacctgctcttcgagcccgagcgcgacgaggtcggcgccgagatcgtcgcctggatggacgggatgctccggctccggcggcaggctggatgaagggatggccgtgctgcttctctctccttctaggtggtgttcctctccaaagataagatggatgc

SEQ ID NO: 135463 - DNA, 1725 bp, Zea Mays
tttattatttattttttttaaaagaaaagaagtataaagggcctaccccagaataaacaaacacagcaatcaagcaagcaaacagaggcataattagcaccaccgtgtagcaagttgcaatccatgtgcccctgctatataacaatccaacccctctcctcagcattgtcgtgcgtagcatagcagcagcccttgcctgcctttcgccttaccctctctctctctctctttcacacaaccactcacactgccggttggtttcccttccgttgtggttggtgcgtacttagtggcggccggccatggcgcggaggaggggcttctcggcggtggtgccgccggcgtggctgccggcggtgctcctgttcctggcaggcgcggcgtcgggcgagccgctgcagcagtactacaatgccatcttcagcttcggcgactccttctccgacacgggcaacttcgtcatcatcaactcgggcaagctgcccaacatgcccaagttcccgccgccgtacgcgaggtgctccaacggccgcctcgtgatcgacttcctggccgaggcgttcggtctcccgctgctccctccgtcggcgaacaagggcaccaacttcagccagggcgccaacttcgcggtgatgggcgcgacggcgctggacctcaagtacttcaaggacaacaacgtgtggagcatcccgcccttcaacacgtccatgggcgtgcagctggagtggttccaggaggtgaagcgcagcatctgccccgacgaccccgccgcgtgccgcgccctgttcgggagggccctgttcgtgttcggcgagttcggcggcaacgactacagcttcgcgtggaaggcggactggtcgctggagaaggtgaagacgatggtgccggcggtggtggcgtcgctggtgggcggcgtggagcggctgctggacgagggcgcccgccacgtcgtggtgccgggcaacctccccgccggatgcatccccatcacgctcaccatgtacccgtccgaggaccgctccgagtacgacccgcgcaccggctgcctcaagaagtacaacagcgtcgcgctctaccacaacgccatgctccgcgtcgcactcgaccgcctgcagcgccgccgcccggagtcccgcgtcgtctacgccgactactacacgccctacatacagttcgcgcgcacaccgcacctctacggctacaagcgcggcgctctgcgggcgtgctgcggcggcggcgggccgtacaactacaacgtgagcgcgtcgtgcgggctccctggcgccaccacctgcgaggaccccgacgcgcacgtcagctgggacggcatccacctcaccgaggcgccctaccgcttcatcgccaacacctgggtcaagggcccctacgcgcacccgccgctcgccaccgtcgtgctcgaggacatggtcgactgatccctcttgcttctgcaggattggtttgccacaagggagtagctgatatgtaacgtgaattccattcgttcatgtccatgtatattgggtactaccggagcggagtaacaaaaaaaaaatgttagtcttttctgttttttttttcgtcgtgcacctgtgtgccgtgcagtcgcatagatcaatgaagaaaccactccagctgtttttgatgattggtttaggcggacttgcaagcggtcgagcctgcttatgttttgctatgttgggcagtgtactgtacacgctaagg

SEQ ID NO: 135464 - DNA, 3149 bp, Zea Mays
aatgtcgaggcttatccaacgacatcaccatcgtctcttcccgtccccgccatggccaccgtccgctccaccctcccacccagtctcccaccgccatccccatcttcacctcccgctcacaccctcgcggccacctcccgccaccgcaagcctctcaccacgaccgcagccgggcaggcggccctccagccatccgaagcggcggcgctcctcacggccgcagcgcgcgcccgcgacatccacctgggccgtgcactccaaggccacctcctccgcaccgggtcactcctcgagaccgacgccgtcgtcgccaactcgctcctcacgctctactccaagtgcagcgccgtggccgccgcgcgcagcgtgttcgacggaatgcccgtcggcctgcgggacctcgtctcctggacggccatggcgtcctgcctctcgcgaaatggcgctgaggcggaggcgctccgccttttcggtgagacgctcgaggagggtctcctgccgaacgcgttcacgctgtgcgccgcaacccaggcttgcttcgccagcgagctcttccacttggctggtggcgcggttcttggtttggtattcaagctgggtttctggggcactgacgtctcggtgggttgcgctctgatcgacatgttcgcgaagaatggggatttggtggcgatgcgccgggtgtttgatggattgttcgagaggacggttgtcgtctggacattgttgattacacggtatgcgcagagtggttattctgatgaggctgtagaattgtttcttgacatgctggagaacggatttcagccggaccagtacaccttgagcagtatgttatcagcttgtacagagttgggatcattcaggttggggcagcaactgcactctctagcgctcaggcttggactggaatcagacagttgcgtgagctgtgggcttgtggacatgtatgcaaagtctcacaatggacagtccttgcacaatgcgagagaagtcttcaatcggatgccaaagcataatgtgatggcgtggacggcacttttgtcagggtatgtgcagcgtggatcgcaggacaaccaggttatgatactgttttgcaagatgttaaatgaaggcatcagaccaaaccatatcacatattctagtatgcttaaggcatgtgcaaaccttggtgatcaagattcaggcaggcaaattcatactcattgcgtcaaatctaacctagctgacttaaatgttgttgggaatgctttagtaagcatgtatgctgaatctggttccatagaggaagctagacatgcgttcgaccagctatatgaaaagaacatggtatccttcagcggcaatttagacggagatgggaggagcaacacttatcaagattatcagattgaaagaatggagttaggaatcagcactttcacatttggtagtctgatcagtgctgccgctagtgtagggatgctaaccaaaggccagcggctgcatgccctctcactgaaggctggatttgggtcagatagagccataggaaactctcttgtatctatgtattctaggtgtggatacctagtagatgcttgccaagtctttgatgaaatgaatgaccataatgtgatctcatggacttcaatgatcagtggtttggcaaaacatgggtatgcagcaagagctctggaattgtttcacgatatgatcgcagctggggtgaaaccaaatgatgtcacgtacattgctgttttatctgcatgtagccatgccggtctagttaaagaagggaaggaacactttagaatgatgcagaagcatcatggactcataccaaggatggagcattatgcttgcatggttgatctccttgggcgatcaggccttgttgaagatgcactagattttatcaacgaaatgccttgtcaagtagacgcattggtctggaagacacttcttggtgcctgtaagacccacaacaacatggatattggtgagattgctgctaaccatgtcatacagctcgaaccacaagatccagccccctatgtcttgctttccaacttatacgcagaggctggtttgtgggatcaagtagctaggataaggagtctaatgagggataaaaacttgatgaaagaaaaagggttgagctggatgcatgttgacaataccattcacgagtttcgagctggtgataccagccatccacaagcagaggagatctatacaaagttggagacactgataagagaaatcaaagtcatgggctatgtaccagacaccagcgtagtgctccatgacatgtcggatgagcttaaggaactgtgtctgcttcagcacagcgagaagattgctgttgcattcggtttgatcagttgtacatcagcaacaaagccaataaggatatttaagaacctccgtgtatgcgttgattgtcattcagcactcaagtatgtctccaaggccaccggtagggagataatattgagagatagcaacagattccacaggatgaaggatggggaatgctcgtgcggagaatactggtaacaagcaagctagctagctcacgtagtcacgtttagctgaagagccatgtacagagttctggcgcaccacaacattattgacagtgagtgtccatgttcatattttctgtaggaccttcacaaaatcatagtttatacaaagcatgagttgttgtgatagtttatactttatactagggtcagagtttgtacagttgtatgcactctcctatcaccataaatgcaaattgttttgagtggtcaaacttttttggctttaccatcaatatggtaagactggcatcgcaagatgaaagcagaattttcagaacctaattgccgactgcaggtgatgaaaacaactttcatgtaattttcattgcgaatcaagataaacatgtccaaaatagacaagataaactgtcatatctgcatgctctttaataccattttattgataaatgaacataaaactggttgtacatgagttttgttgaagtgtataagtagattgactatcttatcccaaaaccttaaactttaattatttcaattggtcagtgcgttcactgtaacatagtatcgaagccagatgtcttaagttcgaatcatgacagagattttgtttta

SEQ ID NO: 135465 - DNA, 959 bp, Zea Mays
accatccgctccttgacttcctcgctggcccataaatatatatctatctatcgccatcgagcaattataatctcacagaataataaaaatcatggggcaagcctcacggctcgtcctcctcgccgtcgtggcgctgctgtccgccggcctcctcccgcaggcgctgggtaagggtaggggaggcaggggacacggtggcgccgtcaacccgcaggtcgccggcatctgctctcgcaccccgttcccggaggtgtgcacgtccaccgccgggcggcacgcgtccaagtacccggtcatcgacaacctggccgtgctgaacatgcaagtggacgcgttcgccaagcgcaccgcgcaggcgcgcaagcacgtcgcgaagtcggcccgcaccatcccgccgcagcagacgcaggcgctcacgttctgcgacaccatgtacatgaacacgcaggacaccatcggcgcggcgcagcgggccatcacgttcaaggacaccggcaccgccaagatcatgctgcagctcgccgtccaggacttcgactcgtgcgaccgccccttcacccaggccggcgtccccaaccccatggggaagtttgacaaggagctcaaccagatggccaacaactgcatggctcttgcaaacatgatatgaaccacgcatgcaaccccagcgtgaggtgccatcgcatgcagggaatgcttgcattcatttttcatttaattgagaattcattgaaattatgagttatatatattgagtaactctatgtatttgttcctgacctgcaactatttattcattagtatgtcatgaaacgaggtagagcgcctttcattgcctttatccttcagtttgatcctttcattgttcaacttttaattataccacgtctttgccttgagacaagtataattacctaattagaagctcccctaagtattactaaagaaatactttattt

SEQ ID NO: 135466 - DNA, 638 bp, Zea Mays
agataaaacaaggaaaccaacacttttggcatatgataaaattgaaactaaaagatagtaaaagcatgctcagctatcctccacggtccacagtaccactaccacacatattcattccaattcaacaacactaaccccagagcaaaagctataagcatagataacctcccaatcatgcttatcaaggcgtccttgaagcgccgccttagcgtcgcttaggggctaaggcgcgcgtggaacctgaggcatctaacgcgccttgccatggagcgtaaagcgcccgctgcggcgcagggcgtccgcgaggcgtcgacggggcgtcgttgagccgtcgtcggggcgatgccttggggagttagagcggcggcattggctgggaaacagaggagagctggagcagtgacggcggcgcgtagggcacccgtagcggtggcgtgtagggccacgcagcggcggcgcgcaggggagaaggagagagaagagctgcggctcggagaagagaggagcggcagcggtgtagatgcccgcagtggcggcgcgcaggggagagggagagagaagagctgcggctcggaggagagaggagagcagtgtggaggagaggagagcgacggcgacggctgagaggagaacggctg

SEQ ID NO: 135467 - DNA, 830 bp, Zea Mays
agatcgcatcaggtagcataccattaccataccgcgcgggccgggccgggagaaacaaaactgacaaggacgatatggtgcgtagcctcgtcgcgctgctcctcgtcgccacggccgtagccgccgtggccagagccgcaccctcgccggggtttgtcgtaaccggccgcgtctactgcgacaactgccgcgccgggttcgagaccaacgtctcccacgccatcgaaggcgcgacggtggagatggagtgccgtcacttcgagtcgcaggaggtccacgacaaggcggaggcgacgacggacgccggcgggtggtacaggatggagatcagcggcgaccaccaggacgagatctgcgaggtgctgctgctcaagagccccgaggcggactgcgccgagatcgagcgcacccgcgaccgctgccgcgtcccgctcacccgcaacgacggcatcaggcagagcggcatccgatacgccaaccccatcgccttcttccgcaaggagcctctcagcaactgtggcgagctccttcgcgcttacgacctcttcaacgagacgtccgagaattcctaagcgtcattttgttttttttttaatttcctcttccatagcacatttgttcgactgatcgacgttatattagcagacgtgcagctatcctaaaaataaaaataattttcatctccaatgttttagtagctaccatattaatatatattaatggtctttgagtagttgtactgtataaataatgccatcatatatatttgtagccgaaaaaagggaccaaccctatgctgtaaatttattttttaatctcctttatagccg

SEQ ID NO: 135468 - DNA, 2870 bp, Zea Mays
atggcggtagcgccggtggtgcgccagcagagccttacagagggattgatttcctgtaggactgatgttcaatgtttgcatagatggcagaaggttttgaaccctgagcttgttaaagggccttggtcgaaagaaataactactgatgtgaaacatttcgatgtgacatcttcatttagatggcacaaccatcttaatcctgggatcaataaggacgcatggacacaagacgaggaaatcaggctcatccatgctcatcaaacttatggaaacaaatgggctgaattgacaaagtttttaccaggaaggacagacaatgcaattaaaaatcattggcacagctcggtgaagaagaaagttgattcatacagatcatctggtttactggctcaatcccagggcttcacacctgttgaatacactgctggtggtttaaatgttgattcttcatctgcaataaccaatcaaattagcgaaggcagtggttttaatgtttttcgggaggctgaagattcgatggagttaagtcagtcttcgtttgccaagggttcttgctctcaggaggagcaaaatgatgtgactttgggatctcatttgcatgtgcatgaatctttgtgtccagatggttccactaatgatggcaatggtgcttctggtttacctgacattcatcaccgcttatgcacttctgacatggatcaagataaacacttgcaggaaggaatggatttggataaacacttgcagcatgaattctctcaaggaacggatttgcatcttgatgtagatgaagtgccaaacaactttgtgataaaaggtagccagtcatctaatgagcttgcagttcaatttcatgacacagagattatgaatagttcaaaaaatgatggagtgtctttggtaccacatgctataacaccatgtgttcccatcttacctagtgtttctggatgtgtgcataacataaatgtgatatacgaaatgggcataaaaaatgataattgtttccaatctgaaaagtgccaggatatttccattcaatcaggtgcatactcgtctgaagctgcaggcagctttttagcaccactttacccattgcagacatctgaaccagcaataatgatgggtggccctgtgtactatcagagttctgtaatgtcattaccaccaggctttatttcttctgatggtgcttctaatgcatctggtgtcaaatctgagacaagttactatcctgtttctcgccaaaatttggagattaaaacttgccacaatgcttctggtgatcctgaacaaaattcatatattagcagcgaagatgacagaaacaagacttctgaacctatgggcagaatatcagaatctgaaaagaaacagcaagttgatgttgaacaatcatgtttggagcctgcagcctgcattggaaaggaagcattatctagtcatggtgacaccatattaagtaaaaaggaggatgctggagctctatgctatgaacctccttgctttcggagttttgaatttccctttgtcagctgtgagcttgtaaactccagcgatctcccagaatatagtcctcttggcattcgagagttgatgaggacatccttgaacttccctaccccagtaagattgtggggctcccctactagggatggtagccctgatgctgtgctaaagaatgctgccaaaagattcatgtgcaccccgtccataatgaaaaaaaggcacagagatcttttatctccagtttctgatataagaactgacaagaaaccaaatactgaaagggattttatgagctcaggcatatcctctacaagagttgggaaatcttgcatggatagcgctgatgattcagctgatttagtttcaccgaaagagagtgcatttcaaaagaagctgaagctttgtcacgaaaacaaagaaaatttgaatgaaattgctgatcaaggagaaaatgaagccaatgcaaagcattcttcagggattcttactccgagcagtgttgacaaccataatacacataagcatggtccaaattttcgaattcaggagctaaataccactgtacaggctttgtctaactctaaagacataatattttctagatcaaagccatcagaacatgttgaaaaatctgcagcctgcattgatgcagattacgagtatttgaacatattggctgatactccaggtattaaaagaggcttagaatctccttctgcctggaagtctcctgtgttcacaccattccaggatgcatacttcatgagcccagcaagcagagcttttgatgccttaggattggtgaagcagattaatgagcagagtgcttctgctgtggaggaagcacatgaagttctggcaaatggaagcccatggaaacaacataacaaggaaaactctgacaaagaaaatatagaaaatacagctttgaagcatgagcatgtcacaagcaaacctccatcgatactcatggtagaggcacgggtgctcgatttcaatgaatgctccacacctgtgaggaagaaagacgataagaaagtggaaatagttttaggaggacctgcaacatcccctgttacttcctcgcatctttggataaatatgcggtagccctttgaggtgggtgggcgtggggatgcttcgcctatgctgttcagtatgtacatgtctgttattcccataatttccaccgttttgaaatacacattccaattagtactttattctttgtgcttggtaccctaaatgtcaattctaaatggaaatacatttttttgtagtgttaagatttgtaatgtgtcatttgattatgttaaatattaaacaaggcaatatatttaaattcagagtatattatgaaa

SEQ ID NO: 135469 - DNA, 3099 bp, Zea Mays
tggaggaggagattacagaggcatgcacacctctgttcttctccctcctctcgtcttcctcctaaactcgactcattcgctcgacaccgcatggcctaaccagttaaacccccttcctcctgcaccggtgaattgaacgaaccaaaccgtcctgactggtccagcgaggcgaacatggcagcctgccgcggcgccttcctcgccgtcgtcattgcgatcaacgtcgtggtttccgcttccgcggacaagtacaagccgacggagtccatactggtgaactgcggttcggcaaaggagggcaaggacgtcgacgggaggaaatgggcggccgaccaagacaagagctggctcgtcgacgccgggaagtcatccatcatgggcgacgccgacgtccaggacccgtcgcttccgtcgcccgtgccgtacatgacggcccgggtgttcaccaaggaggccatgtacaacttctccgtcggcgacgcggacaggcactggctgcgcctccacttctacccggcggcctaccacggcgtcccggcggagcagttctttttctcggtgtccacgtccaccgggatcacgctgctccgcaacttcagcgtgtacatcaccgccaaggcgctcagccaggcgtacatcatcagggagttcacgctgccgccgatggccgacggcacgctggcgctcacgttcaagccgaccgcgatgaacaacgcgtcgtacgccttcgtcaacggcatcgagatcatctccatgcccgacatcttcgctgacccggcgaccatggtcggcttggctgaccagaccgtggacaccgcgaccagcagcctgcagaccatgtacaggctcaacgtcggcggctcttacattgccccgaccaacgactctgggctgtcgcgggactggtacgacgacacaccatacctctacggagctgcggtcggcgtcacgtacaaacctgacgacaatgcccagatcaagttcccgagccctgaggcagagtacgcggcgccggccagcctctacctcagcagcaggtccatgggccctaacccaaaggtgaaccagaactacaacctgacgtgggtgttcgaggtggacagcaacttcacctacgttgtccgcctccacttctgcgagctgctgcttaccaaggtcaaccagcgggcgttcgacatcttcgtcaacaacaagacggcgcaggcagacgcggatgtcatcgggtggacgtccgggaaggacgtgcccgtgtacaaggactacgccacgttcatgcccgccggcacagccgacaagatcctatggatcgcgctgcacccttccgtgtcgatgaagccggagttctacgacgcggtcctcaacggtctcgagatattcaagatgagcgacagctccggcaacctcgctggtccgaaccccgacccgtccaggatgctggaggaggcagagatgggcgtgacgcaggggcagttcaaagccaagcaaagcaacctccaggccatggtgatcggcggcgcggcgggtggcgcggcggcctttgggattgtagcggccatatgcgtcgtggcttaccactcgaagaagaggcgggcgctgggtaacagcgtgtcgcattcctcgggatggctgcccgtgtacggtggcaactcgcacacaaacgccagcaagtcgtccggcggcaagagcgcggcgctcaacccgaacatcacggccatgtgccggcacttctcgttccaggagatcaaggcggcgaccaagaacttcgacgagtcgctggtgatcggcgtgggcgggttcggcaaggtgtacaggggcatcgtcgacggggacaccaaggtggcgatcaagcggagcaacccgtcgtccgagcagggcgtgctggagttccagaccgagatcgagatgctctccaagcttcgccacaagcacctcgtgtcgctcatcggctgctgcgaggacgacggcgagatggtcctcgtgtacgactacatggcgcacggcacgctgcgggagcacctgtacaagagcgggaagccggcgctgccgtggcggcagcgccttgagatcaccatcggcgccgcgcggggcctgcactacctccacaccggcgccaagtacaccatcatccaccgcgacgtcaagacgaccaacatcctggtggacgagaactgggtggccaaggtttccgacttcggcttgtccaagaccggcccgacggccatgaaccagacgcacgtcagcaccatggtgaagggcagcttcgggtacctcgacccggagtacttcaggcggcagcagctcacggagaagtccgacgtctactcgtacggcgtggtgctcttcgaggtgctctgcgcacggccggcgctgaacccgagcctgccgagggagcaggtcagcctcgccgaccatgccctgagctgccagaggaaggggacgctggaggacataattgacccggtgctgaagggcaagatagcgccggactgcctgaagaagtacgccgagacggcggagaagtgcctgtgtgaccatggagtggaccggccgtccatgggcgacgtgctgtggaacctcgagttcgcgttgcagatgcaggacaccttcgagaacggcgggaagccggagggtggaagaggcagctcgagcgacagtggcaccgtgtctatggccgacagcatggctgcctcggctgcggcgctcgagctgatcagcgaggacatggacgaggaggacatcgccaacagcgtggtgttctcgcagctcgttcacccgactggccggtaaggggtgtgcgtgtgtggattgggacgtggatgctgaaatctatgggtgcgtgcgtttgttgtccgttggggttcatctgttcttgttaatatgtactcagatcatgttgtgcgtatgtgtgtgtcgtcgttgttggttgattctttaatttggttccttttgctgtacttttgtgggccatgaaaacgggggaaacttggtaagaacataggatttctgatgtttctttaaagatcgactaaaaatttagtgttcatgatagacagacagtaacgattggatgggcttaaaataggggtctcagcaatgcac

SEQ ID NO: 135470 - DNA, 1086 bp, Zea Mays
aaaataaaacacagcctcacgatccccgcactgcccggtgccccgcgagctgctcctctacacacgccagcgagaaccagcccaccccacctgctcgatcggcgcaccgtcccgcaggccgcagggccgtcgtcagccatgatccagctcctgttctcgctgctggccgcggaggccgcgctggtgctggcgctgctcttccccacgcccgtgcgccgcctggctctgctcgccatcgatcgcgccaagagggggcgcggacccgtcatggccaagaccatcgcgggcaccatgctcctcgtactagtctctgctttctacagcgtcgctaagatccgccgccgcgagggcgagctcggacagctcacgcccaccgaccaggtgctcgccagtcgccacctcctcgaggcgtcgctcatgggatactctctgtttcttggattaattattgaccgattacatcactatattagagagttgagaatgttgaggaaagacatggaggctgtaacagagcagggccggacactagaagcagcaaaatccggaagcactgacgagattcaaggataccagaaagaggttgcgagtttgaaggaacaagtgcaagagctccagaaccaatcacaaaagaaaacagagcgactaaaaaccgccgaagcaaattctgtagctttacagaaacaatcggaaggtttactcgctgaatatgaccgtctcattgcggagaacagggatttgagggaccaactgcagtcaattgacctccgcctgtcccattctggcggaaagaagaactcgtgaagcaagttctgcaattttgaagagcatgattttctgtagattttcttccaataggttaactgtactcggttttctctattatcataatcgcccatgtaattcagtagatggattttcctatgtaattcagtagatgcgtgcgtgtatgtatgagtggaccatttaatgctttatggactgggtggcatggactcagacccggcatttggccatagtttatggcctaacgtcttggttcagtgagatcaaataagaacctgcatcttcaaaggcagaatcaaa

SEQ ID NO: 135471 - DNA, 427 bp, Zea Mays
tccaacttgcaggtatgtgtctgctggaacaagctggctgaatggtgcttttagcaaggtcgccaaggctggtcatgttgctggctcaagaaccagagaaaagttccagttggctgtgtcaaatctaacagccaaaggccctgttgttgttgcctgaggggggatgctggttaaggaagctctctttctgaggaaaatctattggaagtccctatgcaaaagcatttcctttgattgtgtggacagtgtggaaaataactgtgtttcagtgttatcttgtccgcctttccttagttgcaggctattcggtgattcttttgaggtttggtgtatagatgcgttcagtttttggtattttagaaccccattcttttagtgttgaagttaaattgattgtaggtgatagtggcattctattgtattgact

SEQ ID NO: 135472 - DNA, 1565 bp, Zea Mays
gtggaatattactcgtgcggatgaacccaaccaacttggccggagggtgaatggtgatacggtgaaggcagacgccgaaccaaaccaaaaggcgaaggcgaagaagaccaaccaaagcaaagccaacgggatctccctctcattccagaggactccgcgtcgtcaggcccgcttcgcgtgcgacgccggcatatagggtttcgccggcgccggcgatggacccaccccccgtgagccccgatcgctgggggcccagtcagggcgctggcgtcgggccctccggcctccgccgatatggcctcaatttctccgcctccagcctcctccaggcccccatcgcggccctccttgagtactccggcgtagtccagtccggccctgccctggcggcgcaccacccgtccgcggggccctcgtcgccgttgtcggcgtcggaggtcgatggtcttctctccgctgccgccgctggggacggggaggtttcgatccggattcagggcggcccaggcgacacggaggccacgggcgggccggatgcggggacctcgtccgaggatttgatcgaggcgaccgccggctctgaggttgaccaggcctccgctgcgggcaggggtgcaggcgctacggatgcggaggcaaacggtggcggggccggcacgtcggggaacgggggcggggaccgcgcgtaccagcgctacgacgtgcaccacgttgcgcggtggttcgaacagatattgccgttctcgctgcttctactcgtcgtcttcatacggcagcatcttcaaggtttctttgtcacaatttggattgctgcggtaatgttcaagtcgaacgatatattgaggaagcaaactgccttgaagggcgagagaaaaatatctgtactcattggtattacagtaatcttcatgattcatgtgtttggcgtatattggtggtacaggaatgatgatcttctcagacctttgttcatgcttcctccaaaagatataccaccattctggcatgcgatttttgtcatcatggtcaacgatacaatggttcgccaagctgcaatggctgtcaagtgcatgctgcttctgtactacaagaactgcagaggtcgtaactaccgtagacagggccaaatgttaacccttgtggagtaccttctgcttctttatcgtgctttgttgccaacttctgtttggtatcgtttctttctgaacaaggaatatgggagtctcttctcatctttaaccactggactgtatctgactttcaagttgacttcggtagttgaaaaggttcagtcattcttggccgcggtgaaagcactgtcacgtaaagatgtgcattatgggtcttatgcgactgcagaacaggtacttgctgctggtgatatgtgtgccatttgccaggagaagatgcatgtgcctgttctccttcgctgtaaacatattttctgtgaagactgtgtttccgaatggtaatattcatcgtttgctgttccgcatgcactgttctttgtatctttgttttgaatcaggcatctagttgaatatgtttactgtattctttggtgt

SEQ ID NO: 135473 - DNA, 2090 bp, Zea Mays
gtggaatattactcgtgcggatgaacccaaccaacttggccggagggtgaatggtgatacggtgaaggcagacgccgaaccaaaccaaaaggcgaaggcgaagaagaccaaccaaagcaaagccaacgggatctccctctcattccagaggactccgcgtcgtcaggcccgcttcgcgtgcgacgccggcatatagggtttcgccggcgccggcgatggacccaccccccgtgagccccgatcgctgggggcccagtcagggcgctggcgtcgggccctccggcctccgccgatatggcctcaatttctccgcctccagcctcctccaggcccccatcgcggccctccttgagtactccggcgtagtccagtccggccctgccctggcggcgcaccacccgtccgcggggccctcgtcgccgttgtcggcgtcggaggtcgatggtcttctctccgctgccgccgctggggacggggaggtttcgatccggattcagggcggcccaggcgacacggaggccacgggcgggccggatgcggggacctcgtccgaggatttgatcgaggcgaccgccggctctgaggttgaccaggcctccgctgcgggcaggggtgcaggcgctacggatgcggaggcaaacggtggcggggccggcacgtcggggaacgggggcggggaccgcgcgtaccagcgctacgacgtgcaccacgttgcgcggtggttcgaacagatattgccgttctcgctgcttctactcgtcgtcttcatacggcagcatcttcaaggtttctttgtcacaatttggattgctgcggtaatgttcaagtcgaacgatatattgaggaagcaaactgccttgaagggcgagagaaaaatatctgtactcattggtattacagtaatcttcatgattcatgtgtttggcgtatattggtggtacaggaatgatgatcttctcagacctttgttcatgcttcctccaaaagatataccaccattctggcatgcgatttttgtcatcatggtcaacgatacaatggttcgccaagctgcaatggctgtcaagtgcatgctgcttctgtactacaagaactgcagaggtcgtaactaccgtagacagggccaaatgttaacccttgtggagtaccttctgcttctttatcgtgctttgttgccaacttctgtttggtatcgtttctttctgaacaaggaatatgggagtctcttctcatctttaaccactggactgtatctgactttcaagttgacttcggtagttgaaaaggttcagtcattcttggccgcggtgaaagcactgtcacgtaaagatgtgcattatgggtcttatgcgactgcagaacaggtacttgctgctggtgatatgtgtgccatttgccaggagaagatgcatgtgcctgttctccttcgctgtaaacatattttctgtgaagactgtgtttccgaatggttcgagcgagagcggacttgccccttgtgcagagcattggtaaaacctgctgatatccggtcatttggtgatggttctacaagtctattcttccagttgttctagactgcaagcggtaaaatcctaacataacaatggacgagctattgcatgaaaactcgagtggaggtccttttaacgccatcatgtgaaaccatcttccgcaatgttgagatcaatgtgagaaggttcatgacagtcacgacagtgcagtcgttatttgtttatatattcaaccaaatagtttacagagctttttagttgcaacagaggcaaaatgtttccagcagactgctttcagagcctttagaactctgctggacaaacaatttgatcgttgaggtctgctgagccgacaaccgtatgcctcctgtaaaattctggtatttttttttaattttttttttgcatatgtgggcttacgtgggtgtaactgaaatttgaaagtaccgcttgcacagcaagaattgccggtgggggttgaaagtggtaaatgaatgtaactgtaaagcgttgttacatgaagacaaaaatttccacccgttgcaacatagtaaatgctgacagacgcgacttgtgtac

SEQ ID NO: 135474 - DNA, 1388 bp, Zea Mays
accactagaacatggtcatggaggtccctacgaggctacgaccctgtccctgcccttgaaagaagagagcaaggccgtaggatcggaattcccttccggacaagacacctaccaccacccaccacccagcgcaaggccaggcggcccaggccaccactccttaccttttcccccctcttttgttccttcattcacgaatcccgtcttcttcctttcttggccttctccacctcatcgccgagacgagatctctcccacacgaggagggcagcagggaagggagagatgggcgggcgggtggatcacgagtactcctacctgttcaagatggtcctcatcggagacagcggcgtcggcaagtccaatatcctctctcgcttcacgcgcaaccacttctccctcgactccaagtccaccatcggcgtcgagttcgccaccaagtccctgcagatggacggcaaaacaataaaggctcagatctgggacacagctgggcaggaaaggtaccgtgcaattacaagtgcttactaccgtggagccgtgggagcactgcttgtgtacgacatcacaaagaggcagagcttcgacaatgttcacaggtggcttcgtgaactccgcgaccatgctgactccagtattgtgatcatgatggtcggtaacaaatctgacctaatccacctgagagctatctctgaggatgaaggcaaagcgttggctgagaaggaggggttgttcttcctcgagacatcagctatggaggctataaacgtggagcaagccttccagactatcatgacggaggtctatggcattgtcaacaggaaagcgctggctgccaaagaagcagcagctgcaactgcttcgttgccctcccagggtaaaatcatcagcattgacagcactgcaggaaacacaaagagggcatgctgctctacctaaaaatgttcaaacaccacattatacagaaccttggagacaattgttggtagaaaatggagcatagtgatcacaaatggtgtggtggcaatatatactcctattctattctattcttttcttttctttattgtgtggacaaaatgggggtacatgcagtttagtttgttcagtgtgtgttagtcaaaagttagatattttcgttaggatccataccatttatcttctcaagttaaatgatactgcagtataactcagaatcatatagtcccaagttgctacagaattcaactgcgaatttgtgatttcatcatgcttacattctactctctgtatcttaaatattaagatatctttgtgcagcctactctgacaggagtttgttgcatgctggtacctaagccactcttgttccataactacagtaggtgttggaaccattgaataattag

SEQ ID NO: 135475 - DNA, 1441 bp, Zea Mays
cgaccctgtccctgcccttgaaagaagagagcaaggccgtaggatcggaattcccttccggacaagacacctaccaccacccaccacccagcgcaaggccaggcggcccaggccaccactccttaccttttcccccctcttttgttccttcattcacgaatcccgtcttcttcctttcttggccttctccacctcatcgccgagacgagatctctcccacacgaggagggcagcagggaagggagagatgggcgggcgggtggatcacgagtactcctacctgttcaagatggtcctcatcggagacagcggcgtcggcaagtccaatatcctctctcgcttcacgcgcaaccacttctccctcgactccaagtccaccatcggcgtcgagttcgccaccaagtccctgcagccaggacagctactgttgatgtggatttataaccgatgacttctcctaaatttctcatcttaataccgagcatgcaaaatcctgagcatttatggacggcaaaacaataaaggctcagatctgggacacagctgggcaggaaaggtaccgtgcaattacaagtgcttactaccgtggagccgtgggagcactgcttgtgtacgacatcacaaagaggcagagcttcgacaatgttcacaggtggcttcgtgaactccgcgaccatgctgactccagtattgtgatcatgatggtcggtaacaaatctgacctaatccacctgagagctatctctgaggatgaaggcaaagcgttggctgagaaggaggggttgttcttcctcgagacatcagctatggaggctataaacgtggagcaagccttccagactatcatgacggaggtctatggcattgtcaacaggaaagcgctggctgccaaagaagcagcagctgcaactgcttcgttgccctcccagggtaaaatcatcagcattgacagcactgcaggaaacacaaagagggcatgctgctctacctaaaaatgttcaaacaccacattatacagaaccttggagacaattgttggtagaaaatggagcatagtgatcacaaatggtgtggtggcaatatatactcctattctattctattcttttcttttctttattgtgtggacaaaatgggggtacatgcagtttagtttgttcagtgtgtgttagtcaaaagttagatattttcgttaggatccataccatttatcttctcaagttaaatgatactgcagtataactcagaatcatatagtcccaagttgctacagaattcaactgcgaatttgtgatttcatcatgcttacattctactctctgtatcttaaatattaagatatctttgtgcagcctactctgacaggagtttgttgcatgctggtacctaagccactcttgttccataactacagtaggtgttggaaccattgaataattag

SEQ ID NO: 135476 - DNA, 2130 bp, Zea Mays
ctcacagatagcggccgcgtgaataaacatttctgttcggttaattaggtgaggcatcttgtaagaacttggctgtgtttagtcacagcaaacgtattccactctccacaaaataaaataaaataaaataaaataaacgggtcagtgaaacggcaattaaccgactgcatgaatcccttcttttgcttgctgccaggaaatggcaatagtgtttgttcccgttccaaagaccgtgccaaccccccgcaatcggaaacgcctgcctcaccaacccccgcaatcgcaattcgcaaaccaaacaaatttgtgtactcaaaccggccccgtctcggttctattgtataaaacccccgccagaccgctggcttgttccgtcgtctccgctgtccgctgcacagagactgtaccggggcaggggcggcgcagaaacagagccacacaccgacacaccccacctacgctacgcgcgtgctgggcgagtgatggacctcgccctcctggagaaggccctgctggggctgttcgctgcggcggtgctggccatcgccgtggcgaagctgacgggcaggcggtaccgccttccaccgggcccccggggcgcccccgtggtggggaactggctgcaggtgggggacgacctgaaccaccgcaacctgatggcgctggcgcggcggttcggcgacatattcctgctgcgcatgggcgtgcgcaacctggtggtggtgtcgaccccggagctggcgaaggaggtgctgcacacgcagggcgtggagttcgggtcgcgcacccgcaacgtggtgttcgacatcttcacgggggaggggcaggacatggtgttcacggtgtacggcgagcactggcgcaagatgcggcgcatcatgaccgtgcccttcttcacgggcaaggtggtggcgcggaaccgcgccgggtgggaggaggaggcccgcctggtggtggaggacgtggcgcgggaccccgccgccgccgccgcgggcgtcgtcctccgccgccgcctccagcggatgatgtacaacgacatgttccgcatcatgttcgaccgccgcttcgacagcgacgacgacccgctgttcaacaagctcaaggcgctcaacgcggagcgcagccgcctgtcgcagagcttcgactacaactacggcgacttcatccccgtgctccgacccttcctccgcgggtacctcaaccgctgccacgacctcaagacccgccgcatgaaggtcttcgaggatagcttcgtccaggagcgcaagaaggtgatggctgagacgggtgagatccggtgcgccatggaccacatcctcgaggcggagaggaagggcgagatcaaccacgacaacgtcctctacatcgtcgagaacatcaacgtcgcagcgatcgagacgacgctgtggtcgatcgagtggggcatcgcggagctggtgaaccacccggccatccagtccaagctccgggaggagctgggctcggtcctgggcggcgccggcgtgcccgtgacggagccggacctcgagcgcctcccctacctccaggccgtcgtcaaggagacgctgcgcctgcgcatggccatcccgctgctggtcccgcacatgaacctcaacgacggcaagctcgccggctacgacatccccgccgagtccaagatcctcgtcaacgcctggttcctcgccaacgaccccaagaggtgggtgcgccccgacgagttccgccccgagcgcttcctggaggaggacaagtccgtggaggcccacggcaacgacttccgcttcgtcccgttcggggtcggccgccggagctgccccgggatcatcctcgcgctgcccatcatcggcatcaccctcgccagcctcgtgcagaacttccagctgctgccgccgcccggcctcgacaagatcgataccacggagaagcctggccagttcagcaaccagatcgccaagcacgccaccatcgtctgcaagcccctcaaggcctagaaatcacctgcacgcgcctcccgccacatcaagcactattgtaattttgtgcgtcttctctgttatgtgttgtgtccttgaaaacttctccaaaagttatagtgtcataaacttcaatttaatcaactctgttgcacaa

SEQ ID NO: 135477 - DNA, 567 bp, Zea Mays
gtccttcgatgccaacccaaataccccgcgcaatcagcacaacagaggtccccaaaaccagctcccacgcgggcgggccgatggctgccgtcgcggagctggagcggcgggtgatggcggcggtgaaggcctccgctgagcgcggggacccgccgctcctccaggccgccgaggccgcgcgctgcatccgcgaggcccccgccttcactccgggcggcctcgcgctctcgcaggcgttggtggcgaacctgtgcttcgcgcacaacacagccgccatgtggaagctgctggaccaggccatgttgtcccgcctggtggaccctctccacacgctcgccctccttaccccgagggtggtgccgaaccggcgggagcagccggaggcgtacatgctctacctcgagcttctcggtcggtacgcggtggctcctgtttacccggagcgcatggagaataaggatattttggtgtactctattcatgatgcaacttgcacacttgagaattgacaaattgcttattggatatcccggtttaaatctgcgctgtatttgactatttgctgat

SEQ ID NO: 135478 - DNA, 1485 bp, Zea Mays
gtccttcgatgccaacccaaataccccgcgcaatcagcacaacagaggtccccaaaaccagctcccacgcgggcgggccgatggctgccgtcgcggagctggagcggcgggtgatggcggcggtgaaggcctccgctgagcgcggggacccgccgctcctccaggccgccgaggccgcgcgctgcatccgcgaggcccccgccttcactccgggcggcctcgcgctctcgcaggcgttggtggcgaacctgtgcttcgcgcacaacacagccgccatgtggaagctgctggaccaggccatgttgtcccgcctggtggaccctctccacacgctcgccctccttaccccgagggtggtgccgaaccggcgggagcagccggaggcgtacatgctctacctcgagcttctcggtcggtacgcggtggctcctgtttacccggagcgcatggagaataaggatattttggtgtactctattcatgatgcaacttgcacacttgagaattgacaaattgcttattggatatcccggtttaaatctgcgctgtatttgactatttgctgatgcttttgggtgcgtgggcccagcttgatccggctgctgggaggttgcctggtcatttcgattagatgtatctgcgcaggtggaaactaggtagggtggaaacgactgcaaaattcttggtcttggtcttagaaagaaaaggtgcaccatttctaaccttgtgctgtgggccaaagactcaaaggcttcacaagtgtcatttaagctcctttcacattgggtggcttttcaaaagcaacccctacttttttggtataagccactgaataaatatttaaaacatacggttcaattgaccaaactatcttcaactataaattgttccatcaatctgcagctttctgataatggatttttaatctttaaagttctcatactgtggtcaatcacctgtaggcatgcgaaatttactgttagttatttgttaaaataatattttctatttgagtcatagccaaaaaccttacttcataagtgcatatcatataacacagcatagtttgtcaggaaattgcaaactattcctgtgtgtaccaacatcgtcaaagtgtcttattgaaatgtgtgcaaacaccaagggtttgagatgccacataccacttaggcgtctatttgtcaagtgtgtgattcttttccacatcaatgtatgctgtccgttaatgttatgagctactcccagttaatatttggtaaatatgatgcattagactgtacgttcttccaacttaggtagattctccatatagcacctgtaaacttgccataaagtcatgctcatatgtgcgcaattgaagcttttcagtccttttatccagctaatctctatcaattttttgagaaaaacacctttctgatattttaacattaactttagatatgggcatatggctttattttttactgattgttatattcatct

SEQ ID NO: 135479 - DNA, 3379 bp, Zea Mays
gttagccaaatctattgacggtgctatgcagctttcgcatagatttggttttcaacatttggattttggacatactgttattttgtttgtgttgagtcttgtcgacatgctgattgattgcatcttagacgattgtggattgcccgtcacctctgctgatgaacatggcaacagaaaagatatgaattttaatggcaaggggagatcatttgacaggggagatgaacaccgtgaacatctaaggagaaagaatatacttatgtctattgaagttgttgagaaggatagacctgaaaatttcaattatctacttcggaaacttcaccttattggtgctcttaaaaagaagaacgctttgtctccatgcaatctgctagatagcttgattgtgaatatacagaatgccataagcacgggctaccaattagacaggaaaaggcttctgggagttcctgttagcatacagccttgcagttcagctatttacagtatattcgtaactggaaagggatcttgttggattccttttgatatgtttatggagaatgcaatggatgggagacatcttcatactatatcatcagttgaatatctgacagctagaaaagcagcagttgttctgtctaacctgaaaactgggagtgagaacatgtacagttctttcaaagacagttcctctattaaagcagttggaaatatgctacatcttatcgtggaagcctgtatcgcaaggaacttaatagatgcatctgcttatttctggcctggctatgtggttccacttaaagaatcctctccagttcaggcatctccatggtcatctttagtagaagggtctccacttatagaacttaaggatgcccttatggtcacacctgcttcgagtgtagaagagttggagaaattgtactcttttgcagtaagtgggtcaccggaggaaaagttggcagcttcgaagattttgtgtggtgcatcacttcttcgtggttggaacattcaggaacatgttgttcaaatggtgcttaagttgttatcgacattcctccctttggattctggatcagaagggcgatatgtacagcatatgcctatgctgcatgctcttgtatcaggaatttcttctattgacactgttcatattctctcactgtatggtctggtgccagaagtagcatctatgttaatgcctctctgtgagaattttggatctttacctccatctgatcataggagttgtaaacttgaagaggcttctgtgtactcagtattctcatgcgctttcctgtccctgcttcgcttgtggaaatttcatagaccacccattgagagtgctttatcaaggcgtggagtctctgtttggtcagagctccgtttggattttctcttgttattacgtaatagtcattcttctttgaaaaatctgtctaatgttactcaatcaagcatatttgaattagatccaccatttcaaaaaccattgtatattgattcatttccaaagctaagggcatggtacttccagaatcaagcttgcatagcttctacactttctagtgcttgcagcaggacaactgtcctccatgtggcaaacatgatactgaaaatcatatgccataataaagtgccaaaaggtggtgtcctgtctgtaaatcctcagtcaacagcaaattccactacgagtagttcacctgcaggcgtacaggaagatatgtgccagtggccaacacttccagcatgggaaattcttgaagctgttccttttgtgcttgaggctatgctaacttcatgcgctcatggaagactttcatcccgtgacttggttacaggtttaagagatcttgcagatttcttgcctgcttcacttgctgctattgtcagctacttctctgcagaagtcactagtggcatatggaagccagttatgttgaatggaatggactggccaagtccagctgcaactcttccagtagttgaatcggagataaaagaagctcttgcatttgctggtgttcatatcaatatctgtccacgtccacgttctgcgatgccaatgcttccattgccaatagcagcgctaatgagtttgtcaataacagtcaagatggaggaattcagccacctacacggcatcatttcccaaggaattgaaatttgtgcgacatctagttcatggcccactatgcaaattataggcgcattgtggtcccagaaggcacggcggtggcatgattttatcatcctgacttgttcgcagtcccccttcactcgagataacaccgcggtggcacaactgatcaggagctgcttctcgtctttcctggggcctttggttgatgggcgctcctgctccgtagcaaacagaggagttgcgaatctgctggggcagagttctgatgaaaaagcacacaggcttgctgtagctccagggtttctctacatgagatcctgccggttatttccaaacaacacctttgtttgtgaagagatcttggaggtggtcattgagagagcccatgcgctagcaaatgaccgcagttctgacagacctgcccgtttgaggtcagagtgtttgccgctatcagctgcgtcatccttggtagagcagatagcatcacttgcagcgactatgctttgccacgctggcggggtgaatctgattcgtctcctctacgagcagatcatgcccaccctgctgctttcaggtggagaagctaagctcggttccggtggtatggtatgcagcataatcgaaggatacacgctagcgtacgttctcctcttctcgggcgcaaccgtctggggagtcggagaaacgtcgccagcttacactttaatatacacatccaaaagacaacgggtcctcgacaggcacctggagttcatggccagggtgatggagggtaacattgtgctgggctgtggagatgccacgtggaggtcctacgttctgtgtttcgtcaacttgctggtcagcttcgtgcccgcgtgggtccctgaagtgaagctaaatacgctgcagaaactggcatctgggcttcggagatggcacgagggcgatcttgccctctctttgcttgagctagggggagccaagaccgtgacttcagtagttgaatctcttctgcggtgagctggtgctcaactgactgtatagttttctacgacaggttggtccatatacacattataacatgttaatgatctaaaaattcagtcatcagaaagatgaacagtacagttctaccgaagcttgattattcgtactgtcagtcagctaaagagatgtccagcagtttctatagtagttacatgatagtgtgtaattgatggaaatgtcatttactggcagtcgtccatttggagtgtataaaaatcatgg

SEQ ID NO: 135480 - DNA, 223 bp, Zea Mays
cggtagttggctagagaatagtgtcccggcgagcacgaccagggaggtgagcaaggggcatagggtattgatgtccttcgaccagagaccacagcacatagcatggcggatggacttagccgcggcgaggtcgaccgacgagggaagcagggaacacgacgacgacggtcagccgatcgacgaccggagcatgacgcgatagacttggggatgtcgtgacggc

SEQ ID NO: 135481 - DNA, 223 bp, Zea Mays
cggtagttggctagagaatagtgtcccggcgagcacgaccagggaggtgaggaaggggcatagggtattgatgtccttcgaccagagaccacagcacatagcatggcggatggacttagccgcggcgaggtcgaccgacgagggaagcagggaacacgacgacgacggtcagccgatcgatgaccggagcatgacgcgatagacttggggatgtcgtgacggc

SEQ ID NO: 135482 - DNA, 1410 bp, Zea Mays
atgagcaagatgccatatccggtgagctacgagtacgtgccgttcccctacagctccagttcctacgacagcctcgtgtcgctggtgccgagacagatagccgacatcgtcgtcggcgacgtgacaatcacggcgagcaggatgggcagcgcggacttcagcatgccgttcacggactcggggtggtcgatggtggtggcgcctgtggctcgccagcctcgccttcttctgcttcaccggattcgtggtatgggcgatcgagcacaggatcaacccgagttccgcggcacgccgtggcagcagttcggcctcatcttctacttcgccttctccaccctcgtcttctcgcacaaggagaagctggagagcaacctgtcgaggttcgtggtgatcatctgggtgttcgtcgtcctgatcctgacgtcgagctacacggcgagcctgacgtcgatgctgacagtgcagaagctccagccggcggtgaccgacgtgagagagctccaacggaccggcgcctacatcgggtaccaggagggctccttcatcaagaattcgctcaagaaactaggcttccacgaggccaagatgaggagctacagcacggcgggggagtacgccgacgcgctgtccaaggggccggccaacggcggggtcgccgccgtgttcgacgagatcccgtacctgaagctcttcttgtcgcagtactgcgacggctacaccatgtttgggccggtctacaagaccgacggcttcgggttcgtcttcccgataggcagcccgctgacgccggacgtgtcacgggtgcttctgacgctggcggaaggcgagaagatggcgcagatcgaaaagaagtggttcggcgagccgggagcgtgcccgagccagggcgccgccgccctcggctcctccaacctcagcttccggagcttcggcggtctgttcctcatcaccggcgtcgtgtccagcctcatgctgctcgtctacctcgccaccttcatttaccaggagcgcggcgaggtccggccagagccggaggaggaaggctcggggagctcgtcgtcggtgcgccggctgcgcgcgtggctgcggcacttcgaccagaaggacctcaagtgcgccacgttcagaacgggggaccacgactccgtcagggatggtgggaaccagactcagaggtgggcggagtccgtcaggtatggccgtggcggaaacgggtcggtgcaggcggcaatcgaggaggaagccgtagcaatgggcatgagccctctcaggttcggcacctccaccccgtcggagacgatgaacgccggctcgtccccggcgtcagagttcgggacctcgttcgagcagaggatgcaggaggcgccacactctgtgtcggtggagatgccaagatcgacgccctcttaa

SEQ ID NO: 135483 - DNA, 1744 bp, Zea Mays
ggccgcaagaatcattttgtgaaaaaaaaaactaaaaaaaaatacaactaggttcatccactttagggcacctccctcacccgaagagctgatgctgacagctccaccgctcgccgccgccgcccgccgcgccgccacagctgccgcatgtggcgccgcccaccggctcctccttccagtttgctttctatcctccaacccctctgccccgagcactctcgtaccgcgccgccgcttcggccacatgtcgcaggagtgcatggccccgcgcgctcccctaccgccggtcggacggaactttgcggtggctgtgggggatgagatcctgtatggagatgccccggagctggttgtggtgtcgttctaccggttcgctgatttccccgaccatgctgcattccggctgccgcttaaggagctttgcgaggagctgcgtgtttcaggtggcattatccttgcacctgagggaatcaatggtagtatatgtggaaccccagttgctgtggacaaaatcttaaactttattcaagaagacggtcgtttaaaaggattgagaatgatccagtcacctgttactccagaggatgaggccatacatcatggacataccagtcactcccctgttggtgctggggaagatgcaccattccgatgggatcatgtccgtgtcaaattgaaaaaggagatagtgacgtttggagacccaggtgttatgccaactaaaatcgttgggaaatatgttaagccaaaagactggaatgacttgataagtgatccagacactgtcatcattgatgtgcgtaacatgtatgagatacgcataggaaagtttaagaaagctgtcgatccacgtacaaactcattcagagagtttcctacttgggttgacgatcaatttcaattggttcaatcaggcaccctagggtcagggggagatgataatggaaccggtgaaccatcggcagaccttaatgccagcaaatccaaacagctaccaagagttgctatgtactgcactggtggtatccgatgtgagaaggcatcaagctttctcctcggcaagggctttaaagaggtttatcatttggaaggcgggatattgaagtatctggaggaaatcccaaaggccgaaagtttgtgggagggtgaatgctttgtgtttgacaagcgtgtctctgtggggcatggattggcccaaggcacccacaaactttgctacgggtgtaagcagccagtcagcgatgaggacatgttgtcgcctcactgggagtacggcgtctcttgcccgcattgcttcgcaacgaaatccgaggaggagaaggaacgggctagggctcggcagcggcagttcgagacctttggagtgataggtgggcctcatatgggcaagagtccgagagggtctgccgctaacaatgcagtggagttcatacagttgcccaagtcagtgtaactttaattatccatctgaaacttttagattgaagtgttgttgacaaagtgagggaatcaaccagattggcaatgattgccatattatgatcttttccgatgcttaagtttttgtcggaaaaagtggtgtcgataccatttgttttagattgtaacctcgctaactcccggagatgctaaggtcctgttcggttgtttagaattggagacccgaattaattcctagccggattatttctctaatttatatagattttgatgagctggaatgaatcctggcttattccggtac

SEQ ID NO: 135484 - DNA, 2528 bp, Zea Mays
gcgctctctgtggcggacatcaaatcctctcggagaacagccaaacgagccaccaaaatgtaagaaaacgcacgccccggcgctggccgctagtcaccccaaagctccgcctccgcaccttctctcactcgcccagccgcggctatggcggccaccacatccacggcggcggcggcagtatccttctccctcccctcaccaccgcactgccgcggggcccggcgccgccgcgcgccttccctcctccgtgccgcctccaccgccgcgcccccctcccccgacctctccatccagctctcgccccgcgcgtccccgcccgcgtctaccaacggcgccgccaccgcgcttggaccccccgtgtccgcctcctttgcccgtgaccgcgccgaggacctgcaggccgaggcccgcgcgatggcccgcgccgctggcgccacagtctacagtcccgagctcctcgccgcccgctacggctcccgccccttcaaggtggcgctccgggcaggggaggtgctgtccaagttggcgtcgttcggggtgaaggtcctactggacgagcggagaggggagtcgtcatcggagaggaggcgcgccagggcggtggagttgcgcaccatcttcactaggctcggcccaaccttcgtcaaaattggacagggcctgtccacgcgccccgacctctgcccggccgagtacctcgaggagctcgccgagctgcaggattcacttcccacatttccggatgaagaggcatttgcatgtattgagagagagcttggcttcacgcttgattcaatctactcgacaatttcaccttcccccattgcagcggctagtttaggtcaagtttataaagcacggttgaaatactctgggaagctggtagctgtgaaggtgcagagacccagtattgagaaagccattgggcttgatttttatctacttagaggacttggctttcttataaataagtatgttgacattgtaaccagcgatgttgttgccctcatcgatgaatttgctcgaagagtttttcaagagcttaattatgttcaggaaggccaaaatgcaagaaggtttaagaaattatatgccgataagcaagatgtattagtgcctgatatattttgggattacacaagtgcaaaggttctaacaatggagtggattgagggtgtaaaattaaaccaacaagcagttattgaaagtcaaggattgaaggttctggatttggtcaacattggtatccagtgtagcttgagacagcttctggagtatggttactttcatgcagaccctcatcctggtaatatattagcaacacctgaggggaaactggcttttcttgattttggcatgatgagtgaaacaccagaggatgcgagggtagccattataggacatgttgtccacttagtcaacagggactacgaagcaatggctcgtgattattatgcactagatttcttggaacccgatgtagatgtttccccgattgtgcctgctctcaagaattttttcgatgatgcactaaatgcaacagtgagtgagttgaacttcaagacaatagttgatggcctaggtgctgttctctatcagtacccattcaatgtaccagcatactatgcattgatactgcgatcgctcaccgtactggaaggtttagcactctatgctgaccctgattttaaggtgcttgctgcatcatacccttactttgcgaaaaggctactgactgatcccaacccatatctcagagatgctttaattgagcttgtattcaaggatggaaaattcagatggaataggcttgaaaatcttcttgttcaagggcgccaagatagggagtttgcagccaaagatgcactgcagcctgttctaaagcttctccttggtcctggtggggaggaattgcgtgcgttagttgtgaaagaggcagttcgtgtgacagaagccatcgccattggaacactggtcgattcatacaatgcagctccatcatttttgaagccattaatttccagcggcaatctagctgaaccctttaagtttagtgagactgaacaagaacagatgatggagctccgagaccaggttttcagagtatggggtcttttgagatcctcaaataactttgatccgagccttttgcagccaatcgttcaggttctacaagaaccagaggcccgtgtcttgggttctcgtgtcgcaggtggtgtaacacagcgccttgcggcacgtctgctgcaacagcttctcaggacccctcctgctcctggatcttcttagcagatatatagatataggctcgtatgattgtatgaagcatgtaaattgacacgatatttttcacaggaaatgagaaggaagcacaacccagaattcgagtatatagctagtttcttggttctaagtggataaagacattgtgcatcgagctttgtccagcagaccgtgtatatagttgtgtaaaaaacattgttttgtgctgtagattacactgtttacggagtgaagattgaaatgat

SEQ ID NO: 135485 - DNA, 1110 bp, Zea Mays
ccctttccccctccatctcggtgtcagacgcatacgcacccaggagatacagcgagcgagcgaccaaagccatggctctccgcaccctggcatcgaagaaggtcctatccttcccgttcggcggcgcgggccggccgttggcggcggcggcgtctgcgaggggggtgacgacggtcacactccccgacctctcctacgacttcatcgcgctggaaccggccatctcgggggagatcatgcgcttgcaccaccaaaagcaccacgccacctacgtcgccaactacaacaaggcgctggagcagcttgacactgccgtctccaagggcgacgcctccgctgtcgtccagctgcagggcgccatcaagttcaacggcggtggtcatgtgaaccattcaatcttctggaagaacctcaagcccattagcgaaggtggcggggagccgcctcatgggaaacttggctgggccatcgatgaggattttggttcgtttgaggcacttgtaaagaagatgaatgcagaaggcgctgctttacaagggtctggatgggtgtggttagctttggataaagaggcaaaaaagctttcagttgaaacaacagctaatcaggatcctctggtgactaaaggtgcaagcttggttccgctgttggggattgatgtctgggaacatgcatactacctgcagtacaagaatgttaggccggattacctgaacaacatctggaaggtgatgaactggaaatatgctggagaggtgtacgaaaatgttcttgcttgaattgtcttaacggacaatacacatctgcgcgcgcgggtttcggctgtttgatcatgtgaaataaagatggacctgtctagcggctggaccttgtgtacatttcactgagatagactaatgcacggcctgccgattttgttcgtcctgcttgcgtgctactctgtctctgctcctagtttttggcatcatgtttatgttgagcaaggtgatgcccaagggaagccattcccactcttgtctccattaataaaatcagctgagcttccgatgtttgcttgaatttgttgccatgcgtttccagtttttggccattccacttgttggagcaaaa

SEQ ID NO: 135486 - DNA, 1882 bp, Zea Mays
acgattcccccgctcctcccgatcgcggtcagttcagccagccatatcgttgaacgccgcgtccagcgcgctagctctcgagcgcgcgggcggtggggcgggccggagtaaggcgcgtcgcgcgcgggcgggtcaggacagctagggatcaatggggaaggcgcagtggttgagcgtagccttgggctgcgcggcggcggtgacgtgcgcggtggcgacggcgctggtagcgaggcgggcggtggcgcggtctcggtggagcagagccgtggcggtggtgcgcaggttcgaggaggactgcgccacgcccacggagcgcctgcagcggatcgtcaactccctctccgtcgagatgttcgcggggctcgcgtccgagggcgccagcaaggtccggatgctgctcacctgcgtagacacgctccccgacgggagtgaggaaggcgtctactactctgttgatcttggggggacaagttttagagtcatgaaactagagcttggtccaggatctacgattatcaataaaaaagttgaacatcaacctattccagaagacttgaccaagggtacgagcgaggatttattcaatctaattgccttggcattaaagaacttcattggaagagagggtgggggcgatgagggaagggcacttggttttacattttccttccccgttagacatatttccatatcctcgggatcgttaattaggtggaccaaggagttttcaattgaagaggctgttgaaaaagatgttgctcaatgcttgaatgaagctcttgttaggaatggactgaatttgcaggtcactgcattggtgaacaatgctgtcggtacattggccatggggcactattatgatgaggatacagttgctgcagtggttataggagctggtaccaatgcttcctatattgaacgcaatgccgctatcgcaaaatctgagggccttcttgacaaatctgacgacataacggttgtgaatgtagaatggggtagtttccggtctcctctaataccattaactccttatgacatatgcaccagtgaagcaaaacgcaatcaatatgatcaagcttttgagaaaatgatctctggtgtgtatcttggggaaattgctagattggtattccaaggaatggctcaagaatcagatttatttggtccatctgtgaattgcttatccacccctttcgtattaagtacaccttctctcgctactattcgtgaggatgattccccagaccttagagtagttggtagggtgctcgaagaacatctgaagatgcaggatgttccaatgaagactcggagacttgttgtgagagtatgtgacattgtaactcgaagagccgcccgtctagcagctgctgggattgttgcagtgctacagaaaattgggcgtgatggtagtctttgcgggacaaccttggttcgaaagataagaggcgagccgaagagatcggttgtcgcgattgaaggcggtctctaccaaggctattcggtcttcaaggagtatgtgaatgaagcggtggacgagatcctgggggatgagatcgcctccacagttagtcttagggttatggaggatggttcagtgattggggctgcactcgttgcggcatcatactcgtcatcggctagaaaaaattcagtgtagatatgtcgctagcttaaacgatttcctgtattgttgtattttcttctcatctatacaaactgatgtcaagttctagtagtagtggatcatgcattgcatatataggtggctagctatcagttgagagtttaatactactgttagtgaactatgaggtatgagcccatcaatgttgtaatgttgattgaatgaaatgctatgtcaatccagcttgatcaa

SEQ ID NO: 135487 - DNA, 351 bp, Zea Mays
atgctcgagggcgccactgaagacatggacctcatgggccggctcctcgatgagctcgacctgctgcagcgccactccccggatgtggaccttgacatggtggacatggaccttcttaaacatattgtagttcacaaagaagtcatcagcattactaaatatcactgcaagcttggtcttactggcacaaaactgaacgtgtttgcttggacctccagtcctgagctgttctatgtcgatgtctctggtgtacaagatatctacaggtggcaacaaggtttatatgctggtgagtgtcgagcgaatctggacgtgtggtgttccatgtacatgtttctacgggacaactaa

SEQ ID NO: 135488 - DNA, 3396 bp, Zea Mays
agaggtgtctcggtccgacttggtacttggcggctccactgctcacgtcacgtgcccgcgttctctctccgactcccatgcctctccggcgagctagtctggtatccatcggcgagctagttttgtctccaccggcgagcacgcgtctgtaacctcctccacccccatcgaactccacctgctctccaatccgctagatctcggctccgtgcagctgtgctgattgtgaggaatttggtagcacctctatcagggttttaaaactagagtgctgccgccccagcatacataatatggacgaagaaaatgttgttgagctgctgcaacgttatcgccgtgaccgtcaagtattactcaactacattctttctggcaacttgatcaagaaagttgcaatgccacctggtgcaatctctttggatgatgtagatatagatcaagttagtgttgattatgtcctcaactgtgctaagaaaggtgaacctcttgaccttggagacgccatccgcctttttcatgatagccttgactatccatatgtgaataacactggagctgtggatgagttctatttgcttacaaaaccagaatattcaggaccagctccaacacgagaaccaccacctatcccagccactgcaccatcatcagttgtgataccaccaccggatgtggaaccagcaccaattattgtgtcatcgccagtcacagctaccaacttgccaaaatcacaaccatttgattctccgaccgagaaggagttaactatagatgacattgaagactttgaggatgatgaagatgaatttgatgggcgaagggcttctagaagacatcaaactgacgctagtgatctatcgttgctgttaccatcatttgaaacaggtatcacagacaatgatcttcgtgaggcagcatatgagatccttgttgctgctgctggtgcttcggggggccttatagttcctcagaaagaaaagaaaaaagagaagagacacagattgatgaggaaactcggtcgtagtaagagtgaaagtgtggatatcaacactcaacggcaacctggtttagttggtttgcttgaaaccatgcgagctcaacttgagataacagagtccatggatattcgaactaggcaaggattactcaacgctatggttggcaaagttggaaaacggatggacaatcttttgattccattggaactattatgctgcatatccagaactgaattttctgacatgaaagcataccttcgttggcagaagagacagttaaacatgctggaggaaggcctcataaaccatccagttgttggatttggggagttaggtcgaaaagtcaatgagataaggagcctttttagaaagattgaagaatccgagtccttgccaccatctgctgcagaggttcaacggacagaatgcttaagatcactgagagaagttgccacttctctatctgaaaggcctgcccggggtgatcttactggtgaggtttgtcactgggctgatggataccatctgaatgtagcattgtatgagaagatgcttggcagtgtttttgacatcttggatgagggaaaacttacagaggaggcagaggaaatccttgaactcttaaggtcaacttggcggacactaggaatcacagagactgttcatgatacatgctatgcatgggtattatttcgacagtttgttcttacaggtgagcaaggacttctgaaagtcgtgattgacaatttgaggaagatacctttgaaagaacagcgtggtccgcaagaaagattacacttgaaaagcctgcgtagttctgttgatgctgagggtagctatcaagacttcacatttttccagtctttcctgtctccaattcagaaatggacggacaagaaactaaatgactatcacctacatttctccgagggctccagcttgatggctgatgttgtgacagtggcaatgcttacaaggcggatccttggtgaagaaaatgacaaggtagcggagtctcctgacagagatcagattgaccgatacatcacttcttcagtcaaaaatactttcttgaagatggcacattctgtagagttcaaagcagacactacaaatgagcatgttttagcatctctagctgaggagacaaagaaactgctgaaaaaagatacagccatttttacacctgttttgacaaaatggcatccacaggcagcagttgtttctgcttccctcattcataaactttatggaaataaattgagaccatttcttgagcatgctgagcatcttacggaggatgtggtttctgtatttccggcagctgatgctttggagcaatacgtaatgtctgtgatggcctccgtcacgggagatgatggtttggatagcctatgcagacataaactagttccatatcagattgaaagtaaatctggtacattagttttacgctgggtaaatgggcaacttgagagaattgaaacttgggttaaaagggctgctgaccaagaggtttgggaccctatatcccctcaacaacgccatggaaattctattgtagaagtctatagaatcatagaagagactgcagatcaattttttgcatttaaggttcctatgcgagatggagaattaaatagtctatgccgtggtcttgacaaggcattccaagtttatacacagctggttactgcacccctagttgataaagaagatttagctccgcctattcctgttcttactcgatataaaaaggagcttggaatcaaggcttttgtaaaaaaagaggtccaagaagttagaacagttgatgagaggaaagctagcgaaattactcagcttacaatgccaaagctttgtgttcgtcttaacagtctatattacggtatcagccagttgagtaagttggaggacagcattaatgagaggtgggctcggaagaaaagtgaaaacactaacatcagacgaaaaagtgaaaagtcaaagagtgccgtccctaatcagaagaatcaatttgatggcagcagaaaagaaatcaatactgctattgatcgtctctgtgaatttactgggacaaaggttatattctgggacctgcagcagccatttgttgagaatttatacagaaatggtgttgctcaagctcgattggacaccataactgaagtgcttgatttggtccttaatcaactttgtgatgtcattgtggaacaactgagggatcgtgtggttacagggcttctgcaagcatgcctggatggcttccttcgtgtgatactggatggaggttctacacgtgtcttctctccaaatgatgcagctttattggaggaagatcttgaaaccctgaaggttatatcatttacagaatcatattgcctgctttgctgtaatt

SEQ ID NO: 135489 - DNA, 702 bp, Zea Mays
atggccactccgtcctggacggccacccccacggacgctcagtcgcccctcttacccccttctggactgcttggctctaccccctccttgtcattgctggccaagcctcttgttcctagaggtcgctcgaagactgatcattggaaagagctttcccgtagcccatcacctgctcttttggatggggtctccgctaccccctctgcgaatgtggattttgatggtgcagcagtggattcccatcctacgccctaccgtgatatcatgctctcgacagcacatgaacatcgtagtctagagccgatcactgttcggacttccccgatgaggattgtgctacaatgcgaagatgtttgttctgctttggttccagtttgtcgaggatctgacgcagatgactgtggttggttgagcgtagacgaaaggttgttgagtgagctccttgtcaaatggtccctcacgatctccgaggaaagtgcttcaactgtttgtctacttaccattgtgccaccagatgccgtcttcctccttgatgcttcaattgcttgcaattacgacaccgtgtctcggagtgcttcacatcttgtgatgctgccaatgaaggctcacgacttccagtctgggatcgactatttaagaaggctggagcgaagagtctggcagatgttcggcgtggaatcgtctatcttggaaagagaatag

SEQ ID NO: 135490 - DNA, 586 bp, Zea Mays
tcttcatcatcatcatcatcgaaagcaaccacatgcgtatttcagaacaaaagataagaccaatacaaaaacaacccatgcaggtccagaaatcgcaaaatcttgcgaggactagtcaggcacaacaatctgcacgggatgcggcgtcctgcgatatccggcggactggcgcgtcctcgcgtgactgctttgctgcgcggagaactgagatcgagcggggcttcccaatccctcgcggcatcacaaaaacagacgatcgatacggggaaccacctatcaagcaacaagcttacgaagattactacatgaaggcatcgaacgcatcgcacctgagcggggtggggcgtgagcaccgcacgcgcacggtcgcccggcggcggcctaaggtctacagatggagcaagcaaacccgcagaaatcgcctcgcgtcgtctgctctgttcctctgggttccgttcgacgcgtggctctgtgggtggcggaggcttatatgggatcgaatggagaagcggaggccgtgatggttacgagctcttgcgaacgcgtagggaaaactttcggcaaggcttcgcgtccacgtgctgcg

SEQ ID NO: 135491 - DNA, 2290 bp, Zea Mays
cacgcgcggtgttctgcctccagtcggtcgcgatagcgctctccatcctgccgccgccgcctaccatttctgccattcctgtctattcccatcgttgaaaccgctcgccctctccacgtgacatccaaacgcgaccgccccctccccacccccaccagccgcccgcctcctctgcgtcgcatccgccgcgagctcggggcgggacagcctccacggcggcggggtcacgctgaacagggagccgctgcagggccggcgcctgcacgccatctccgtgtatgtgagcgggatgctgaccgtgcgcgagacgctgctgttcgccgctgagttctgcctgccctgcgcgctttcctcagagcggaagcgcgcgcgcgtcgaccagctcggcctcttctacgctgccgacaccatcaacggctggcggcagcggcgttcctatcgcagccatgcgccgtcgacgtcgtctacggggaggtgtgggcaggacggctggcactgccggtggtgaacggggaagagctgtttgcacgcgggctgttgggtgtcgagctcgccccgatgacgttccgtcgttcgcagcaaagccagactggtgccctgtgttccttcgggcatcactacggcaatttgaggggctagaggacgccgccgacgtgctcgtcaactcattccacgagatcgaacccaaggaggcagattatatggccctaacatggcatgcaaagacaataggcccaacattgccatcattttatcttgatgatgactgtttgccgttgaacaagacttacggtttcaacctcttcaacagcagtgagtcatgtctggcttggctcgacaaacagcttccgtgttctgttgttcttgtatcctatggtactgtctctgattatgatgaagcacagttagaggagcttggcaatggattgtacaattctggcaaaccattcatttgggttgtgaggtcaaacgaagaacataagttgtccaatgaactccgtgacaagtgcaaggaacgtggccttattgtttcttagtgcccccagctggaagttctagcacataaagctacaggttgtttcttcacacattgcggatggaactcaacattggaagcaattgttaatggtgtgccaatggtggcaataccacactgggcagactagccgaccatatcaaaatatatggagagcatgtggggcttgggtgtccgggtgcgcaaggatgagaaaggcttggtgacgagggacaaggtggaaaggtgcatcaaggatgtcatggatggtgatagtaaggataagtataggaagagtgccactatgtggatgcaaaaggccaaggcagctatgcagaatggagggagttcggacaagaatattacagaattcatcgctaagtattctttaagttaattttcaaagatttcgtaaaaaagttaattttcaaaggtataatgatagtgttataattactttctaccttcgtggattgtatgctgcatgttatattttgtctcaggattgtgcgtattacgttttgacttgatgctgtagatgctacaacagcaacctccacgtctaaaaatatatacattgttatgcgctatcctttgaaactttataatcacattatctttacaactaattaagtactcattgtaggcgtccacacgccgcgagctcggggcgggacagcctccacggtggcggggtcacgctgaacagggagccgctgcagggccggcacctgcacgccatctccgtgtatgtgagcaggatactgaccgtgcgcgagacgttgctgttcgctgccgagttccgcctgccctgcgcgctttcctcagagcggaagcgcgtgggcgtcgaccagctcggcctcttctacaccgccgacaccatcatcggcaacaggggccaccacggcacgtcctcggcagcggcgacctgtacgcggtgtgtgctggtgatgcaagtggcggcgtgggcgtgggcgtgggcggcctatacgaggtcgtgtacaacaacgtcgttagtctatgtgtcaaggccattgggtggaggcccgagcggaggttcaagtggaagctcctcgacggctcgacggggagaagaggagcgcccacttccctatggtcctggtccagatgcccatgtataacgagctggaggtgagaacaggccaccacaaaaaagtcgctaaaatcgtataggaatatgttaactattcatccatggattgttattcctcttgttactttgtgagatcaaatattattttgatgaggtgcgct

SEQ ID NO: 135492 - DNA, 2275 bp, Zea Mays
atgcgccgtcgacgtcgtctacggggaggtgtgggcaggacggctggcactgccggtggtgaacggggaagagctgtttgcacgcgggctgttgggtgtcgagctcgccccgatgacgttccgtcgttcgcagcaaagccagactggtgccctgtgttccttcgggcatcactacggcaatttgaggggctagaggacgccgccgacgtgctcgtcaactcattccacgagatcgaacccaaggaggcagattatatggccctaacatggcatgcaaagacaataggcccaacattgccatcattttatcttgatgatgactgtttgccgttgaacaagacttacggtttcaacctcttcaacagcagtgagtcatgtctggcttggctcgacaaacagcttccgtgttctgttgttcttgtatcctatggtactgtctctgattatgatgaagcacagttagaggagcttggcaatggattgtacaattctggcaaaccattcatttgggttagcatgtggggcttgggtgtccgggtgcgcaaggatgagaaaggcttggtgacgagggacaaggtggaaaggtgcatcaaggatgtcatggatggtgatagtaaggataagtataggaagagtgccactatgtggatgcaaaaggccaaggcagctatgcagaatggagggagttcggacaagaatattacagaattcatcgctaagcgtccacacgccgcgagctcggggcgggacagcctccacggtggcggggtcacgctgaacagggagccgctgcagggccggcacctgcacgccatctccgtgtatgtgagcaggatactgaccgtgcgcgagacgttgctgttcgctgccgagttccgcctgccctgcgcgctttcctcagagcggaagcgcgtgggcgtcgaccagctcggcctcttctacaccgccgacaccatcatcggcaacaggggccaccacggcacgtcctcggcagcggcgacctgtacgcggtgtgtgctggtgatgcaagtggcggcgtgggcgtgggcgtgggcggcctatacgaggtcgtgtacaacaacgtcgttagtctatgtgtcaaggccattgggtggaggcccgagcggaggttcaagtggaagctcctcgacggctcgacggggagaagaggagcgcccacttccctatggtcctggtccagatgcccatgtataacgagctggaggtgcataagctgttagcggcagcatgtgagctgcagtggtcgaaggacaggataatagttcaagtggtggactattctactgatccctttatcaagacctgaagatgaaagaagagcaccggcccactttgcttcataggaccactatatggaatggtatgcagttggtggactctggcttttgtagcgtaacatagtggtccatggtgcacttagaaaggacaatctaatcatgatgcaatgacatcatatgtgattcatgatatagcatcgacatcatggttcaattatcgtgatatatgttcccgttgcaacgcatgggcactcacctagtaccttttgaagtcctgaaccaccacgagagcggcggcggcggcggcggctcccaagatattttcgcttcctaaattcacaatgcaggatccgagtccgatacgtcctgcgtatgtaggatgagaacagtcggatttgtaaacgctaaaatcgttctgctctcgtatttttttatcaaaaataaaatcgaaaatagtaactccagacagatatcaatatttcgaaaacatcgaaaataaaagtttggcacagaaagtatatcgctaactgtcgaaatttaaaatactatcggtaaccaaagcaatatgaaaacatcccaatataataggctcactaactgtatcatagtcactcgcaatttacatggtagaaactagcatattcatacgctgaggccacctgggagagatcaccggtgctaacaaattcaatattcatacagagactatattcatatagagagcaaagcaaatagttgctagttcagtagtttatagtttatacgtggtgcctgtctgtacgactctatctctgttgatgccgtcgccgatctgggaggccacgacgctgcggcgtttttgggagggcgagaggggagggcgagggcgtgatgccgacgcacggcttgcaaggcacgacggcgattcagctaggacgaagacgacgagtcagccatggacgaccggatgagagttgagagaggctggaactggacct

SEQ ID NO: 135493 - DNA, 1004 bp, Zea Mays
atggaccagtacctgagggtggagtggccgtggaacgagtcaaccatcaaggagaacgagatccgcatcaccgcgcagggcctcatccgcaactatgtctcctacgctacctccctgctccaagtgcctgggcttgtcctcgccatcgccgtcatgttcacggtgttgtcggagaggttcctgaagatccagagggaggcgccgctggagtaccagcagtacctcgtgcaggtgaccaagtaccaggccgcacagaactgcaaggctaggggattgaagaagcacttgaagaggctcaatgcgcccaagcattggatgctcaacaagcttggcagagcttttgctcccaagccatcttctggacctcacaagtccagggagtgcctgcctttgatcctcatcatcaggaacaggctcaagtatgcactgacgtaccgtgagatgtcatttccatccctaagacaaacgagaactataggctgcttccgtcttcacccaatcagggatgaggatgccaagttcatgctctgtaaggtggggtctgttcagtttggccagaaaggcatcccctacctgaacacctatggcgaccgcaccatccgctaccccgacccgctcatcaaggccaacgacaccaacaagatcgatctagagaccaacaagatcatggacttcatcaagtttgacgtcggcaacgtggtcatggtgaccggcgggaggaacaccgggcgtgtaggagtgatcaagaacagggagaagcacaagggcaacttcgagaccattcacgtgctgcttggagctttttgctatgtctagttttctcctatttgttgtacaggaaaacatagaatggaattcaaatttggtggccgcaaaagagtagagacttgtttcatataaagttaggcttaacattagtgcaaacagttgtattttagtttagatttagagtacacttatgtatgcgttgtttgacaatgcttatttatgatatattgaatggt

SEQ ID NO: 135494 - DNA, 601 bp, Zea Mays
tgtttattttattttttaaacaaacagaaccatgcaatttgttgtagcatttttttcttcaaaaggtacaatatttgtagctaagcaaagaaaataaaggaaaataacaatacttaaatcacctcaaatcatatatagtttttttactttttgtatgaagagaagatgcagatcatgacataaatcatttgtagcccacttgtttactttagttgtgctatgtgtgtcctataagcagcatagtaattcaaaacatagtaattcattgaatggcactggacagttgaattgaatggcacgttttttgaatgaaactacaccaacagcatatttcggtgccactggagactggacggttgaattgaacaccacacatcaaactcagaaggaacccaacaaagatactaaatcttcagatttaaggtaccagctgaaatcacaacattgcatatagtgacatgaattcaaaacatagctaaggcagtgtccaattcttggtaaactagatgtaaaatctactgcttgatatcagccttcttctgccacagcctgtccaaggagctgtctgcgtcgccctatgcacaacaaaatatgaaatcag

SEQ ID NO: 135495 - DNA, 807 bp, Zea Mays
atggcgccgggtccttggacggtgaaaagcggaggcggagaacgagcaacattggcagctggccgagacacaggccagtggcgacggtggctgctgcgcactcaatgggtacgaccggacgaagacacgagcagggagcgacggcggtcggtcggagcgcgacacgagcaggcaatgatggcgatggggacagacgccgtggacgagccgactaattctcacggcgggagattaatctgtgtcggcagtagggaagcgtctaacaccaactaccactttttgtgcgactacatcggtcagtctctcccatccttgcctaaggagccctgcgcaggcaaaggccgtagtatgtcaaggcggcagcggttcccgaggcaacatcatggaggcgtgctgcctctagccgatcgaagtcttcaagacgcgactgcggctcgatcgcacgagagcctaccggggcatcgtgcattgcggcaccaccgggtgacccacgctgggggcgttcacgtgctctggaaggggctcacacacttcgccacacacctcaaactcaatatgcgtttaaggaccccagaccccacaacgggcatggttgccattcaaccatatgataagtcaagaaggcagcaaaaactagcgaagaggggaggtgctgctattgaccgaagtcaggatattgctaaattgcaagaattttacaagctttatagagaaaagcataaagtggatgagttgattgaagatgaaatgaagttgagggaatctgccgtgttcagcggtaaccttgattcaccgcaagatggttga

SEQ ID NO: 135496 - DNA, 639 bp, Zea Mays
atggcgtgtagaacgctggagctgacgctggtctccgcgagggacctccgtgccgtcaacctcgtctccaagatggaggtctacgcggtggcctacgaagccggcgacccgcgctcgcggcagcgcgtccccgccgaccgcgccggcggccgcaaccccacctggaacgccaccgtcctgctcacagtcccggcctccgcaggcaccgggagccgcgccgtccgcatcctgctgcgcacggagcgcgcgctgggcggcgaccgcgacgtcggcgaggtgctcctcccgctcgccgacgtcctcgctggggccggggacgggcccacgacggacgccacggtcgcctgcttccccgtccgcaggatcggcggctcaagcaagccccagggcgtgctcaacctctcttacaagctcggcggggtcgtccagccggaccaccttgccgcccggaccgagggaaccccgcgggtgcaggcagctggcggcccgtgtccgacgatggcgtacttggctgccgcggcgacggcgtactcggctgcgcgcccgccacaggacttgccgcctacagcgtacgcagcgccgcccgtgggtgcgacgtcgacgagcatgcggagcagccggtggaagctagccgcttga

SEQ ID NO: 135497 - DNA, 1998 bp, Zea Mays
atgccccattccagctccctccaccacttcctccgccacgtttccttccctccggacccgcacctcctccccaccgcgttcaagtcatgcccgacactgccgctcgcccgcgctctccacgccgtcgccgaggtcagcggcctcgcgcgggaccccttcgtcgcctcctcgctcctacacgcctatctccgcctcggtaccacgggcaacgcccgcgccttgttcgacggaatgccgcgcccgcagaggaccgtcgtcggctggagcgcgctggtcgcggcgcacgcggcgcgcggggacgccgagggcgcctggcgcctgctcgaggagatgcggcgggatggcggcgtggagccgaacgtgatcacctggaacgggctcgtgtccgggctcaaccgcagtggccgtgcccgggacgcggtcgttgcgctggcgaccatgcacggggaagggctcctgcgtcctgacgccacgggcgtctcgtgcgcgctgtctgctgttggggacgtcggtttggtttcggtgggccaacagctgcacggatacgctgtgaaggcaggttgcagggcggacgcctgcgtggtcaccgccctcatcgacatgtacgggaagtgcggccaggctgcagaggttgttcgggtgtttgatgagtccagccacatggatgttgcttcttgcaatgcccttattgcgggactatctcggaacgcgcaagtctgcgaggcactaaggttgttcaaagagtttgttgaccggggagttgagctgaatgtcgtgtcctggacctcgattgttgcttgttgtgtgcagaatggtaaggatttggaagctgtcgagtttttcagggagatgcaggcacaagggactgaaccaaactctgtcacgatcccttgtgtgctgccagcgtttgccaatgttgcagctctgatgcatgggaggtcagcgcactgttttgctctcaggaagggctttctccatgatgtttatgtgagcagtgctttggtggacatgtatgcaaagtgtggcagggttaaggatgcgagaataatattcgatacaatggtatctcggaatgtggtgtcatggaatgcgatgatcggtggctatgctatgtatggagaggctgtgaatgcagtttggatgtttcactcaatgctgaagtgcaaacaaaagcctgacatggtcaccttcacctgcttgcttgctgcttgcacgcaagctggcctcacagaggaagggcgtcattatttcaaagaaatgcataatgagtatggtgtttctccgaggatggaacattatgcatgtatggttactcttctaggacgtgctggcaagcttgatgaggcatatgatctcataagtgacatgccctttgagccagatgcttatatttggggttcattattaggctcttgccgggttcatggcaacgtggatctggctgaggttgcagcagaaaagctctttcatctagagccagaaaatgctggtaattatgtccttctctctaacatttatgcttctaagaaaatgtgggatcgggttaatagggttagagagatgatgaaggatgtaggcttgaagaaggaaaaaggctgtagctggattgagatcaagaacaaggtgcatatgttgttggctggtgatgattcacaccctatgatgactgcgataattgagaaaataaaccagcttaatattcagatgaggaagctaggctttgtaccaagcacagattttgtcctacatgatgtggaggaacaagagaaagatgatattcttgctgttcacagtgagaagctagctgtcgctttgggactcataagcactagcccaggaacaacccttcgggtgataaagaacctccgaatttgtggcgactgccatgaggcaatgaaatttatatcatcttttgaggggagggagatatctgttagagataccaacaggttccatcacttcagtggtggaaaatgttcctgtggggatttttggtga

SEQ ID NO: 135498 - DNA, 711 bp, Zea Mays
atggagctctcatcggcggggaggtggactgacctccccgaggacatcgccctagccgtcgcctcccgcctccaggaggctgatgtgtgcgcgctcggcggctgctcgcgcacctggcgcagagcctgcgacgccgactgcatctgggagcgcctctttcgctgccgctggccagctgccgtggcggaggcgtcggcgtcgtcgtcccgtatgcagggctggaaagctctctacatcagccaacacagaagaatggctgctgcaatatctaatgtggttgaatttgtgggaggcagcttaaataatgggtcacttgaatccgaatactatctgaaagctattgctgatttggccatgatacttgatataggatttctcgatgtccagtttttcttgttttcaaggaaccatagtgcgataataaacctaattggactgcactactcgatcgcatctttgcatgtgctgccagctgaagtcagtaaagcactccaagctcaccgtgtatcagaaaggatggtttgtgtgaacttgctcaagcttggtaggtggttctatggtttccggttgcctgatgagtacgagtcccgcaaaatctcgctaggtgagctcaccacggctgagggagcagagattcttgccattcttaaccgtggagctgtccacgaggtgtttcgtctccgcatcggtttggtgaacgtagataagtga

SEQ ID NO: 135499 - DNA, 1659 bp, Zea Mays
ttaatcagcgtgaaccgacagatccggctcattgtatctattcagatcagacgaaaacgttttaggatcaggcaagtagaagggaggtcgtaagagatagtagcaggcaatgcagccaaacacctttttttcaggctatcaaaggaaacgaattcaggctatagacgaaggaacgccctggttcgccagaacaaaaggattacatgagttggagcaggatggatattacagttgagtagaaattattggtggatcgaaagatgatgtgaggaaccaatgcctgtcctgctctgctcccctccccccaagaacttgaagctcccctgcacacatgctgaagctgatccgaaacctgttggttggatccagaagctcctgtcccgcacgaggagggccaggcagcggcagcggcacagcgaggaggcgcgagcgctgactgaggggtcagcagcacgggtagacggcgacgcagcgcctcctgggcggcgcgcagaggagcatgaacaccagcgcgatgatggcggcgaccagcagccccaggaggttgaacccggcctcctcctccgcctcgttgctgcagcacagcttacccatctacccaaccctcaggcagctggtacctggctgcttggcttgtataattgggcgtccaccacagcatggcttcaccgtgcccccgcgcgcccccggccccgtgtccctacgctccaccaaaacagcgacgaaatcctcgccgccgcctccgtagcagccatcagcgcccatgccgcgcccccgcgaaatcctcctccaccgagccgcgccgaaaacctcgctcgcgtcgaaaacctccaccgcgtccgattccccacgatccactcccccgctgggctgctttcctacaagggtcgtgatctcctcggcgagatccacgctgctctccaggcaaggacagcttcgtccaacctcggtgcccgcggggaccagatactggtccactgcgtcctccacggcagccaagaagaaggcgaagaagaagctctcgacttctcgagctgggccctttttggttccaagtacgatgacgccgccgacctcttcgataaggctatgaactccttagaactcgccaagaactttttaatatttgatggtagaacaacatatgtccgtgcatggcaactgataggaaaagatgaagagcttgacgatgctttctgggaggaggtgagcgccatctgtgatgcccagtctgctaccaagagccaggagaggaaaaaggaggaggggagcttggtgctgtcctgcgatgatgcttcactcccccctgctatttccatcaccgcggagggtggggaggcgggaacgagcggcggaggagattgtaaatacaatgaacatcatcgatgccaaaatcagagatcgaatgttaagaggtcaatgaatctatccggcattagcataaatcatatgaaggaagtagattcacatgcacccgtgaagcagaagctacaattatttccaataaatgaagctactcttaagccatttgagaaggttgatttattagacagccctattgccagactacctgacatagagaccacaacacttggagccacatatgttgctagcttagatgcaggagtttggaccaaggaacaggaatttgcaggttag

SEQ ID NO: 135500 - DNA, 522 bp, Zea Mays
atggacggcgacggcagcaaaccacgcggcggaaataaggctgcacggcccgcgccagcccccgatgccacgcagcagccagcgtcatccgccgcggccggcgctggcgagaaggtcgatgacggccgccagcagcccgtggcgccagtggacgagagccgccgcgctgcgggcggcgccgagccggaggaggaggaggggggcaaccgcaacgacgacgcgcaggtggagatgttctacgcgctgctggccaacatccgggcaatgaggaggggcctgccgccgcacgacgtggcggcctcctcgtccgtgcgcggaggcggcggcgacaccggcgacgacgccgtactggactctgcgagggagaagcggctgcgcctgagcgcggacccgccgtggcgaccggcgttcaggatggaggacttcgaggagcccgctccggcggcgtgcgagacgaggaagcggacgaggggcacgggccacgacggccacggcgacggcgcgagcagcgggcacgaatag

SEQ ID NO: 135501 - DNA, 417 bp, Zea Mays
atgctcacgggtctggccatccttagagataccggcctcaaaaccaccagtggtggagtcaatgatcaggacagcacagtcagcctgggaggtacccgtgatcatgttcttgatgaagtcgcgatgtccaggggcatcaatgacagtgcagtagtacttggtggtctcaaacttccacagagcgatatcaatggtgatacctctctcacgctcagccttgagcttgtcaagcacccaagcgtacttgaaggaccgtttgttcatttcagcggcttccttctcgaacctctcaatcacacgcttgtcaatgcctccaagcttgtagatcaggtggccggtggtggttgacttgccagagtcgacatggccaataaccacaatgttgatgtgggacttctccttacccatggctggagg

SEQ ID NO: 135502 - DNA, 1056 bp, Zea Mays
atggttccaaagattgccgacccagctccaagatttcgcggcgagcggtgcctgcctacctaccgtgacgggcgcgcatgcacgcatgccgataaggtagcgcacgtcactgaccgacctcctcgccctagcggagtcgtgctcgtgtgtgtcccagactcccagtctccctttcaaagcctcgcacacacgacgctagtcgtactgtgtacatacacatacaccacttgcccgagagtcgaaggtgccaagccaacgcaggtgcagatggcggccgagcaccacctcccgccggagcacgcggaccaccacagaggcgggaggaagggggtccgcgccgacgacctgaagccgggctggtggcgccgcagcccccggtacagctactactacggcgggggcgagggcgggggcgcggtccgcgccctctgcttcgccgtcctcgtcctgctcctggccgcggggatcaccctgctggtgctctacgtcgtgtaccgcccgtcccaccccaccttcgccgtcacctcggccgccgtgctggcgctgtacaacgccaccgccaacgtcgccgcgggcgcgggcgcgggcccggcgccggccaccgcgctggccgcgtcgttccagttcacgctggtgctcggcaacccgagcgggcggtcggcggcgcggtacgaccggctggcggcgtacgtggcgtaccgcggggaggccgtgacggcgccgacgcccatgcccccgctggcgcaggacgccggcaccgccgtggcggcggcgcccgtgctgggggcgggcgtcgcggcgcccgtgcccgtgtcgcccgacgccgcggcggcgctggcggcggacgtggccaacgccgtgctgccgctccgggtggtgctgctcggccgcgtccggttcgtgcacgaaccgttccaccgggggtggcgctcgctctacgcccgctgcgacctcctcatcggcgtccgcaagatcgggatcgggaacggcggcgccgccggcggtgtgcccctggcgccgcttcttggtgacccgagctgcaacgtcgacatgtga

SEQ ID NO: 135503 - DNA, 617 bp, Zea Mays
acgacgaacgccatggcgggttgaagaacggatttaataacggtgttataccatggcgaatagaaaatcgacgaccgactcagatgcgattgacgagttgagcgactccaacgatttaacggcggacgcgacaacgagcagggtcccaaactcaacgccgacgtcgaggagtgctaacactacggtcgggcgagctgggaacactggcaagcagaggagcgcgcgcatcaaggctaaacacaggagaacgcacgaaagggagctcgacatgggcagtggctcacgtccacgacgagcaggctgggcgcgccgatggcgtagctgcagggagaaacaccggcgagccaacaggaaactcaggcaaaatcgcggccggcgaacgccgtgaagatggctaggccgagcgcggtgtcgggggcgagcaggacgccgagcagagggtcacggcgaacagagaagcctgcacgcagccatggaggacggaacttggcgggacgcggccatgaacggagcttggtgtggagccgagaccaggggcacacgatggcaaactggaacaggcgagcagaggggcgctggcaaatgacagggctgcgacagcagagaaacaggcgacc

SEQ ID NO: 135504 - DNA, 1002 bp, Zea Mays
gcgtgattgcgtgaaagtctcttctggatccaaactaataaacaccacgcgagtacgccgcgtgcgacctcgaggctcgagcttgacgcccgcgtgccatggctcccacggcgccgacgcaacggccgacgatgcgccactcctccgcgttcctcctcccttcaaccgcaccgtcatcgcccgcgcctggtcccgatgacgccgccgtcgcggtcgtcgtcctcaaccagccgctgccccgcttcgcgcccctcctctggtccagagcggcggtgcgggtgtgcgcggacggtggcgccaaccgcgtcttcgacggcatgccggccctgctccccggccaggaccccgacgaggttcgcgcgagttacaagccagatgtaatcaaaggggatatggactcagtaagaccagaagtgaaggaacattattccaacttgggcaccagaattgttgacgagtcacatgaccaggacacgaccgatttacacaaatgcatagcttttatagctgagaattattctgccactaacaaatctaacctcagcatcttggtccttggagcacttgggggaaggtttgatcacgagatgggaaacatcaatgtgcttcatctcttcccaagcatcaatatcgtcctcctatcagatgattgtctgatctttctgctctcgaaaatgcatacccacgagattcacgttgaaaagtcgatcgagggaccccactgtggattgatcccgattggcatgccgtcgactagcaccacgaccaccgggcttcgatggaatctagataataccagtatgagcttcggaggattgatcagcacgtcaaatatcgtggaagaggacaaggtaacggtcacctcggattcagaccttatgtggacaacatcgctccggaagtgaatctacactcgagtatagagtatcgttatactgttgtaatattagagaaataagtgacatgcttttaatatatatatatatatatatattaaatatt

SEQ ID NO: 135505 - DNA, 952 bp, Zea Mays
tcctcgactcctctcttcttcctccgctccacttcctgcacccgcttcttcccccaaaggccaaaaccctaaatctcctccctccctccctccaagcacctagctgccgccggttcccgcgtatgggagggtcgcggcgcaaattgaagcgctcccgcactaaggtccgcgtggggcttccccgccggaaacccaatgaattcaaggcggccttcgaactccccgaggcactcgccgccgccgccggggccggggcgggctgggacgcggagggcagcgtagtgaagaactacgccgcgttcggggtggtggccaacccaaacctactcggtgcgcactcccgcggcacgccgcggctcgtccagagcgcggcgctgcaggcgcccgacgtcgccgccgcgcatgcacccgtcccggagttcgagccaatcgataccggcagcgacctcgaggacgacgacctgaagtctgctcttgggaagaaaaggaaggatggcaaatctgcaccgttgcaaccacttactaaagttcaacgtgtttgcattggcagattaatagagaagtacggtgatgactacaaggccatgttcatggataccaagctgaacgcaatgcagcactctgtgggtacattgaagaaactatgcgaaagacaccacgttgatggcaagatcttcgtctatccactgtagtattgtgctggcacctacttcagcctcagtgtactcttttcgccccgttaatggaacaagaacaattttgcaatgtgccccaaagaggaatccgcaattcagaactattgtgtacttacttttcgagagttgtcttgatctcccaatattgctgtgtcactttgtcgattgtcgcagtagtttgctgttcttttgtcaagcgaattatgcagggataaaccatacagtcgtttaagcaaaaggacaatatcctaggctgt

SEQ ID NO: 135506 - DNA, 1287 bp, Zea Mays
atggcggcgccagcagcccggggcagagccgccaggctggcgcagtcgcgcaacagacagccagacggccgtggcgggggcgggagcagtactagcccttcccaagtgaagctcaagtccctccctggcttcttggctctcgttctctcaactcacgcggcggcggcggcggcggcggtagctgagtacggcgaagggattaacaactcgcgggaaaagaaaatagagaaccaccgtagaaacagagaggccgcaataataactgaaggccggcggggtgaggggagtcgaaccctaatggattttgagatgggcctcagtgggccgtacaaaatgggcctgctgcgacatgctccacgatccttctcacgcttttcaaattacaacatcctttcctgggtcacgaatgacgattctactaaatccaaatccaaatccaagagtcctctaacttgggtcagggtggccacctccgtcgacgccggcgaggccaccaccatggtcttggcgcagcacgcgccgttgtccaacgcgtcatcgctaatcaacagcctcggcaactcccgcgagggcaaccctgactgcgacgacggcctgtctatgctcttctccaagaagcccctggcgcaggccggccgggcaaccggtcccgcgatggcggcggctcgacgaggtggtcccctccctcgggcgaggatagaagggaggcgggttagggacactattggggaggaggtcctgcgcatgttccttaaggagaggcaactgcacgacgatttcgtcaccaagatctctgacatggtctggaggaggaatggcggcaatgttgatgcggttgaggcgaccacggaccaaggcagtgctatagaggttgctcagcctgaagacctcaaggatgaattgctgctcttgaccacagggattggagcagcatgtagtttatattgtctcctggttttctctcttgagaccgatgtgagttatgctttgggggttggtttcagaattggcattacaagtgaagatttaaagaatacaatagagaagacattgggtggtggaggagtagctctttcatccccaaggcttgtgattcctaccgtgatttttggattgtcagctttaatagaccacttcaaaaatagttttttcagttttgaggttcttccaaggatgatgggtttcctcgcatacaaggttgcagctttggttcaggtctacagagataacgaggatctccgcttgatacttcatgaggaagaggatgctgaccgtgaaagcacttga

SEQ ID NO: 135507 - DNA, 545 bp, Zea Mays
ttaaggatatcctaaaattcgtttgcttgaacagctgatagtggccaagaagatggaggctcgacggagtttgaattcaagcctcatctcaattctcaatcgtcggtatggaaacattattggaatggttacttttttagaattctttagcactatagaacacaacaacttgagaatccgatacacagttcttgtgcatgttcgagagaaaaaacagtagatgcaaactatagaaggaggtaaaacatttttactctgataaatgatttgtaatgatttttgttaaccccgtagcaacccagacacctaaattatttttattcttcactacatgttaccttctctgtggtacgtgagtaatatatagtgacactaaagtatgagagtttcgagttccttattaatgtagcaccccatttttgttggagctccttattatcataaaaacatttatttatttcttgacccgttctttgctaatgaaagtttcttgtgtttttctttttagtcgtctgatcaacattcgctctcacgttcatcttcac

SEQ ID NO: 135508 - DNA, 1321 bp, Zea Mays
atagcttgtatttctagtagaaaaaaattcagacattgcttccctccggacaaaatgagatcagcggcaccaccgtgccaacttcccagcccaaaccccgacgcgtccccacctccgtcgccgatgacaccgcgtgccccgcaggttcggcatcacccgccgcacctcctcctcgccgaggctgtcgcctcctggcaccctttccacaagaagccatgtctcacggaccgctccacggctcccccctcctcggcccgcctccccgatgcggagactccgacgcctgccccctcggggggcggtagcggcggatccttccggtggttcgggctccgcaagcggcgccgccgcggtccgggctcgcggtccgtgtccggccgcagcagcgaccgccggagatccggcacgtgctccgacttccatttcacgtgcggcgccggtggtggtggcggcggcggtgccactgactccagcggggagatgtgggcgtcggatgtcggggaggtgcggatgagggacgtgccgatggcgacggagttcggcccgtcgcctgttggtggggttggtgtctggagtggtggggtcggcgctgcagcggaggcagcagtcaccgattctgaatatgggagcgaacctgggtaccgtggcgacgtggagctgggatatggagatgaaatcgacgaagaggaggaggatgggaggcagcagctgttctggggcggggtgattggagatatgaacaaaatgaaaatcgatggcgacaataactttggggagcagaagagccatcaccgatgcaggcgcaagaagcatgatgtgaggattttggattccttgagttgaagagcttcataaggctaaaagtggtgaagcgtccatgtgttggttgtagtgttccttcactagcagcagctatttatcgatagcatgtctttgttgcagcatccactgatagagcagacaactagttactagtgtttcgacattttgtatggcacagatgtttcataatagttccctagtatctgggcgagaatttccatgagtttatctatgacggcttcaaagtgtagcttatgtgctaagaacatgtgtcttcttggttgtttttggtacacttgttagcatcgctgctggtctgacgttctacatttttatttgagtgcgtgattgatacagcacatgtcagctacttgggtgcagttgttaatattgacatgggttacagcgtaggctaatgtttcatgtttgtacgaattatttgtatttatcctgctttgaattgaacatctgtagttcccctttggaaccgattttcaat

SEQ ID NO: 135509 - DNA, 566 bp, Zea Mays
gttgcaatatatgctctttatatgtgtgctcctagaagctttcctgatcacggttcttttcttctccattgcagatatgaacaaaatgaaaatcgatggcgacaataactttggggagcagaagagccatcaccgatgcaggcgcaagaagcatgatgtgaggattttggattccttgagttgaagagcttcataaggctaaaagtggtgaagcgtccatgtgttggttgtagtgttccttcactagcagcagctatttatcgatagcatgtctttgttgcagcatccactgatagagcagacaactagttactagtgtttcgacattttgtatggcacagatgtttcataatagttccctagtatctgggcgagaatttccatgagtttatctatgacggcttcaaagtgtagcttatgtgctaagaacatgtgtcttcttggttgtttttggtacacttgttagcatcgctgctggtctgacgttctacatttttatttgagtgcgtgattgatacagcacatgtcagctacttgggtgcagttgttaatattgacatgggtta

SEQ ID NO: 135510 - DNA, 384 bp, Zea Mays
atgtcccatacgctaaggattaaccactgcaccacatgcatcctaatgtttataaaaaggaaggtatgaagatttaaaaaattagacatagctgatgccatacttagccataatggctcctccgcggctgagttaatcacaatgacatcacatcttcacaaagctcaagtcttgattttagtttcacctactgtgcgaaagtataatagatttaccggtaagaaattatgggtacctttgttctcgttctctctagatgctttactctttaaaacatcaatattgtaccgtgcaacaaaatcaagttggagaaatctcatcttaccaatcccggcgcatggcacacacttgcaaatggtctccttgccgttcttcctaaagtag

SEQ ID NO: 135511 - DNA, 86 bp, Zea Mays
cttttattattactgacagcatttagcggcaccaaaaatacggtgtctttgatgcaaagtagtcacccgaaccgcaaatttaaacg

SEQ ID NO: 135512 - DNA, 4298 bp, Zea Mays
atgccgacggcgccagcggcggtgctgccgcgcacttgcatggactccctcatcgccttcctccaccaccacctgcgcgcgctcctcgccgaccccgccgcgctccacgccacgcgccgccgctgtctcgctctgctcacgcccccacggcggcaccattgtcgtaaaaacctctccggagcgcaggaggaggaggagaacgaagacgacgccgtcctcgccgcgctccacggctccatcgacgcgctcctcccgtcccccgtcgacggcgcggcggccgtctgcctggcgggcgtcgaggaggcgctgcaggcccccgcgctgctgccggagcacggcgagacggcggggctggacaaccgccgcgtcgccgcgtgcgcctacttctacctcgcgctcgtgcggtgcgcccagggggacgcgtggcagatgtccatggacctcctgcaggccgtcgccgtgtgcccagccgcggtggccgctggccgcgaggacggcgcccgccgcgccgggctcgcgccacgcgcgctctgggaggggctgttcgacgacggcgtgctcgccagggccggcggcgccggcgaagaggacgcggcgcggcgcgcggccaggcgttacaaggactggctcatgtactacaaggtggtggccgccgcgccggagcaaaatggcgggtatcttcaggcaggaagatctggaagctctgtcatttcgagatggttgagttcttcggagagttgatctggcctccatttgagaactgaaggtgaatctggcatcgttgcaggatagaacgaaccattcggttgatcctgaaggaattaccacggtctctgcatcagaatttggtgcccatgacggtttcaccgagctgaaggatttcctcagcatcgcagatcaagatttccaggaagataccaaggggagctctgacagcaggtgcctccatgagatgctcgaggagtcgcagtctgattcgcctgtttccttttactcgcatcttgattctagtgaacaaagtgatagcgaggcagctccatatgacaaaggaaggtcagcaaagatcatgcccatagatgcagatttcttagcagctaaactccatgaaagatcaaaccacaacaagaatctgacgtggtgcacatctcctgaaaatgcaatgatatatgctccagaatcctcaatgtaccaggtcgatgaccgtgagacgaaaccaaactgcttgcaatcaaacagatctcatggatcactgaataatctatcaaattcggtcctggagctgaagaatgctgactcatactccacatccaactattccgccaaggatgccatgtttacgcagtgctcaccgaggcatgatctcagatgcttcaatgccttctcggccaaattcatcaagaaaagttccctgtccgatctagtctccagaggaagcatgagcaggaaattcaagacttccacagccagtgatgattggagtgatgtcagctcgcgctgggcgaaggacagccaggtagattttcttgagaggttcgagaaggcagtatcaaaactgctgatttcagatggactagaaagctgcctagatgctggctctgaggtcacaactatatggcaattactgaacaacacttgtgaggcgagacacatgtcgtcagtaaggcaagatatccttgatcggctgcttgacagcatttccacatcaaaaaaggacaaagtggtcagggcatcagtctatgtactactgctcatgatatctgaagatagaaatgtcatgagaggcatcaagaggaaggacttccatttatccaacttagccgttgcattgaagagagatgtacatgaagcagccattctgatatatctgttagatcctacacctttagagatcaaaaacttggatctgttgccctcgcttctacatgttgcttgtagctcaggcacccaaaaatggccttcaatgcttccactgacaccgacatcagcatcaatagctctcatcgagatcttagtgacagcattcgactatgtaacaaacaatgtccacttggcttccctcagctcccctcctattttgtccaagcttgtggatgttgcaaagaaccacaacttggaggaaggtgtggccctggcagctattctcatcagatgtgtacgtctcaatggtaactgcaagaagttcttgtcacaggctactccagtggacccattccttcaccttctgagacgaaaagagcaccgggccaagtgtgctgcacttgaatacttccatgagattctacagattcccaggtcctcagcaaactctctgcttgaagaaataagacggcaaggtggcattgcaattatgcacacactgatggagagatcagatggcaggagtgtgttccaagatgaagcgatggaagtcctgttggactctctatcatctcaagaaaacagtagagtacaggcattatcagcatgttttctttcaaacctcggagggacttattcctggtcaggagaatcgtacactgcagcatggctcacaaagaaagctggtctcacatcaacatcacaaagaaatacaatcaggaacatcgactggcttgattcttgcctgcaggatacagaaataagcacatggagcaataaatctgcacgagcgattattaaaataggagtaccgtttatcagcgctttagccaaaggaatgcaaagcaaagtgaagggaacctcacagaattgcctcttatgcactgcatggctcggaagcgagctggctgcccttggtgaaaatgccataagatattctgcttgtgagatcttgttgcatgacatagcaagtcaccttcatccaggaaatgagcttgacgaaagggttctagcatgcatgtgtctctataattacacctctggaaaaggaaagcaaatgttgatgagcttgccagagggttcccgagaatctcttaggaggctttcatcgttcacatggatggctgaggagttacttcaagttacagattattttctttccagcaaaccacgtgtatcatgtgtacatacacaaattctcgaaattggtcaaccaggcaatggtgcagcaactgctatagcattcttcagagggcagctttttgctggttattctaatggcaccatcagggcatgggacataaaaggccagagggcagtaatcatcagggaggtaaaagagcacaagaaggcagtgacatgtttttcactatcagaaactggggagaacctcctgagtggatcagcagacaaatctattcgggtatgggaaatggcacagcgcaagctagagtgcgtggagatgattcagacaagagaggctgtacaaaaacttgatatttgtggtgacaaaattcttgtacttacacagaacagcgttctcaagttctcttgtgcatcaagaagcacccaaacattttacaggagcaagcatgtcaaatctctagctgtataccagggaaaagcttaccttggatgcaaagacgcaagtatacaggaactagacgtgtcagttgaatccaacagtgcgatgataaggatacctagaggaggctggatggttaggaaacaatccattagctccattgttgtatacagagattggatgtactgtgccggtgctcaggtcgaagggtcagccttaaaggattggaagaaacgatgcaaacctaatatgacaatgccaataccaaagggaacaagtgtagaggccatggcagtggttgaagacttcatctacttgaactgcagtagaagtcctagtatcattcagatatggttgagggagaagcagcagaaagtaggaaggctatccgcaggaagcaagataacgagcttgttcactgcaaacgacatggttttctgtggtacagaaactgggttaattaaggcatggataccgttgtgaagtgtagaagcaagaaggagcaggtggaaggcttaatcttgtaaatgtaaaggaaagctagagtgtacaggaaacatgaaaaagaggagcataccattgtacaagccctcaggacacaacacagcagccagcgcggttcgttcataaactccatggatcagcaagtttcttcgaaatggatgagtagtaggttcataatgtaaatactaactagtgtgtgcgtgtttgttttagttttgcgaagggatgagttgtggatgttaataaagggtagagtaaatttcttagatctacatatatacttgcctagaactggaaaattaagaggacactaccactataacaaaaaaaagccatgtcattttggacaatg

SEQ ID NO: 135513 - DNA, 4352 bp, Zea Mays
gcggtgctgccgcgcacttgcatggactccctcatcgccttcctccaccaccacctgcgcgcgctcctcgccgaccccgccgcgctccacgccacgcgccgccgctgtctcgctctgctcacgcccccacggcggcaccattgtcgtaaaaacctctccggagcgcaggaggaggaggagaacgaagacgacgccgtcctcgccgcgctccacggctccatcgacgcgctcctcccgtcccccgtcgacggcgcggcggccgtctgcctggcgggcgtcgaggaggcgctgcaggcccccgcgctgctgccggagcacggcgagacggcggggctggacaaccgccgcgtcgccgcgtgcgcctacttctacctcgcgctcgtgcggtgcgcccagggggacgcgtggcagatgtccatggacctcctgcaggccgtcgccgtgtgcccagccgcggtggccgctggccgcgaggacggcgcccgccgcgccgggctcgcgccacgcgcgctctgggaggggctgttcgacgacggcgtgctcgccagggccggcggcgccggcgaagaggacgcggcgcggcgcgcggccaggcgttacaaggactggctcatgtactacaaggtggtggccgccgcgccggagcaaaatggcgggtatcttcaggcaggaagatctggaagctctgtcatttcgagatggttgagttcttcggagagttgatctggcctccatttgagaactgaaggtgaatctggcatcgttgcaggatagaacgaaccattcggttgatcctgaaggaattaccacggtctctgcatcagaatttggtgcccatgacggtttcaccgagctgaaggatttcctcagcatcgcagatcaagatttccaggaagataccaaggggagctctgacagcaggtgcctccatgagatgctcgaggagtcgcagtctgattcgcctgtttccttttactcgcatcttgattctagtgaacaaagtgatagcgaggcagctccatatgacaaaggaaggtcagcaaagatcatgcccatagatgcagatttcttagcagctaaactccatgaaagatcaaaccacaacaagaatctgacgtggtgcacatctcctgaaaatgcaatgatatatgctccagaatcctcaatgtaccaggtcgatgaccgtgagacgaaaccaaactgcttgcaatcaaacagatctcatggatcactgaataatctatcaaattcggtcctggagctgaagaatgctgactcatactccacatccaactattccgccaaggatgccatgtttacgcagtgctcaccgaggcatgatctcagatgcttcaatgccttctcggccaaattcatcaagaaaagttccctgtccgatctagtctccagaggaagcatgagcaggaaattcaagacttccacagccagtgatgattggagtgatgtcagctcgcgctgggcgaaggacagccaggtagattttcttgagaggttcgagaaggcagtatcaaaactgctgatttcagatggactagaaagctgcctagatgctggctctgaggtcacaactatatggcaattactgaacaacacttgtgaggcgagacacatgtcgtcagtaaggcaagatatccttgatcggctgcttgacagcatttccacatcaaaaaaggacaaagtggtcagggcatcagtctatgtactactgctcatgatatctgaagatagaaatgtcatgagaggcatcaagaggaaggacttccatttatccaacttagccgttgcattgaagagagatgtacatgaagcagccattctgatatatctgttagatcctacacctttagagatcaaaaacttggatctgttgccctcgcttctacatgttgcttgtagctcaggcacccaaaaatggccttcaatgcttccactgacaccgacatcagcatcaatagctctcatcgagatcttagtgacagcattcgactatgtaacaaacaatgtccacttggcttccctcagctcccctcctattttgtccaagcttgtggatgttgcaaagaaccacaacttggaggaaggtgtggccctggcagctattctcatcagatgtgtacgtctcaatggtaactgcaagaagttcttgtcacaggctactccagtggacccattccttcaccttctgagacgaaaagagcaccgggccaagtgtgctgcacttgaatacttccatgagattctacagattcccaggtcctcagcaaactctctgcttgaagaaataagacggcaaggtggcattgcaattatgcacacactgatggtcagcctccatcaaactggacctgaacatcgggttttaggagctagccttctcctgcaattggatatgatggagagatcagatggcaggagtgtgttccaagatgaagcgatggaagtcctgttggactctctatcatctcaagaaaacagtagagtacaggcattatcagcatgttttctttcaaacctcggagggacttattcctggtcaggagaatcgtacactgcagcatggctcacaaagaaagctggtctcacatcaacatcacaaagaaatacaatcaggaacatcgactggcttgattcttgcctgcaggatacagaaataagcacatggagcaataaatctgcacgagcgattattaaaataggagtaccgtttatcagcgctttagccaaaggaatgcaaagcaaagtgaagggaacctcacagaattgcctcttatgcactgcatggctcggaagcgagctggctgcccttggtgaaaatgccataagatattctgcttgtgagatcttgttgcatgacatagcaagtcaccttcatccaggaaatgagcttgacgaaagggttctagcatgcatgtgtctctataattacacctctggaaaaggaaagcaaatgttgatgagcttgccagagggttcccgagaatctcttaggaggctttcatcgttcacatggatggctgaggagttacttcaagttacagattattttctttccagcaaaccacgtgtatcatgtgtacatacacaaattctcgaaattggtcaaccaggcaatggtgcagcaactgctatagcattcttcagagggcagctttttgctggttattctaatggcaccatcagggcatgggacataaaaggccagagggcagtaatcatcagggaggtaaaagagcacaagaaggcagtgacatgtttttcactatcagaaactggggagaacctcctgagtggatcagcagacaaatctattcgggtatgggaaatggcacagcgcaagctagagtgcgtggagatgattcagacaagagaggctgtacaaaaacttgatatttgtggtgacaaaattcttgtacttacacagaacagcgttctcaagttctcttgtgcatcaagaagcacccaaacattttacaggagcaagcatgtcaaatctctagctgtataccagggaaaagcttaccttggatgcaaagacgcaagtatacaggaactagacgtgtcagttgaatccaacagtgcgatgataaggatacctagaggaggctggatggttaggaaacaatccattagctccattgttgtatacagagattggatgtactgtgccggtgctcaggtcgaagggtcagccttaaaggattggaagaaacgatgcaaacctaatatgacaatgccaataccaaagggaacaagtgtagaggccatggcagtggttgaagacttcatctacttgaactgcagtagaagtcctagtatcattcagatatggttgagggagaagcagcagaaagtaggaaggctatccgcaggaagcaagataacgagcttgttcactgcaaacgacatggttttctgtggtacagaaactgggttaattaaggcatggataccgttgtgaagtgtagaagcaagaaggagcaggtggaaggcttaatcttgtaaatgtaaaggaaagctagagtgtacaggaaacatgaaaaagaggagcataccattgtacaagccctcaggacacaacacagcagccagcgcggttcgttcataaactccatggatcagcaagtttcttcgaaatggatgagtagtaggttcataatgtaaatactaactagtgtgtgcgtgtttgttttagttttgcgaagggatgagttgtggatgttaataaagggtagagtaaatttcttagatctacatatatacttgcctagaactggaaaattaagaggacactaccactataacaaaaaaaagccatgtcattttggacaatg

SEQ ID NO: 135514 - DNA, 555 bp, Zea Mays
tttattcttttttttcccaccatttatttaattggaaaacgtgatcatgaaataattgttgaaacagataaatttaagcggcagtggccgtagaatcatgaggccaactacacccagtggcggagcgctcggtatggcgagctatggcgcttgccataccttactccgccatgaggaacaggtgcttcaggctcaggcggtagtgggcagagaacaccagggccgagagtgaggcggcgagggcgaggcaaagctgtcgatgatgaagcgtgtctcctcactctcccatggcgtcatccgctgcgctcctcctcatgcccttctagtcccgtcgatttactgccttgcgctcaaggtttgcacctgcttcctgtccaactcactccacctcccatccgtccacgccgctgtctcactcttcagctctgccacagacgcaccgcaagtctccatcgatggtcctgcactcacgctgctctgcagcctacacccatagcactcatgcctcgcgcgcagctctgcagccccacctaacgacgtgagcgctcctgcctc

SEQ ID NO: 135515 - DNA, 1892 bp, Zea Mays
agtcaaagcccccacctcccggccagcccccaccgccccgcgaagactgggtccctgccgtccgccccacatccaagggccccgtatccctcctccggcgagccaccgctcccccgcccataaatacctcttcgctcccgccgctgccgctgccacccccgcgagacctgtccgaatcgcgcccaggtccctcgctgggagtttcgccgagggccctcccgcctcccctagattcacgacggagatggcgtccgagctcacctaccgcggcggcgggacgtccacggccgccggcgccggcgccgggggatactcaccgaagccgtccaagccgctcgcgtggctgccccgcgcggcccgctacgccgtcgccgagcatcgcccgctcttcgcgctcgccgggatgctgatcgccgccgccgtcatctccatcgcctccccgtccgcctcctcctcctcctccacctccacctccaccggcggcgccgcctcgtcctactccaacaacaacaatccgctcgcccgcttccccgtcgagcccgcccaccaccgcgacgtggccacgcggcacttcgtcggcggcaaggtgccgctgggcctcaagcggaaggcgctccgcgtcctcgtcaccggcggcgccggcttcgtcggcagccacctggtggaccgcctcctcgagcgcggcgacagcgttatcgtcgtcgataacttcttcaccggccgcaaggacaacgttcttcaccacctcaacgacccaaacttcgagatgatccgccacgatgtcgtcgagcccatcctgctcgaggtcgaccagatctaccacctcgcctgcccggcgtcccccgtccactacaaatacaaccccatcaagacaatcaagaccaatgtggttgggactctgaacatgctcggattagcaaagaggatcaacgccaggttcctcctcaccagtaccagtgaggtctatggtgatcctctccagcacccgcaggtggagacttactggggcaatgtcaatcccatcggtgtcaggagctgttacgatgagggcaagcgtacagctgaaacgttgaccatggattaccaccgtggtgccaaccttgaggttaggatcgcacgtatcttcaatacatatggccctcgcatgtgcattgacgatggccgtgttgtcagtaactttgttgctcaggcactgaggaaggagcccttgacggtttatggtgatggaaagcaaaccaggagtttccaatatgtttctgatctggttgagggtctgatgaagctgatggaaggcgagcatgtggggccattcaacctgggtaaccctggcgagttcaccatgcttgagcttgccaaggttgtccaggacaccatcgaccccaacgcacggatcgagttccgcaagaacacccaggacgacccgcacaagcgcaagcccgacatcagccgcgccaaggagttcctcgggtgggagccgaagatccccctgcgtgagggccttcccctcatggtctccgacttccgcaagcgcatcttcggcgaccaagacgctgctgccaccaccaccggaaaccagcaaggttaggatgaaggagcgcacatgacatggaaatttttggtggccctgcttctagctgcttggttgctctctccttactgacaaaagctatgggccacgtagttcgttgggaatgtgttactggaatacctcggcacggctgatgctgtaatgccattctttttttcccctgtattttttctttctcagttctctcagtccttagctatacaaaaaaagttcagttgaacagttggagatgaacccggatgatctaattctttgttgagagcatagcatcatatatatggtataaatcctgtcattttgcaaa

SEQ ID NO: 135516 - DNA, 3057 bp, Zea Mays
agtcaaagcccccacctcccggccagcccccaccgccccgcgaagactgggtccctgccgtccgccccacatccaagggccccgtatccctcctccggcgagccaccgctcccccgcccataaatacctcttcgctcccgccgctgccgctgccacccccgcgagacctgtccgaatcgcgcccaggtccctcgctgggagtttcgccgagggccctcccgcctcccctagattcacgacggagatggcgtccgagctcacctaccgcggcggcgggacgtccacggccgccggcgccggcgccgggggatactcaccgaagccgtccaagccgctcgcgtggctgccccgcgcggcccgctacgccgtcgccgagcatcgcccgctcttcgcgctcgccgggatgctgatcgccgccgccgtcatctccatcgcctccccgtccgcctcctcctcctcctccacctccacctccaccggcggcgccgcctcgtcctactccaacaacaacaatccgctcgcccgcttccccgtcgagcccgcccaccaccgcgacgtggccacgcggcacttcgtcggcggcaaggtgccgctgggcctcaagcggaaggcgctccgcgtcctcgtcaccggcggcgccggcttcgtcggcagccacctggtggaccgcctcctcgagcgcggcgacagcgttatcgtcgtcgataacttcttcaccggccgcaaggacaacgttcttcaccacctcaacgacccaaacttcgagatgatccgccacgatgtcgtcgagcccatcctgctcgaggtcgaccagatctaccacctcgcctgcccggcgtcccccgtccactacaaatacaaccccatcaagacaatcatatcctttctctacgaattccttcagttcagttccgttgcgttcatttcctttcctccatgaatgattcgtgattgatgcctggatcgcgatcgcttctatttttcttcttcttttggtgcctaaacaaaaatattttatattgttattgggatggacttggtttctattgctttttcgtggggaatttccaaatttgtttcttcctgcgggtttatcggttaacgcgcgatgcatctgaggaggaggatcgattcactactctttgagattccgtatccgtctctgaaatgggaatatgacaatttttttaaaatccggtaccaacaggtataaccccccagaactacgatttccttccacggaaggagaattttgtccggagctcgaatttgtgccacgtttcacttcgttttttggagttttctgctcaactgagggaaagcagagccaccagagcttggccgtttcagatctctgtctgctaggctgccctttgctcaagggcaatcctcccttttcattcaacgcaaaaaaaaagatctttttttgcgtctttctatgaaatctggtgacaaatgttcagttgaactcagattcttcagatgcaattgaagatctcaaatcatcacatcattttttctgtcgaaataatttatgtgtgtgtgtgtttttcttaaaaaaactgttttttatgcttctgaatgcttgctgcattttcccgtgcatttgaaacaggaaaaacgtactagcgaaagctatagctgtgatctgaactcaattgctccgtaccgttttactttgcttcatgatccgttaatgaaagcaaaaagtaagcgcacggtgcgcatggatctgggttagttatgtactttgcttacttctgacataaagggcgcatttcaattttcaacaacacaaaagttgacgtccaagtggcctttgccttttccgctttctaagcaacttcgcttactgttcacttcacgaaatttccttatgctttacttgttttgcaactgaatgtggagtagcaatgtaacaaagtgaaaaagggtgtctggctgattcatttagtttctgctcgttttgctttcttgagatggttcgtgttagccttaacctttgtgatagcacaagaccaatgtggttgggactctgaacatgctcggattagcaaagaggatcaacgccaggttcctcctcaccagtaccagtgaggtctatggtgatcctctccagcacccgcaggtggagacttactggggcaatgtcaatcccatcggtgtcaggagctgttacgatgagggcaagcgtacagctgaaacgttgaccatggattaccaccgtggtgccaaccttgaggttaggatcgcacgtatcttcaatacatatggccctcgcatgtgcattgacgatggccgtgttgtcagtaactttgttgctcaggcactgaggaaggagcccttgacggtttatggtgatggaaagcaaaccaggagtttccaatatgtttctgatctggttgagggtctgatgaagctgatggaaggcgagcatgtggggccattcaacctgggtaaccctggcgagttcaccatgcttgagcttgccaaggttgtccaggacaccatcgaccccaacgcacggatcgagttccgcaagaacacccaggacgacccgcacaagcgcaagcccgacatcagccgcgccaaggagttcctcgggtgggagccgaagatccccctgcgtgagggccttcccctcatggtctccgacttccgcaagcgcatcttcggcgaccaagacgctgctgccaccaccaccggaaaccagcaaggttaggatgaaggagcgcacatgacatggaaatttttggtggccctgcttctagctgcttggttgctctctccttactgacaaaagctatgggccacgtagttcgttgggaatgtgttactggaatacctcggcacggctgatgctgtaatgccattctttttttcccctgtattttttctttctcagttctctcagtccttagctatacaaaaaaagttcagttgaacagttggagatgaacccggatgatctaattctttgttgagagcatagcatcatatatatggtataaatcctgtcattttgcaaatgtatgtatgcccttctttgatggttct

SEQ ID NO: 135517 - DNA, 1648 bp, Zea Mays
ttgaagcttactgttgcatgaaagaggccttgtataagcaatatgcagaaaggcatttggaatcttactctcttgagatgctggccatggaatcttagcttggtgggttctggcatgctttgattctttttggtgggaagggaccatgttggtaggtggaatttggtccaagagggccactttgtggattccttttcaataaagcaagagggggggggacacaactatacttgaccagttatgcctaaccaaacacccaccaaccactgcacctaaaataatgaatgaagtttgttgagttattcacgtagtacttgttggctgttggatactcgttggattatttacaaagtaggcaagctcttgccttgctctttgcgagttttactgatgggtacgatttctcaatgacaggtgtcaggagctgttacgatgagggcaagcgtacagctgaaacgttgaccatggattaccaccgtggtgccaaccttgaggtaagtcaacgatccaaaatgtcggtttagtggatggaattccatttcatctgcgaccaagtatattcattttggtggtttctttctgtttcaggttaggatcgcacgtatcttcaatacatatggccctcgcatgtgcattgacgatggccgtgttgtcagtaactttgttgctcaggtaaatatgcgcagtgctgtctattctatctacagaacccaaaagatatgacaattggtcttgtatcacagaaattaaattacgtgcgattatggttgcaggcactgaggaaggagcccttgacggtttatggtgatggaaagcaaaccaggagtttccaatatgtttctgatctggtaggtctatctctggccaacatatattgaaaaaaaaaagaaacccttgatttggcttttcctgtggcctagtggcctagccagtgggatgcttgaagtattcattactaggaattttattctttgcattcaatgtactgattggggtcttctcccaggttgagggtctgatgaagctgatggaaggcgagcatgtggggccattcaacctgggtaaccctggcgagttcaccatgcttgagcttgccaaggttgtccaggacaccatcgaccccaacgcacggatcgagttccgcaagaacacccaggacgacccgcacaagcgcaagcccgacatcagccgcgccaaggagttcctcgggtgggagccgaagatccccctgcgtgagggccttcccctcatggtctccgacttccgcaagcgcatcttcggcgaccaagacgctgctgccaccaccaccggaaaccagcaaggttaggatgaaggagcgcacatgacatggaaatttttggtggccctgcttctagctgcttggttgctctctccttactgacaaaagctatgggccacgtagttcgttgggaatgtgttactggaatacctcggcacggctgatgctgtaatgccattctttttttcccctgtattttttctttctcagttctctcagtccttagctatacaaaaaaagttcagttgaacagttggagatgaacccggatgatctaattctttgttgagagcatagcatcatatatatggtataaatcctgtcattttgcaaatgtatgtatgccct

SEQ ID NO: 135518 - DNA, 939 bp, Zea Mays
atttacaaagtaggcaagctcttgccttgctctttgcgagttttactgatgggtacgatttctcaatgacaggtgtcaggagctgttacgatgagggcaagcgtacagctgaaacgttgaccatggattaccaccgtggtgccaaccttgaggttaggatcgcacgtatcttcaatacatatggccctcgcatgtgcattgacgatggccgtgttgtcagtaactttgttgctcaggcactgaggaaggagcccttgacggtttatggtgatggaaagcaaaccaggagtttccaatatgtttctgatctggttgagggtctgatgaagctgatggaaggcgagcatgtggggccattcaacctgggtaaccctggcgagttcaccatgcttgagcttgccaaggttgtccaggacaccatcgaccccaacgcacggatcgagttccgcaagaacacccaggacgacccgcacaagcgcaagcccgacatcagccgcgccaaggagttcctcgggtgggagccgaagatccccctgcgtgagggccttcccctcatggtctccgacttccgcaagcgcatcttcggcgaccaagacgctgctgccaccaccaccggaaaccagcaaggttaggatgaaggagcgcacatgacatggaaatttttggtggccctgcttctagctgcttggttgctctctccttactgacaaaagctatgggccacgtagttcgttgggaatgtgttactggaatacctcggcacggctgatgctgtaatgccattctttttttcccctgtattttttctttctcagttctctcagtccttagctatacaaaaaaagttcagttgaacagttggagatgaacccggatgatctaattctttgttgagagcatagcatcatatatatggtataaatcctgtcattttgcaaa

SEQ ID NO: 135519 - DNA, 693 bp, Zea Mays
cgtcgtcgtgggccttcatttctcctagaaggtcgagaggagaagaaggcgagacgtgcagtccgtcgggcaccgatcgagaacagggaaccgatcaagtcgtacgtcgtcagcatcacgaccggatggcgcgtgccgcgtccagctatgtatccaggagggggctctccgcagcgatgacggtggcggcggagtccgtgaagaaggtggaggagaaggcggtgaagctgggcacggtggccaaggacatcgccagcgccatggccaccacgacggaggagaagacggcgttctgggaacctgaccccgagaccggatactaccgtccggtcaccggcacgaaggaggtggacgccgccgacctgcgcgccgagatgctcaagcggaggattctgcaggacgactgatgcatgcagcatgcactagctgcccctgttcgatcgccaagatcacaccacgacgaagatactgtacctagtagtacgtacgtacgtgtacacctgattatccgaagaagatggccagccgattattaaccattggctatcttcgatcggggccaatttcagaaggaatttcctttactttctgtagcaaatgatcgggttcctgcacagttcatcaggaattccattgtatgctcgtgttggtatatatacgtacgatggggtaccattctggtcaccataaaaa

SEQ ID NO: 135520 - DNA, 923 bp, Zea Mays
ttatctgctcgccacagcatcatcgcttgtgtcgcaagctcgttagccacagttatcttaaccgcgtcagcacgtgaccgtggtcgtgttcgtcgagttcgccaacactatgttgtcgattcgactgtcgtcgctgttatatgcctcgttgcatgctcgctgagtgttgtcggtacctcagcatttgtgcttgccgctggctcgtgttaacgctcgcgcgcctgctcgttatcactgcgtcgcactcactctttgtccatcaggcttcacgcgtgctcgcgtttgtcgtcgagctgttgaacccgtcctcccttgctcgtgacttcatcgtcgctagaaccctcactaaattcgtgtcctcgccagctcactccatattcaatctcgtcgtcgttccgcgcgtcagcaagaaatcttaatagtcgggtgaagacggagccaacagcatggtgttcatcaagtgcgcgacaaaaagctcggacatcctacgcaactcaagtttgattcgtcagaattattcagtcgagaaaaagatcttcagcaattgattaccgaagaaaagaagacccctggatgacgtcaaccgaaaaccgtcgtcgtgcttgcgactatcgcgtcaaattagacagagtacgataaataatcgcgtgatgcggaagacaagccaagtcgacctcaagcgtgggctaatccgcgggatgatgctgatggacgaaccggaagatggataatctgaacaatgccaacacaaaaggctgatcgtcaagtggttgtcgtctaacaacactaacctagtgttacccaggcaagccccggtgcatttgccacctccttgctattttaaaatcttttatcaccttgtttgatgcattaggtgataggagttgtgtgctaaaccgttgatgcatttccttccttgaaaa

SEQ ID NO: 135521 - DNA, 225 bp, Zea Mays
ttctattaatattttttttgcgtgtaaacctaatagtaataacatttttgctaattgagataattagattagtattatcagtttatgtccaatacatatatagatatgtacgtagacgacgttataaaaaaacgattagtaatgtcggttgcaaaatataattattataattagttcctaattcatttttataaaatttctagaaataaataactttatttttcc

SEQ ID NO: 135522 - DNA, 744 bp, Zea Mays
atgactccaccaatgcgagcaaatgatcccatctcaacttggagggcggttatagcttcgtatcacctgatagtgtcaaaccgatatgctattgatcgtgatagaacaagagcaaaatgcaaaaatcatctcgtcggcgcagaagccatcatgtcgacggccgggagcggcagccttcgcccggccgtggtggaggacacgggcagacactgggcgccgcacggacctgtgctgacggcctgcgtcgtggccatcaacgtgctcatgatcctcctcgtcttcgtcttcttctggcgctacttctccggtaaacggggaccatccgcgtcatccggcggcggcgacggcgacgacgacgacgcgtcgtcatccgcgtcgctgcccgtggcctccccatgggcatggtcgtcccgccggcggagcagcaaggaccacggcccgcagccggtggacgacgacgtggcgtcggcgctgcccgtgtacgtgtactccagcagcgccggcggcgaaggcgggaaggccccggagtgcgcggtgtgcatcctggagctccgcgacggcgactcggcgcgcctcctcccgcgctgcgggcaccggttccacgccgactgcgtgggcgcgtggctgcggctccacgccacgtgcccgctttgccgcgccagcgtcgtggcgcccagagcggtggcggccgccgacgggtctagtagggacgccaaggacgacggcgcggattgtctcgtctga

SEQ ID NO: 135523 - DNA, 1146 bp, Zea Mays
ttcgtatgggataattaaacccagttgcatgcaatttaattgagaacaaatcaccccagtcaaaacattttggccttaattaaccagctcagcgctattgcacacccccaaggggcgaaatgaagcaacgctacctcccccgtttctaccttccttctataaacctttcttccgctttcctcatttgcgaccttcttctttgctgtccttttcctcttccatctttcatatctctctcgtttatttgcgcgactctttttcttggagacatttgtgatcttttccttcagaatttgatcgatttgcaaattaaacttgatcatcttcttgttgcgaagccgtcttggagatttcgtaaagcggttttacctttggtggtttatgcgcaccattggccgctgccgctctcttgggtttgggttgtgcaataccagcatctcgtcggcgcagaagccatcatgtcgacggccgggagcggcagccttcgcccggccgtggtggaggacacgggcagacactgggcgccgcacggacctgtgctgacggcctgcgtcgtggccatcaacgtgctcatgatcctcctcgtcttcgtcttcttctggcgctacttctccggtaaacggggaccatccgcgtcatccggcggcggcgacggcgacgacgacgacgcgtcgtcatccgcgtcgctgcccgtggcctccccatgggcatggtcgtcccgccggcggagcagcaaggaccacggcccgcagccggtggacgacgacgtggcgtcggcgctgcccgtgtacgtgtactccagcagcgccggcggcgaaggcgggaaggccccggagtgcgcggtgtgcatcctggagctccgcgacggcgactcggcgcgcctcctcccgcgctgcgggcaccggttccacgccgactgcgtgggcgcgtggctgcggctccacgccacgtgcccgctttgccgcgccagcgtcgtggcgcccagagcggtggcggccgccgacgggtctagtagggacgccaaggacgacggcgcggattgtctcgtctgaggcgcccagagacctgctgctgtgtgttgcaaaacgtaaacggtggatggcgatggtggccggcatcttttggcgttggtgtccccagcttgtc

SEQ ID NO: 135524 - DNA, 471 bp, Zea Mays
tacaccaccactactaccaccactaccaccactagcaccaccaccaccaccaccaccaccaccaccaccaccaccaccaccaccaccaccaccaccaccaccaccaccaccaccaccaccaccacgcccaccaccaccaccaccaccaccaccaccaccaccaccaccaccaccaccaccaccaccaccaccaccaccaccaccaccaccaccaccaccaccaccaccaccaccaccaccaccaccaccaccaccaccaccaccaccaccaccaccaccaccaccaccaccaccaccaccaccaccaccaccaccaccaccaccaccaccaccaccaccaccaccaccaccaccaccaccaccaccaccaccaccaccaccaccaccaccaccaccaccaccaccaccaccaccaccagcaccaccaccaccaccaccaccaccaccaccaccaccaccaccaccaccacc

SEQ ID NO: 135525 - DNA, 3288 bp, Zea Mays
gaattccatgaaaagcaggagcaggtcaaagaatggctccaaaatttgggaattggggagcatatgccagtagtacatgatgaggatgaagcggatgatgtaaatgttccaccacagtctgatgataactcaattagaaatagaaacgttccttcaagtgctgttttacctgtcattcgaccggctcttggacgtcaaaactctatttctgatcgagcaaaagttgcaatgcaagaatatctaaaccatttcttagggaacttggatatcgtcaattcacgggaggtttgcaaatttttggaggtgtcatgtttgtcatttttacctgagtatggtcccaagttaaaagaagacaatgtttcagttggacatttaccaaagattcaaaaggaccggaaaaaacgatgctgttcatgtggattgtttaactgttgcaagagcaattggcaaaagacctgggctgtcctgaagccaggattcttggctttgcttgaagacccttttgatccaaagcttttagacgtcattatttttgatgcattgccacatatggatataactggagaaggccaagtttctttagcaaaagagattaaagaacgtaatccactgcattttggattccaggtttcttctggtggccggacaataaagctacgcgcaacaagctcttctagggttaaggactgggttactgcaataaatgctgctcgacaacctccagaaggctggtgctatcctcatcgttttggctcatttgcaccaccgaggggtttgttggaagatgggagtatggtacaatggtttgtagatgggcaagctgcattcaaagctattgcatcctccattgaggaagccaaatcggagatatttattactggctggtggctctgcccagagttgtatcttcgacgcccattccaacatcatggatcatctagacttgatgctctactggaagcaagagctaagcagggtgtacagatttacattctcttgtacaaggaagttgctcttgctttgaaaattaacagcttatacagtaaacagaggctacttaacattcatgaaaatgttaaagttctgcgttaccctgatcacttctcaagtggtgtatacttgtggtcacaccatgagaagattgtgattgttgataatcaagtatgttatattggaggtcttgatctgtgctttggtcgctacgatagtcctgagcacaaagtcgctgattctcctccagagatgtggccaggaaaggactactacaatcccagggaatctgaacccaattcctgggaggacaccatgaaagatgagctggaccgtgataaatatccccgcatgccttggcatgatgttcagtgtgctctctatggcccaccttgccgtgatgtagcgaggcattttgttcagcgctggaattatgcaaagaggaacaaagctctaaatgagcaagcaattcccttactgatgcctcattaccacatggtaattccacactacaagggtagaagcaaagaaacaaatgatgaggctgagggtaaacaatacaatgataaggatgttgatattggaaagccagtcttgacatcacgcacatcatgtcaggatgttccattgctcttacctcaagagcttgaacctcgtgaattatccagttcagatttaagggtgaatgatttagatattaaccattcagatcgtttaaacaagaagaactttaatcagcctttgctcaaccgaaaggcaaaactggattcttctcatcaggatttacctatgagaagttttgtagacaatctcagttcccttgagccatcatctgttagacgttttgattcgtcaaaagatgataggaatcacattgacaaaaaatggtgggaaatgcaggagcgaggcaaccaagttgcttcattacttgatattggacaagttggtccaagggtaacatgtcgttgtcaggttgttaggagtgtcggtcaatggtcagctgggaccactcaaattgaaggaagcatccacaatgcctacttttctctgattgagaaggcagaacacttcgtatacattgagaatcaatttttcatatcgggtctgtcaggagatgatacgattaaaaaccgcgtactggaagcattgtatcggcgcatacttagagctgaaagagagaaaaagcgctttaaggccatcatcatcatacctcttttacctggttttcagggaggcattgatgatggtggagcagcatcagtcagggcaatcatgcattggcaatatcggactatctgcagaggttctaattcgattcttcagaatctatttgatgttattggacctaaagcacatgattacatctccttttatgggcttagagcacatggtaaactccatgatgggggtcccttggttactagtcagatttatgtacatagcaagttaatgatagttgatgaccgcatcacattgattggctcagctaatattaatgatagaagcttgcttggatcaagagactccgagattgctgtggtcatcgaagataaagaggttgttaattcaaaaatggatggaagaccttgggaagctgggaagtcctctttaagcctacgcctctcgctgtgggtggaacaccttggccttcatccaggagaggttagccatatcatggatcctatagatgattcaacattcaaaaatatctggatggccactgccaagacaaataccatgatataccaagatgtcttcgggtgtgtacccaacgatctcattcactcaagggttcaatttcggcaaagctttgctcacttgagggacaaaattggccacactacaattgatttgggtgttgcccaagagaagctagaagcttaccaagagggtgatctcaaaagtatcaaccctatggacagactacagttagtcaggggccaccttgtttcgtttccgttggatttcatgtgccaagaggacttgagaccatatttcagtgaaagtgagtactacacatcaccacaggttttccattagcctctctgtctgcctcgtaaagttactcaaccggctgtacatgttgcaaagatcaccttgtagatgctctacacatgttgtcaaataggaaacaaaaaaaaattaatatattatcataccattagagtattagaattgtttcctagaaagaaaatagtatatcagtatagttcattcgttccaacaacttttagtttcgggaaagaaacaatcaaattcattgtttataagtgcaaataataggagtttccttagttc

SEQ ID NO: 135526 - DNA, 1842 bp, Zea Mays
gcaccgcgcttgttgactcggcttcccctgctcccacggctctccctcccacctcatcttcctcctcctctcctcctccatctcctttaaaagctccgtccaagctttcacctcgcttcaaaccacaattcacaggccctctccgatactcttccttcctcggtccaccttttttttcccggccctctatctccttagctgccaagaacacgctgttcgatcgtctcgtgctagcgtggtagtctggaagcgtctctttttttttcttcttcctgttcgatccagttctacccgtccaatccaatccaagctcctcccttcaccccaaagggacgagagagagagagagaggtcctctatggccgggcctgctgtccaccctcgtcacggcagccggccggcgctctgaactcccgagccggctctccatcagccacgtcgcgcgccgcccaggagaaggagctctttaatctgtgctagcagcggtcccagagaatgcggcagatctcgtcgctgctgcagggcctggcccggtcactctcggtggggagggacagggacagggacagggaccggaaagggaacggcgcaggcgaccgcaagaccgccgtgccggcggtgctgcggacgtcgggcaccctgtggggcgacggctcggacacgttcgccgccgtctgctcgcggcgcggcgagaaaggcatcaaccaggactgctccatcgtctgggagggattcgggtgccaggagggcaccatcttctgcggcatcttcgacggccacggccagtggggccactacgtggccaaggcggtgcgcgactcgctgccgccgtcgctgctgtgccactggcaggaggcgctcgctctcgcgtcactcatcgacgacggcgagaagaagctcggcgactgccagttcgatctctggaaacggtcctacgtggccgcatgcgccgccgtggacgatgagctgcggcgcagccgccgcttggacgcggtccaaagtggctgcaccgcgctatccatcgtcaagcagggggacctcatgatcgtcgccaacgtcggcgactcccgggccgtgttgggcaccacgtccgacgatggcgccattgcggctgtccagctcaccgtcgacctaaagcctaacctgccacaggagaaggagcgcatccggcggtgcaatggtcaagtgtactgcctcgccgatgagcccggggtgcaccgcgtgtggcagcctagccgagagtcgccggggctcgctatgtcgcgcgcgttcggcgactactgcgtcaaggactgcggtgtcatctctacgccggaggtgacgcagaagaggatcagcagcagtgaccaatttatcatcctcgctaccgacggggtatgggacgtgctctccaacgacgaggcggtacatatcgtggcggggacgccggaccgggcgaaggcggccaagcggctggtggagtgcgccgttcgcgcgtggaggcgcaagcggcgcgacatcgccgtcgatgactgctcggcgatctgcctcttcttccacccgccgccgccgtcgtagacacgaaaacctgtaacgtgccgaagtccacgccaaggaggagggggcaacgaaatgcacatctcaagacagactacgattattgtgcccgtggcgttcgtagagtgcactgccgccgtccaccgttcagaaacgtgcagtttgtcacgtgagagcgacactccacgattaggaactgcagccggtgcacggccaaacaaaaagatctccggctttcacacgttaccagtcaagatgtacgagaacatcagagaaaaagggtaggaaagacgcattttgtcctca

SEQ ID NO: 135527 - DNA, 122 bp, Zea Mays
tgcatacgcaacaacaaaacaaaggccctgaaagcagagttattcataaccattagtcccaagaaaagaactgactatgaagaacctcacacattaaacttttataaagaccaaaaaaataa

SEQ ID NO: 135528 - DNA, 634 bp, Zea Mays
agattcctgactcgtcctgagtgccgccgcaccgcctcactcgtctcctccccgagcgccgcgtcgtcgcctcctctgatctgtctcctccccgagatctgctgcggtaatgtcacttgctccccaccccttctcctcttctctgactggtacaccttccgcttcagcctcaaggtctcagccgagccgtccgcctcgccctgtagctgctggtcaagccagtcgctcgtcaccttatctccctctgcatctgtgtccccctgctcatgtccctctgctcatgttgctagccaagcacacctaccctccttcctcgtagctccacatgatactgctaatttttaagactttttaatagaagatgaacctacggagagcttagcttagcatcaggccgtcagcttgatatttctgagatcgtgcgcacgagaagctaagccatccaagcagcttcatgcaccatcgtctgtgtctttcgggcaggtgttgtgccttggcttgtcgccccattccctcaccgctagcgcccagcagcgagcacctcgtttgggtttggatgcagcactgcacgattccctgacaactcgaaaagggtacagagcctgcggttggggataagcacagtggtgaacca

SEQ ID NO: 135529 - DNA, 183 bp, Zea Mays
atggcgaccagtggggtcgacgagacaacaaaggaacacatgacattaattaatagttttggtatgcacctgttaccaccaaacaccgaacttagagtcgcaggcattacatacttgatgaagaatatgccaccaactcttccagggtgtggtatccgcaacttcgttgaaaactacaagtaa

SEQ ID NO: 135530 - DNA, 912 bp, Zea Mays
tcctcagcatttcagcacccagttcggcgttgcacatgtgacccgggcacccggcccccagcccccagctcccgaccatttctgcacatctacagctcgcgagctcagcaccagaacacgccaggccagcccaacctctccaagaacccaagcagcagcccccgaccgaccggccatgccaagggccatcggcggtggtgcggcctacaagggcggaatcaagggctactggaagcgccgcggctacgaccggatcgacgcggccgcggcgcagcgccgcccgcgcctccctacagcggagcttggcggcggcgaggcgcatcctcagccagcgggtggtcggcgccgccgcgggtggcgcgttcgccggcgagcgggcgtcctcggccggcgcctcctccgcgcgctctccccgcggcggctgctggcgcggctccgcgacgcctacgtgaacgccatgctccgcctcgcgtcctccgccgccgtggccggctacggcggcgccgggccctactgcaccgccgccgacccgttcgcccggccgcgcccgctcaccagggagtacgacgagaaggcgctcgtcgagatctacaggtccatcctcgcgcgcggcgaggccgggccagtggtcgccgccgcgcggctgcccgcggtgctctgaggagctgatgacgacggggacggacgggcgctggcacgcacgcgcgctgggagcctggccggccctgctggcgcgctccgtctactctccttgcctcatgcaaggctcgtgtacgctagaatctcgctttcatgtagcgcacagaatttgcatgtcggatgaaaagtttcaggtggtcattattccggtaccaagtacttcgaacctgtgaattgttccccaaggatttggaacgaagaacactagtacag

SEQ ID NO: 135531 - DNA, 704 bp, Zea Mays
gccacgcgcattcccctctccactagctccggtccgaagagggagggaggaccggaggaggacgcccgttgccactgccgcgccgctcccgcctccctctctccatccgccgagctcgagaagccaccatgatctccgcgcgcaccgccgcagcttcccccgcttccctgtggaagcagggaggacgaagcgagggcggcggcagctgcgacggatgtcggacttacaggaacactttgcggagggccgcagcagcgaaggtgcgtgccttgccgtcgagggcggtggaggcggtcaaaatgggctccgccgcggagatggagcaggaggaggcggaggtggccgcggccgcggccggcgtcgtcgtcgaggaccactacggcgaggacagcgccaccgaggagctgcccatcctgccctgggccttctccgtcgcaaggtgatccggcgaatcacggcagggggtgtgaatttgggaattggatctggatgggcgggcggaggtcacgatgcgccgatctggattttatttacttttgcttgtttggttcagactctgttggtgatccgggtttggtcaggggtttcgtccgcgtgatgctgacagctgacgtgtctaggagtgtaaatgctttggggctctggctgtctagctctaccatgttcatactagttcttattctactatcgcttgcttgcgtcta

SEQ ID NO: 135532 - DNA, 1295 bp, Zea Mays
gccacgcgcattcccctctccactagctccggtccgaagagggagggaggaccggaggaggacgcccgttgccactgccgcgccgctcccgcctccctctctccatccgccgagctcgagaagccaccatgatctccgcgcgcaccgccgcagcttcccccgcttccctgtggaagcagggaggacgaagcgagggcggcggcagctgcgacggatgtcggacttacaggaacactttgcggagggccgcagcagcgaaggtgcgtgccttgccgtcgagggcggtggaggcggtcaaaatgggctccgccgcggagatggagcaggaggaggcggaggtggccgcggccgcggccggcgtcgtcgtcgaggaccactacggcgaggacagcgccaccgaggagctgcccatcctgccctgggccttctccgtcgcaagcggttacaccctcttgagggatccacatcacaacaagggtcttgctttcatggagaaggagagggatgcacaccacttgcgggggctgcttcctcctgcagttgtgcctcaagaactccaaattaagaagatcatgcacaacctgcggcagtaccaggtccctttgcagcgctatatggccatgatggaccttcaggagaggaacgagaggcttttctacaagcttttaattgataacgtggaggagctgcttcctgtggtttatacaccaactgtaggtgaggcctgccagaagtatgggtccatctttcgacaaccacagggtctgtatgtcagcttgagggacaaggggaaggtcctagaagttctaaggaactggccacataggaacattcaagttatctgtgttactgatggtgagcgaatcttgggacttggagatttgggttctcagggaatgggaattcctgtaggcaaacttgctctatacactgctcttggaggagttcgtccatcagcttgtttgcctatcacaatcgatgttggcacaaataatgagaaactgcttaatgatgagttttacattggactccggcaaaaacgtgcaactggcgaggagtatcatgagcttatggaagagttcatggctgctgttaagcaaatctacggcgagaaagtcctcattcagtttgaggacttcgcgaatcataatgcttttaatttgcttgcaaaatatagcaagagccatcttgttttcaatgatgacatccagggcacagcatcagtggtccttgcaggtttgttagcagcactcaaggtgtgggcacatgagcatgagcccttgacaaccttgtac

SEQ ID NO: 135533 - DNA, 2395 bp, Zea Mays
gccacgcgcattcccctctccactagctccggtccgaagagggagggaggaccggaggaggacgcccgttgccactgccgcgccgctcccgcctccctctctccatccgccgagctcgagaagccaccatgatctccgcgcgcaccgccgcagcttcccccgcttccctgtggaagcagggaggacgaagcgagggcggcggcagctgcgacggatgtcggacttacaggaacactttgcggagggccgcagcagcgaaggtgcgtgccttgccgtcgagggcggtggaggcggtcaaaatgggctccgccgcggagatggagcaggaggaggcggaggtggccgcggccgcggccggcgtcgtcgtcgaggaccactacggcgaggacagcgccaccgaggagctgcccatcctgccctgggccttctccgtcgcaagcggttacaccctcttgagggatccacatcacaacaagggtcttgctttcatggagaaggagagggatgcacaccacttgcgggggctgcttcctcctgcagttgtgcctcaagaactccaaattaagaagatcatgcacaacctgcggcagtaccaggtccctttgcagcgctatatggccatgatggaccttcaggagaggaacgagaggcttttctacaagcttttaattgataacgtggaggagctgcttcctgtggtttatacaccaactgtaggtgaggcctgccagaagtatgggtccatctttcgacaaccacagggtctgtatgtcagcttgagggacaaggggaaggtcctagaagttctaaggaactggccacataggaacattcaagttatctgtgttactgatggtgagcgaatcttgggacttggagatttgggttctcagggaatgggaattcctgtaggcaaacttgctctatacactgctcttggaggagttcgtccatcagcttgtttgcctatcacaatcgatgttggcacaaataatgagaaactgcttaatgatgagttttacattggactccggcaaaaacgtgcaactggcgaggagtatcatgagcttatggaagagttcatggctgctgttaagcaaatctacggcgagaaagtcctcattcagtttgaggacttcgcgaatcataatgcttttaatttgcttgcaaaatatagcaagagccatcttgttttcaatgatgacatccagggcacagcatcagtggtccttgcaggtttgttagcagcactcaaggtggttggtaggaccttggcagagcacacttatttattccttggtgctggggaggctggaactggtattgcagaactcattgctcttgagatttcaaaacagacgtcggctccaattgaagagtgccgcaagaagatttggttggtggactcaaagggtttgattgttgactctcgtaaaaactccgttcagtcattcaaaaaaccttgggcacatgagcatgagcccttgacaaccttgtacgatgctgttcagtccatcaaacctacagttctgattgggacgtctggagttggaagaacattcacaaaagaagttgttgaggccatggcttccttcaatgagaggcctatcatcttttcactgtcaaatccaacctctcattctgaatgtactgctgaagaagcatataactggactcagggtcgtgtaatatttgccagtggcagtccatttgaccctgtggagtacgatgggaaggtttttgtacctggacagtcgaacaacgcctacattttccctggatttggcctcggtcttgttatctctggagccatccgtgtccacgaggacatgcttcttgccgcctcggaagcactagctgctcaggccacacaggagaacttcgacaagggatcaatcttcccgcccttcaccaacattagaaagatctctgcgcgcattgccgcagccgtggctgcaaaagcttatgaactcggtacgcacgtgccctctgttttgctttgcagtgcagacaccattccacaccttggcgttcaccacaccgtcacttccctctgcaggtttggcgacccgtctgcctcccccaagggacctggtgaaatatgcacagagctgcatgtacactcctgtctaccgtaactaccggtagtgctgctgggatcaattctgcagtaataaaatatgtcgacgcagatgatcctgcaatgttgtagtttattttttcatttgttggccctgctgctgaccacctttgtggctgctagacactgtacctgtctatgcatatatgatactggaacatttggcgcgctgtgggcgtccctgtcatgagatcaattgcagaaataaaatgcaatttagatttgagcaccaaaataaaaatagtaataatacac

SEQ ID NO: 135534 - DNA, 2473 bp, Zea Mays
gccacgcgcattcccctctccactagctccggtccgaagagggagggaggaccggaggaggacgcccgttgccactgccgcgccgctcccgcctccctctctccatccgccgagctcgagaagccaccatgatctccgcgcgcaccgccgcagcttcccccgcttccctgtggaagcagggaggacgaagcgagggcggcggcagctgcgacggatgtcggacttacaggaacactttgcggagggccgcagcagcgaaggtgcgtgccttgccgtcgagggcggtggaggcggtcaaaatgggctccgccgcggagatggagcaggaggaggcggaggtggccgcggccgcggccggcgtcgtcgtcgaggaccactacggcgaggacagcgccaccgaggagctgcccatcctgccctgggccttctccgtcgcaagatatgtttccttcagttggttgaaaaaatacgctgaggagtcttatttctacatcagcggttacaccctcttgagggatccacatcacaacaagggtcttgctttcatggagaaggagagggatgcacaccacttgcgggggctgcttcctcctgcagttgtgcctcaagaactccaaattaagaagatcatgcacaacctgcggcagtaccaggtccctttgcagcgctatatggccatgatggaccttcaggagaggaacgagaggcttttctacaagcttttaattgataacgtggaggagctgcttcctgtggtttatacaccaactgtaggtgaggcctgccagaagtatgggtccatctttcgacaaccacagggtctgtatgtcagcttgagggacaaggggaaggtcctagaagttctaaggaactggccacataggaacattcaagttatctgtgttactgatggtgagcgaatcttgggacttggagatttgggttctcagggaatgggaattcctgtaggcaaacttgctctatacactgctcttggaggagttcgtccatcagcttgtttgcctatcacaatcgatgttggcacaaataatgagaaactgcttaatgatgagttttacattggactccggcaaaaacgtgcaactggcgaggagtatcatgagcttatggaagagttcatggctgctgttaagcaaatctacggcgagaaagtcctcattcagtttgaggacttcgcgaatcataatgcttttaatttgcttgcaaaatatagcaagagccatcttgttttcaatgatgacatccagggcacagcatcagtggtccttgcaggtttgttagcagcactcaaggtggttggtaggaccttggcagagcacacttatttattccttggtgctggggaggctggaactggtattgcagaactcattgctcttgagatttcaaaacagacgtcggctccaattgaagagtgccgcaagaagatttggttggtggactcaaagggtttgattgttgactctcgtaaaaactccgttcagtcattcaaaaaaccttgggcacatgagcatgagcccttgacaaccttgtacgatgctgttcagtccatcaaacctacagttctgattgggacgtctggagttggaagaacattcacaaaagaagttgttgaggccatggcttccttcaatgagaggcctatcatcttttcactgtcaaatccaacctctcattctgaatgtactgctgaagaagcatataactggactcagggtcgtgtaatatttgccagtggcagtccatttgaccctgtggagtacgatgggaaggtttttgtacctggacagtcgaacaacgcctacattttccctggatttggcctcggtcttgttatctctggagccatccgtgtccacgaggacatgcttcttgccgcctcggaagcactagctgctcaggccacacaggagaacttcgacaagggatcaatcttcccgcccttcaccaacattagaaagatctctgcgcgcattgccgcagccgtggctgcaaaagcttatgaactcggtttggcgacccgtctgcctcccccaagggacctggtgaaatatgcacagagctgcatgtacactcctgtctaccgtaactaccggtagtgctgctgggatcaattctgcagtaataaaatatgtcgacgcagatgatcctgcaatgttgtagtttattttttcatttgttggccctgctgctgaccacctttgtggctgctagacactgtacctgtctatgcatatatgatactggaacatttggcgcgctgtgggcgtccctgtcatgagatcaattgcagaaataaaatgcaatttagatttgagcaccaaaataaaaatagtaataatacacaagtgaggcaagcatatgttgaatctgatttgcttcaccttcgattagagatgacaatgagtaaatattcaccttcgattagagatgacaatgagtaaatacccgt

SEQ ID NO: 135535 - DNA, 2416 bp, Zea Mays
gccacgcgcattcccctctccactagctccggtccgaagagggagggaggaccggaggaggacgcccgttgccactgccgcgccgctcccgcctccctctctccatccgccgagctcgagaagccaccatgatctccgcgcgcaccgccgcagcttcccccgcttccctgtggaagcagggaggacgaagcgagggcggcggcagctgcgacggatgtcggacttacaggaacactttgcggagggccgcagcagcgaaggtgcgtgccttgccgtcgagggcggtggaggcggtcaaaatgggctccgccgcggagatggagcaggaggaggcggaggtggccgcggccgcggccggcgtcgtcgtcgaggaccactacggcgaggacagcgccaccgaggagctgcccatcctgccctgggccttctccgtcgcaagcggttacaccctcttgagggatccacatcacaacaagggtcttgctttcatggagaaggagagggatgcacaccacttgcgggggctgcttcctcctgcagttgtgcctcaagaactccaaattaagaagatcatgcacaacctgcggcagtaccaggtccctttgcagcgctatatggccatgatggaccttcaggagaggaacgagaggcttttctacaagcttttaattgataacgtggaggagctgcttcctgtggtttatacaccaactgtaggtgaggcctgccagaagtatgggtccatctttcgacaaccacagggtctgtatgtcagcttgagggacaaggggaaggtcctagaagttctaaggaactggccacataggaacattcaagttatctgtgttactgatggtgagcgaatcttgggacttggagatttgggttctcagggaatgggaattcctgtaggcaaacttgctctatacactgctcttggaggagttcgtccatcagcttgtttgcctatcacaatcgatgttggcacaaataatgagaaactgcttaatgatgagttttacattggactccggcaaaaacgtgcaactggcgaggagtatcatgagcttatggaagagttcatggctgctgttaagcaaatctacggcgagaaagtcctcattcagtttgaggacttcgcgaatcataatgcttttaatttgcttgcaaaatatagcaagagccatcttgttttcaatgatgacatccagggcacagcatcagtggtccttgcaggtttgttagcagcactcaaggtggttggtaggaccttggcagagcacacttatttattccttggtgctggggaggctggaactggtattgcagaactcattgctcttgagatttcaaaacagacgtcggctccaattgaagagtgccgcaagaagatttggttggtggactcaaagggtttgattgttgactctcgtaaaaactccgttcagtcattcaaaaaaccttgggcacatgagcatgagcccttgacaaccttgtacgatgctgttcagtccatcaaacctacagttctgattgggacgtctggagttggaagaacattcacaaaagaagttgttgaggccatggcttccttcaatgagaggcctatcatcttttcactgtcaaatccaacctctcattctgaatgtactgctgaagaagcatataactggactcagggtcgtgtaatatttgccagtggcagtccatttgaccctgtggagtacgatgggaaggtttttgtacctggacagtcgaacaacgcctacattttccctggatttggcctcggtcttgttatctctggagccatccgtgtccacgaggacatgcttcttgccgcctcggaagcactagctgctcaggccacacaggagaacttcgacaagggatcaatcttcccgcccttcaccaacattagaaagatctctgcgcgcattgccgcagccgtggctgcaaaagcttatgaactcggtttggcgacccgtctgcctcccccaagggacctggtgaaatatgcacagagctgcatgtacactcctgtctaccgtaactaccggtagtgctgctgggatcaattctgcagtaataaaatatgtcgacgcagatgatcctgcaatgttgtagtttattttttcatttgttggccctgctgctgaccacctttgtggctgctagacactgtacctgtctatgcatatatgatactggaacatttggcgcgctgtgggcgtccctgtcatgagatcaattgcagaaataaaatgcaatttagatttgagcaccaaaataaaaatagtaataatacacaagtgaggcaagcatatgttgaatctgatttgcttcaccttcgattagagatgacaatgagtaaatattcaccttcgattagagatgacaatgagtaaatacccgt

SEQ ID NO: 135536 - DNA, 1321 bp, Zea Mays
cgtcattcgctcaccactcccaccgccaccggcctcaagccaacaccaccagtccacacatgcgcaggcgcacacgcacggccgttgagacttgagacagagacgcaggagcgcggaggaaaaggaggcccagaccaccgacggggaaaaaacatcacgaacaccgttctccatagcgggagtagtgaggaacgaaagagagggggcggcctagggcttcgattccgcagccatggacgccgctgacgtgtggggccgctcatcgtcctcgtcttcttcgtccgccgccgccgcgaggcgcctgcaggcgcgctacgatctgtacatggggatcgacgacgcggacgccggcttggacgaggtgacggagccgcgcggcggggcggagtcctacaactgccccttctgcggcgaggacttcgactttgtcggcctctgctgtcacatcgacgacgagcatgccgttgaggctaagagcggggcatgccccatctgtgctacaagggtcggaatggacttgataggacatttgactatgcaacatggaagttatttcaagatgcaacgcaggcgcagagtccgaaaagtatcttctgggtcccattctttattatctttgttgagaaaggacttgagaaatggcagtttgcagtcatttctcggtggatcatcctatgtatccaatcctcctgctgcagcaccagatccatttgtgtcatctttaatttgtactttgcctgtggctgaaccatccaaagatttacattccgactcatctgacaataactttttgctaaataaattcccagatgaaaagcctgtagagagggctgaaccatcattgtcggagaaagatcagaaggaaagggttcaaaggagcaaattcgtccgagggcttgtgctctcgacaatatttgatgatgataacttgtaaagggggtcatcaaacttgataacagcatcacaatagttaaggaacacgaagagaatcatcagactctgctgctgttgtcgtgatcacacaagaggcccatctaagttcgtatatgtacggatggaatatttatgcatgtatgtatttatgtttatctccctgcatttacccttagtgcaacagggtggtaggggacggttgtagtattccaaatttatgtatcaaataaatgaggacactgtccttggggtgcaattgtgtatataatataataatagggagctactcgccatgatttaggatattttatttaactgttgtaataatatgcagtgttttgtatgatgaccccatttttttatatataactgttcattttagtccttt

SEQ ID NO: 135537 - DNA, 1393 bp, Zea Mays
cgtcattcgctcaccactcccaccgccaccggcctcaagccaacaccaccagtccacacatgcgcaggcgcacacgcacggccgttgagacttgagacagagacgcaggagcgcggaggaaaaggaggcccagaccaccgacggggaaaaaacatcacgaacaccgttctccatagcgggagtagtgaggaacgaaagagagggggcggcctagggcttcgattccgcagccatggacgccgctgacgtgtggggccgctcatcgtcctcgtcttcttcgtccgccgccgccgcgaggcgcctgcaggcgcgctacgatctgtacatggggatcgacgacgcggacgccggcttggacgaggtgacggagccgcgcggcggggcggagtcctacaactgccccttctgcggcgaggacttcgactttgtcggcctctgctgtcacatcgacgacgagcatgccgttgaggctaagagcggggcatgccccatctgtgctacaagggtcggaatggacttgataggacatttgactatgcaacatggaagttatttcaagatgcaacgcaggcgcagagtccgaaaagtatcttctgggtcccattctttattatctttgttgagaaaggacttgagaaatggcagtttgcagtcatttctcggtggatcatcctatgtatccaatcctcctgctgcagcaccagatccatttgtgtcatctttaatttgtactttgcctgtggctgaaccatccaaagatttacattccgactcatctgacaataactttttgctaaataaattcccagatgaaaagcctgtagagaggtacgtcacctcaagcttgtcctttctgctgcctcactcatctccctctttgccacgataccattggatctgggctgaaccatcattgtcggagaaagatcagaaggaaagggttcaaaggagcaaattcgtccgagggcttgtgctctcgacaatatttgatgatgataacttgtaaagggggtcatcaaacttgataacagcatcacaatagttaaggaacacgaagagaatcatcagactctgctgctgttgtcgtgatcacacaagaggcccatctaagttcgtatatgtacggatggaatatttatgcatgtatgtatttatgtttatctccctgcatttacccttagtgcaacagggtggtaggggacggttgtagtattccaaatttatgtatcaaataaatgaggacactgtccttggggtgcaattgtgtatataatataataatagggagctactcgccatgatttaggatattttatttaactgttgtaataatatgcagtgttttgtatgatgaccccatttttttatatataactgttcattttagtccttt

SEQ ID NO: 135538 - DNA, 879 bp, Zea Mays
atggctatgcttgaaaatgaaccaatggaatactagtaggcatgccccatctgtgctacaagggtcggaatggacttgataggacatttgactatgcaacatggaagttatttcaagatgcaacgcaggcgcagagtccgaaaagtatcttctgggtcccattctttattatctttgttgagaaaggacttgagaaatggcagtttgcagtcatttctcggtggatcatcctatgtatccaatcctcctgctgcagcaccagatccatttgtgtcatctttaatttgtactttgcctgtggctgaaccatccaaagatttacattccgactcatctgacaataactttttgctaaataaattcccagatgaaaagcctgtagagagggctgaaccatcattgtcggagaaagatcagaaggaaagggttcaaaggagcaaattcgtccgagggcttgtgctctcgacaatatttgatgatgataacttgtaaagggggtcatcaaacttgataacagcatcacaatagttaaggaacacgaagagaatcatcagactctgctgctgttgtcgtgatcacacaagaggcccatctaagttcgtatatgtacggatggaatatttatgcatgtatgtatttatgtttatctccctgcatttacccttagtgcaacagggtggtaggggacggttgtagtattccaaatttatgtatcaaataaatgaggacactgtccttggggtgcaattgtgtatataatataataatagggagctactcgccatgatttaggatattttatttaactgttgtaataatatgcagtgttttgtatgatgaccccatttttttatatataactgttcattttagtccttt

SEQ ID NO: 135539 - DNA, 440 bp, Zea Mays
ctccctccctctgtttacatcgaatcattttcgatttagctatagcaggtctcgatcggcggccatgagcggtagccgcagcaagaagtcgtggccggaggtggaggggctgccgtccgaggtggccaagcagaaaattctggccgaccgcccggacgtccaggtggtcgttctgcccgacggctccttcgtcaccactgatttcaacgacaagcgcgtccgggtcttcgtcgacaacgccgacaacgtcgccaaagtccccaagatcggctagctagctagctaggcccaatcgttctaatcagctagtttctttctttcataaataaaagtcctctctcgtacccggactgtgatgtttccctagttgtctcgtacgtgttgttttctgtcttaatggatgccatggcgcccgcgcgcgcctccatcatgaaaagcta

SEQ ID NO: 135540 - DNA, 228 bp, Zea Mays
atgcatgctaacaaatctattacgtacacagatgctaatgctctgcctacactattgtttcaacttttgaatggcagctattatctgggaaaaaaacaattctcttttacaagagccatctggcacagtaaacaacattgctgttgctggatggttactggggtcctaatctgccgcatggatagggtacagatgttgtatggtcaatgctttagaggttggatgtga

SEQ ID NO: 135541 - DNA, 351 bp, Zea Mays
atgggactctacactgtgcagaaggttgttggcgacatccgcatcctcgcctatggtgttcctcctaatgtcgtggatgagtacgtgctcattgcagagttcactgcacatgaggctcttcaacgcttctgtaaggccatcgtaactgcatttgctctgtgctacctgcgcccgcatacaccccatgatctcacacgactactccaagtctatccaactcacagatctttggaagaacgcaatcgcttcatcctcaaacaacacgagaagcttaaggatccacagaagtaccagcaactgcagagggacctgattgagcatcactgggcacgtatcggcgccgacatttag

SEQ ID NO: 135542 - DNA, 1090 bp, Zea Mays
gcaaaggctgggtcccaccgtccaccaacaaaaaaacgaacgactgttgctcggcccgaatctcccgtgcttccctttccctcccccattccccccctccctccgggctctgcctccgctcaccgctcaccgctcatgggcgagtaccaccgtccctaccggggcgacctccgctcgccgccgtcctccgtgccggacccggccttcacgcacgccaacggctacttctcctcctccgcctccccgaactccaacaacggctacttctctcccgtcttcgcgaagaatgacgctttccctgggaccggcgctggcgcaggcggcgaccggcggatcgagatctacaccacggcgcctcctccgcacctcccgccgccacccggccacacgctggcgctgcccccgccgccggggtggaaggaggggcgactgggtggaggtggaggcggaggcggcgccggcggcggcaggaaagcgggaggtggtgggggcggggccagcatgtggtgcctcagcgatccggagatgaagcggcggcgaagggtggcgagctacaaggcctactcggtggagggcaaggtgaaggcgtcgctgcggcgcggcctccggtggttcaagggcaagtgctccgagatcttccaccatggatggtaacctccgatggctggctggctggctggctggccggctctccttcttggacggtggcaggccccccccaagaaaggaaccaaacttctgaatatgttcgcgatttacttttcttttcctttttgaaaataatgatgctcatgctccagatgtctatctatctatgtatctgttcgcctactaatttcgagatggatttgagactgtgagtgtatattcgtaaagctattttgccaagggatgcgcgctctgaacactcgagcggattgatctgttagtgctactgcagggtggctgtcgtatttgttattagtaatcaaatcaaacagttaggaattccatattaccaccatgctttgcttgtcctacttgctatgcattgataggatagccaggaatgtatggcatgtttgttgagattggctttgttcatcatttc

SEQ ID NO: 135543 - DNA, 1719 bp, Zea Mays
gcttctccagttctcctgcactctgctccccatattttatcccttcggagctcggatcagacgcttgtgaatcctggtcatcattcatggagaagaaggcagctactacagaggaaccccttctcgcgccgcggtccgagcacacggtcgcggcggaggccaagcggctgctgagcctggcggggccgctggtggccagctgcatcctgcagaacgtggtccagctggtttccgtgatgttcgtgggccacctcggcgagctgcccctcgccggcgcgtccctggccagctcgctcgccaacgtcaccggcttcagcctcctcgtgggcatggcgagcgcgctggacacgctgtgcgggcaggccttcggagcgaggcagtacggcctgctcggcctctacaagcagcgggccatgctggtgctcgcgctcgcctgcgtcccgatcgccgcggtctgggccaacgccgggcggatcctcatcctcctcggccaggaccgcgacatcgccgcggaggccggcgcctactcccggtggctcatactgtcgctcgtcccctacgtcccgctcgcgtgccacgtccggttcctgcagacgcagagcatcgtcgtgccggtgatggccagctccggcgccaccgcgctgggccacgtgctggtgtgctgggcgctggtgttcaaggccggcatggggagcaaaggcgcggcgctgagcggtgccatctcctactccgtcaacctggccatgctggctgtctacgtcaggctctccagcgcgtgcaagaggacgtggaccggattctccacggaggccttccgagaccttctccggttcaccgagctcgccgtcccgtcggcgatgatggtctgcttggagtggtggtcctttgaactgcttgtgcttctctctggtctgctgcccaatccgaagcttgaaacctcagtactgtcaatatgtctaaacactggcgccttgctgttcatggtgccgtatggtctttgcacagccataagcacacgtgtttcgaatgagcttggtgccggcgagcctcaagcagcgaggctagcagctcgagtggtgatgtgcatcgccctgtctgcaggcttgctgctcggctctaccatgattctcctgcgcagcttctggggctacatgtacagcaacgaacctgaagtcgtcacgtacattgctaggatgatgccggtcctggcgatttcgtttttcacggatgggctccacagttgtctatcaggagtgctgactgggtgcggtcggcagaagattggcgcgcgcgtcaatctcggtgcgtactacttggccggcattcccatggccgtgctgcttgcatttgtgcttcacctgaatggaatgggtctgtggcttggcatcgtttgtggcagcctcaccaagcttgtgctgctcatgtggatcacactgcggataaactgggagaaagaggcaaccaacgcaaaagaaacggtgttcagttcatctcttcccgtagcattatagagctgtatcctatatatgtgcagctggacgtaacaacaccacaacatgaaaaggctctattgctgcatgctgctacactaccttcccaattgagagacaatatgagttctatgcgttctctaatacgttacttagtatacatattttgttattaaatatccatatcgtcagggatattatatgatattgattatctctattcatcata

SEQ ID NO: 135544 - DNA, 1828 bp, Zea Mays
gcttctccagttctcctgcactctgctccccatattttatcccttcggagctcggatcagacgcttgtgaatcctggtcatcattcatggagaagaaggcagctactacagaggaaccccttctcgcgccgcggtccgagcacacggtcgcggcggaggccaagcggctgctgagcctggcggggccgctggtggccagctgcatcctgcagaacgtggtccagctggtttccgtgatgttcgtgggccacctcggcgagctgcccctcgccggcgcgtccctggccagctcgctcgccaacgtcaccggcttcagcctcctcgtgggcatggcgagcgcgctggacacgctgtgcgggcaggccttcggagcgaggcagtacggcctgctcggcctctacaagcagcgggccatgctggtgctcgcgctcgcctgcgtcccgatcgccgcggtctgggccaacgccgggcggatcctcatcctcctcggccaggaccgcgacatcgccgcggaggccggcgcctactcccggtggctcatactgtcgctcgtcccctacgtcccgctcgcgtgccacgtccggttcctgcagacgcagagcatcgtcgtgccggtgatggccagctccggcgccaccgcgctgggccacgtgctggtgtgctgggcgctggtgttcaaggccggcatggggagcaaaggcgcggcgctgagcggtgccatctcctactccgtcaacctggccatgctggctgtctacgtcaggctctccagcgcgtgcaagaggacgtggaccggattctccacggaggccttccgagaccttctccggttcaccgagctcgccgtcccgtcggcgatgatggtctgcttggagtggtggtcctttgaactgcttgtgcttctctctggtctgctgcccaatccgaagcttgaaacctcagtactgtcaatatggtaactactactaaatgtcaaataataaaccgtgcattaccttctttatctctctctctctctctctgattagctagcttgtcgaatcctgcagtctaaacactggcgccttgctgttcatggtgccgtatggtctttgcacagccataagcacacgtgtttcgaatgagcttggtgccggcgagcctcaagcagcgaggctagcagctcgagtggtgatgtgcatcgccctgtctgcaggcttgctgctcggctctaccatgattctcctgcgcagcttctggggctacatgtacagcaacgaacctgaagtcgtcacgtacattgctaggatgatgccggtcctggcgatttcgtttttcacggatgggctccacagttgtctatcaggagtgctgactgggtgcggtcggcagaagattggcgcgcgcgtcaatctcggtgcgtactacttggccggcattcccatggccgtgctgcttgcatttgtgcttcacctgaatggaatgggtctgtggcttggcatcgtttgtggcagcctcaccaagcttgtgctgctcatgtggatcacactgcggataaactgggagaaagaggcaaccaacgcaaaagaaacggtgttcagttcatctcttcccgtagcattatagagctgtatcctatatatgtgcagctggacgtaacaacaccacaacatgaaaaggctctattgctgcatgctgctacactaccttcccaattgagagacaatatgagttctatgcgttctctaatacgttacttagtatacatattttgttattaaatatccatatcgtcagggatattatatgatattgattatctctattcatcatagaggatccgttagtt

SEQ ID NO: 135545 - DNA, 506 bp, Zea Mays
acccgggaagaacgggcgccgtggaggggatccagcaggatggcggcgagcagggcaagcacccagggagccggacgctgagcgctagtcaccgcagcagggagctgggcgagctcgagcagagagccggagtgctcgggcgcgccatggagggggaatccgagctggagcacggcgtgccgtgggaggagccgagcagagagataggaagttgccggcctgccgcgagggagcagagagcagggaggtccggcgcggtggacgccatggctgagcgtgacgggctgagggggcgctatgggagaagaacagggactcagcgagggagatggagatgggctgggcacggcaccagggagctgtgcggccaggcgagcaaggagccgggcggagaagaagctccacaagcagggggattggcacagcagggaggaagaaaggagagtggctgggcgtgcgcagagaaatgtcgaccagagcgggcaccaaatgaactggagtgctag

SEQ ID NO: 135546 - DNA, 626 bp, Zea Mays
atgggtctaggagcagatcaaactagtatttctagaaggtcaaaacatgcaaacctcgaggggaagcaaagcaaacaagctaaaaccatcaattccccattcgcaagcgtccgccgagggatggagaacggtggaatcgaggaggccgacgacgcactgccggagcccgcgccgcccaatgggcggcggtaccggccagtcgggtcgagcgaccgtgccgtgatccagatgacttccatggagccgggatcctcgtctgccaccatcgatgccgtcgtgactccccagccgccaaggaacctgaagcctgatgctaatctaactattgatccaagtatgcgggaaggttctcctgatgatcatgttacatccagtggatctcaaggggattcaaagctagaactctttggttttgattctcttgtaaatatattgggtcttaagagcatgacaggagagcaggttcaggccccttcaagtcctagggatggcgaggatgttgcaattaccattggccggcccaagcaaagtggacctaagttcggcaccatgatgggtgtctttgttccatgcttgcagaatatcttgggaatcatttattatatccgttttacctggtaaggtat

SEQ ID NO: 135547 - DNA, 630 bp, Zea Mays
caccttccgcagccgtcgccaccgccgtcgccggcgtctcctcctctgccacccagcccaccctcctccgccacagacacaccgctatcgcttcccacatcatctctccagcgtccgccgagggatggagaacggtggaatcgaggaggccgacgacgcactgccggagcccgcgccgcccaatgggcggcggtaccggccagtcgggtcgagcgaccgtgccgtgatccagatgacttccatggagccgggatcctcgtctgccaccatcgatgccgtcgtgactccccagccgccaaggaacctgaagcctgatgctaatctaactattgatccaagtatgcgggaaggttctcctgatgatcatgttacatccagtggatctcaaggggattcaaagctagaactctttggttttgattctcttgtaaatatattgggtcttaagagcatgacaggagagcaggttcaggccccttcaagtcctagggatggcgaggatgttgcaattaccattggccggcccaagcaaagtggacctaagttcggcaccatgatgggtgtctttgttccatgcttgcagaatatcttgggaatcatttattatatccgttttacctggtaaggtat

SEQ ID NO: 135548 - DNA, 2761 bp, Zea Mays
atgacggtcatgatgataagcgccgcagggggacaggaggcggtgggggaggaggtggaaggtgccacgggaggagcaactcggttcggtcctcggtcggatcgttttgataacgatcgcagccgcaccgccactacatgggaaatgaggaggatgcgggagaggaggtggaaggcgtcacaagaggagttgctcgattcggtccttggccagatcttatcaatcgacggctacagccgcaccgctgagagtgtaacagttgtcaacaatacattagtgaatggtacagaaactactggcacgtcaactatatctacacccagcttgcatgatcttcaagtgtatggtgttattgtgactatactgctgtgttttattgtgtttggtggtgtcaaaatcatcaacaaggttgcacctgctttcttaataccagtcctgttctctttgctgtgcatttatcttggtgtcttcattgcaccaaggcataatgctccaagggggatcactgggttgagtataaccacattgaaagacaattggggtgaagactatcaacgtacaaacaatgctggcgttcctgatccaagtggatcaatatattgggatttcaatgctctggtcacagccgccgccagtgctggtcttctggactgcagctggacagtagccgagaaggcagaggcgccggtggagcaggccagcagggggcgaaggctccttactgctacggtggcttggcctgctcctgcagtgatttacattggtattattctgtccaccttaggtgcagcactgcagagtttgactggggctccaaggttgcttgcagcaattgctaatgatgacattcttcctgttcttaattacttcaaagtttctgagggatctgagccgcatgcggccactttattcacggccttcatctgtatttgctgtgttgttattggaaacttggatttgattacacccacgatcacaatgtttttccttctgtgctatgctggcgtgaacctgtcatgctttctgcttgatctccttgatgctcctagttggcgccccagatggaaatttcaccattggagcctttcacttgttggggcattgttctgtgttgtgattatgtttctgatctcctggtctttcactgttgtctcccttgcccttgcaagcctcatctattactatgtgagcataaaagggaaggctggagactggggagatgggttcaaaagtgcatactttcaattggcactccgaagtctcagatcactcggagcaaaccaagtccatcctaagaattggtaccccattcctctgatattctgccgtccatggggcaaactgccggaaaatgttccttgtcatccaaaacttgcagactttgctaattgtatgaagaagaaaggccgtggtatgtccatttttgtctctataattgatggtgattatcatgaactagctgaggatgcaaagactgcctgccgccaattggatgcttacattgactacaagcgctgtgagggtgttgcggagatcattgtagctcctactatgtctgacggcttccgcagcatcgtgcagacaatgggcctaggaaacttgaagccaaacattgttgtgatgcggtaccctgagatctggaggcgtgagaatttgacacagataccgtcaacatttgtcagcataataaatgattgcattattgctaacaaggcagtagtcattgtgaagggactcgatgagtggcctaatgagtaccagcgtcagtatgggactattgacctctactggattgtaagggatggaggattgatgcttcttctgtcccaactcctgctgacaaaggagagctttgagagctgtaagatccaagtcttctgcatatctgaagaggataccgacgcagaggagctgaaagctgatgtcaaaaagttcttgtatgatcttaggatgcaagctgaggtcattgttgtcactatgaaatcatgggagtcacacatggagagcagcagtagcggtgttcagcaggataactcccatgaggcttacacaagtgcacagcaaaggatcgaaacataccttgacgagatgaaggaaactgctcaaagagaaaggcagccactaaaggagaatgggaggcaagttgttgtgaatgaacagaaggttgataaattcctttacacaatgttgaaattgaactccacgatactcaggtactccagaatggcagctgtagttcttgtgagccttccaccaccaccactaaatcatcctgcatatttctacatggagtacatggatttgcttgtagagaatgtcccacgcatgttaatagttaggggatatacgagagatgttgtcacatttttcacatgattatacatataatataaacttcccacctggagactctagtgtcgtctggctgttgtactatcttagcagagactggttacacaagattcaagcgtggattctgccatcgaaatgacaagccctcaccttgaaggcaaccatgatgagatgtcaaatgtcaagggctcttgttcgggcttattgggttcgtgaactactgaactgcagtgtcttcattcttttctggattttaaagatccacatagcgagctttgattcttacagattttgtagtcatcatatgtaaacacttaccatctagtaagcatacttacatgctgccccaatgacagaatgcgatccttaccttctcacaaacatttatatatgtattttctttgcatca

SEQ ID NO: 135549 - DNA, 2854 bp, Zea Mays
atgacggtcatgatgataagcgccgcagggggacaggaggcggtgggggaggaggtggaaggtgccacgggaggagcaactcggttcggtcctcggtcggatcgttttgataacgatcgcagccgcaccgccactacatgggaaatgaggaggatgcgggagaggaggtggaaggcgtcacaagaggagttgctcgattcggtccttggccagatcttatcaatcgacggctacagccgcaccgctgagagtgtaacagttgtcaacaatacattagtgaatggtacagaaactactggcacgtcaactatatctacacccagcttgcatgatcttcaagtgtatggtgttattgtgactatactgctgtgttttattgtgtttggtggtgtcaaaatcatcaacaaggttgcacctgctttcttaataccagtcctgttctctttgctgtgcatttatcttggtgtcttcattgcaccaaggcataatgctccaagggggatcactgggttgagtataaccacattgaaagacaattggggtgaagactatcaacgtacaaacaatgctggcgttcctgatccaagtggatcaatatattgggatttcaatgctctggtaggtctctttttcccagcggtcactggaattatggctggctcaaaccgatctgcctcactgaaagatacacagcgttcaataccaatcggcacattatatgcaactcttacaacaactgccatgtatctattctctgtgcttctatttggagccttggctacacgggaggagcttctaactgataggctccttactgctacggtggcttggcctgctcctgcagtgatttacattggtattattctgtccaccttaggtgcagcactgcagagtttgactggggctccaaggttgcttgcagcaattgctaatgatgacattcttcctgttcttaattacttcaaagtttctgagggatctgagccgcatgcggccactttattcacggccttcatctgtatttgctgtgttgttattggaaacttggatttgattacacccacgatcacaatgtttttccttctgtgctatgctggcgtgaacctgtcatgctttctgcttgatctccttgatgctcctagttggcgccccagatggaaatttcaccattggagcctttcacttgttggggcattgttctgtgttgtgattatgtttctgatctcctggtctttcactgttgtctcccttgcccttgcaagcctcatctattactatgtgagcataaaagggaaggctggagactggggagatgggttcaaaagtgcatactttcaattggcactccgaagtctcagatcactcggagcaaaccaagtccatcctaagaattggtaccccattcctctgatattctgccgtccatggggcaaactgccggaaaatgttccttgtcatccaaaacttgcagactttgctaattgtatgaagaagaaaggccgtggtatgtccatttttgtctctataattgatggtgattatcatgaactagctgaggatgcaaagactgcctgccgccaattggatgcttacattgactacaagcgctgtgagggtgttgcggagatcattgtagctcctactatgtctgacggcttccgcagcatcgtgcagacaatgggcctaggaaacttgaagccaaacattgttgtgatgcggtaccctgagatctggaggcgtgagaatttgacacagataccgtcaacatttgtcagcataataaatgattgcattattgctaacaaggcagtagtcattgtgaagggactcgatgagtggcctaatgagtaccagcgtcagtatgggactattgacctctactggattgtaagggatggaggattgatgcttcttctgtcccaactcctgctgacaaaggagagctttgagagctgtaagatccaagtcttctgcatatctgaagaggataccgacgcagaggagctgaaagctgatgtcaaaaagttcttgtatgatcttaggatgcaagctgaggtcattgttgtcactatgaaatcatgggagtcacacatggagagcagcagtagcggtgttcagcaggataactcccatgaggcttacacaagtgcacagcaaaggatcgaaacataccttgacgagatgaaggaaactgctcaaagagaaaggcagccactaaaggagaatgggaggcaagttgttgtgaatgaacagaaggttgataaattcctttacacaatgttgaaattgaactccacgatactcaggtactccagaatggcagctgtagttcttgtgagccttccaccaccaccactaaatcatcctgcatatttctacatggagtacatggatttgcttgtagagaatgtcccacgcatgttaatagttaggggatatacgagagatgttgtcacatttttcacatgattatacatataatataaacttcccacctggagactctagtgtcgtctggctgttgtactatcttagcagagactggttacacaagattcaagcgtggattctgccatcgaaatgacaagccctcaccttgaaggcaaccatgatgagatgtcaaatgtcaagggctcttgttcgggcttattgggttcgtgaactactgaactgcagtgtcttcattcttttctggattttaaagatccacatagcgagctttgattcttacagattttgtagtcatcatatgtaaacacttaccatctagtaagcatacttacatgctgccccaatgacagaatgcgatccttaccttctcacaaacatttatatatgtattttctttgcatca

SEQ ID NO: 135550 - DNA, 2217 bp, Zea Mays
gagtctttgtcccatccaacatctcgatccatcccagcatcatccccacaattgaggcgattgaagcagaaaaaatcagtcgccgtagcagcgccgcctccgccgccgtggggaggtagcatctaggcccattccgccgcctccatctccggtatgttcccctccgtccctcgattcgcacgaatgctgggccaaaaacccttgcgcgattccggtgcttttctcgcgccctgaatcaacactgtgttgctccaggccagcaatggcttcggcggtggagcggcggagggaggagcacgcgcggagatcgcgttccccagcacggggcagggagcggaggggaacgccgccacgcaggcggagttccccagagcggaggaagggttcgcctgctagggcacggtctcctgctgcgaagtcaagtgcgtcgcatagggacagggagaggtcgcctccgagggagaaggtgaaggagcgtgtcaggtcgccagagtctcctgctaaggtcagcctgttgcacaaggggagagagaggtcgtctcccagggagaaggcgaaggaccagcgggtcaggtcgccgaaacgtaagcaggagcagtcacgatcaccctcacctgctaggcgacacttctctaggtcgccctcgccgcgctccaagaggacgaggggagcgcagggtgagcgggaggcggtgcagtttactggcagtgatcgccggaaggcaagtcacagggaggagcaggatacactgaggcacagggagcatgatgaggggagggatgcttcaagagacaggaaagtggatcgggaggcagtgcatgtaacaaatggtgatcgccgcaagccctctcatggggaagagagggactcatggggcaagcacagggaacatgatgaagggagggttgcatcgatagataggaagtcggatcgagaggataccagaggtactgcaaaagataagaaatatgttcgtgatgatgagaaggatcattctagggagaggggggctgggagggatgataagtatggtgcttcaaaggtggcattgccggtctgggatgatgatagacatggaaggcctaatcggggtgactggaaatctgcttcttcaagggagcaaaggctggactctggtgacagaagggattcaacaagagtgaaaccaacagatcatgatgggagcaatgggggatcgggaaggtctttcaggcatggtcgttcaatgtctccagaagagcacaggcatcggggcaggcatgaatctcatccatcatcgagagtgtccagaagtgcagcacatatcgaggatattaactcgagaggaggtgaagcatcccggaatggagatcctgatgctttggcaacaatgaacgcaactgcagaagctcttgaagcaaaagaaaaggtgcaaaagccatcgtttgaattgtctggaaagcttgctgaggagaccaacagagttgcaggtgtaaatctattatattcagaacccccagaggctcgaaagtcagagattagatggaggctctatgtatttaaagatggtgaaccactgaatgaaccactgtatgttcatcggatgacctgctacctttttggaagagaaaggaaagttgcagatgtccccacagatcatccctcctgcagcaagcaacatgcagttcttcaatacagacttgtggagaaggagcaactagatggcatgatgacaaagaaaataaggccttatctgatggatcttgatagtacaaatggaactttcatcaatggaaatcgcattgagcctcggcgatattatgagttatttgaaaaggacacaatcaagtttggcaatagtagccgggagtatgttttgctccacgaaaattcaacagaatgagttttgagaaaattcaacagaatgaggattgaaacaatcagccttttatgctgtagaagaaaaatacagcaaaaacatgaggttttgcatgttttaaaatttttagactggagattggccggcttgaacttctggtctgtgatttcttcacgtgttcaagtctataaggatattttgtgaaccaacatgtagtgctattgtaatgaaaagagctagctgcctgtagcagatagccctggggtattgtttgtattcaagcatgttttgcaccgctggcattcacatcattcggtatcggaggcagctgtttatggatcaatgccatagtaatctta

SEQ ID NO: 135551 - DNA, 2140 bp, Zea Mays
gagtctttgtcccatccaacatctcgatccatcccagcatcatccccacaattgaggcgattgaagcagaaaaaatcagtcgccgtagcagcgccgcctccgccgccgtggggaggtagcatctaggcccattccgccgcctccatctccggccagcaatggcttcggcggtggagcggcggagggaggagcacgcgcggagatcgcgttccccagcacggggcagggagcggaggggaacgccgccacgcaggcggagttccccagagcggaggaagggttcgcctgctagggcacggtctcctgctgcgaagtcaagtgcgtcgcatagggacagggagaggtcgcctccgagggagaaggtgaaggagcgtgtcaggtcgccagagtctcctgctaaggtcagcctgttgcacaaggggagagagaggtcgtctcccagggagaaggcgaaggaccagcgggtcaggtcgccgaaacgtaagcaggagcagtcacgatcaccctcacctgctaggcgacacttctctaggtcgccctcgccgcgctccaagaggacgaggggagcgcagggtgagcgggaggcggtgcagtttactggcagtgatcgccggaaggcaagtcacagggaggagcaggatacactgaggcacagggagcatgatgaggggagggatgcttcaagagacaggaaagtggatcgggaggcagtgcatgtaacaaatggtgatcgccgcaagccctctcatggggaagagagggactcatggggcaagcacagggaacatgatgaagggagggttgcatcgatagataggaagtcggatcgagaggataccagaggtactgcaaaagataagaaatatgttcgtgatgatgagaaggatcattctagggagaggggggctgggagggatgataagtatggtgcttcaaaggtggcattgccggtctgggatgatgatagacatggaaggcctaatcggggtgactggaaatctgcttcttcaagggagcaaaggctggactctggtgacagaagggattcaacaagagtgaaaccaacagatcatgatgggagcaatgggggatcgggaaggtctttcaggcatggtcgttcaatgtctccagaagagcacaggcatcggggcaggcatgaatctcatccatcatcgagagtgtccagaagtgcagcacatatcgaggatattaactcgagaggaggtgaagcatcccggaatggagatcctgatgctttggcaacaatgaacgcaactgcagaagctcttgaagcaaaagaaaagcaaaagccatcgtttgaattgtctggaaagcttgctgaggagaccaacagagttgcaggtgtaaatctattatattcagaacccccagaggctcgaaagtcagagattagatggaggctctatgtatttaaagatggtgaaccactgaatgaaccactgtatgttcatcggatgacctgctacctttttggaagagaaaggaaagttgcagatgtccccacagatcatccctcctgcagcaagcaacatgcagttcttcaatacagacttgtggagaaggagcaactagatggcatgatgacaaagaaaataaggccttatctgatggatcttgatagtacaaatggaactttcatcaatggaaatcgcattgagcctcggcgatattatgagttatttgaaaaggacacaatcaagtttggcaatagtagccgggagtatgttttgctccacgaaaattcaacagaatgagttttgagaaaattcaacagaatgaggattgaaacaatcagccttttatgctgtagaagaaaaatacagcaaaaacatgaggttttgcatgttttaaaatttttagactggagattggccggcttgaacttctggtctgtgatttcttcacgtgttcaagtctataaggatattttgtgaaccaacatgtagtgctattgtaatgaaaagagctagctgcctgtagcagatagccctggggtattgtttgtattcaagcatgttttgcaccgctggcattcacatcattcggtatcggaggcagctgtttatggatcaatgccatagtaatcttaatgagttaatcatggatttactagttcgat

SEQ ID NO: 135552 - DNA, 2141 bp, Zea Mays
gaggcgattgaagcagaaaaaatcagtcgccgtagcagcgccgcctccgccgccgtggggaggtagcatctaggcccattccgccgcctccatctccggccagcaatggcttcggcggtggagcggcggagggaggagcacgcgcggagatcgcgttccccagcacggggcagggagcggaggggaacgccgccacgcaggcggagttccccagagcggaggaagggttcgcctgctagggcacggtctcctgctgcgaagtcaagtgcgtcgcatagggacagggagaggtcgcctccgagggagaaggtgaaggagcgtgtcaggtcgccagagtctcctgctaaggtcagcctgttgcacaaggggagagagaggtcgtctcccagggagaaggcgaaggaccagcgggtcaggtcgccgaaacgtaagcaggagcagtcacgatcaccctcacctgctaggcgacacttctctaggtcgccctcgccgcgctccaagaggacgaggggagcgcagggtgagcgggaggcggtgcagtttactggcagtgatcgccggaaggcaagtcacagggaggagcaggatacactgaggcacagggagcatgatgaggggagggatgcttcaagagacaggaaagtggatcgggaggcagtgcatgtaacaaatggtgatcgccgcaagccctctcatggggaagagagggactcatggggcaagcacagggaacatgatgaagggagggttgcatcgatagataggaagtcggatcgagaggataccagaggtactgcaaaagataagaaatatgttcgtgatgatgagaaggatcattctagggagaggggggctgggagggatgataagtatggtgcttcaaaggtggcattgccggtctgggatgatgatagacatggaaggcctaatcggggtgactggaaatctgcttcttcaagggagcaaaggctggactctggtgacagaagggattcaacaagagtgaaaccaacagatcatgatgggagcaatgggggatcgggaaggtctttcaggcatggtcgttcaatgtctccagaagagcacaggcatcggggcaggcatgaatctcatccatcatcgagagtgtccagaagtgcagcacatatcgaggatattaactcgagaggaggtgaagcatcccggaatggagatcctgatgctttggcaacaatgaacgcaactgcagaagctcttgaagcaaaagaaaagcaaaagccatcgtttgaattgtctggaaagcttgctgaggagaccaacagagttgcagataatagtgtgtgcctgttgtgatataggcacacttcattatctttggagatgacactttgttcctacttcaggtgtaaatctattatattcagaacccccagaggctcgaaagtcagagattagatggaggctctatgtatttaaagatggtgaaccactgaatgaaccactgtatgttcatcggatgacctgctacctttttggaagagaaaggaaagttgcagatgtccccacagatcatccctcctgcagcaagcaacatgcagttcttcaatacagacttgtggagaaggagcaactagatggcatgatgacaaagaaaataaggccttatctgatggatcttgatagtacaaatggaactttcatcaatggaaatcgcattgagcctcggcgatattatgagttatttgaaaaggacacaatcaagtttggcaatagtagccgggagtatgttttgctccacgaaaattcaacagaatgagttttgagaaaattcaacagaatgaggattgaaacaatcagccttttatgctgtagaagaaaaatacagcaaaaacatgaggttttgcatgttttaaaatttttagactggagattggccggcttgaacttctggtctgtgatttcttcacgtgttcaagtctataaggatattttgtgaaccaacatgtagtgctattgtaatgaaaagagctagctgcctgtagcagatagccctggggtattgtttgtattcaagcatgttttgcaccgctggcattcacatcattcggtatcggaggcagctgtttatggatcaatgccatagtaatcttaatgagttaatc

SEQ ID NO: 135553 - DNA, 440 bp, Zea Mays
gttgattaccttactcatgtgaagatcaagaattctctgggctatgccatacaagagatgaggcgtcaaaaaactctcttacacagcgtgtccaggttatgctccatgccttataaagtgcaaggtccgaaggcgaaaaatgttgtgaatcatcttgaccatgtttgtaaagttcttgaggaaactactttagtttgcaaacaagatttagacacaagcacttctttggttgtcttcgagtcaacagatcctcgcaccgaagatgttacactctagatgactgcaccgaagatgattacaatgatgaatttgagtcaaagagtttgtgggaaatgatttttgaggatcaagatttttgggagaaccttgaagttcctagcatggcacaacaatgtgaggatatgagttgggatttcgaagaatggtgggatcgtatcatg

SEQ ID NO: 135554 - DNA, 927 bp, Zea Mays
ggtccttataacttcccttggggagacaggccgaattcggccgttccaaaatataattcattttagactaaaatacatttattaatcaacaaataaatgtagtttatatatatgtctatatttattaatatttatttaaatgtggacgaaaaaagtgatggctagaaagaactatattttaagatgtaggggtaatttttaagaatcggaatatgaaattgaatttcgatttttaaaatataaaaatgtaaaagatacgcacaaaaatgggcttgagagtgccccctcgtctctataaagtcagcctcgaagcgtcgccgctctagaaaccctaacactcatcacgccgccactgatctgctctgttgctggtgactaggagcagtagcgagagggattctggatggccaagtcgaagaaccacacggcgcataaccagtcgttcaaggcgcacaagaacggcatcaagaagcccaagcgccaccgccagacctccaccaaggggatggacccgaagtttctgaggaacttgaggtactcaaggaagggcaacaagaagagtgggcgaggctgagtccgaggagtaagatgatggtgattgagtttgtggcgacaaatgcatctcttgtatcgctaagagtcttagctgtgaacttagttctcacttctgtgtgactgtgatcaaaggacttgtgtatgatcaaaggagatccatcagttggtaccgaagtgtattttatgtcttgttggttacctggaatttaattaaaaccatcacttgtatccttttgagaattgggcaattgatgtgtcgttttctgttctgccgtgatctgttatcagcattttacctgcccaatttcttgacttctttagggcttgttcggtttgcaagggattagtatggatttagagatattttgactt

SEQ ID NO: 135555 - DNA, 680 bp, Zea Mays
cttgcacacacacactctctctctgtcaccgtattgctgttctattggcttccagctgaattaaccgagaggaggctctggactaccgattccatggtgggccgctttttcctctcttcctccaagcacgagacggccagcctgagcatccccttcacctgcgagcagtcgaactcaccacccagcctcaagtccacgaactccgctacccagaacggctcatccttgtccagcctgtacgagaccatcctgacgaacttcttcagcaccgcatgcgcatgcgccctgtcgtcctcctcgcccttgagtaccaggtcgaagacccgcgtccccgacaccagctcaaggagcacgacgccgtagctgtacacgtcggccttggccgtgataggcaggccggacacccactccggggcgatgtagcccacggtgcctcgcgcccgcgtcggcgtcacgttccgggccggcccggacccggacctgctgagcagcttcgccagcccgaagtcggcgatcttgggctccaggtcctggtccagcaggatgttctcgggcttcaggttgcagtggacgatccactccaggcactcgtggtggaggtaggccaggcccttggcgacgcccagggccacgctgaatctctgcttccagtctagggaggaggaggttttgctgttgtt

SEQ ID NO: 135556 - DNA, 915 bp, Zea Mays
aatcctcccacgaggacaagagaagccactgccagtgcctccatggctacttaaagcccccccccttcagttcttcttcctcggtgcatttgcaagcgttaggaaagggagaagagaaaggaattaatggaacgtgaagaggagctgccttcatcttcttcttccttgggttacatgatgcagtgcagggtctgccatgaggaagaggatcaagggcgtgcgaccatggagtctccttgtggatgctccggctctctcaagtacgctcacaggggatgtgtgcagagatggtgtgacgagaaggggagcaccctctgtgagatctgccttcagaatttcaagccaggctacacaatgcctcccaagaaaaccccggtggttgaaacggcggtcactatcagtgaacacgaggacatgcaacatttggaacctccggagggcttggttgacggtgcagattacaccaggtgctcctacgccgcagatcaatgcgccacatggtgccggtcgctggcgatcacgttcaccattgtgacgctcgcatggcatctggttgcagtggcgacggctgaagcagcagagcactgcgcgttcagtctcctcacaatgtacttacttcgtgctgctggtatcctgctgccgctctaccttgtcatgcgaatgattggcgtcgtccaaagtgggcagaggcagtaccggttgcagctgctggaggaacaaagaagaaatgcatcaactatatgaattatatgcgtgtccaggaagaggaccagctagtaattaatattcattagccaattcatttaaataaatcttatggaaggttgtattaatgggaaaactttcaaacagaacatcatttgtaaactttcagtatacatacagttggtgcagtgaaacagcagcattttatcc

SEQ ID NO: 135557 - DNA, 2127 bp, Zea Mays
aatcctcccacgaggacaagagaagccactgccagtgcctccatggctacttaaagcccccccccttcagttcttcttcctcggtgcatttgcaagcgttaggaaagggagaagagaaaggaattaatggaacgtgaagaggagctgccttcatcttcttcttccttgggttacatgatgcagtgcagggtctgccatgaggaagaggatcaagggcgtgcgaccatggagtctccttgtggatgctccggctctctcaagtacgctcacaggggatgtgtgcagagatggtgtgacgagaaggggagcaccctctgtgagatctgccttcagaatttcaagccaggctacacaatgcctcccaagaaaaccccggtggttgaaacggcggtcactatcagtgaacacgaggacatgcaacatttggaacctccggagggcttggttgacggtgcagattacaccaggtgctcctacgccgcagatcaatgcgccacatggtgccggtcgctggcgatcacgttcaccattgtgacgctcgcatggcatctggttgcagtggcgacggctgaagcagcagagcactgcgcgttcagtctcctcacaatgtacttacttcgtgctgctggtatcctgctgccgctctaccttgtcatgcgaatgattggcgtcgtccaaagtgggcagaggcagtaccggttgcagctgctggaggaacaaagaagaaatgcatcaactatatgaattatatgcgtgtccaggaagaggaccagctagtaattaatattcattagccaattcatttaaataaatcttatggaaggttgtattaatgggaaaactttcaaacagaacatcatttgtaaactttcagtatacatacagttggtgcagtgaaacagcagcattttatccctgcttttcgcaatggcgttcagattctgggttgcatgaaaaaaaatatcccttgctatgtaggtgctgcagggaatgttcaaacagaacattatcgcatatcttcaataagaatgtaaagttacacttatttgcttttggtttttctcagtagaaaaagaagaatataggctcaaataaggagaagataaaatggagtcaagttaacacattcatatttatcaatttttcacagatgatattggtggtatcaaggagatgattttaatctagcaagtcaataatttagagggaaaatcctaatataacctcaaggaacgaagaaaagaaaaacataactaatagagcaccgtgcttcatctccattccagtggcaagtggagaaactaagcaagatgacaacctcaaataataaaatgatgtcagtcaattatacagggaagaaacaatttactgctatctcgcttgtactctggacacacagtttctgtgtgttagaaaaatcatgcgtccaggatgtcagatattttttgacataaattaggataatacattaatccaggtcaggtttcacatgcttatgtatttattcacgtgaaatacacaagtgcagtctgtcgaaggaccacgggagtactaaaagaagtaaagaactcaatgaccagcagatgcagttcagacgcaaagattcgaaccaaatgaacagtcggatcttgtgcaaaattcaggcccagagtcatgtcattctcatttctttcagttttatcctactaatctagtgatccaaacagattaattatgagcgaagcaatagaaaacaagatttgcagactgcagatataagaattaactaagagcagggattggaacatagaaaattgagttcaccaaacataataaccataccaaagtcacaaaatggtgaagcagtgcccagagtcacgggagctaacaaactcaatagtagatatttgttagcctcataccagcagagtgccatgctggaaacacccagcacatggtagaccaaaagatttgcatgtgctgcatgcaatacatttattaaggtttgttgtcttgtacccttgtttaaatctagttacaggaataccgagtataagaagacagaagagcatttcaataatgtacaattcgatggaactgaaagtttgatgggaagtaaaattactaacatgttagtgatctccacaa

SEQ ID NO: 135558 - DNA, 989 bp, Zea Mays
actcaacattttcagtctgagcatattcaagaaaacattgtcagaccaacggatattaacgcacgcaattcttcaatggcacattaccgtacaatggcaaactgaaaaaggtagcagttctccttagtaatcaaatttcaagcaccatcacagcatgccacattcctgctggcagcatagtaatcttagaacattctattaccaatctgaaggtacatttctcttcacccgactcttcattctatctgcccactgatagaacacattagatacatctaatttcccagcaaatttcactttctgagccaactcaaacaatatatctggtttcccagcctttgagaaatctgcagcaaacttattatagtctatttgtggagctttcatccctttattaatcatctcctcgatatatttatatgcctcctctggcctgccatgtcgtatatgcccattaatgaacactgtgtaagagttcacatcagggcaaatacccctctggtgcatctcctcccacactgcacaacccattgcatagttgctatcaccaacgaaatatgacttcatcatcatgttgtaagtatggattgtgggctcaagtcccttcttgatcatcttcttgtatatccttgcagcatcgtctggcatattcctatttgttagcaacttaatcagtgcattgtaagtccgagcatcaggggggcatcccttctgtgtcatctcctccaacacagcagtcactctgtccatttgttttgcattcccatatccaaccagcaaacatgtataggtagcaacatctggttggcatttagcctcctgcatctcctcaaagcactccattgccatgtccatcttcccctgcttacaatggtcacggattaacattgtgtaagtccacacatttggtggaggcccctttgccttcatcagctcaaacatcttcacggcctcgggtcgcctctgcccacgcagcaacccctcaatca

SEQ ID NO: 135559 - DNA, 2285 bp, Zea Mays
acgagtccacgcattccgctacccttgggccgaacagtcggccccgcggccgcgaggtagcgcccaaccaccccgcttgtcctcggctccctcttgaagagcgtgccccccgcctcataaataaacatcgggcaaaacaagcaaagtgaagaaagctgccggcctgccgctgcctgctcgcagttgccagcccccgccgccgcggaggacggaaggaagcgaatcaaccgcgactgtctccgacgggaataaagcaggcgaggccagccggtcgcggaacccccaattctcagctgcggccggcgatcgagtcggttccgtcccgcgccgatgcggatcccgcggcggaagggcggggccgggccgctcgctgtcggggtgcccagcaggcgggcgcaggtcgccgcggtcttcgcgctcgccgcactgctgggggtctccgtgctctacgacaacgcccacatcgccgcctcgctgcggaggcacggcggcccgaggacgtacgccaagctctcctccttcgaaggcgccaccgctgtccccagcatcgccaaggaagaggcggcggcggcggtggcgcgggcaacggagtcggtgccggtgcacggcgcggatcgggccgactcgcccccgcacgagcggcaggaggagatcgaggagcgcgcatcgaagcctggagcgacggccgggagctccctgcaggacgcgccgctaatcgaggaggtggtgcaaggaggaagcggaggccacgacggcgacggcgacggcgacggcggcgcgcaggcgcaggagcagcccccggccccggggacctgcgacctgtacaagggccgctgggtgtacgacgagtcccgcgcgccgctgtacaaggagtccgactgcagcttcctcacggagcaggtcacctgtatgcgcaacggccgacgcgacgacgactatcagaagtggcgctggcagcccgacggctgcgatctccccagatttgaagctaagttgcttctggagaagctaaggaacaaaaggctgatgtttgtgggggattccctgaatcggaaccagtgggagtccatggtgtgcctggtccagtcagaggctccatgggacaaaaagtcccttgtcaagaatggttctcttaatgtgttccatcttcaggagtacaatgcaacggttgagttctattggtctcctttcctagtggagtcgaactcagatgacccagacattcatagcatcagtgaccgcatgatcaagccgacatcgatcgctaagcatgcggcgaactgggaaggggtggactacctgatcttcaacacttacatctggtggatgaacacgccacagatgaaaactctgcacggtggatctttttcgaggaaacatgtcaagtatgacgaaatcgaacgtgtggaggcgtaccggaaggtcctcaagacatggtctagatgggtagaggcgcacgtagatcccaagagaacaacggtcttattcatgagcgtgtcaccagtacatatgcagagcgaaggttggggcagccccaacgccgtaaaatgcttctccgagacacagccggcgatcagctacaataagaaactggaggtgggcacggactgggacctcttcgcgaccgcccagcgcgtgacgaggtcgatgaagaaggtacccgtgcacttcgtcaacataactgcgctgtcggagatccgcaaggacgcgcacacctccgtgcacacgctgcggcaggggaagctcctgacgccggagcagaaggcgaacccgaggaagttcgcggactgcatccactggtgcctccccggtgtgccggacacgtggaacgagtttgtttatggccatatcgtgtcgagcaccccgccgccgcagcagcagcagcagcagaagataaccgaggatgaacctcacagatgacggctagaaaatacttcacatggtagcgcaattttagtgagagaagaagatttgtgatcgaggccataagttatttttttttgtctgttctaggtttagaagcctatgctatgctgctggttcacctaagcatttgttggaaggtaacaccaagcagccgtgaacagccacggtcacctgaggagccttctcgcagtgtctggatgtggttgtttgagcctctgaggggaaatgccctgcgcgcttctgtgcttctcgtgtttctacctggcaaccacgtgcacataattttaccagaatccgattgtttccattcgtgtagcagtatttctctataaaatgccagaaagtttcagtcaagattt

SEQ ID NO: 135560 - DNA, 231 bp, Zea Mays
ggtatattgcatggatattcttggcagcactataccatctgcccagtttgcagccaatgggcttagatttgcggatgaatattttccttttcctcaccatttaattttcttctctaatgttcttgatggtcttccataccatatttattggcgtttggtatttgggttttgtttctagtatggcagagaaaaaaaccagagatgcttactataatacaaaattgtgcagta

SEQ ID NO: 135561 - DNA, 1634 bp, Zea Mays
tcctatcttttcttttctttcttcgtcgctactagcgacatacgagcgccaccttatcggttcccctctctggccctcccggcctcactcaccagcatcggctcttcagtcttcaccatggccgccgcccacctcctcgccgctttgtcctcctccaccgccttgcgccctcctctccgcctccgttctccacagcatccaccacatatccgcttcaactgtactgggaggcggccgttcccggtggtacgcgcggctgagaccgacgccaaaaacgcgaaggcgaacgccaaggccccgaataaggcacccgcggcggatggctccagtttcaaccagctgctcggtatcaagggtgctaagcaagagagcgacatatggaagatccgtcttcaacttactaagccggtgacatggcctccgcttgtttggggagttctctgtggagcagctgcctctggaaatttccactggacagttgaagatgtcgcaaaatctattgtatgcatgataatgtctggtccatgccttacaggatacacacagccaaacattcttgcttgtagacacttaatgactggtatgatcgagacattgatgcaattaatgagccttatcggcctattccatcaggtgctatatcagaaaacgaggtaataacccagatctgggtgctattgctaggagggcttggattgggtgctttgttagatgtgtgggcaggacatgattttcctattgtgttttatcttgctgtgggtggctccttactttcttacatatattcagcaccacctctcaagctcaagcagaatggatggattgggaacttcgctctgggtgcgagttacatcagcttgccctggtgggctggccaggcgttatttggaactcttacaccagatatcattgtcttgactactttgtacagcatagctgggctagggattgctattgtaaatgatttcaagagtattgaaggggataggactctggggcttcagtcacttcctgttgcttttgggatggaaactgcaaaatggatttgtgttggagcaattgatatcactcaattatctgttgcaggttacctattgagcaccggtaagctgtattatgccctggtgttgcttgggctaacaattcctcaggtgttctttcagttccagtacttcctgaaggaccctgtgaagtatgatgtcaaatatcaggcaagcgcacaaccattcttcgtactgggcctactggtgacagcactggcaaccagccattaatgaaggcaaacttaaacagaacgagcaaccgttctgataccgaagaggcacgtctggtgaccattaataagctagctgcttgtgtgcagggtaggaagagaacgtctttttacttgtagaacacagatcgattttgtaagggttatgtggtgggaggaaaagttagcaatagcactggatgttgttgtagtaggatctgtagttgcacggtaagatcgttacttcgccattgttagcggttgaactggcaatgctttgaacaaacagttttgtgtatcggccgtattgttgtatgatcaaccctggaagattgtacaacctccgttctgagtatttgcacctcgttctcgagtatttgta

SEQ ID NO: 135562 - DNA, 1614 bp, Zea Mays
tcctatcttttcttttctttcttcgtcgctactagcgacatacgagcgccaccttatcggttcccctctctggccctcccggcctcactcaccagcatcggctcttcagtcttcaccatggccgccgcccacctcctcgccgctttgtcctcctccaccgccttgcgccctcctctccgcctccgttctccacagcatccaccacatatccgcttcaactgtactgggaggcggccgttcccggtggtacgcgcggctgagaccgacgccaaaaacgcgaaggcgaacgccaaggccccgaataaggcacccgcggcggatggctccagtttcaaccagctgctcggtatcaagggtgctaagcaagagagcgacatatggaagatccgtcttcaacttactaagccggtgacatggcctccgcttgtttggggagttctctgtggagcagctgcctctggaaatttccactggacagttgaagatgtcgcaaaatctattgtatgcatgataatgtctggtccatgccttacaggatacacacagacacttaatgactggtatgatcgagacattgatgcaattaatgagccttatcggcctattccatcaggtgctatatcagaaaacgaggtaataacccagatctgggtgctattgctaggagggcttggattgggtgctttgttagatgtgtgggcaggacatgattttcctattgtgttttatcttgctgtgggtggctccttactttcttacatatattcagcaccacctctcaagctcaagcagaatggatggattgggaacttcgctctgggtgcgagttacatcagcttgccctggtgggctggccaggcgttatttggaactcttacaccagatatcattgtcttgactactttgtacagcatagctgggctagggattgctattgtaaatgatttcaagagtattgaaggggataggactctggggcttcagtcacttcctgttgcttttgggatggaaactgcaaaatggatttgtgttggagcaattgatatcactcaattatctgttgcaggttacctattgagcaccggtaagctgtattatgccctggtgttgcttgggctaacaattcctcaggtgttctttcagttccagtacttcctgaaggaccctgtgaagtatgatgtcaaatatcaggcaagcgcacaaccattcttcgtactgggcctactggtgacagcactggcaaccagccattaatgaaggcaaacttaaacagaacgagcaaccgttctgataccgaagaggcacgtctggtgaccattaataagctagctgcttgtgtgcagggtaggaagagaacgtctttttacttgtagaacacagatcgattttgtaagggttatgtggtgggaggaaaagttagcaatagcactggatgttgttgtagtaggatctgtagttgcacggtaagatcgttacttcgccattgttagcggttgaactggcaatgctttgaacaaacagttttgtgtatcggccgtattgttgtatgatcaaccctggaagattgtacaacctccgttctgagtatttgcacctcgttctcgagtatttgta

SEQ ID NO: 135563 - DNA, 1185 bp, Zea Mays
atgtcgtcggacgatgaggtcagggaggagaaggagctcgacctctcctccaacgacgttgtcaccaagtacaaggctgccgccgaaatcctcaacaacgctctgaagattgttgtgtctcagtgcaagccaaaagtcaagattgttgacctttgcgagaagggcgactctttcataagagagcaaactgggaatgtttacaagaacgcaaagaggaagattgaaaggggtattgctttcccaacctgtgtatccgtcaatgacacagtttgccacttctcaccgcttgcaaccgatgatgccgttctggaagaaaatgacatggttaaaattgatatgggctgtcatattgatggctttattgctgtggtggcacatacacatgtaattacaaatgggcctgtcacaggaagggctggtgatgtgcttgctgctgccaacacagcagcagaagtcgcaatgcggcttgtgagacctgggaagaaaaataaggatgttactgaagcaattcagaaagttgctgctgcttatgattgcaaaattgtggaaggtgttcttagccatcaactgaaacaatttgtgattgatggtaacaaagttgtgctcagtgtctccaatgctgatacaaaggttgatgatgctgaatttgaagaaaatgaagtatatgcaatcgatattgtcaccagcactggggaggggaagcccaagttattggatgagaaacagaccaccatctacaaaagggccgtagacaagaattatcacttgaagatgaaagcgtcaaggtttattttcagtgagatcagccagaagttcccaatcatgccttttactgctagggcattagaagagaagcgtgcgcgtttaggcttggtggaatgcatgaaccatgaactattgcagccgtaccctgtacttcatgagaagccaggcgatcttgttgcacacataaagttcactgtgctgctgatgcccaatggatcagataagataacatcacatcctctacaggagttaaagcccaccaaatccattgaagacaatgcagagataaaggcatggcttgctttggggacgaaatcaaagaagaagggtggtgggaagaagaagaaaggcaagaaaggagatgcagcagaagcagatcccatggaggaggcgacaaacggtgctacaagccaagaataa

SEQ ID NO: 135564 - DNA, 1156 bp, Zea Mays
ctctgaaagtgggcctatcctcgctggtcacgtctcctctccgcgcacgaaaaccctagcacgcaggcgcagccagccctgctccaattcccaaagcttctggaaaacacctactcgtctctcatcccttccccgccgtcgcgtcctcttcgaactgaatcgcgccgcgatcacccaccttatggcggacaaggagcctgtcgtggagcgatccgaggcgtctgaggaggaggacgcctccgccgcggccgccgcgggggaggaagaggacacgggtgcccaggtggcccccatcgtgcggcttgaggaggtactcgtcaccaccggtgaggaggacgaggacgtcctgctcgacatgaaggcgaagctgtaccggtttgataaagacgggaaccaatggaaggaacggggcacgggcaccgtcaagcttctcaagaacaaggagaccggcaaggtccgactggtcatgcgccaggccaagacgcttaagatatgcgcgaaccacctcgtggcccccaccacgagaatgcaggaacatgccggcagcgacaaatcgtgcgtctggcacgcttctgactttgcggatggcgaactcaaggaggagatgtttgccatcaggtttggttcggtagaaaactgcaagaagttcaaggagttggttgaggagattgctgagtcacttacagagaacgaggacaaggaaggtcaagatggctcatccacggccggattgctggagaagctcactgtgagcgagggcaaatctgaggaaagtggcaagtcggagtccactgattctggcaaagtgaccgaaaccaaagccgatgcagccccagccgagtagttggtgtggttgcacgcagatcctccccgtgctgaatcagttcctctgccctttagccatgaaatatgtttgctaatttttttggggcgagttggagcagtctcatgtgtttgggtttgttcttaaaaactttgagttaattggggttggaacgttcggtatgcaagtgtagtatttcactgcgtggatcgttatggattgcggtaaattcatataaggtgcatctattttttgatttctttcagtacacatacatgtgttgtgctaatactttacggctttacgccactgtccacggggagagttgaatgt

SEQ ID NO: 135565 - DNA, 1110 bp, Zea Mays
atggtggtatcgtcgagtggtggcgcgggaggcgtggagggtggcagcggctgcggtgtctcggcgtcggtgccgccggtggtgtcgtcgagcggtggcgcgggagaggtggagggtggcgacggcggctcggcggcggtgtcggggtgccgccggagggtgaaggggtcgtggacgccggaggaggacgagctgctgcggcgcgcgatcacgcggcacgggccgcggaactggaccgtgatcagctccgagatccccggccggtccggcaagtcgtgccgcctgcggtggtgcaaccagctcagccccagcgtggagcgccgcgccttcacgcccgaggaggacgccatcatcgtcgccgcgcacgcgcagcacggcaacaggtgggccaccatcgcgcggatgctccacggccgcaccgacaactccgtcaagaaccactggaactccacgctgctccgccagcgcagggcggcggccgcccatgccagcgccgccgggtgcgccctccagctgcggccggcgaccacggcctccgtcccgctccgccatctgctggatcgtcctaaggaggcggcggcatccgtttcgttccgtcgtctggacccaaaggcggaggaggaggaggacgaggacatggacgaaggcggcagcagcagcgaggattcggcgcatcggcatcgttcgctgtcacccgcgccggtcgagccgctcacactcaatctatttagcgacggagcccacgggctccctacccccgcccccgcacccgcaccgcagggtacggcagccagaacggagggtgccgccatgaggaggaaggcgaagctggagcaggacccgtggttgagcggcggagtccacggggcccccgcacccgcgccgcagagtgcggcagcgagaacggaaggtgccgtcgtcacgaggatgaagacgaagctggagcatgacccgtggttggtgaccttggtgcggcagatgatatctgtggaggtggagcggcagatgcatggagtgggcccgcaggccagaagcagcgccggtggtggtggtggtgcagacggcgacggcgtgaacggccaggacacgtcgatggacgtggacccgtga

SEQ ID NO: 135566 - DNA, 882 bp, Zea Mays
atggctacaatccctaggttctctcctcgcggcatcagccatgccagcgccctctaccgacccataattcaccagtcaggcttcgaacaggaagagttgatttgtggtacgaggtatgtaatcatagttcaagtgatttctgaaataaaaacagcagacattcctgataatgtcatgtccttggctggttgctccatgcaaagaagtgttaacccccctgaacatggttctgggttgttgagcagattgttgtcatctcattaccatggcaatgtacatgatgaaaagtctgttgcacgacatactgtaaatttattgacatcaaccattaaagttgatgctgaacaatcagatctgaggttctgcttcagaattttttcacccacaaaaatctacacattgcaggcagagagtgcagtagatcagatggattggattgaaaagataactggtgttattgcccctttgctgaactcacaatccccagaacagtgttttttgtcaagccctaagggcagtggtcatgataggagtaccagtgatggaagctcttttacaagttcagtagaatttgaaccttctgtaagtgatgatttagtactggagaagaaatctggaaatgggcagcatgatgtcagaggcacacatcatcacaaaaccagcatgaaacctgaaaaaccaattgacttgcctaggaaagttgatggcaataatatgtgtgctgcctgtggtgcttcagaacctgattgggcatcattaaaccttggcgcacttctatgcatagagtgctctagggtgcacagaaatcttggagtgcatatatcaaaggtatctacaaaacctttaactgttaattcttttaaatagactcttgtttctctt

SEQ ID NO: 135567 - DNA, 463 bp, Zea Mays
aacctaacgcactcgctccctcctgcgtcctggactcctggctctccatgcggcggcggcgctccctccatcctctctagcttcggcgcggcgctcccttctccctcctctcggcgcaggccgcgggctccgtcccctcgcgcggcgctccgtgcctccgcgctccctgctttcggcgcggcgctggcataccgtcctctcggtcctcggcggcggctgctctctccctgctctcggcgcgcgtcgggctccctgctgccctgctcccttctcccggcgcgcgcggtggccggtactgccatgctggacatgcatgtatctgctcctgctggcgaggagcaggggttgatgacatgcatgcctgtgaattgatgaatgtagtgtatatctgcggtgcatgagaagagaattaagagatgccaacgccgagcgagtcaactgtcaggctaaataatttcttcaa

SEQ ID NO: 135568 - DNA, 1895 bp, Zea Mays
cgagcagactgtgatcctgaggcagcagcaggctcacaggctggtcctctcgtctcgtgtctcgtctcgtctcgtcttcctcctcccccgccccctggcaccaacccggcccaaccccactcgagcgaggcgcggcgcggccatcataacgtccccccttcacgttcttccgctccactccaaatcctcctcccatttgaaaacctcctcttttctcctctcctcgccgcagctcccaccattcccgcagacggacgcttttccccttcccagcttcccctgaccactccgcagcaggcccgcaagccccgacgccagcggcatgtcccccgccaccaccccgttgcccgcccccgtggcagccccagcgtccaagggcgggaaacgcagcctcatgtcgtcactcatggacgccaccgcgctgctccgctcctcctccttcaaggaggactcgtacgtggcggcggcgctcccggcgtccgagctccgcgcgctcgccgacctcaaggcgctggtggccacccacccggaccccatctccatctggggcgtcccgctgaatccccactcccctcctcccggcgcggcgaacgacgacgccgacgagcgcgccgacgtggtgctcctcaagttcctccgcgcgcgggacttccgcgcgcgcgacgcgcacgcgatgctgctccgctgcgccgcgtggcgcgccgagttcggcgcggacgcggtggtggacgaggagctgggcttcaaggagctggagggcgtggtggcgtacatgcacgggtgggaccgggacgggcaccccgtgtgctacaacgcgtacggcgtgttcaaggacagggccatgtacgagcgcgccttcggcgacggcgaccgcctggcgcgcttcctccggtggcgcgtccaggtgatggagcgcggcgtgcgcgcgctcacgctcaggccccgcggcgtcaacgccatcatacaggtgaccgacctgagggacatgccgaagcgggagctcagagccgccagcaaccagatcctctccctcttccaggacaactacccggagatggtggcgcgcaaggtgttcatcaacgtgccgtggtacttctccgtgctcttctccatggtctcgcccttcctcacggagcgcaccaagagcaagttcgtcatcgctcgcgagggcaacgtcgccgagacgctgtacaagttcatccggccggagctggtgccggtgcagtacggcgggctgagccgcgccggcgagctcgagaacggaccgccgaagccggcgtccgagttcaccatcaagggtggcgagaaggtgttcctggagatcgacggtatcgaggccggcgcaacgataacgtgggacctcgtcgtcgggggctgggacctggagtacggcgccgagtacgtgccggcggccgacggcagctacaccctctgcgtggagaaggcgaggacggtcccggccacaaccgccgacgccgacgccgggccgctgcacaacgccttcacggctcgggaggccggcaggatggtgctgtccatagacaactccggttcccggaagcggaaggtcgccgcctaccgctacttcgtgcgcaagccgtcggcgtagcgtaggccttgctgtgctcgtggcggccgccggcgtcttgccggccggccgcgccaggggggaggcaaacgtggaaccaccggtgaagtgcctgcatgcatgctttgcttgggcttatatttgtcggacttggagaggagaggttaagctaggctattttattattagtgctatatataacgacatgcatgtattatgccatgtgtagagtataatgtaagagatgtcgaacttctgtttttttgtcaccgccgttataaagctgatgatgagctaaagttttctt

SEQ ID NO: 135569 - DNA, 1908 bp, Zea Mays
ctgtgatcctgaggcagcagcaggctcacaggctggtcctctcgtctcgtgtctcgtctcgtctcgtcttcctcctcccccgccccctggcaccaacccggcccaaccccactcgagcgaggcgcggcgcggccatcataacgtccccccttcacgttcttccgctccactccaaatcctcctcccatttgaaaacctcctcttttctcctctcctcgccgcagctcccaccattcccgcagacggacgcttttccccttcccagcttcccctgaccactccgcagcaggcccgcaagccccgacgccagcggcatgtcccccgccaccaccccgttgcccgcccccgtggcagccccagcgtccaagggcgggaaacgcagcctcatgtcgtcactcatggacgccaccgcgctgctccgctcctcctccttcaaggaggactcgtacgtggcggcggcgctcccggcgtccgagctccgcgcgctcgccgacctcaaggcgctggtggccacccacccggaccccatctccatctggggcgtcccgctgaatccccactcccctcctcccggcgcggcgaacgacgacgccgacgagcgcgccgacgtggtgctcctcaagttcctccgcgcgcgggacttccgcgcgcgcgacgcgcacgcgatgctgctccgctgcgccgcgtggcgcgccgagttcggcgcggacgcggtggtggacgaggagctgggcttcaaggagctggagggcgtggtggcgtacatgcacgggtgggaccgggacgggcaccccgtgtgctacaacgcgtacggcgtgttcaaggacagggccatgtacgagcgcgccttcggcgacggcgaccgcctggcgcgcttcctccggtggcgcgtccaggtgatggagcgcggcgtgcgcgcgctcacgctcaggccccgcggcgtcaacgccatcatacaggtgaccgacctgagggacatgccgaagcgggagctcagagccgccagcaaccagatcctctccctcttccaggacaactacccggagatggtggcgcgcaaggtgttcatcaacgtgccgtggtacttctccgtgctcttctccatggtctcgcccttcctcacggagcgcaccaagagcaagttcgtcatcgctcgcgagggcaacgtcgccgagacgctgtacaagttcatccggccggagctggtgccggtgcagtacggcgggctgagccgcgccggcgagctcgagaacggaccgccgaagccggcgtccgagttcaccatcaagggtggcgagaaggtgttcctggagatcgacggtatcgagcgtccttaatccgcattccaggccggcgcaacgataacgtgggacctcgtcgtcgggggctgggacctggagtacggcgccgagtacgtgccggcggccgacggcagctacaccctctgcgtggagaaggcgaggacggtcccggccacaaccgccgacgccgacgccgggccgctgcacaacgccttcacggctcgggaggccggcaggatggtgctgtccatagacaactccggttcccggaagcggaaggtcgccgcctaccgctacttcgtgcgcaagccgtcggcgtagcgtaggccttgctgtgctcgtggcggccgccggcgtcttgccggccggccgcgccaggggggaggcaaacgtggaaccaccggtgaagtgcctgcatgcatgctttgcttgggcttatatttgtcggacttggagaggagaggttaagctaggctattttattattagtgctatatataacgacatgcatgtattatgccatgtgtagagtataatgtaagagatgtcgaacttctgtttttttgtcaccgccgttataaagctgatgatgagctaaagttttctt

SEQ ID NO: 135570 - DNA, 1989 bp, Zea Mays
ctgtgatcctgaggcagcagcaggctcacaggctggtcctctcgtctcgtgtctcgtctcgtctcgtcttcctcctcccccgccccctggcaccaacccggcccaaccccactcgagcgaggcgcggcgcggccatcataacgtccccccttcacgttcttccgctccactccaaatcctcctcccatttgaaaacctcctcttttctcctctcctcgccgcagctcccaccattcccgcagacggacgcttttccccttcccagcttcccctgaccactccgcagcaggcccgcaagccccgacgccagcggcatgtcccccgccaccaccccgttgcccgcccccgtggcagccccagcgtccaagggcgggaaacgcagcctcatgtcgtcactcatggacgccaccgcgctgctccgctcctcctccttcaaggaggactcgtacgtggcggcggcgctcccggcgtccgagctccgcgcgctcgccgacctcaaggcgctggtggccacccacccggaccccatctccatctggggcgtcccgctgaatccccactcccctcctcccggcgcggcgaacgacgacgccgacgagcgcgccgacgtggtgctcctcaagttcctccgcgcgcgggacttccgcgcgcgcgacgcgcacgcgatgctgctccgctgcgccgcgtggcgcgccgagttcggcgcggacgcggtggtggacgaggagctgggcttcaaggagctggagggcgtggtggcgtacatgcacgggtgggaccgggacgggcaccccgtgtgctacaacgcgtacggcgtgttcaaggacagggccatgtacgagcgcgccttcggcgacggcgaccgcctggcgcgcttcctccggtggcgcgtccaggtgatggagcgcggcgtgcgcgcgctcacgctcaggccccgcggcgtcaacgccatcatacaggtgaccgacctgagggacatgccgaagcgggagctcagagccgccagcaaccagatcctctccctcttccaggacaactacccggagatggtggcgcgcaaggtgttcatcaacgtgccgtggtacttctccgtgctcttctccatggtctcgcccttcctcacggagcgcaccaagagcaagttcgtcatcgctcgcgagggcaacgtcgccgagacgctgtacaagtgagtagctagctaccaggccacagacccaccgatctcctttggcattacggtgttgctgctaaaggcaggggcgtcgctgcttgcaactcccaatcgcaggttcatccggccggagctggtgccggtgcagtacggcgggctgagccgcgccggcgagctcgagaacggaccgccgaagccggcgtccgagttcaccatcaagggtggcgagaaggtgttcctggagatcgacggtatcgaggccggcgcaacgataacgtgggacctcgtcgtcgggggctgggacctggagtacggcgccgagtacgtgccggcggccgacggcagctacaccctctgcgtggagaaggcgaggacggtcccggccacaaccgccgacgccgacgccgggccgctgcacaacgccttcacggctcgggaggccggcaggatggtgctgtccatagacaactccggttcccggaagcggaaggtcgccgcctaccgctacttcgtgcgcaagccgtcggcgtagcgtaggccttgctgtgctcgtggcggccgccggcgtcttgccggccggccgcgccaggggggaggcaaacgtggaaccaccggtgaagtgcctgcatgcatgctttgcttgggcttatatttgtcggacttggagaggagaggttaagctaggctattttattattagtgctatatataacgacatgcatgtattatgccatgtgtagagtataatgtaagagatgtcgaacttctgtttttttgtcaccgccgttataaagctgatgatgagctaaagttttctt

SEQ ID NO: 135571 - DNA, 1488 bp, Zea Mays
acacacacacacacacacacacacacacacacacacacactaacacacacacacacacacacacacacacacacacacacacacacacacacacacacacacacacacacacacacacacacacacacacacacacacacacacacacacacacacacacacacacacacacacacactagacacacacacacacacacacacacacacacacacacacacacacacacacacacacacacacacacacacacacacacacacacacacacacacacacacacacacacacacacactagacacacacacacacacacacacacacacacacacacacacacacacacacacacacacacacacacacacacacacacacacacacacacacacacacacacacacacacacacacacacacacacacacacacacacacacacacacacacacacacacacacacacacacacacacacacacacacacacacacacacacacacacacacacacacacacacacacacacacacacacacacacacacacacacacacacacacacacacacacacacacacacacacacacacacacacacacacacacacacacacacacacacacacacacacacacacacacacacacacacacacacacacacacacacacacacacacacacacacacacacacacacacacacacacacacacacacacacacacacacacacacacacacacacacacacacacacacacacacacacacacacacacacacacacacacacacacacacacacacacacacacacacacacacacacacacacacacacacacacacacacacacacacacacacacacacacacacacacacacacacacacacacacacacacacacacacacacacacacacacacacacacacacacacacacacacacacacacacacacacacacacacacacacacacacacacacacacacacacacacacacacacacacacacacacacacacacacacacacacacacacacacacacacacacacacacacacacacacacacacacacacacacacacacacacacacacacacacacacacacacacacacacacacacacacacacacacacacacacacacacacacacacacacacacacacacacacacaccacacacacaccacacacccacacaccagacacacagagagagagagagagagagagagagagagagagcgagagcgcgagcagagagagacacacacacacacacacacacacacacacacacacacacacagagagacacacacacacacacacacacacacacacacacacagacacacacacacacacacacacacacacacccacccccaccaccacacacacacacacacacacacacacacacaccagagagagagagagagagagagaga

SEQ ID NO: 135572 - DNA, 1937 bp, Zea Mays
caccacacccatctgccctcccggtttccctttcccccctcctcctcctcagcgtcatgatgtcctcgacgccgctgtcgcagccggccaccgccggcgacgacgacgacgatatggagtccctcccccttgccgccgcctccgactacgcctcagtcgcctccacctttgaccccctcttctcctccacctccgccaccgccacctcgccccgctcccctcccacgcgcgccgccgctttcaccctctccccgaccttttcctcctccttcgttgacccgccctcctacgccgacgccaccggcgccggcgccggcgccgtctcctcctccccgtgctccgcctcctcaccctcctccgcgtcgccgagatccgcgcgcgtggcggcctccgagtactccttcctcgccgtctccgacccggagactgaagcagagcctgccgccacctcgctcgtccccggatccgcgcccacctacgtctcctacctcgtcaccagcgtccgccgcggggaccccgaccagcgccgccattccgtgcgccgccgcttccgcgacttcgtcacgcttgcagaccgcctcgccgacgccttccggggccatttcgtgccgccgcgcccggacaagaacaccgtcgagagccaggtcatgcagcgggacgagttcgtggctcagcgccgtgctgcgctcgagcggtatctctggcgactcgccgagcacccggccatcggccccagcgacgagctgcgcgtctttctgcaggccgagggcaagatgccactgcccggcaccactgatatggcatcgcggatgctggatggtgcagcaaggctgccgcggcagctcattgctggggaagataccgtcaccgcaccacaggaagtcgtgcagcctgccaagggcggcagggacctgcttaggatattcaaggagctcaagcagtcggtggtaactgactgggctggtgtcaagccacccttggtagaggaggatagggagttcctggagaagaaagagaagctgcaggagtgggaacagcagctcaccagtgcgtcacaacaggcagaagcacttgtcaaggctcaacaagatatggctgaaacaatgggagcgcttgggttggcattcgttagactaacaaagtttgaaaccgaggaggcaatgtatgactctcagaggatgagagcagctgacagcaggcgtgtagccactgcagctgttaaagctagcagggcatgtcgagacttgaatgcgcaaactgttaaatatctggatacgctgcatgaacatttaagcataatgttgtctgtccgcactgcattttctgatcgggcaagtgcattattgactgtgcaaacacttatgtcggatttggcatcattagagtccaggatcgagaaactcgaggctgcatccttgaagatatttggtggtgataaagctaggactcgcaaagttgaagagctaagggaaacaattagggctactgaagatgctaagttctgcgctttaagagagtacgagagaattaaggaaaataacaggagcgaactccagcgactagacagcgaaaggaaagaagaattcatgaggatgctaaaaggatttgttgcaagtcaggcggcctacgcggacaaaatcgtggatggatgggagacggtagcggaggagacgagcggttatgttggtgtgcgtggatctgatagcatgacttcgtagcttcgtttggttggatgtcaagtgtttgtacaatgtaatctaggttatggatttgggaatagaagaaaggtgcgccaggttcgatttgtttgtataatcaaataaaggtactgccatggagccacgatttcacgtcctggatgtcaagtatacgttgttcttctgtggataccacaaatatatcattgctccggttcgttccagagcaggatacgacct

SEQ ID NO: 135573 - DNA, 1561 bp, Zea Mays
gccctcccggtttccctttcccccctcctcctcctcagcgtcatgatgtcctcgacgccgctgtcgcagccggccaccgccggcgacgacgacgacgatatggagtccctcccccttgccgccgcctccgactacgcctcagtcgcctccacctttgaccccctcttctcctccacctccgccaccgccacctcgccccgctcccctcccacgcgcgccgccgctttcaccctctccccgaccttttcctcctccttcgttgacccgccctcctacgccgacgccaccggcgccggcgccggcgccgtctcctcctccccgtgctccgcctcctcaccctcctccgcgtcgccgagatccgcgcgcgtggcggcctccgagtactccttcctcgccgtctccgacccggagactgaagcagagcctgccgccacctcgctcgtccccggatccgcgcccacctacgtctcctacctcgtcaccagcgtccgccgcggggaccccgaccagcgccgccattccgtgcgccgccgcttccgcgacttcgtcacgcttgcagaccgcctcgccgacgccttccggggccatttcgtgccgccgcgcccggacaagaacaccgtcgagagccaggtcatgcagcgggacgagttcgtggctcagcgccgtgctgcgctcgagcggtatctctggcgactcgccgagcacccggccatcggccccagcgacgagctgcgcgtctttctgcaggccgagggcaagatgccactgcccggcaccactgatatggcatcgcggatgctggatggtgcagcaaggctgccgcggcagctcattgctggggaagataccgtcaccgcaccacaggaagtcgtgcagcctgccaagggcggcagggacctgcttaggatattcaaggagctcaagcagtcggtggtaactgactgggctggtgtcaagccacccttggtagaggaggatagggagttcctggagaagaaagagaagctgcaggagtgggaacagcagctcaccagtgcgtcacaacagagtccaggatcgagaaactcgaggctgcatccttgaagatatttggtggtgataaagctaggactcgcaaagttgaagagctaagggaaacaattagggctactgaagatgctaagttctgcgctttaagagagtacgagagaattaaggaaaataacaggagcgaactccagcgactagacagcgaaaggaaagaagaattcatgaggatgctaaaaggatttgttgcaagtcaggcggcctacgcggacaaaatcgtggatggatgggagacggtagcggaggagacgagcggttatgttggtgtgcgtggatctgatagcatgacttcgtagcttcgtttggttggatgtcaagtgtttgtacaatgtaatctaggttatggatttgggaatagaagaaaggtgcgccaggttcgatttgtttgtataatcaaataaaggtactgccatggagccacgatttcacgtcctggatgtcaagtatacgttgttcttctgtggataccacaaat

SEQ ID NO: 135574 - DNA, 2835 bp, Zea Mays
tgcgcccacgtcccccaataccagcccggctcctcgctgtaatcactgcagcggccagatctgacctcgcccgcgacccatggcatgcgcccgagctacccgcgtcccccaaaatccaccccggatcctctcccttccccggtatgccaaaacccgtcccggctgctccccgccacatcgcggtgcctcaatactcaagacgcagcaaccccaatctagcgcaacttcttcaccgccgactgcgttgtgtcgccgtggtgggaccgggtccagcttgcccgacactggatagcaatgttgttgagaggtgcctggcagcagtaaatgctcttgcttcataccatttcagagaaagattaggagggagaggaggacagaactcgtagctcatggaatctgcaggaccaaatggcaaactgcaggaaagcataccaactcaattcttcatacttctattgtaaatacttctttttgaagatctcgggtgagctgtgtactgataatttgttttttattttgattgttttcaatattaagcgaagtacttatcaatttgttattatcttgtttaatcacaccgcaaattgtgtctgaagggaaccagaccatcaaagcatccattggtatttggacttgttcacatttaacttcagtctgctagattttttatataccgtgtgttctctgcaacaattactctatacatatgtaccataacgtgaggttgaaaagatttatgttcacaactctatagatttgtaaagagtttcatgagaaatgtggttacctttctgcccagctcctcttagtggccttctttctatttcccacatctttgcactgctgctgactgaatttcatccacagatatttcaccaattcactgcttcctcactatgaatcacctgctgctgctgctgcaatcaacattcagtcgacacaaaccagacaattcacctggacacaaaactgcagcagcagctgtgaaccattcatttaaatttagacaaagcagcaacaatttcagtcaatcattctaactcaaaccaagcagcggcagtgtcgaccattcttacaaattcagagcaagcagcctcactgccgaccattgtttccactttagaccaagaagcagcagtgtcaaccattctttcaaattcagagcaatcaacctcagtgtcgaccattatttccaatttagactaacatgcaacagtgtcaaccatttagtcaaccattctttccccaaggttctcttcttttcttttattaatcgtttgattactttttgtttcagctatttatgtggcaacaaactcactagacatatacccccaagactagggaacatgagtaattttagctacttgtaaattattgttaactaaataattgtgtgctgctgttgtccgtaattttaatgaaggttaatatttgttccatccatgcagctgaatgactagaggggcaattagcaggagcagaaggagcatgtgtcgctaatcatgttgttagccttttttattctttgctccagaaatttgttatcacatttcttttgccttgaaacttgaataaactttcttgtagcaattgctaatactagaggctaagcctatatttgggtgctttttcctcctatgattggcatacagacatgcagatggatattgataatatgtattatgaggtactatcttttatcatgtcttatcctgcctggatgttagaggggttttgttataggattattttctttgtggaggattctgctaggcgtgtgaacctctgtctccgcgctctcgcttgactgttgatttgactaatttggttgcttagatgtggctcttattaaaaaccatatgtagataggcttgcactacgtacacggtggcatggtaaacgttgtgaccacgctgtgataatgcatggattccatcagtttattttattcgtcaattgatcatggttgtgatctattttgtttagatactctatgatttgaatttcccctcttttttcgttatatttctcccttaactatatgattgtgatgaaactttattgttgtggaatttctcatatatgttataagatagctatttaccactttgaggtctgaaataaaacataatgacactcttaggctcactttgaggtctgaaataaaacataatagcactcttacatgattaccacatagctattcaccactttgaggtctgcaggtctcaggctcactttgagaggctagcagatttgcttacttcagatattttgaagccttataccaagccaccaaggagcagggttgcatcggtattactgccaatgatgatccatataattctaatgaaatgagcccaagtgaccaaagacaaaaccatgtttcaacatcgagaaaaaagcctatttccctcccaaaaagtgaagaagcaaaaactggtaaacctacataaaatctttgtagaaataaatttgatactggaatgttattatttatccatatgagttaagtctgtcaagatagttattatgtattctccagttttccctcttattggttgatgcttgacatatttcctgttctcacacattttatcacattttttccacgcacaaaattttcttttttaagagactgagagacaatgacgatgatatgatatcaacactagagaaagtttgacatgtgcagatcataaatgcatgtgctatgtttaaggtctctttagtgctctttgttatcctacatctattgtagttctgtaaatgagtgaaccttacctacatgtctcaacttgtattgtccctctgtttgtatgtggagggatt

SEQ ID NO: 135575 - DNA, 1558 bp, Zea Mays
ggcatgcgcccgagctacccgcgtcccccaaaatccaccccggatcctctcccttccccggtatgccaaaacccgtcccggctgctccccgccacatcgcggtgcctcaatactcaagacgcagcaaccccaatctagcgcaacttcttcaccgccgactgcgttgtgtcgccgtggtgggaccgggtccagcttgcccgacactggatagcaatgttgttgagaggtgcctggcagcagtaaatgctcttgcttcataccatttcagagaaagattaggagggagaggaggacagaactcgtagctcatggaatctgcaggaccaaatggcaaactgcaggaaagcataccaactcaattcttcatacttctattgtaaatacttctttttgaagatctcgggtgagctgtgtactgataatttgttttttattttgattgttttcaatattaagcgaagtacttatcaatttgttattatcttgtttaatcacaccgcaaattgtgtctgaagggaaccagaccatcaaagcatccattggtatttggacttgttcacatttaacttcagtctgctagattttttatataccgtgtgttctctgcaacaattactctatacatatgtaccataacgtgaggttgaaaagatttatgttcacaactctatagatttgtaaagagtttcatgagaaatgtggttacctttctgcccagctcctcttagtggccttctttctatttcccacatctttgcactgctgctgactgaatttcatccacagatatttcaccaattcactgcttcctcactatgaatcacctgctgctgctgctgcaatcaacattcagtcgacacaaaccagacaattcacctggacacaaaactgcagcagcagctgtgaaccattcatttaaatttagacaaagcagcaacaatttcagtcaatcattctaactcaaaccaagcagcggcagtgtcgaccattcttacaaattcagagcaagcagcctcactgccgaccattgtttccactttagaccaagaagcagcagtgtcaaccattctttcaaattcagagcaatcaacctcagtgtcgaccattatttccaatttagactaacatgcaacagtgtcaaccatttagtcaaccattctttccccaaggttctcttcttttcttttattaatcgtttgattactttttgtttcagctatttatgtggcaacaaactcactagacatatacccccaagactagggaacatgagtaattttagctacttgtaaattattgttaactaaataattgtgtgctgctgttgtccgtaattttaatgaaggttaatatttgttccatccatgcagctgaatgactagaggggcaattagcaggagcagaaggagcatgtgtcgctaatcatgttgttagccttttttattctttgctccagaaatttgttatcacatttcttttgccttgaaacttgaataaactttcttgtagcaattgctaatactagaggctaagcctatatttgggtgctttttcctcc

SEQ ID NO: 135576 - DNA, 619 bp, Zea Mays
ggcatgcgcccgagctacccgcgtcccccaaaatccaccccggatcctctcccttccccggtatgccaaaacccgtcccggctgctccccgccacatcgcggtgcctcaatactcaagacgcagcaaccccaatctagcgcaacttcttcaccgccgactgcgttgtgtcgccgtggtgggaccgggtccagcttgcccgacactggatagcaatgttgttgagaggtgcctggcagcagtaaatgctcttgcttcataccatttcagagaaagattaggagggagaggaggacagaactcgtagctcatggaatctgcaggaccaaatggcaaactgcaggaaagcataccaactcaattcttcatacttctattctgaatgactagaggggcaattagcaggagcagaaggagcatgtgtcgctaatcatgttgttagccttttttattctttgctccagaaatttgttatcacatttcttttgccttgaaacttgaataaactttcttgtagcaattgctaatactagaggctaagcctatatttgggtgctttttcctcctatgattggcatacagacatgcagatggatattgataatatgtattatgaggtac

SEQ ID NO: 135577 - DNA, 1429 bp, Zea Mays
ggcatgcgcccgagctacccgcgtcccccaaaatccaccccggatcctctcccttccccggtatgccaaaacccgtcccggctgctccccgccacatcgcggtgcctcaatactcaagacgcagcaaccccaatctagcgcaacttcttcaccgccgactgcgttgtgtcgccgtggtgggaccgggtccagcttgcccgacactggatagcaatgttgttgagaggtgcctggcagcagtaaatgctcttgcttcataccatttcagagaaagattaggagggagaggaggacagaactcgtagctcatggaatctgcaggaccaaatggcaaactgcaggaaagcataccaactcaattcttcatacttctattgtaaatacttctttttgaagatctcgggtgagctgtgtactgataatttgttttttattttgattgttttcaatattaagcgaagtacttatcaatttgttattatcttgtttaatcacaccgcaaattgtgtctgaagggaaccagaccatcaaagcatccattggtatttggacttgttcacatttaacttcagtctgctagattttttatataccgtgtgttctctgcaacaattactctatacatatgtaccataacgtgaggttgaaaagatttatgttcacaactctatagatttgtaaagagtttcatgagaaatgtggttacctttctgcccagctcctcttagtggccttctttctatttcccacatctttgcactgctgctgactgaatttcatccacagatatttcaccaattcactgcttcctcactatgaatcacctgctgctgctgctgcaatcaacattcagtcgacacaaaccagacaattcacctggacacaaaactgcagcagcagctgtgaaccattcatttaaatttagacaaagcagcaacaatttcagtcaatcattctaactcaaaccaagcagcggcagtgtcgaccattcttacaaattcagagcaagcagcctcactgccgaccattgtttccactttagaccaagaagcagcagtgtcaaccattctttcaaattcagagcaatcaacctcagtgtcgaccattatttccaatttagactaacatgcaacagtgtcaaccatttagtcaaccattctttccccaagctgaatgactagaggggcaattagcaggagcagaaggagcatgtgtcgctaatcatgttgttagccttttttattctttgctccagaaatttgttatcacatttcttttgccttgaaacttgaataaactttcttgtagcaattgctaatactagaggctaagcctatatttgggtgctttttcctcctatgattggcatacagacatgcagatggatattgataatatgtattatgaggtactatcttttatcatgtct

SEQ ID NO: 135578 - DNA, 984 bp, Zea Mays
ggcatgcgcccgagctacccgcgtcccccaaaatccaccccggatcctctcccttccccggtatgccaaaacccgtcccggctgctccccgccacatcgcggtgcctcaatactcaagacgcagcaaccccaatctagcgcaacttcttcaccgccgactgcgttgtgtcgccgtggtgggaccgggtccagcttgcccgacactggatagcaatgttgttgagaggtgcctggcagcagtaaatgctcttgcttcataccatttcagagaaagattaggagggagaggaggacagaactcgtagctcatggaatctgcaggaccaaatggcaaactgcagatatttcaccaattcactgcttcctcactatgaatcacctgctgctgctgctgcaatcaacattcagtcgacacaaaccagacaattcacctggacacaaaactgcagcagcagctgtgaaccattcatttaaatttagacaaagcagcaacaatttcagtcaatcattctaactcaaaccaagcagcggcagtgtcgaccattcttacaaattcagagcaagcagcctcactgccgaccattgtttccactttagaccaagaagcagcagtgtcaaccattctttcaaattcagagcaatcaacctcagtgtcgaccattatttccaatttagactaacatgcaacagtgtcaaccatttagtcaaccattctttccccaagctgaatgactagaggggcaattagcaggagcagaaggagcatgtgtcgctaatcatgttgttagccttttttattctttgctccagaaatttgttatcacatttcttttgccttgaaacttgaataaactttcttgtagcaattgctaatactagaggctaagcctatatttgggtgctttttcctcctatgattggcatacagacatgcagatggatattgataatatgtattatgaggtactatcttttatcatgtct

SEQ ID NO: 135579 - DNA, 106 bp, Zea Mays
aatcgggcggataatttcatcctccgcgggacaagcccctcacgagcccttctcgtcctcatcctcagatccgcctccttcaccccactggccggcgagcagcaaa

SEQ ID NO: 135580 - DNA, 921 bp, Zea Mays
caggcggccatggcttcggaggcggagacggccggggagcgcaagaggaagaagacgctggggcgccgcaagatcgagatcaagcccatcaagtgcgtggaggccaagcacgtgtgcttctccaagcgccgcgagggcctgtacaagaaggccaacgagctgtgcgcgctcacgggcgccaaggtcgccgtcatcgtgtcctcccccgcgggcaagccctactcgttcggccacccctccgtgcgcgccgtcctcgaccgctacctgctggaccccggcaccgccgcccacgacgcgttcgacgcgccgccgccgccgatcctgcgcgagttcgacggccagcgcgagcggctgtgcgaggccatcgcggcggaggcgcggcggcgggacgcgctcgacgcggcggcgcgcgcggccggcgtgtggaccgacgacgtcgtgcgccgggccgagctgccggacctcctcgccatgctcgccgcgctcgagcgggtccgggccgacgccgaccgtgcgatgaggcagcaccagtgcgccgccgcggctgcggcggcggcggcggccgacgcttgctactacgacctggccaacatcgcgtcgttcacggccgatgagtacggtggcgccggcagcagcagcctccatcatcaggcggcggccgtggacgtcgcgcatatggcgtttctgatgggcggcgacggcgtcagccatgcgccgcagccctttggtccgatgctgctgcctgctcccgacgaccttccgccgccggcgccactggctttccactacggctccgaccacaaccatatcgcgggatatcaaggccatgcctacgaccctggatgtggcagcggcggcggccatggcgccgcttatgaaatggaagggtggacaacggccacgtgcaacttctttgggtag

SEQ ID NO: 135581 - DNA, 264 bp, Zea Mays
atggggagagcgagcctggttctcaccgacgttgcggccagcaccgcccttgctcacgccgtagagaagagagggcgccaggactccgagacggcggaaagcgcgtcggagagcggggtggaggccgacgcggaggagacagagaggagggaggcgagctcggcagcgggtatagtagggggcggggaggaggatggaaggggcaggtgttacgcgagagcgctgatccgatcacgatccgataaggatttgcacccttattag

SEQ ID NO: 135582 - DNA, 542 bp, Zea Mays
tgctcacataatcatttgcgcataataaagagatatacttttttgggcagtctttttttaccttgattttgtttcctttcatgtctgttgttggttggaataggaaccaaattaccaaaataaatctacacattgacaaataaattggactaaacatctttggtctcacacaacacaagcagacattcagatttcagacaagatttacctcgactcgagcatagagcacggaagaactgagggcgatgtctgctacttcctcgtactcatttgagtcgatgctactacctcctactcaggcagcgctgcgggcaggagcgggactgagggcggtggccagaggcggcaggcacggcgggctccgggcggcagtgaatgagccgtcgaggcgccgggcacgggtagggagcaccgagccgccgaggtccgtgtccacggcatgttggtctgctgaagcagtggagctcggtctcgtagggtggagtaaccgagcaggtgctcgatggagacgcggtcgcgtggagctcgcagctcgagcatcg

SEQ ID NO: 135583 - DNA, 2349 bp, Zea Mays
gcgaaattattgcgagtttgctagccccaaccacaccaacaccacccgctccgcgtggccatcttcctcctcgtctccactctccactgcaagagctagacgaattaatgctgaggcgtctagctcttccctcgccggcactggccgcatgctaaggcgagagtggccttcttctcatgaccagtgcatggttggtccgggcgtacgttcccatgttgctccgtagcagaatctcgtcggcgtccatggagaagacgcgccgtcaccgggtgctggctgtgctgctgctgctggtggtggtgctggtctccgctctccctgatctcgggagctgccacaaagatgatgccggacaaggaggaactacgaacccagaggaagatatggtctctgtctccgaagctaggacaacccaccacggtgaccggaccaggaaattcctgcacgagcagcagcagcagaacaggtactggtccggggatttcggcgacaaggtgtcgtcgttgacagactccagccagtaccctccagacagtggaggcagttcttctcaaagcccagcgtcgacgttcaagccagaccagtggcagccatggctaccgtgggcacccaaggccccgccaccgatgagcgttcctccagcgcaggccccggcacctttccccgcgggggtggtctcaaaccctgggcacagcatcgcgctgcccccgcagccggcggtggtggtgccggccgacgccggcagtaggccggcggtgggtgccggcgttccggctggaggagcgggagcgaggccgcgctctggcggtgttggcaggcctgtctacgccatggctgcggccggggcctccctcgccgcggccgcggccgtggcgctcctcgtcctctgctaccggtccagcagcgtggtcaccgtcaggccctgggcgacggggctcagcgggcagctgcagaaggcgttcgtcacgggcgtgccgtcgctcaagaggtcggagctcgaggccgcgtgcgaggacttcagcaacgtcatcggctccctgtcggattacatggtgtataaggggacgctgtccaccggcgtggagatcgccgtggtgtccaccaccaagaactctgccaaggagtggtccaagcactgcgagtcacaattcaggaagaaggttcaaaataaaataaatgctgccactctgagactgtccatccgatatacgtgcttgctcagcatcaaactagtaacaaatcagctgacatcaatagctagagtagtaatatactagcgatgcaaatctttcactttcagataacaagcctgtccagagtgaaccacaagaacttcgtcaacctgctgggctactgccaggaagagcagccgtttacgaggatgatggtgttcgagtacgctccaaacggcacgctcttcgagcatctgcacgtcagagaagacggttacctggactggcccactcgcctgcgcgtggcggtcggcgtcgcctactgcctggagcacatgcaccagctgagcccgccggagatcctgcgggcgctggacacgtccaccatctgcctcaccgacgacttcgcggccaagatctccgacgtcttcttctgcgacgagccccgccggcaggaggggagcctgtccctgtcggcgctgtcggaccgggagagcgtggtgtacagctacgggatggtgctgctggagaccatgaccggccggttcacggcgtccgacggcggcctgctagaggcctgggccgcggcctacctgagaggggagcggcagctccgggacgtgatggatcccgccctgcggcggtccttccacgccgccaccgtggacaggctggacggcgtcatcaggggctgcaccgaccgggagcccaggaggcggctgaccatagcggaggtcgccaagcgcctgagggagatcactgccatgtcacccgacgcggccacccccaaggtttcgccgctgtggtgggcggagctggagatcatctgcgcagaggtcaactgaggtcaacctgagacggacgtgccaatgtttgtcgtgaaaaggctgtttcgtggtagatacacaggttgcttctttttgatatttttattttttaggtttatgttgaagtttgtgtccatctgtacatatgaacaaaatgaagtgtgcaaccaagctgattgttttaaaatattattttaataattaattattaaaaagaattgcaaaagttgtacgatttcaagatctgtctgtcttaagagctggttccaaccttcataggtaacgatatctcttcgcaatttatttgagctcttaacaaattttagttaaaaaatgaatagaaataaata

SEQ ID NO: 135584 - DNA, 2375 bp, Zea Mays
atctaactatgctagctgaaaagccaataccgattcagctttgacttctttcatgtagcagatgacacatcttcagcgccatgcctttcagttttcacctggaaacagcgaatagaaaaaatcaatgcggatcacctgtatattcggcacacctatatatctacccttcatgcatggatcacatttcacaaactgtacgtagtaccaaccaacaactacactactgtcgatagaaacaaggatgggcttggaatcatccatccatccattggttgtcaggaattgacagctgaaccaacgacacacaccaaggcaccaagcagcctcatccctcagatgatgatgacacatcgacgcttctcagattgttctgcgcctcttgtgctcacactcctttttgcctccgctcaattattgccttattggcagcaggacaacccaccacggtgaccggaccaggaaattcctgcacgagcagcagcagcagaacaggtactggtccggggatttcggcgacaaggtgtcgtcgttgacagactccagccagtaccctccagacagtggaggcagttcttctcaaagcccagcgtcgacgttcaagccagaccagtggcagccatggctaccgtgggcacccaaggccccgccaccgatgagcgttcctccagcgcaggccccggcacctttccccgcgggggtggtctcaaaccctgggcacagcatcgcgctgcccccgcagccggcggtggtggtgccggccgacgccggcagtaggccggcggtgggtgccggcgttccggctggaggagcgggagcgaggccgcgctctggcggtgttggcaggcctgtctacgccatggctgcggccggggcctccctcgccgcggccgcggccgtggcgctcctcgtcctctgctaccggtccagcagcgtggtcaccgtcaggccctgggcgacggggctcagcgggcagctgcagaaggcgttcgtcacgggcgtgccgtcgctcaagaggtcggagctcgaggccgcgtgcgaggacttcagcaacgtcatcggctccctgtcggattacatggtgtataaggggacgctgtccaccggcgtggagatcgccgtggtgtccaccaccaagaactctgccaaggagtggtccaagcactgcgagtcacaattcaggaagaaggttcaaaataaaataaatgctgccactctgagactgtccatccgatatacgtgcttgctcagcatcaaactagtaacaaatcagctgacatcaatagctagagtagtaatatactagcgatgcaaatctttcactttcagataacaagcctgtccagagtgaaccacaagaacttcgtcaacctgctgggctactgccaggaagagcagccgtttacgaggatgatggtgttcgagtacgctccaaacggcacgctcttcgagcatctgcacgtcagagaagacggttacctggactggcccactcgcctgcgcgtggcggtcggcgtcgcctactgcctggagcacatgcaccagctgagcccgccggagatcctgcgggcgctggacacgtccaccatctgcctcaccgacgacttcgcggccaagatctccgacgtcttcttctgcgacgagccccgccggcaggaggggagcctgtccctgtcggcgctgtcggaccgggagagcgtggtgtacagctacgggatggtgctgctggagaccatgaccggccggttcacggcgtccgacggcggcctgctagaggcctgggccgcggcctacctgagaggggagcggcagctccgggacgtgatggatcccgccctgcggcggtccttccacgccgccaccgtggacaggctggacggcgtcatcaggggctgcaccgaccgggagcccaggaggcggctgaccatagcggaggtcgccaagcgcctgagggagatcactgccatgtcacccgacgcggccacccccaaggtttcgccgctgtggtgggcggagctggagatcatctgcgcagaggtcaactgaggtcaacctgagacggacgtgccaatgtttgtcgtgaaaaggctgtttcgtggtagatacacaggttgcttctttttgatatttttattttttaggtttatgttgaagtttgtgtccatctgtacatatgaacaaaatgaagtgtgcaaccaagctgattgttttaaaatattattttaataattaattattaaaaagaattgcaaaagttgtacgatttcaagatctgtctgtcttaagagctggttccaaccttcataggtaacgatatctcttcgcaatttatttgagctcttaacaaattttagttaaaaaatgaatagaaataaata

SEQ ID NO: 135585 - DNA, 626 bp, Zea Mays
agcattgaaaaataccaagataaatgaaccaagttttgctgttcaagacatactcggacagaaaccactcggtacaatgtgacgcgcaccgacttgacagaccaacaacgcacaaatatgtctaccaggatcctacgactgacgctacatatatattggtagcctttctttcgtctgtggcaaatgaacttggcacaaccacaagaaatctcccataacaaacaaaccaaaatcaacctacattaggagaccaccgcctggtttatcatcccctgggcccattgtgcagtctcccgaacttcatcatccaactgttgtgcttggcactccctcaagaactcaacatggaataggtgggtcttgaacagatcctttgagctctggccaagcgtgtctgcaagatccccaaggacagcaactgcagcctttgtcacactgtcatccctgatggcacaaacaacaacagatcagggatatattataactgaaagaaacgtaacaaaaaataatttaacagaaattacaatgtaaatgaaagacacctgctcctatctttgaagacagcttcagtgaactgtagtagatgtgttgcatatgggatcatcagctgagcttttgggcccttg

SEQ ID NO: 135586 - DNA, 321 bp, Zea Mays
atgagggaggcacaggagatgggggcgattcttgctctggcaacgatggaagttcttgctccagcagcaagggcagcttcagctcctactcggctagcaggagacaaggccaagaatgaggaaccaggttcccggatcgatggggtcatggaatgggaacatggcttacagctccagctccacgattttctggagcacctaatgacctgctccaccaactccaccaaatttgttggagctggagctatcccaaacaaggcatatcaaaatttaagagttggagaccaaatgacaccgggcaagttcaaggaccatttgtga

SEQ ID NO: 135587 - DNA, 667 bp, Zea Mays
aagcttgaacccggctattccatacatgaaaagacaatcgcgcactgggcgtggagagatggcgagagtggcacgtaccctcctggcaacggatcgcctaaaaggggtggtgtactctcgggtggcgcggacctgttcatgcagtggaggatccgtgggaatagtagacatcaaggtttacgagaaacatatgtcgtgtggttagagatcctcagctgagtaaatcgattcggatcgccgttatatccccggagagtggagacttgagctccgacctacaacctaagtcaagatgtgaacactatggataaaaatgatgttgtattgatgagatgatgaaattagactagatgcaaacagagtctattaaatatttaatctggcgttaaaatattgaaagtaaggactcactttagtaagctatttctgcaaaagtatctaagttgattcttgctaaagcctctccttgattcccaaatccagcatatccttgagagtcttttctttagtcgggtaagtcttgctgagtaattccatactcagggttttattccctgttgtttttcaggttatagtttttgtgctgctgttgatggtgttaagtgccggtgggctcggccttcttatataagtataccccgcctttatcttcttattgaggatggtc

SEQ ID NO: 135588 - DNA, 1425 bp, Zea Mays
gcgaagctgagtgcagacgtccgatccccgatccatggctccttttctggcacttgagagatgtgtgtgtggtagacggtggctgtgcgtggtggagaagcagggcacgtgcattaccatccaatgccgccgggtgggtgggtggaatggatggatggttcttgatgtgcccatcttctccaccgagcacgaactgtcttggatccgcgcgcgcgtgccgtacatacctcgtcatgcaggagttcaggtgctgcctaatcctcggcggccctcaccgcgccaccggcgtctcgcgtcgtcgctgccgatcgatcgatcgtccagcccgccgccagttgagttccgaaccccgatgcttatagcctcccatccctggttagcaagcatcgtgtgtatcttgcatctcagacttgcttcctcttcatcattcattcattcatactcaagcattaattattcaggaccaagcaagcggtagaattcaaattcaattcgcacaaccctttgcttgtcagctagcttaccttgtgtattggatttgaatacatgctggtaatccatctaataagaaagcgctgtgtggcgctacctgtccgtagtatggccgcgccgactgtctgtcggctggcatggcatgatatacattctagttatcttgaaccaaaggcgactgtccgtagagttgcttgctcttgcttcagcaggtgggaatggcgccgtgcacttgggttcgcctgtctcagttaccagaggagcctaatcccatcgtcgctcgtacgtcgctcggatgtcggcatcaacgaccagcgcggcagccagcatgcacaggcgcgccgagaatgatcagggggtgccgtctctatccttcattcagcgattcgctttctgaaaagaacattgcacaaaaacagcaagatggctctgggtgcggatgaatgctagctccatgttccgtcactttttgtttgtgcggttcttcactgactttgagtctagtcttggcgttctaactaaagaccgtcatgttgcgagtatacatgcaggtgttagagtagccgttcctcgtgcatgccttgcatattgctcatcatattaataatgatctgtcgtcacccatcttcatctcaactgtagaagatgcgagctgagatcggccatggatcctgcatattattcatccagggccaaattttcttgttctctgtgtgggtttcgtttttttttcatgtgaatgaaatcccttatttcatgaagcaagatttctatgagatttgtctatgtgtgtttttgatatggtgcaagctcactactagccagtagccactcatgattcatgaagacagtagagctaccctttcatgaacaatgtcactatattaaatgtccttgatagtccttccatgaataagacttgtgtctttcaga

SEQ ID NO: 135589 - DNA, 498 bp, Zea Mays
atggagagttggggctcggtcgtcgcgccttccatggagagctggggctggatcggcatggtaaggcgaggacgtgttgattgcgggagcgaggagagtggatccacgtggtgggatagtggatcgtgccttccatggagagctggggctcggttgtcggggtgtccaaggcgttcgggtctaagatctacgtcgatagggagaaaaactctgactaccacccagaggctggcgcacgtcgcgccggagatcctcgtcgccgacgacgccgcgccctccacccgcttccacgtcctgccgttcccgtggctgtcggagcgggccatggagatcctcacgcaggcgcgcgccgcgcgccagctggagcccctcatcatcaggccctcctcgcagtggtcgcgccttccacagccttccatggagagccgaggcggggtcggcgcgttgggggcgaggagagtggatcgtcgatggtgggagcgagaagagtggatctag

SEQ ID NO: 135590 - DNA, 2021 bp, Zea Mays
cccatacctttcgcgccgaacacccgccgtcaccaaaactgacggctcctccccctctcccctctccccttttgtgattggactgaagtgggattcatatatcaggtgtttggattcttctctttcctctgctggtgaggacgtcggtttcttctttttgtgctgtttcccccctttatcttctcattcagcgatcttcaaattcaatatgttgtccgtcggattggcgctctagtctggtgggtttgctttcagatttgccgagtatcaatccgggtctccattcggtggtggctgaagcttgatttctccatgtcgctccgtgcagcttcatgaatccatgttctcaagtgtatttgatcatgattctataaacaaccatcttatattactaatctgtaggagtttttttacatgttggtggtccaagctgaaaaaaataatttaggacaaagctagattgtcttttacatttgtgattggaaggagtaggctttttcattatccagtggcagttatagacagttgttgcgctcgtgcagcttcaaatattttgggatgttgccatgttaaggtattagccttttgttgtttcagtatactagcttcctaaaggatcgatgtcggctatctccaatcagaagaaacgcaccttggaagcccttcagcaacagtatactgctgcaaaagctaagaaattgcaagatgaacaggttaagagtcagaagaagagcaattttaatacccctaagcctaaatttgatgcaccaaggggaagcaaaggtctagtaatcactcctcgacgaacatatgcccagccttctcctcataaagatgtagcattttctagttctaattgtcaacaaaagccttccacgtcctcaggtgaagaaatcaatcctgtgtatgctgaactttcttgtgcttttcatgacactttgtccaaaggatttggatggcacagaggttgttcacaatgttatatatgacataattcagaaaggtggagatgctgggaaaattacaaagggagccaaaaagttgaaactggaaaagggatccttttggatgagggaaatttggatccataccattaaaagatcaccactttggatccataccattactatctcacttacatgtgggtccacatgagtcaatgacatgtggggtccatggtatatatctaaagtttggatcttttaatggtatagatccaattgttcctttggataattatgttcaaaggggttctagattagtggatgaccaagcaagatctttgctaattcattcaaagtgataaaaaggcacatgtctctgaaacaacataagaaatgtggttcatttgatttagatggtacattccacaagtactacctctataagctaatgcatgagatgtggaaggactatatcaaagagcttatggatatgagcccgaaaaataaatttactgagaaccttctttcagcagatcttcatggggcccttctaatagtggcagaacacaaagctgcttcatataaaagtgtaaacggaatcatgattcgagatactgcagagacgtttggaattatatccgaggacaaccgcttccgggtttatcaaaagctggttcagttttcgtacttcaagcagaccgctggaagttcacactgatcggcgacaagctctcgcccagggagaagttgaaggaggatcagcgtcaacaacgtgcgcaatcgctaatcagatagtttccaatgtgccagctgttctctcacaaaatttttgctccacggaatacttgcttttgtttaggtcctgccactgtagcatggtagttttagcgctctagaggcgttgacatttcttagcgacttactggcagctcgagttgtggaggggtgtgtgatcatgagccatgtactccggtgactgattattgattagtataggcgaagcaagtccatttacgtttgtttcatctagtcacacaaacctgtggcaaatatttattacgccttgtttctgtcgcc

SEQ ID NO: 135591 - DNA, 1227 bp, Zea Mays
cattggcgaagttcaaaagaaatatttctttatatcaaacaaaaatactataatttgctagctaaattttttgcataatgtgggttgtccagacacctgaaagcttttggctacgctactgtctccacttgaacttttttgtcgtttaatacaaaggcaggagaagctacagatcattgcattaatgagaaagtattttagtggacaaccccacacaagcacaccacccaacatatattgaactgggttctattgagaatgctatagtgataggtggatagtataacgtgatggatttaaacccactatgtctaatgtagcaaatagttaaagggcacggatttccagactttatacaatacaataaaatgagctttcttgtataagctacgtcgagaccactcaaagactctagttttcttgaactgaaatttattgaccatatgaattatgaactaaactaaaaacactaaatcatttgttaccatataagcattatattttatgaaatatcaacgaatttgaagatttgaacaaacaagaaagacaataattaacctgagtgtgaagcaagcgcattcagagtagtggaccaactcgagcttttggaaaactttaatgtaaaccctattattgtgcctgttcctgtaatatgtacccttgagctaattacatgtcctgtcttcaccacaggaaaaataaatttactgagaaccttctttcagcagatcttcatggggcccttctaatagtggcagaacacaaagctgcttcatataaaagtgtaaacggaatcatgattcgagatactgcagagacgtttggaattatatccgaggacaaccgcttccgggtttatcaaaagctggttcagttttcgtacttcaagcagaccgctggaagttcacactgatcggcgacaagctctcgcccagggagaagttgaaggaggatcagcgtcaacaacgtgcgcaatcgctaatcagatagtttccaatgtgccagctgttctctcacaaaatttttgctccacggaatacttgcttttgtttaggtcctgccactgtagcatggtagttttaggctggctcccgcaatagtctctaaagcctcctctatcttaaatatagaggatcaaacggtcctatatgctcttcaacagcgtactctaaattatcctctaaatttagaggacgctactggattctctatatatagagtttctct

SEQ ID NO: 135592 - DNA, 558 bp, Zea Mays
ctttattcaactttctttaatccaatcatgcttatatgtctttgaggtatccagtggcagaacacaaagctgcttcatataaaagtgtaaacggaatcatgattcgagatactgcagagacgtttggaattatatccgaggacaaccgcttccgggtttatcaaaagctggttcagttttcgtacttcaagcagaccgctggaagttcacactgatcggcgacaagctctcgcccagggagaagttgaaggaggatcagcgtcaacaacgtgcgcaatcgctaatcagatagtttccaatgtgccagctgttctctcacaaaatttttgctccacggaatacttgcttttgtttaggtcctgccactgtagcatggtagttttaggctggctcccgcaatagtctctaaagcctcctctatcttaaatatagaggatcaaacggtcctatatgctcttcaacagcgtactctaaattatcctctaaatttagaggacgctactggattctctatatatagagtttctctaaacggtcctctatccatttgaatacttt

SEQ ID NO: 135593 - DNA, 1760 bp, Zea Mays
ccagataagtgctcttactggggataatgttgatgaacttctggaaactgtcatgcttgttgcagagttgcaagaattaaaggcaaatccacataggaatgcgaagggcactgttattgaagcatgccttgacaaggccaaagggcctcttgctaccttagttgttcagaatggaaccctaaacaaagctgatattattgtgtgtggtgaagcttatggaaagatccgtgcattgtatgatgactgtgggaagctcgttgacaaagcaggaccatccaatgcagtgcaggttattggcctcaataacgttccccttgccggtgatgaatttgaggttgttgacaaccttgatgttgcacgtgaaagggcgaatgggcgtgctgaagcactgcgcatagaaaggatatctgcaaaagctggggaaggaaaagtcacactctcagctattgcagcatcggtttcatctgcgaagcaagttggaattgatacacatgagctaaatgttatccttaaagttgattttcagggttcaatcgaggctattaggcaagccatccaaactcttccacaagaaaatgtctctctgagattcctccttcaaggtccaggagatgtgagtgttaatgatgttgatctggctgttgctttggaaggaattatatttggctttaatgtcagagcaccaggatcagttaaaaactatgctaagaagaaaggtgttgaaattcggatgtacaaagtgatatatgatttgattgatgatttacggaaggccatggaaggtcttctcgaacctgctgaggaggaagtaccaattggttcggcaaaagttcgagctgtctttagtagtggcagtggaaaggtggccggatgcatgattacaacaagaaaagttgttcaagattgtaatgtgcgggttcttcgtaaagggaaagaagtatatgtgtgttcgcttgattccttgagaagggtgaaagaaactgtgaaggaggttggtgctgggctagagtgtggtattggggtagatgacttcgatgaatgggaggaaggtgacatcatagaggcattcagtaccgtgaataagacaagaaccctcgaggaggcctctgttaccttgactgtcgcactcaaggatgcaggggtccagctgtagaattggcaacacgctggtaagaaatataagtggtttaacagttgcagcagcctgtggccaacaattttctggcaacgaatctggagggcgctggtcgaagttcctgaagaataacaagaatgttgttgtacaaactcgacatatgaagatcaattctacaccaccagtgtctgagctcgaccatctcacgcctgccagagctgcatctgctgctgaaagttgatggagtcttttgctattataatattcatttaaacaagcttctctcttctagtatctataaatttaacttctctaaaatggtacctataacttaatctcttctctaaaatagtattaagtatctttttactctcctttcttattttcccagaagtgaaatatcgaaatgttcctagagattttgtttatagatcataatgctcccacattgctatatgtgaccgaacatcccggtggttttattttacgttcggaaatatcgctgccaagatgctgagtataaactttattcttaagaagttcagattgcagtactgaagtaagttgaagcagctggttcatgcagaaagcaagtttagatcaataaaagatatcagtaagcata

SEQ ID NO: 135594 - DNA, 2474 bp, Zea Mays
aaagaatgggtagaaaatgcacgtctgcacatcgcaggctctagatgctaaagagagtgcaagaaagcaatagaggctgcaaaaaggaagagggaggagaagactgttcgtgagctagaacttagagaggaagtgaatgtatctagggttggagaggagtcagaagaagtcacttgtgttggaagctcacagcctcacaaattagggccaattgacaaatggacacgtgctattgatcctaccaaggctggttcattcaaacaacagcagctgaacaaggaactatggaaagaaagagagcatgaggtgcacaagtttattgcaagatgggcctataatcatggaatacctttcaatgcatgtgacaatgatgagttcaagcaaatgtgtgaagcaattggacaatttggaccaggacttacacctccaactcaagatgccttttgaggtagtttgctggaagaagattatgaaagaaccaagtgtttgctgcaggaacgtgaatccgagaagatgaaaaatgggtgctctattatgaccgatgcttggtcagataggaagaggagaagcataatgaatatatgcactaattgtgctgatggaacctccttcatcagctcaaaagagatgtcagatgtgtcacacacaagcgaagtcatttttgaattagtggacaaagcaattgaagacattggtgaagaaaatgtggtgcaagtagtcactgacaatgcctctaacaacatgggagcaaagaagctattgcttgagaagagaccacaaatattttggacctcttgtgtagctcacacaatcaacttgatgctccaaggaattggcaaattgcctcggttcaggaaagtgattgaccaagcaaagtcatttaccatatttgtgtatggccacacaagaacattggagtgcttgagatacttcacagaggggaaagagctagtgaggccaggagtgactaggtttgcttcatactttctcactttgaacagtatgcaagagaagaaggaccagttaaggaagatggtagttcatagcaggtgggactcattaaaggatgtggaatcaaagaaaggaaaagaggccacagctactatattgagtccagccttttggaaggatgtgaagctaatgttggctgtttttgagccattggtcaaagtcctccgtttggttgatggggatgtgaagccatccatgggtttcctttatggagagctactaaaggcaaaaagagagatcaaagaggcctttggcaatgttgagtctcgattcaaagatgttatggctgtaattgagaagaagatgaatggaagacttgattctccattgcatttgacagcttttttgctgaatccacactatagctatgctaacccatcaatatttgatgagcccaaaatgaatgaagccttcatatcttgtgtcgagcaattttattatcatgatgaggaccaacaagaacaggctgccaactttgaattgaaaaaatttcagaatagagaaggaccatttagcaagaagcttgcaagaacttttcaaaactatgattacaatccaggtagagcatcatggtggcggttatatggaactgaaacaccagctttacaaaagatggctacaaggatattatctttgacatcaagctcttctggttgtgaaagaaattggagtgggtttgaagggatacacactaagaagagaaataggctgactacaacccgcctcaacaagttggtctatattcagttcaataacaggctgatgaataacagagaaaagattaagtcaaagaaaatcactgatgttctcttgtctagtgatacaactgaagctcaaggttttctccaagagggtggagatgattgtgcacaagttgtctttagagatgaggaggaagatgagatggaaggtacagggataccttggtctattattggagaggcaattggagcagaagaacagcttgagcctcgtagaagtgcaagagtgagagagctctatgaaggagaagagtttgagtctgaagaagaagagtatgaagatgaagatttgtgctacagtgaagatgaaatatgatctggaccatctccatctagtagtgaagccttttgtgatgccctggtcttatgaactgcagctgtgtcactttgtgtctgtgtgtcttcttttgtgtgagacctgaactaagaactatgtgcttgtgttgtcctttatttataaattgtgttctgcacttgtattactgtcctatccacttgtgttgtaattaccagctgctgatatggtgtgcagtgtgctcaactgctcatgaatgggaggctgctgaaatcatccagataagtcacaatttagtgttttctattttttttatgaacagctagctgtctattgactaatttactaactactagctgtcaaaatgtgttgcagccttgcaggagctaggaacatgcaagagtaag

SEQ ID NO: 135595 - DNA, 683 bp, Zea Mays
gcccatagattgatacctcaccaccaaaaaacatgactttttttttgtttctgtctacacgaagctacagtttatgtccttgctcaaatttccacatagcacctgatgttcttgatcttgtaggtacgacctctataagctaatgcatgagatgtggaaggactatatcaaagagcttatggatatgagcccgaaaaagaaatttactgagaaccttctttcagcagatcttcatggggcccttctaatagagtgtaaacggaatcatgattcgggatactgcagagacgtttggaattatatccgaggacaaccgcttccgggtttaccaaaagctggttcagttttcgtacttcaagcagaccgctggaagttcacactgatcggcgacaagctctcgcccagggagaagttgaaggaggatcagcgtcaacaacgtgcgcaatcgctaatcagatagtttccaatgtgccagctgttctctcacaaatcttttgctccacggaatacttgcttttgtttaggtcctgccactgtagcatggtagttttatcgctctagaggcgttgacatttcttagcgacttactggcagctcgagttgtggaggggtgtgtgatcatgagccatgtactccggtgactgattattgattagtataggcgtagcaaggccatttacgtt

SEQ ID NO: 135596 - DNA, 1575 bp, Zea Mays
ggctctctctctccggcgtgccaaccttatcaccacccattcgagcttgctgcggctgcccgctgcccccacgatcccgatagttttccgaaaaaagacacttccccaatccgtagtggttcacgtcctggttcctcgccggcggcaaccgcgctggacgaggtttcatctgcgcttcgccggcggcaaccgcgctggacgaggtagcgctgctatcaaacaccttgtgctgtcaacatttatgagtgcaaggcagtattgctaagagtatcttgccatggcatctcctgcttccgtcaccaacctcggaagcaatgggaggtctggcccgctcccggctgcagctgcaaggagggcgcagttggtcacaaggatcagattcacggggttcgatggcataaggcgatggcagtatgagcctgggaggctttgcaggtgtatggtcgtcactaatctgattgaggagaaggttgttcagttctcgtcaagagggagtgtcagtgtgaaagctgatgatgacaatgatctgcttctgaagccgccacagaagccagtccggtcaaatggacccccggagagcatgaaaacagcatcactgccggatcagaagccagcaggggcaactttagacgacagagagaaggtcagagagtcactggacgctgtattggagaaagcagagaagcttgaggcctccagctttggtaatgcagatggtggcaaccttggttcaaggcagagtaatgtttccatgagtaatggtccaggaccgacagcagtggaggaaggtggtaattcaaggaagacaaaaacactaaagagtgtatggcggaaggggaaccctgtgccaactgtacgtaaggtcattagagagcaaccaagaactgaaacaaggagtcagtctatacctgtggctaaaccttcagtgtcatctgcatctaagccttcccctctgctactatctaaaccttctgtagcacagcctcctcgtcggcctatcaagtctgatacatcaaatgagaaaaaaggacccatccttattgataaatttgcttccaagagggcagcagttgatccgattgtacctgaggaattgttagaccctctaaaaccagtacgaggcccaccagcaaaagtcagagttgatcgtcgtaaaaaaccagacacacaagctggttccagacgacgtatgtccaatgatgatggattagttgatgaggatactactgacgtgccaatttctggtgttccagtgcgcaagggtaggaggtggagcaaggcaaaacgccgcgctgcaaggctagaggctatgcaagctgaagagccagtcagagttgagatccttgaagttggtgaagaaggtatgctgattgaggacttggcatatgagttggcaattggtgaatcagaaattttacgattcttatcggtgagaggagttatgcttgacaatgttcagactctagataaagatttggttaagatggtttgcatggaatatgatgttgaagtactagaaagtggtcctgtgaaagtggaggaaatggctaagaagaaggagttccttgatgatga

SEQ ID NO: 135597 - DNA, 1980 bp, Zea Mays
gaagtgaggcctcccattgtgactatcatgggccatgttgatcatgggaagacaactctgttggattatatacgcaagagcaagttggtggcatctgaagctggtggtataacacaagggattggagcatatcaggttcttttaccagtagatggaaaccatcaagcctgtgtttttctggatactccaggacatgaggcgtttggtgcaatgagagctcgaggagctagagtaaccgatatctgtattgttgttgttgctgcggatgatggtgttcggccacaaacaagtgaggcaattgcacatgcaagggcagcaggggtgccaattataatagcaataaacaagatagacaaggagggagctaatgcagaacgagttatgcaagaactttcccaaattgggataatgccagaaatgtggggtggtgataccccaatggtcgagataagtgctcttactggggataatgttgatgaacttctggaaactgtcatgcttgttgcagagttgcaagaattaaaggcaaatccacataggaatgcgaagggcactgttattgaagcatgccttgacaaggccaaagggcctcttgctaccttagttgttcagaatggaaccctaaacaaagctgatattattgtgtgtggtgaagcttatggaaagatccgtgcattgtatgatgactgtgggaagctcgttgacaaagcaggaccatccaatgcagtgcaggttattggcctcaataacgttccccttgccggtgatgaatttgaggttgttgacaaccttgatgttgcacgtgaaagggcgaatgggcgtgctgaagcactgcgcatagaaaggatatctgcaaaagctggggaaggaaaagtcacactctcagctattgcagcatcggtttcatctgcgaagcaagttggaattgatacacatgagctaaatgttatccttaaagttgattttcagggttcaatcgaggctattaggcaagccatccaaactcttccacaagaaaatgtctctctgagattcctccttcaaggtccaggagatgtgagtgttagtgatgttgatctggctgttgcttcggaaggaattatatttggctttaatgtcagagcaccaggatcagttaaaaactatgctaagaagaaaggtgttgaaattcggatgtacaaagtgatctatgatttgattgatgatttacggaaggccatggaaggtcttctcgaacccgctgaggaggaagtaccaattggttcggcaaaagttcgagctgtctttagtagtggcagtggaaaggtggccggatgcatgattacaacaggaaaagttgttcaagattgtaatgtgcgggttcttcgtaaagggaaagaagtatatgtgggttcgcttgattccttgagaagggtgaaagaaactgtgaaggaggttggtgctgggctagagtgtggtattggggtagatgacttcgatgaatgggaggaaggtgacatcatagaggcattcaataccgtgaataaggcaagaaccctcgaggaggcctctgctaccgtgactgccgcactcaaggatgcaggggtccagctgtagaattggcaacacgctgatactcttttttattaatggtatgaaatgttaatttatatatactttgaagctgaatggtgagctgaagctattgtgctgaagctgttgtgagctggaccggtggaccgtttccctgattccttcggtggtggctgaagctgaatggtgagctgctggagagtggagacgtggagtggtggccggtgggcgcctgggcggtggctgccggctggtgcagactgtgcacttgtgcagtgcagtggcgctaatatattgtgtgtggctgtggaagatgcatgtgtggatcggctgtctgtagtgagatggaagatactgtatatagcatatcaaaccatatattcatcgtatatacattaattattgata

SEQ ID NO: 135598 - DNA, 2178 bp, Zea Mays
cgcgccaccacccaagtgagtgacccatcccctccatcggactctccactcccaccgtctcacgaccacgaataccgccgcccccggccctttcctcgtctcctcctcctttcatcgccaccatcgccgtcggtgcgccttgcaggaggtgcgagaggtcggtcgaaaagcacagccatggcggcggtcaaggtggacaaggccaccaacgagctgctgctgggccccgactggaccctcaacatcgatatctgcgacgccgtcaactccgatcacgggcaaggaaaggaggtgattaaagctttgaaaaaacgtattcaacacaagaatgcaaatgttcagtttcttgctttgacgctattagagactctaataaagaactgtggggatcatgtacattatcaagttgtagagcgcaatatactggaggaaatgatgaagattgtgaagaaaaaggctgatatgcaagtgagggataagatcctgatgctcttagactcttggcaagatgcatttggagggcctggtggaaagcaccctcattattactgggcatatgctgaattgaagcgatctggtgttgaatttccaaagcggtcacctgatgctgcatcgatgtttatttctccggtcacacagccagaatctttgccaacatatcttcaagcagggtatggaatgccagttgattcttcctcaaggcttgatgaggcaatgtcatcaaatggagctcctctgagcatctcagacttggaacgaatgctgggggctgtggaactattaaatgagatgttgagagctgtcaatccaaatgaaaaagatgctgccaatgatgaaattattacagaacttgtgacccaatgccggtcataccagaaaaagatcatgagttcagtaagcttagtaagggacgaggacctcttgggccaagctcttgatttaaacgatagattacaaattctgcttgagaaacacgattcaatcgcatcgtgttctccttcatctgctgacgtgatagacgtggtgtgtgaagtgccatcgggaacagctccaaaccaaggaacaaatttccctccacaagctgcacttcgtacagccatagtaccgaccaatgttttggacgacgaagatgaggaaaacgaagacgacgagttctctatgctagctcgaaggaactcaagattccagcccacaaacacccagagcacctcttcaccaaccgtccatgatgaaacagcaagctctacagcctctgttccctatacagcatcgccatcagttgcgaacaacgcattgcctccgcacgatcctccagccccgccagtgagggtctctccagaagagcaggtcatgagtgaccttctcgcactcaccgtgtcatcaaacccgtcaccatcctcctacaccccggtaacacctgaaccaggccgcctgaatcaaagcagcgcaccaacaggtgagcttccgcgggcttatcatggagaccaaggacacgtgtctgcaccttacgtcgctccgtgggctcagccgcagtcccagaccgcaggaagtcagcaaccgacacgcactcaggcacaggtatcttacagctcgtatgcttacccaccgccgccatgggcgtcacaggacagcaccgaatcgaacccttttgtagcggcagcatcgtcatctcagcaataccagtccacttcgagaacccctaccatgccaccgaacttgaggcctctactacagcagtcgcattcttttggagtaccacttccaaccgcgagtctggactcgccaataaatgggaacctgaagcaaccgctgtctgctggggctcgcaggccatcttatgtttcttccaacaagttcttcgacgacttgtttgagaggaactcggatggtagcctgaaagtaggcagcacaaggcacagtgatgtctatggaaaataaatgtcgttctcttgtcctgcctgcgtttgatgttatcagctgcctgcatattagaacgatttagttgatgcttctggcgaacttgcttgcctttccataaataattttgccaaaccaaactatgtggaagcttcagcctatgagctgtccactgtccagacattttgaatggcaaaaggcgattcttcctaaattgtgtaatgaaacgggtttgcttctaaatatagtgttctttagagc

SEQ ID NO: 135599 - DNA, 869 bp, Zea Mays
aaaacgaaacggctaagaaatccccaccttcacttcacccacaaactagccggacaagcgaacaaaaggtgtaagagcttacgaccgacgcggccaaatcgagataagagcaagatgacgtcgtcgacggcgttcagccaactgttcccttccgccgctgcggtatcccccgtccctcgctgcgtctccctgcagctcttctgcgccagcggtggagttgtccctggatggaggagaagatgccgccgcatggccatggtgcgcgcggccaccgtggatgctgcggcgcccgcctacacctccgattccctcatcctctacttcaaggcggagggcaccatggaggagagggccattcccaagatcacagaatctcttgagggtatggagggagtcaaggacctggaggtgctcattgaagaaggcatagggagcgttgtgttaacaaaggagacaactgtgcaagctactggagtagcctcgaacctggtggaagctatccagggagctgggttcaagctgcaaactctaagcttgagcttcgatgatttcgacgagccagcagcaggagcgggaggcactgtccaatccagcgagtgagctaatttgtggtgccgtgcgtggtgccaaatgcatataattcggtctcctgattttgtttaccctgctccttacctttgatttcccaagcacgatcttgttttttttttggcaaatggtcgagaaatcaatgaatatttttaaggaaaaacatttgttttttttggctgattcgtgaagttagtgatggcttaagtaaattcatttggcagcgcttccaatacttgggaattctgggccgaaactgcctaatatccctatccttgtag

SEQ ID NO: 135600 - DNA, 1782 bp, Zea Mays
atggcatccgcgaatgccatctccaccgcctccctcctccggcccctctctcagggcagggcgacgaggtcacagcggttcgtggtgcgtgcgaacgccaaagacattgcctttgaccagaaatccagggcagcgctgcaggccggcgtcgagaagctcgcaaacgccgtcggtgtcaccctcgggccacgagggaggaatgtggtgctcgatgagtacggaaaccctaaagttgtgaatgatggagtcactattgcccgtgctattgagctgtatgatccaatggaaaatgctggtgcagcattgattcgtgaggttgctagcaagaccaatgattcagctggtgatgggactacaactgcgtccgtccttgctcgtgaaatcatcaagctaggccttctgagtgtaacatctggtgcaaatcctgtatcactaaagaaaggaatagacaaaactgtgcagggcctaattcaggagcttgagaataagtctagaccagtcaagggtggtggtgatatcaaagctgttgcatctatctctgctggcaatgatgaatttatcggatccatgattgctgaagcaattgacaaagtggggcctgatggtgttctatcaattgaatcctcctcatcttttgagaccactgttgaagttgaagaaggaatggagattgaccgaggttatatttccccacaatttgtgacaaacctcgagaaatcaattgtggagtttgagaatgctaaggttcttattactgatcagaagatcacaagcataaaggaaattcttccaattttggagaagaccacacagctgagagcccctctgttcattattgctgaggacattactggtgaagctttggcaactcttgttgttaacaagcttcgaggaattctcaatgttgcagcgattaaggctccaagttttggtgagcggcggaaggctgtacttcaggacattgccatcgtcacagtttcgttttgcttatatcgtgtaagttctctttcaggtgctgagttcctagcaaaagatcttggtttgttggttgaaaatgctacagaggaacaacttggcacagcaaggaaagtcacgatacatcagactacaacaaccctcatagcagatgcagccagtaaagatgagatccaggcgaggattgcacaactgaagaaggagcttgctgagactgattcagtttatgatactgagaaattggccgagagaattgctaagcttgccggtggtgttgctgttatcaaggttggagctgcaactgagactgagcttgaggaccggcagctaagaattgaggatgcaaaaaatgccacttttgcagctatagaggagggcattgttccaggaggtggtgcggcatatgtgcacctatctacggttgtccctaagatcaaagaagcaattgaggaccctgatgagcggcttgcgctgatattattcaaaattagatggtatgaactgtatttgccagaggcattggtagcacctgcttcattgattgcacacaatgctggagtagagggtgaagtggttgtcgagaagatcaaggagagcgattgggaggtgggctacaatgcaatgactgacaagtacgagaacctgatggaggctggtgtgatcgaccctgccaaggtgaccaggtgtgcgctccagaatgcggcctcagtagctggaatggtcctaaccacgcaggccattgttgttgagaagccaaagccgaagcctcaagtggcagagccaccggagggagcccttaccgtttaa

SEQ ID NO: 135601 - DNA, 1589 bp, Zea Mays
gtggtggcgctgaagaaggtgcgggtggatggcgtcggcgaggccgagagcgcgcggttcatggcgcgggagatcgccctgctccgccgcctcggcgaccaccccaacgtcgtccgcctcaacggcctcgtcacctcccgcctcaacacggcgccgtccctctacctcgtcttcgagtacatggagcacgacctgactggcctcaccgcctgcgcaactgcctccggccgccgcttgtccttgcctcaggtgaagtgctacatgaaacagctactctccgggatcgaacactgccacaacaacggcgttctgcaccgtgacatcaagacctccaacttactcgtcagcagcgacggagttctcaaaatagccgactttggactcgccacctcttacgatcctgagaacgtgcggcccatgactagccaagtgatcactctttggtatcgtccacctgaactcttgctaggggcgactcactacggcgtcggtgtggacctctggagcgtgggttgcatactggcagaactgcttctcggcgagccgatgttccccggaagaacagaggtggaacagctgcacaaggttttcaagctatgtggtactccatcggaggattactgggagaagatgaagcttgctcatcctttattcaagccatatgaacggtgcctagctgaaaagtttaaagacgtgccaccgtctaccctatcgcttctcgagactctcctgtcgattgacccagatatgagaggcacggcaaccgatgctctgaacagcgagttcttcaggacggaaccatacgcctgtgaaccatccagcctcccacgctacccaccatgcaaagaaagagacgtgaagctgaagtatgagaagcataaaaggaagtccagggttaatgggtcagtagagcgtcacaggaaccgacagcacgcgtcgcaaaatcctgggcgtagagtttttactccagacgccagtaataagccgcaagcaaatctaaaggtaccaaggttggtgacaagcacaagcacaaccaaacttgagagatttccgccgcctcatctggacgcgtcgattggttatagtctagattcatcagtggatggagccacagaagagttcttctcgtcgtcggtcgttgagctaaagaaaatgccaagcctcatatttggtcacgtgaaatcttacctgaatagcccaaagaagggcatgcacagcaaggcaaggccaagcctcaacatggcgcctcccaccgttctcattggcgcattccggccttactcctttgggcagccaatggaggtgagaagaaagaatagagagcaattcagaagcaaaggaagaaatgcagtaggtgcagtcaagtgacaacctaatcatgtattcatgttaccccccttttttttgcccttcacttttttattatagatgccagatagataatagccggtgaatttcaaccacagttgataggttttaccttgtatagttagagagtactatacattagagttgcgtatactgcatttattctgtataatggatcacagagtttcatctttaacacaaaggaaggtctgagaactccc

SEQ ID NO: 135602 - DNA, 2247 bp, Zea Mays
aaataataatataaagttttttattcggaaatttctttgatattttcctctcacctgactgtactactacctcagcctttgactccccacgcccacggtgcacccacatcacctcgttaaaaagatcccaaacgcacgcgctccacgcacacacacaccctatacgcgccgtcatggccctctctatcatcccgagtacaagcagcggggagcacgctgcggcgtcagcatcggccacggccacgaccacgacgaagctgggtcagctgaacgcggcggtggagcggtcatgggtggggcgacggttccgcctcgcagcgcgcgggactacgttcaccacggagctgcgtgccggcacggccacgttcctcaccatggcttacatcctcgccgtcaacgcatccatcctctccgactccggcgccacgtgcacggtggacgactgcgacgtgccgtccccagggtgcaagttcccgcccgtggaccccgggtacgccgcttgcgtggcgcgcgtccgccgggacctgatcgtggccaccgcggcgtcgtccgtgatcgggtccttcatcatgggcgccttcgccaacctccccatcgcgctagcacccgggatgggcaccaacgcctacttcgcctacacggttgtcggcttccacggctccggcacgctcccctaccgcacggcgctcgcggcggtcttcctcgagggcctcatcttcctctttatctccatcgtgggcttgcggtccaagctcgcgcagttcatccccacacctgtgcggatctcggcgtccgcggggatcgggctattcctggcgttcatcgggctgcagagcaacgagggcgtggggctcgtggggttcagctcgtcgacgctggtcactctgggtgcgtgcccagcgtcgcagcgcgcgtctgtggcgccagtgctgacgttccccaacggcacggtggcgctgatgccgggtggcaccgtttccggcggcatactctgcctctcggggcgaatgacctccccgacgttctggctggccgtcgtggggttcctcatcatcgccttctgcctcatcaagcgcgttaagggcgctctgatctacggcatcctgttcgtgaccttcgtgtcctggccgcgccacaccgccgtcaccgcgttcccggacacgcccgccggcgacgacagcttccactacttcaagaaggtgttcgacgtgcaccggattcggtccacggccggcgcgctcgacttcagcgggcatcggccagggctacttctgggaggcgctcttcaccttcctctacgtcgacatcctcgacacaaccggcagcctatacaccatggcgcggttcgccggattcgtggacgatgcgacgggagagttcgagggccagtacttcgccttcatgtccgacgcgacggccattgtgtttggctcgctcctgggcacgtccccagttacggcgttcatcgagtcgtcgacggggatccgagagggcggccggacggggctgacggcgctcacggcggcgatctacttcgcggcggcgctgttcatcacgccggtgctcgcttcgatcccgtcttgggcggtcgggccgccgctggtgctggttggcgtgatgatgatgcgtgcggtggcggaggtggactgggacgacatgcggcaggccgtgccggcgttcctaacactagcgctcatgccgctcacctactccatcgcctacggactcatcggcggtatcgcctcctacatgctcctccactcgtgggactgggcgtgccaagcgaccaggaggctcggctgcctcaagaagggcggaggcggcgccgacagcactaatggcggcgtggcagagcagagcgtggaagagcagagaaaggatatggaatcggcataacatttctttcgcctttttgtcctctctgcctttcaaatttcttattttttagggaatttaggtacttcggtcaacctcaatggccattgtttcattttacagtttttaacagtgctacgtcaggtccataagatagtttttatgttgcggtttcatagcccatactgaacctttgacagggcgtaaattaatagaggaactagggtagatgattacatgacagtcaactgaactactacaagaagaaagtatatctcccagtttccttcttgtacaccaccttctccttgtacattaccttcaaaagttacacagaaatcagcttacgttcaggaatataagtttcaggat

SEQ ID NO: 135603 - DNA, 1568 bp, Zea Mays
ggcgcgtgtgagccacaccgcgccaggctgcccctccctccgccgcacaacctcaccgatcccactttaagccacaccatcgccccaccgtctcctctcgtccgcctcccgccggccaccaccttgttcttgctgtctcggtgctgcaatggcagcggcgacctcgctggcagcgtgcgcacgagcgtctgcgtccggcctccacacgggccgcctcgccgtgcgcgccgccgccctcccggcagacggccgcagtgacggcgctgcctcctataaggaacttggtctgtactccttgaaaaagaggattgaagatgcagttgtgcgggttgaaacgaccgcttccgatgctctggagttggaggaagcacagagaattaagcaggaagaagtactgcagaaacgtaacttgtgggataatccagctaagtcacatgagactctgtctgctctggctgatgctatcagggtggtcgaccatcttaaagatcttcgcttcaaggctgaagaggcgaagttgattagtcaattatcagagatggatgccataaatggtgagctatttaagcaagcatacaaatcttcagtagacgctagtgagtatctagatcgctaccagatgtacaagcttcttaagggtccgtatgacaaggagggagcgtgcattattgttactgcagtatctaacggtgttacttctgagctgtgggcagagaaggtctttggcatgtatacaagttgggcacggaagcaaggttacaaggttggattgattgagaagatattttcaactagtggccatatccaatctgcaacaatggagattgaatcagagtacatgtttggcaccctttctggagaaaaaggaatgcatcaaatgatatactcctcccttgaaaattctgacattgatcaggcattatcagctagagtcgacataattcccctgttcttggatagaccagttgttcttcacttggatgacgatgatatagagacctctccctcaccttctgtacataagaagggagatagaagaaatggtgttgccgttagggttcaacacgtaccaagtggagtcactgctgaaagttcaggtgagagaagctactttgcgaacaagctaaaagccacaagtaggttgaaagcaaagctccttctaatagctagagaattgaaagtatcggatataaaaacaatcaacagacaagctgtagaggataaatgcaactgtggagcacgaagatacacatttggacgtcagaaattggtacatgatctcaatacaggcatccaattgtcagacttgaactcagtcttggaaggcgatatcgaaccattcatcagaggccgtattacatccagacaattgtgatgcacccagctctcacaaagtcattgatctgttcgctcgttatgattctgtacatttatttcttttcttttacagaacaaatcacatcataagataatatctgtaaatatatcacatttcaagtcaaaagggcatgccaaaaggtatacaaaacatcaatattaatgagcattgtcaagcttgaatctctttt

SEQ ID NO: 135604 - DNA, 1575 bp, Zea Mays
ggcgcgtgtgagccacaccgcgccaggctgcccctccctccgccgcacaacctcaccgatcccactttaagccacaccatcgccccaccgtctcctctcgtccgcctcccgccggccaccaccttgttcttgctgtctcggtgctgcaatggcagcggcgacctcgctggcagcgtgcgcacgagcgtctgcgtccggcctccacacgggccgcctcgccgtgcgcgccgccgccctcccggcagacggccgcagtgacggcgctgcctcctataaggaacttggtctgtactccttgaaaaagaggattgaagatgcagttgtgcgggttgaaacgaccgcttccgatgctctggagttggaggaagcacagagaattaagcaggaagaagtactgcagaaacgtaacttgtgggataatccagctaagtcacatgagactctgtctgctctggctgatgctatcagggtggtcgaccatcttaaagatcttcgcttcaaggctgaagaggcgaagttgattagtcaattatcagagatggatgccataaatggtgagctatttaagcaagcatacaaatcttcagtagacgctagtgagtatctagatcgctaccagatgtacaagcttcttaagggtccgtatgacaaggagggagcgtgcattattgttactgcagtatctaacggtgttacttctgagctgtgggcagagaaggtctttggcatgtatacaagttgggcacggaagcaaggttacaaggttggattgattgagaagatattttcaactagtggccatatccaatctgcaacaatggagattgaatcagagtacatgtttggcaccctttctggagaaaaaggaatgcatcaaatgatatactcctcccttgaaaattctgacattgatcagcttgcaggcattatcagctagagtcgacataattcccctgttcttggatagaccagttgttcttcacttggatgacgatgatatagagacctctccctcaccttctgtacataagaagggagatagaagaaatggtgttgccgttagggttcaacacgtaccaagtggagtcactgctgaaagttcaggtgagagaagctactttgcgaacaagctaaaagccacaagtaggttgaaagcaaagctccttctaatagctagagaattgaaagtatcggatataaaaacaatcaacagacaagctgtagaggataaatgcaactgtggagcacgaagatacacatttggacgtcagaaattggtacatgatctcaatacaggcatccaattgtcagacttgaactcagtcttggaaggcgatatcgaaccattcatcagaggccgtattacatccagacaattgtgatgcacccagctctcacaaagtcattgatctgttcgctcgttatgattctgtacatttatttcttttcttttacagaacaaatcacatcataagataatatctgtaaatatatcacatttcaagtcaaaagggcatgccaaaaggtatacaaaacatcaatattaatgagcattgtcaagcttgaatctctttt

SEQ ID NO: 135605 - DNA, 1387 bp, Zea Mays
cccaccgtctcctctccggcgacctcgctggcagcgtgcgcacgagcgtctgcgtccggcctccacacgggccgcctcgccgtgcgcgccgccgccctcccggcagacggccgcagtgacggcgctgcctcctataaggaacttggtctgtactccttgaaaaagaggattgaagatgcagttgtgcgggttgaaacgaccgcttccgatgctctggagttggaggaagcacagagaattaagcaggaagaagtactgcagaaacgtaacttgtgggataatccagctaagtcacatgagactctgtctgctctggctgatgctatcagggtggtcgaccatcttaaagatcttcgcttcaaggctgaagaggcgaagttgattagtcaattatcagagatggatgccataaatggtgagctatttaagcaagcatacaaatcttcagtagacgctagtgagtatctagatcgctaccagatgtacaagcttcttaagggtccgtatgacaaggagggagcgtgcattattgttactgcagtatctaacggtgttacttctgagctgtgggcagagaaggtctttggcatgtatacaagttgggcacggaagcaaggttacaaggttggattgattgagaagatattttcaactagtggccatatccaatctgcaacaatggagattgaatcagagtacatgtttggcaccctttctggagaaaaaggaatgcatcaaatgatatactcctcccttgaaaattctgacattgatcagcttgcaggcattatcagctagagtcgacataattcccctgttcttggatagaccagttgttcttcacttggatgacgatgatatagagacctctccctcaccttctgtacataagaagggagatagaagaaatggtgttgccgttagggttcaacacgtaccaagtggagtcactgctgaaagttcaggtgagagaagctactttgcgaacaagctaaaagccacaagtaggttgaaagcaaagctccttctaatagctagagaattgaaagtatcggatataaaaacaatcaacagacaagctgtagaggataaatgcaactgtggagcacgaagatacacatttggacgtcagaaattggtacatgatctcaatacaggcatccaattgtcagacttgaactcagtcttggaaggcgatatcgaaccattcatcagaggccgtattacatccagacaattgtgatgcacccagctctcacaaagtcattgatctgttcgctcgttatgattctgtacatttatttcttttcttttacagaacaaatcacatcataagataatatctgtaaatatatcacatttcaagtcaaaagggcatgccaaaagg

SEQ ID NO: 135606 - DNA, 749 bp, Zea Mays
actgcagggcggcgcggtcccggtgagcgagatgttcggcacgtttgcgctcttcgtcggcgcggcggtacgcggcggtccttggcagtcgggatggagttctgggcgcgtaggcgcaccaggcgctattgcacgcctccctgtggcacatgcacgagtcgcaccaccggccgcgcgagggcccattcgagctcaacgacgtgttcgccatcgtcaacgccgtgccggccatctacctcctcggtgacgtcgcgagcagatacaccacatggacaagtttgagggcgtcccgtatgggctcttcctgggaccaaaggagctgcaggaggtcggtggcctggacgagctggaaaaggagctcgcgcgaatcggccagaccatctgatggattcgtctggattccggcgcggcgatctccgctccgctccgtgattccggcgcagcctcatggttggggagccgacgaccagaacctccagaagggatttggtttggatgcgcgagcgtagatcttgacctgcatttcggatggtctgtggaggcacagctcgtacctggagatgtctggtgccatggaattacttttcttttcttcttttcctgacattttcacgccggcgtctttatttgtggggacgtcgcacgttctggcccctgtattactgttcttatggctaggattctgtatataacttgtagagacatgttatgaaccaccagctcaatgaagctaaaaatttggtggttgg

SEQ ID NO: 135607 - DNA, 4063 bp, Zea Mays
cttccttcccccgcctcccttcctcccccagttcacatcacctttgctttgctttgctttgccttgctttcgtgccgcccttcaacgcaagaagccaacaagcacaagcaagcctccagtatcagcaagacaagaacgtcgcgagagaaaccgttgatcccaacaagccaaggagaaatccggctgaggattaagctgcgagaagcgaagaaacacaggaactcgccgcccccgtcgctgaagaagaaagcagcagccaccagccatggtgcggagcaaggaggcgccgaaaaagaagcccaaggacccgctcctgacgcccccgtccaagcccaggggcggcttcctggacgagggctgcccgtggaaccgcggcggcgcggccatgtccccggcgccggcgtcggtgcccagctacatgcggggcaccagcagctctgacgccaaggccgagcgccgtgggcggcctgcggcgaccgtttcggcgtcggcgtcccccgcgaggtggaggcccgcggcgtcggtgtcagcgtccgcgtcgcccgcgccgcggcggaggcccgcggtgcgggtgctgaccaaggggaaggttttgttcgcggaggaggaaccttgctctggctccggcatgggccgcgccacgtgctcctcaaccatgaaggacaccaagttccccgaagcgctcgacctcgcaccgggctccaccgacgccgagggccccgcggcgctgcgggtgtgcccctacacctactgctccctcaacggtcacgtccatgcgccggcggtgccgctccggagcttcctcgcgtcgcgccgccggctcatcaagacgcagcagagcatgaagctcaagggcgtctcggccttccgcaagaaatccgaggagaggaccagcggcggaagtggcagtggtggaggtgcaaagatcgcgcctttgatcgacgaggaggcggtcggcgacttcttcgtcgaggtgtacggcggcccgagggtgagctcggacatgagctgcagcgacatgtctctcgacgagatggatgccacggtgcggaggatggagttcgtcgtgttcgatcggtgcggcgcggacgaggacggtgagaagggcaaggatcttgcggtttgcgatgatggtgaacctgagcctcgcccggtgttgcaacagaagcatggtgccttcggggacagcttgtcggagtgcagtggggtacacatcgacaacgatttcgtcgaggagttgccatggttgaagtaccatggatacgagtatgatgatagcttggacgatgagatcttggaagaacagagaattggggaacaggaggttgttggagcagagttttctgtggagcaagaagcagagcaaggaacgtccggtagatcctctgatgaatacaaagaggatgctgctgatgaggagaatacaacgaatttggtccgtgaccaggagatcctctcagatcaaggtgttgcttgcagagtggaggcatgcgaggagctgggtggaagagatgaagacaacatcctggaggcgtctgctggacaagggaaggcagaagagaagctctctgatgatatctacaaatctgagatacctgatcaagaaataacagcaaggacatgtgctactctggaaggtagcttcgaagaggatatttcatcggaccaagaggcaaatgatgatgatgaagatgagtgccatgtgaaatctgatggcgaatcagaggacactgaggagcaagatctggaggatcaacagagcatgccagatgatgtctctaaaatggagatttctgaggacactatctctggtgatggatgcaaagaggatttttctgaggaagtaacctcggcagctgtgttagcagatgatgtgtttgaacaatatgagaagactgtggatgatgtgcatgaacaagatagcagccctgctaaggctcaaatggaattgggtaatccaacaagcaaaaaggaagacacttctgaagaaactgctattttgcaacaaatcaatcaagacagcaatgtggatactcaaagggaattggagattagggcatccatattggaagaatctggtattgctcagcaaagcaaccttgatggtgataaaatggaaccagagattattgtgtgcaagctggaagatgtttctgaagaatctggtgcctgcactgaaagcaacctacatgataatacagagtatgttatagacgatgctgaaatgagacaagaaattactttatgcaagcgggaagatgcttctaaagaaactggaattgatcaagaaaccttagaagatgatagctcaacatgtggtattgttgatgacagaaacaatctggagatcaataactgcaaatcggaagatgtttccatagaatctgttggcactcaggaagctgatcataatgataactttgcaaatttcagtaatgatgttcaagggactgcagaagatcatgactcacatctcattgatgatgctcaaaatgatatccaaatccctggaggcaaatcagaagacacttgcaaagaatttgataccatgaaagaaactgatcagagtgatagctctgcaaatgtcagatatgatgctgaagaaactgtagaagatgatgattctgtgtgtgtcagtgatgatgctcaaaatgatctgaagaataccaagtgcaaattggaagatgcttccaaagaatcttctactgctcgcgaagctgagcggagtgatagttctgcaaatgtcattgctgattctcaaaatggatctgaacttaccacaaatgagttggcagtcattacgatcagtaacgacaaggaaaatgaatccatgcttttcacatgcaactcagaagatggtttcaaagaatctattattggtcaacaagctgaccatgatgatagctctgcatatatcagttatgatgatcaaaatgaatgtgaagttactgcatgtcattcagaaggtgctcaaggggaatcaaatgtagttcaagaaggtgaggataaaactgcaggcgctgaaaataaattggaatttacagcatatgaatcagtagatgcttctttaaaacctgctatgcctcaagaggttgctggagatattaatatcacagatgcaaccaaagacattcgtgttactgaagaaactaatgaatcattcaatgcgcaaatgccagcagaatgtacggatgcaaaagaaccttctattgatgacatatgtggcgcgttcagcggaatgaacctcaagggtgatgtatattttgatcctgctgagtctgccacatgcccgaggaacaagttgatcatctccaggaggagaagaacacctgaagaggaggaatacttgcgaggtttcaatccacgggcaccgaattttcttcctctggaactggatccagacgcagagaaggttgacctcaagcatcaaatgatgggtgagcggaagaatgctgaagaatggatgattgattacgcgcttaggagggcggtgacaaacttagctcctgctcggaagaagaaagtggagctccttgtccaggccttcgagactgtcctaccacatgacgaagatgacaagaaaaatgtctcaccctcaaggcctgtccaagcctgcaactgataacattagagttagtggttacactgatgttgatgtcgacgcgcaagctactaactcggaggttgctgcaatattatcgcgagtgacctgctccaagtttgaatgagagagcgctacttactaatttgctagaggtaactagagaattagagatctctagctgagctgtgacagaggagctcactcctgctccacaaggaaggataactactcattagtcattactgatcaaggtatccctatccagttgctgagttgcaaagaggatgctcccggcttgagttatgtaatttaaaagtgtgtatacatgtctcgtgtgctaatgttgtctgatattgtgctggtggatctgtgaggattggaaaatgtcaatggtgatgaggtccatgctcctttggcaaagatcaataaaactcttcttgagtgctcaattgttgttac

SEQ ID NO: 135608 - DNA, 1891 bp, Zea Mays
gtagtcactgcctattcttggccatacggctttccccacaccccaacacaaacaagagaaaaaaacaaaaactagacgaaagagggaagaaaccaagaaattggcgaatccctgacgctccccactttcaactcccatccgcttgccgttgccgcgtttgtttatcgagccaatttgatcagggcgccacaccgaaccctagttcttgatttaatcacgggttgtgtggtcatgccggccgggtcaccccgttcttcttctcttccacgagttcaggaggtagagtgagagagaacatggaacgacaggggatggagggcaacaatcttctgcattttcttgataccccgagcgcccattacagaaggttgttggtttgctcctctttgtcttgaaggacatgcgacggatttgaggcccaacacggcggcgatgaacactctgagacatcagatactgatccggcgaatgcaagggaaatgctggaatatttgttgaaccaaccagcaaacaaaatctgtgcagactgtggctctccagatccaaaatgggtggccctgccttttggcacattcatctgcattaagtgctctggaactcatagaagtcttggtgtgcacatatcaaaggtgatttcagtgaatctggatgagtggacagatgatgaagtcaactgtttagctgaatcaggcggaaattctgttgtgaactcaagatatgaagcctttttacccgaaaacaaaaagctaaaacaagattgctcaacggaggagcgtaatgattttatcaggaaaaaataccagtttcaacagtttgtgtgtgatccacaattttcatgccctttaccacttaacagaaagcatgcaccaccagataaaaatcaccagcagcataatagcagcaagtatggttttggccatacttttaggaatagctggagaaaaaaggattcagatagcaaaagcctaaagaaaatgtcggatgtgggaatgatagaatttgttggattagtaaaggtcaatatcgtaaaaggcacagatttagctgttcgtgatgtgatgtcgagcgatccgtatgtcttgattcatctagggcaccagtccatgaaaacaaaggtgataaagaacacactgaatcctatctggaatgaaagactaatgctttcgatccctgacccaattccgcctcttaagctgcaagtatttgacaaggacacattcagctccgatgaccggatgggggaggccgaggtggacatccggccgctgattgcagcaacgaaggagcacgagaactcgaccatcaccgaatcgacagaactctacagatggtcagccagcgaagacagcaacggtgtgctcgccaaggacagcgtcatctctgttgcgagtggaaaggtcaagcaggagatcacactcaggctccagaatgtcgagcgcggtgaggtcgagatcgagatcgagtgtgtgccgctcagccagtagcagtcccatcgtgagcaggactggaagcagaaagagggaaggaatacatcatgctccattgttgtgacaaggacactgctttgcaatgcagaaagacctcagcttcacttgtttgattgctccatgcctgtaattcgcgtgcatgtgtgagatgtgtaatgtgttgtacggtagataggcaaagggaaattatctacttatattactttgatgataggcatacggttgaactgtttccagtagatttcctgacctcagttgctagctggtactaccaggatggtgaaaagatctgtatgcattttgcccatagacttggcttgctgcactggggaagacgacaatggtgaccgacaaaacagtcctacaacggttagagacaatttaaaaaatttaaaagaaagaaa

SEQ ID NO: 135609 - DNA, 2350 bp, Zea Mays
gatcgtgcaaaaacattgtaggcatgtgtataatcgtacaaaaacattgttttatacgtggagattaaaactaaaagatgtggatgctgctgaaaattaacccgcgcacccatcagcttgttgtctgtgatgattccacgcccaggctgttcaaagtcaagcatacaacagcgtgcgccccagcagctgtcattattttgttctagatgaatgcgatttccctagccggtgcttttggctttttgaacctcatcaagaagcatccatcggtttgacagcaccgtctacgtgcccatcttccggagacggaagaatattgtagagcagtgcgacagagttccccgatcgaagcagattgaggtccactgtgctgtactgctgtgcgtcaatcatggaagcaatccaccttgcctacgtgctcgtcttcctcttgcccatcctcctcctccgtctccggcgccgcgggcctcctccagtcaagcggccacgaacaacgacggcccactgcccgcaccccagcccggtcctgggcaacaccctccacttcatccgcaaccgccgccgcttcttcgactggtacgcggacatgctccgcgccgcgccgtccggtgccatcgaggcgtgggggcccttgggcgcgggccacgccgtcaccaccgccagcccggccgacgtcgaccacctcctgcgctccagcttcgacaagtacgccaagggcgcgctcttccgcgacgccaccgcggatctcatcggcgacgggctcttcgccgccgacggccgcctctggagcctccagcggaagctggcgtcgcacgccttctcgtcccgctcgctccgccggttcaccgacggcgtcctcgacgtgcacctgcgccgccgcttcctgccgctcctggacgccgcagccagggacggcggggccgtggacctgcaggacgcgctgcgccggttcgggttccgcaccatctgccacgtcgcgttcggcgtggagggcctggacgacgacgccaggaggcaggatgcgctcttcgcggcgttcgacgcggccgtcgagatctccttccggcgcgcgctcacgccggccacgttcgtgcggcggctcaccaagctgctcgacgttggcaagtcgcgccggctccgagaggccgtccatgccatcgacgactacgccatgtccgtcgtcgaatccaaggtggcgcgtcggaggaacagcctcgacgacggggccgcggacctgctgtcgcggttcatggcggccatggacgacggcggcggcagcgacagcgagctcggcgccatgttccccacgccagcggccaagctccggttcctgcgggacgtggtcgtcaccttcgtactcgccgggaaggacacgacgtcgtcggcgctgacctggttcttctggctcctcgccgccaacccgcggtgcgagcggcgcgcccacgaggaggccgcgtcgtgctgcggtgacggcggcgacgtgaaggggatgcactacctgcacgccgcgatcaccgaggcgatgcggctgtacccgccggtgccgttcaacgggcgggtcgcggtgcgcgacgacgtgctgccgagcggcgcggctctgcgagccggttggtacgccaactactcggcgtacgcgatgggccggatggagaagctgtggggcaaggactgcttggagttcgtgccggagcggtggctaggcgagggcggcgagttcgtgccggtcgacgccgcgcggttcccggtgttccacgctgggccgcgggtgtgcctcgggaaggagatggcgtacgtgcagatgaagacggtcgccgcggccgtgctccggaggtttaggttggacgtggtggcgccggtggctaacatggaggcgccgccggcgtacgagatgacggcaacgatgaagatgaaaggagggctgttggtgcggctctgcagtcgggaagactagtcgttacagactatgggctatggcggctgttcttccttgacacgtaaattgcttggaaagacctcctaaaagtcatcacaccacataaaagtcttcgcaccgctacagctctgtgaaaagactttggacgtactaggagtagtggagtattttaggaatggttgggctaggttgtacacttgtactcatctgtccgcaatcatctacactcactactacacgaacatcttctacagtgtttcccttcagcaattttacctatcgagtataaagaaataaactattttaccaataagtagagcatatgattaaataaaattgaagagacaaatatgtgcttgctcataccattgtaaatctcatgcaactcatcataataagcgaaggacttgttctttc

SEQ ID NO: 135610 - DNA, 428 bp, Zea Mays
agtcctaaatcagtttgatgaaatttgataaaaataggacctccgttggaggttgtttttcttccttgagcgctataattcaaaatagaacctcatttaagacccttactcttgttggagatgttcttagtcttggagtcctaaattagtttgatgaaatttgaaaaaaaatagaaactctgttcgaggttgtttttcttccttgagctctataattcaaaataggatcttatttaagacccttgttggagatgctctaaaccatcaaaagctgtcgccatcttcagaagtcagaatattgtcccaaccaaatccgctctttgacaggatggtcttcactgtgttctaatccttctttagcctttgctcactgtccttcaattgtgacacaacaaaatttgctgatacaaacttgtcattcaaacgat

SEQ ID NO: 135611 - DNA, 1074 bp, Zea Mays
aaagctttcctttttatttttcgggtgcgccggcgtcggccccatattacctggctgaagtacttggccggcgcgacgaggcagagcacggtctccagcagggtctcctccccgcgttggcgcaggtcctcctcgacgtgcctgccgtgcatctccttgtagtacatgaacgtctgcacgaggtggggcttgctcctggtggtcaggatgcggagcacctcgtcgttctccaccagcttcccgttcccggcgcgcttcacggcggcacccagcgcctcggcctccgccttcgccacctccttgtccacccgtgggccctcgtacctgtacgcgctcaccagcccgaccagcagctgcgcacacgcaggaaaaaaaaatcgcggtcaggtcaggagcagaggagctttgctgccagagagagcgcgagcgtcggcagctccgtccatccagctgtgcgcggcgctcacgctgcagtagggcttgtcccgggcgcggtgcgcgacgtcctcctcgagggagcggtggaagagcgcctggtacgcccggcgcgcgcccagcagctcgtcggcggaccgcgcgcaggcgacctccacgacgacggcgggcgggtggtggtggtggtggtgcaggacgtggtgcgccagccgcgcgtcgcgctcccacgggtgcgtcgcccacagcaccaccaggtccctgaaccgcgcgaactcggcggccaggtgcagcatgtactcctcctcgcgccggtccatgtcgccgccgtggctgctgaagaagcccgggaatcccttgcggaacgcggaccgcttctcgggctgcccgcgccaccgtgccagcgccgacaccatcgccggctcgtccacgccgagcccgccaaggccttcaaaggccctggtgagttgctgcacttcgtcggccattgcctggatctccaacgaaaccggagcagaggagacgatgagcgatcgaggacttcgttctgtttctgtgtgtgctctggtatgcttctcgagttgtttgctggatgatctttatactgcaacgcgaaaccgtgtgttttggaagacaattata

SEQ ID NO: 135612 - DNA, 1390 bp, Zea Mays
gtagcaattagcccaaaactggaccgaatcgtcagccgtgcgtgccagggaacactaacacgccatgaaaaaactggcagagctcatgctcatcctaggtggagctttgcgcgtgtgccatgtgttgctggtggtgctgccgccgctgcctggagtgcatccataacatcgtccctcccctcagccttcccttcctccgcttctccggcctagctctcccaggtggaggtggagcggcggcggcggcttctccacctgtagtctccatggcgtccatctcggtccccagccgggccccttctgcagccgaagacgccgagaacattaggaaagcagtgcaaggatggggcacggacgagaaggcgctgatcgagatactgggccaccggacggcggcgcagcgcgcagagatcgccgtggcctacgagggcctctacaacgaacccatcatcgacagactccactccgagctctccggcgacttccggagcgcgatgatgctgtggacggtggacccggcggcgcgtgacgccaagctcgcccacaaggccatgaagaagcagggcgagcggtacgtgtgggtgctgatcgaggtcgcctgcgcgtccgcgccggaccacctcgtcgccgtcaggaaggcctaccgcgaggcctactccgcctccctggaggaggacgtcgccgcgtgcccgctctacaaggacccgctcctcaagcagttcttggtgcggctcgtgagctcgtaccggtactccggcgagctcgtcgatgacgagctggcgagggcggaggccgcggagctgcacgacgcggtggtggcccggaagcagccgctgcacggcgacgtcgtgcgcgtcgtcagctcccggagcaaggcgcagctgaaggcgacgttcgagcggtacaggctggaccacggcaaggccgtcgacgaggtcctcgaggaacgccgcagcgaccagctcgcggcggtgctcaagacagcggtgtggtgcttgacgtccccggagaagcacttcgcggaggtaaaagtaaaacccatcattcggttcaggttcagttcagtagcaatccgttcgtttctgatggccttgttgttccaggtcatccggagctccatcgtcgggcttggtacggacgaggagtccctgacgagggcgatcgtctcgcgcgccgagatcgacatgaagaaggtgaaggaggagtacagggccaggtaccgcacgacggtgaccagcgacgtcaacggagacacttccggatactacaatgtcatcttgctcactctggtcggccctgagtgaatgaccatggatggacgatggatccatataggttgaagacattgtttgcgacttgtagtttgcttgaacaagatcacactcgtttt

SEQ ID NO: 135613 - DNA, 1440 bp, Zea Mays
gtagcaattagcccaaaactggaccgaatcgtcagccgtgcgtgccagggaacactaacacgccatgaaaaaactggcagagctcatgctcatcctaggtggagctttgcgcgtgtgccatgtgttgctggtggtgctgccgccgctgcctggagtgcatccataacatcgtccctcccctcagccttcccttcctccgcttctccggcctagctctcccaggtggaggtggagcggcggcggcggcttctccacctgtagtctccatggcgtccatctcggtccccagccgggccccttctgcagccgaagacgccgagaacattaggaaagcagtgcaaggatggggcacggacgagaaggcgctgatcgagatactgggccaccggacggcggcgcagcgcgcagagatcgccgtggcctacgagggcctctacaacgaacccatcatcgacagactccactccgagctctccggcgacttccggagcgcgatgatgctgtggacggtggacccggcggcgcgtgacgccaagctcgcccacaaggccatgaagaagcagggcgagcggtacgtgtgggtgctgatcgaggtcgcctgcgcgtccgcgccggaccacctcgtcgccgtcaggaaggcctaccgcgaggcctactccgcctccctggaggaggacgtcgccgcgtgcccgctctacaaggacccgctcctcaagcagttcttggtgcggctcgtgagctcgtaccggtactccggcgagctcgtcgatgacgagctggcgagggcggaggccgcggagctgcacgacgcggtggtggcccggaagcagccgctgcacggcgacgtcgtgcgcgtcgtcagctcccggagcaaggcgcagctgaaggcgacgttcgagcggtacaggctggaccacggcaaggccgtcgacgaggtcctcgaggaacgccgcagcgaccagctcgcggcggtgctcaagacagcggtgtggtgcttgacgtccccggagaagcacttcgcggaggtcatccggagctccatcgtcgggcttggtacggacgaggagtccctgacgagggcgatcgtctcgcgcgccgagatcgacatgaagaaggtgaaggaggagtacagggccaggtaccgcacgacggtgaccagcgacgtcaacggagacacttccggatactacaatgtcatcttgctcactctggtcggccctgagtgaatgaccatggatggacgatggatccatataggttgaagacattgtttgcgacttgtagtttgcttgaacaagatcacactcgtttttgtttgattgaacgaaacggcactagtgttgtttgttcacatatgtgtacagaactgctgagtgaaatggtgatatttgtggtgatccatttggtgaaaataaaacgccagatcgatgggaaaaccaa

SEQ ID NO: 135614 - DNA, 1577 bp, Zea Mays
cacgccatgaaaaaactggcagagctcatgctcatcctaggtggagctttgcgcgtgtgccatgtgttgctggtggtgctgccgccgctgcctggagtgcatccataacatcgtccctcccctcagccttcccttcctccgcttctccggcctagctctcccaggtggaggtggagcggcggcggcggcttctccacctgtagtctccatggcgtccatctcggtccccagccgggccccttctgcagccgaagacgccgagaacattaggaaagcagtgcaaggatggggcacggacgagaaggcgctgatcgagatactgggccaccggacggcggcgcagcgcgcagagatcgccgtggcctacgagggcctctacaacgaacccatcatcgacagactccactccgagctctccggcgacttccgggtaactctccccaccaccaccaccaccaccaccaccaccaccaccacgttccaaggcgttgattcgatgagcgcgatgatgctgtggacggtggacccggcggcgcgtgacgccaagctcgcccacaaggccatgaagaagcagggcgagcggtacgtgtgggtgctgatcgaggtcgcctgcgcgtccgcgccggaccacctcgtcgccgtcaggaaggcctaccgcgaggcctactccgcctccctggaggaggacgtcgccgcgtgcccgctctacaaggacccgctcctcaagcagttcttggtgcggctcgtgagctcgtaccggtactccggcgagctcgtcgatgacgagctggcgagggcggaggccgcggagctgcacgacgcggtggtggcccggaagcagccgctgcacggcgacgtcgtgcgcgtcgtcagctcccggagcaaggcgcagctgaaggcgacgttcgagcggtacaggctggaccacggcaaggccgtcgacgaggtcctcgaggaacgccgcagcgaccagctcgcggcggtgctcaagacagcggtgtggtgcttgacgtccccggagaagcacttcgcggaggtcatccggagctccatcgtcgggcttggtacggacgaggagtccctgacgagggcgatcgtctcgcgcgccgagatcgacatgaagaaggtgaaggaggagtacagggccaggtaccgcacgacggtgaccagcgacgtcaacggagacacttccggatactacaatgtcatcttgctcactctggtcggccctgagtgaatgaccatggatggacgatggatcctcgtttttgtttgattgaacgaaacggcactagtgttgtttgttcacatatgtgtacagaactgctgagtgaaatggtgatatttgtggtgatccatttggtgaaaataaaacgccagatcgatgggaaaaccaattgtctgcctgagtacataggttagagaaattgtttgggactttagcttgcgtgaacaaaacgatactactggtgtcgtttgtagtttgctcgtttttgtttgttttggacaaaatgacactggtatcgtttgttcacacaatagtacagtgtgcgcgtcatgcgctcatgtgttgtatc

SEQ ID NO: 135615 - DNA, 453 bp, Zea Mays
atggcggcggcctcccgtcgagcaaccatggtggcggcctcccgtcgagcaaccatggcggcagcggcctcccatcgagcaaccatggcggcggtggcgaggcttgcttgctcactcgcgacgagaacgagtggtacagagaaccaatctcggccaatgccacgtctggcaaagaaggaccggtgcagagaggaagatgccaactgtgacaacacacagacagttgagcaacagcagccctctgacgacagacagacagttgagcatgctcctcttcaggaaactgatccaggcaaagagacacatgtttcagaggctaaaacgctcacatctgatgctgatggaaatttgagctcaagccagcaaactggggagtacaatgaattgctgagacaatactattaaattgttgcttaattttaaattgttcattgaaaactagaacttattgtg

SEQ ID NO: 135616 - DNA, 1239 bp, Zea Mays
gatcactagcagcgccaccagtcgccactccagcgcgcgccattgccaagttgaagctcgtcgcgtacgtggtcttctcatttgcccctcacttaacttacttgactagcttgcaatgtcggggcatgcacgccaagcttcgttcgccctactccgcgccttcctcgtcatcgtctccttccgagctggagcaggtgtttcgtcgacgagaacattgaccatgacgaaccactgcgggcacacggtgtggccaggcatcctgtcgagcgcgggctcgccggcgctggaaaccaccggcttcgccctagagccgggccagtcacggtcgctaccggcgccgcgcgggtggtcggggcgcctgtggggccgcacgcactgctccgccgacgcggcggggaggttcgcctgcgcgacgggcaactgcgggtccggccggctggactgcgcgggccacggcgccaagccgccggcgaccctggccgagttcaccttcgacggccacgaaggcctggacttctacgacgtgagcctggtggacgggtacaacctgccgatgctggtggagccgcacgcgccgaacggcggcggcggcgccaactgcctgctgacggggtgcgtgatggacctgaacgccgcgtgccccgccgagctgcgcgtcggcgacggtggcgccggcgccggcggcgcggtggcgtgcaggagcgcctgcgaggcgttcgggaccgcggagcactgctgccacggggagcacggcaaccccgacgcgtgctggcccacggcctactcgcagttcttcaagaagtcgtgcccccgcgcctacagctacgcgtacgacgacgccacctccaccttcacctgcgccggcggtggcacgtcgtacgccatcaccttctgcccgagcgcgacaagtgtcaaatcggtgggaacagatccagaagcacgagcggccgtcggtggcgggcgagtgccggcggcggcggcgtggcgcaccatgccgtcggtccttgtcctcctcggcctcgccatgacggcgctttcgcatgtcttttaagcaagtatcatcagccgagtgggcagcaacgacagtggacagtggttgcgtgcttttaccttctacaccagtacgtgaccggcacgtcgtactcgtacttcacattggttttggctgttgacagatcatgcttcatggtcgcttatctttgtgatttagtagtagcacacagatatataccgttggaa

SEQ ID NO: 135617 - DNA, 952 bp, Zea Mays
tccctcaccatgggcaacggcctctccccttgtctgtgtcccagagccgagcgcggcgagacggcgcgactggtgttctggggtgggtcggcgaggatggccgacgagcggctgtccatcaccgccggggacgtcacggcggagctcccagaccagcacctcgtctgcgccgcggactccttcttcatcggcctgccggtcccggcgctgtctccgtgcgagcggctcgtggccgggcggacctacttcgtgctccccgcggcgcgcttctcctgcagccaggcgctcaccgccgcgacgctcgccaaactctcgccgtcctccgcggcgaaggtgcccctcgccggcggcgcagcgtcccctttcgagtacgtcactggctccgacggcgcgccgctcatcaggatcctgcccgagttcatcgagaaggtgatcacgtcatgcggcggcggcaagggcggcacggcggcgacggagcacctgtgcagcacgccggagctgaggaagcactacatgcagcttgtcggggcgcgggcggagaggccgtggtcgccagggcttgagacgatatccgaggccgacaagaggaggaggatgctgtcgccagtgaggctggtcgggctggcaatgccttcttcaagatagcctgctgcatatgcatggatagattgacatatcaggatagagaatttacgcttcttgatgcaagaggcagaagaagcaatgtagatacaaatacagaaacgagagagtaggcacattggatttagttttagttcatcaattttttttcattctctcctttaaacagaggatactccaactggatggaatcatggaagttattaaataaattgcatatgtcatcaaagtttgcatttgggtgtcctactaagggagaaaagagtttgaaattgtaagacatttccacgtacgtacgtggtctctgaca

SEQ ID NO: 135618 - DNA, 567 bp, Zea Mays
cacccccctcatggacggtggccgagccgcagccgtcggcggcgacccctctcccatcgctgctccttccaatcccccggcgctgagcagccggcccgtcgatgtctcctcgttcacccataccccgtgctactgcgaagaaaatgtttacatgttatgtaacgagcttattagaaccggagtggctgatcctgcgggcactgatctttatgttgttttcatatccaacgaggaaaaaaaggttcctctctggcatcagaaagcaggccattctgatgatggatttatttgctgggattatcacgtgatatgcatccaggcgaagcaaagaagttcttgattttgtttgggatctggactccgatcttcctttcccttccccattgatccaatatgtttctgaggcgattcaaccactatcattcggcaattccagatatgcaagactcttccgtgtggttcatgctcctgtgtttcttcaatcgtttgcctcagacagaagccatatgaaggatcctgaggggaactggattcagttacccccaaaatatgaaccgatcgtggctg

SEQ ID NO: 135619 - DNA, 678 bp, Zea Mays
cacccccctcatggacggtggccgagccgcagccgtcggcggcgacccctctcccatcgctgctccttccaatcccccggcgctgagcagccggcccgtcgatgtctcctcgttcacccataccccgtgctactgcgaagaaaatgtttacatgttatgtaacgagcttattagaaccggagtggctgatcctgcgggcactgatctttatgttgttttcatatccaacgaggaaaaaaaggtgatttattgcttatttttctattgttggagatcttattttccttcagttggaaatttcccttccattcaggttcctctctggcatcagaaagcaggccattctgatgatggatttatttgctgggattatcacgtgatatgcatccagtgtttcatggtacttcttgatgtgcatatggaagtctaggcgaagcaaagaagttcttgattttgtttgggatctggactccgatcttcctttcccttccccattgatccaatatgtttctgaggcgattcaaccactatcattcggcaattccagatatgcaagactcttccgtgtggttcatgctcctgtgtttcttcaatcgtttgcctcagacagaagccatatgaaggatcctgaggggaactggattcagttacccccaaaatatgaaccgatcgtggctg

SEQ ID NO: 135620 - DNA, 656 bp, Zea Mays
gctggcattcgaaatagcagatcacatcgcttgggttttaattcaaggatgtatcagccaatcatcaagaccagggaacatttctggtacaatcccagttaccatgatgatacatggggaatgagatttgtatctcgtgggctccaggtaagctgccaggtgatagttggttaagccaacctcaaaaacattgtatggatttaaaactcccctcactcttcaaatggacttttctactttgtctcagaatcctcgactttcctggattttctctgccgggggcattggacttctccaccttcctggattttctctgccgggcattggactttgccttcattctcttgaacattatccacttcatcgaggtgttgctcttccttttcttgaaccttctcttctttgtcaaggtttggctccagtgcatccaacaatttatctgtcttgcctaatatttccttggaactttcttgaatcccgcttgcattaacttggattttctctactttgtcttgggctttccctgtctcctcttgctcttcccctgctttgtgtttgatcttcacatcatagcgagaaatccttccagacttcggcagtgcctctgatccaacaactcttaccgtctggttcctccttaggagcaacactgcatc

SEQ ID NO: 135621 - DNA, 645 bp, Zea Mays
atgccgaatctttggccggcaacaccatcgatccgagccatcaggtccaagagatttctcctctcccgagcccctgcctcggaaaacactatcccgttcttcagtggtcggggtggtgacttgttggatggcacctgatcttcctccaaggcctctgcatctacatcctccttttcatcgtcgtcaaacaccaatgctgaagtcgactccctctctgattcagccctgcggctggcagcacctcgcttggagatggtcttctgaacatcaacaaccgcacaagggttccctaccacggcaagcccgtcggcgagcccgttccacaccttggccgacacggctttgctgagaagcacgagacgctggacgatgtcggccatggacgggcgccgctccctgcaggagcgcacacagctggcggccagcgcggcaaggtccttgcgggtgaccgggtctcgtggcggcgccacacgcgggtcgaacagcgaggcgaccttgcctttccgtaagagcgggacggcccactcgacgacggacggcggcgagtgctggacgtcgatggccttgcggccgctcatgatctcgagcagcaggatcccgaagctgaagacgtctgtcttggtgctgaggctctcgggcgtgacg

SEQ ID NO: 135622 - DNA, 417 bp, Zea Mays
gttcttcaacggatttgcccgggacaaaggaacacgaagtacaaagcaaccaaatcgtacattcgtacctgagtagtttgagatccaaagaaccagatcgggtaggagaggtcacgctgtggatcgatgcgcacccttccgtcgacgagtgagaacgaatcaccggaggaaagtgaagaacggcggtgacgatgatgaacgtggtactgacctccgcgctcggaaaactcgttcggcgaagaatcctccaggttgtcctgccagactgcacaatcgctttggagacttccaaagacgaggtggagagaggaagtgggatggcaggcaacgagcgcgagctcgtagagttcccctccttgtagtgtgagagaagaaatcgccagcgaagaggactgtatcccctaaacgaactacaat

SEQ ID NO: 135623 - DNA, 1266 bp, Zea Mays
atggctggacctggacctgctctgcaggcggcggcagccagactgaggtcctgccgggtagctatagatcccgaccgcgcaggcgcagacagccggtcgatcttccctcgccccttcctccgttcatcggcagggctctgggggcccgcggcgtcgcgccaggccgccggctacggggcgataggcgccaccggtgacgtcgggatgctcgtcgtcgcccccgcgggctcgttccaccaccagcgagcggccgccgacgaccccgtgctcccgctcatcaccgcggcgcagcgtacccttgtcggcgcggacggcccctccggcaacgccaagctgcccgtgtcgtccgctggcgccatccagttttggcagcaggagccggcggcgggtgggtccctcggcaagaaggccctcgccatgctggaccatggccgcggcgggtccgggtccggaggagctacgtgccaggactgcggcaaccaggcgaagaagggctgcgcgcacagccgctgccgcacgtgctgcaacagccgtggcttcgagtgtgacacccatgtcaagagcacctgggtgcccgccgcgcgccgctgggagcgcctgcagctcgcgggtggcgccggcgccggcgccactgcctcccctccttcactcgcgccgaccacgaccaagagaccccgcctcgcgtgcccgacccccacgaggacgaccaactctcgcgcttccacctccaacgccaccacgcctcgcagcttcgacacatcctcgagccaccaagacgcgtcgttcaaggacagccttccgcggcaggtgcgcgggccggcggtgttccggtgcgtgcgggtaacgtccgtggacgacggcggcggcggcggcaccaacggcgaggtcgcgtaccaggcggcggtgaccatcaacgggcacctgttcaggggcctcctgtacgaccacggcgccgaagacgccgtaatgcccaccgcgtccgacctcaacctcaggagcaccagggccccccgctcatcctcggcggcctgggctacggtaacacaccatgaactgatctgatcgatgggtcattttgactgcaagcagtagtgcagtagctcagtttcatgttactgacaatgttgccatgtgttgtggcaatggagtccttgttgccatcaggaggaaagtgcatctttgtaaaaagaaaaagtggaaagtcgaaagtgggaactcgtagacacagcgctgggattgttggcatttgcaacaagtgaatttgtg

SEQ ID NO: 135624 - DNA, 105 bp, Zea Mays
gccaagctctccatttctattattttcataacagaaatacaacagcgcttaaggtagcatcacaaaaagaaacacgacacgggccctccaccctgcagatgattc

SEQ ID NO: 135625 - DNA, 473 bp, Zea Mays
atggcgagcaaccaaggagttggacgccgagtggacagggaactccggtcgggcgcgcacatcaggaagctcgacggcggcgcgagcaggaaacgtgaggagggaactgcagggagatgggcgcgccatggctggaatcaggggtgtggtgagcttgcaggggagggcgcggctggaggagaaagctgggcacgagctgaactgttggcaggcgacccggagtgcggcgagcagggagcacggagccggcgagccagcaggggaaaacgccatgggggcgagctcgaggcatggagatccggcgagctgaagccgcgcgcaggagcacgagaccacgcggcaagcacaaacgagcagcaggggcgcgggagcaagagtcgctcgacagggaggaagaagctacgccggcaaagggaggagaagacaggtccacggcggcttgattttcatggaagctgagcggtgcgtgaagg

SEQ ID NO: 135626 - DNA, 1473 bp, Zea Mays
ccaacccgcgctgccacttcggcttctctttctatccctccactccctcttatctgctgcgccatcctccccggcctccaccatggccacagccgccgcggccaccgcctcctcctccctcctcgcgccggcggccagcagcacggcgccggcctcgtcaaacgcgctgctgttcccctcctccgtgccgtcgctgcgtgcgtacccgcggctcctcctcgcgttccgccgccccgccgcggccgccatcgccgacccgcagggggccgtgctcgaagaggaggcggaggtcgaccagcagggccagtacgacgacgacgacgggtatgagggcgggcgcggccccgcgttcacggcccccacgcgcccgcgcaccggcaaggccgcgctactgcttaagcgcgaccgcacgaggtcgaagaggttcctcgagatacagaagctgagggagagcaagaaggactacgacgtgcccaccgccatctcgttgatgaagcagatgtccagtgccaagtttgttgagtcagcggaggcgcacttccgcatgaatctcgaccccaagtacaatgaccagcagctccgggccacggtgaatttgcccaagggaacaggccagtcggtgaagattgcggttctcacacaaggtgagaagatagatgaagctagagctgccggagctgatatcgtaggtggagaagatttgattgaacaaataaaaggaggatttatggagtttgacaaattgattgcatcacctgatatgatgcctaaggttgcgggcttaggtaagattctaggaccaagaggactgatgcctaaccccaaagctggcactgtttcttcaaatattactcaggctatagaagagttcaagaaagggaaggttgaatacagggttgataaatcaggaattgttcatattccatttggcaaggttgactttccagaggaagatctcattgcaaacttcatgtctgttgttcgctctgttgagaggaacaagccatctggtgctaaggggatatactggaaaacggcgtacttgtgctcatccatgggaccttctatcaagctaaacataaaagaaatgcttgactatggtttggaatcatctgactagatgtgaccacaggcaccagttaagtcagctggcatcgttatcaccttcacagattaactatctgccccttgcgacaaatgagcagaaacatggttggtgtatggcaagcaggtgcttaggtacagttttctcagttttacgggcacatcatcagagcagctaaagtcacccagattgacaaagagatggtttgttggtcatgtatttatgagaaaattatgcacggtttcatagatgtctgtctcagacgtttgttgtaatgtttcatattttgtcaatagtcatccttgagcttaagccaacaatttgttttcacctgtcattaatttaattacctttcatatttacaaggg

SEQ ID NO: 135627 - DNA, 575 bp, Zea Mays
gatctatgttcctacaaaacatctgtttctgttcatcatattatcgaggatagtgttgatatacttcttgctattcattcacagcgctctgttgagaggaacaagccatctggtgctaaggggatatactggaaaacggcgtacttgtgctcatccatgggaccttctatcaagctaaacataaaagaaatgcttgactatggtttggaatcatctgactagatgtgaccacaggcaccagttaagtcagctggcatcgttatcaccttcacagattaactatctgccccttgcgacaaatgagcagaaacatggttggtgtatggcaagcaggtgcttaggtacagttttctcagttttacgggcacatcatcagagcagctaaagtcacccagattgacaaagagatggtttgttggtcatgtatttatgagaaaattatgcacggtttcatagatgtctgtctcagacgtttgttgtaatgtttcatattttgtcaatagtcatccttgagcttaagccaacaatttgttttcacctgtcattaatttaattacctttcatatttacaaggg

SEQ ID NO: 135628 - DNA, 1758 bp, Zea Mays
ccaaaacccacagcccgctccggcgctccctcacaaaaacctaccacctgccactttcactccaccacacacccacacccccgcgccatggcctctcctcccccgacctccctctcctccccccacctcatccatctccgcctccaacccctacccagcgtcccgccgctccacctcactaccctccccttcctgcgctccctcccgctccacctccactcgctccgcctcaaccgaccccacctccctcccctaccgctcgcctcttccggcagcggaagcgacatcaccggaagcggcggcgaggacgaccttcctccctcgggcgggggcggcggagggggaggaggcgagggcgatggtgagggcgagggcgacggcagcgagggcgactcggtcaacaggagggaggccctgtttgttctggcgcaactcggacggaagctcgagagcctgccggccgacctcgccgcggccgtggagggcggccgcatcccgggcgagatcgtgcggcggttcgtggacctcgaggcctcgccggtgttcaggtggcttctgcagttcggtggcttcaaggagcgcctcctcgccgacgacctcttcctcaccaaggtcgccatagagtgcggcgttggcatcttcactaagactgctgcagagtatgagaaaaggagggagaactttgtcaaagagcttgactttgtgattgcagatgtggtcatggcaatagttgcagattttatgcttgtatggcttcctgctccaaccgtgtctttacagccaccactagcgatgaattctggagccattgctaagttcttctacaactgcccagataatgccttccaggttgctttgtctgggacgtcatactcacttttgcagagagtaggagcaattttgaggaatggtgcaaagctttttgctgtcggaactagtgcctctctgattggcactggtgtgaccaatgcactgataaaagcaaggcaggctgccagcaaggattttgccggtgaagttgagaatattccaattttatcaactagcgttgcatatggtgtgtacatggcagtttccagtaacctcaggtaccaggttttagctggagtgattgaacagcggatgctcgagccactactgcaccagcacaaactagtattgagtgcagcatgttttgcagttcggacagggaatacgtttttgggttccctactgtggatcgactatgccaggtggataggcgtacagtaggctcaagcatgggtacacaaatgcagttgctcggagttccagcaatatgggttcttcgtgattttatattaccacgcttcctccaactggcaagtactcgtttgcttcatgggagactcttaggacagattttgatatcattctttaaacaatgccttgaggaaagcgtgatttatcgaaattgttcccgcaagcaagagagtgaatttgttttgagggcttaaggttgtgttgtgcgtgttggattggattgattaaaattcgtagtttcgtacagttttgtcattgtttgtgcaagttcctgtgatttggttatcgtggtcgagcaccatttttgctggccatgcctacaccaaagtttggcattactggcaaacatatccgggtgttgtcacgagaagaaaaccattctaacaagtgggcttaaaagtgaaagtgagcccaaatacaaacaaaaccaacgaaaggagttggtagaccgagtgcaaacagcaaaaaatagtaaaa

SEQ ID NO: 135629 - DNA, 1811 bp, Zea Mays
ccctgtgccagcccactgggctccacgcgtccctatcgcctatcgccccgaccccgcggccccacccccaccctgcttcttccacaccatttcaaatcccaccaccacccacgctgcccccaaacggtcacccgttctacgcttggcttggctgcgctgcgctgcgcacaccgaacccctcgccgtcgcggctcgcctcggctccgccccgaccgaccgatcgatccggccggcggtgggcgccatggcctcccccaaccccgaggccgcggggctgcaggccgtggctgtggcgggggcaggggagggcggctcgtcctcgtcgctcagcgccgttgcgggagcggctgcgttgtccggggagctggtgcccaggagggcgttggcgctgcgcaaggagcgcgtgtgcacggccaaggagcgcatcagccgcatgcctccctgtgcggcggggaagcggagctccatctaccgcggggtcacccggcataggtggacaggtcgatatgaggctcacctttgggacaaaagcacgtggaatcagaatcagaacaaaaagggcaaacaggtatatctaggtgcatatgatgatgaagaggctgcagcaagggcctatgaccttgctgcattaaaatactggggagctggaacacaaataaatttcccagtatctgactatgcaagagaccttgaagagatgcagatgatatccaaggaggattatctcgtgtctcttaggagaaagagcagtgccttctacagggggttaccaaaatatcgtgggcttcttaggcaacttcataattccagatgggatacatctttgggactcggcaatgactacatgagccttagttgtggcaaggatatcatgttggatgggaaatttgcaggaagctttggtctagagaggaaaattgatcttacaaattacatccggtggtggctaccaaagaagacaaggcagtcagatacatctaaaacagaagaaattgctgatgaaattcgagctattgaaagttcaatgcaacagactgaaccctataagttgccttctcttggcttcagttctccatcaaagccctcttcaatgggcttatcagcatgcagcatattatctcagtctgatgcctttaaaagcttcttggagaagtctacaaaattatctgaagaatgtagtcttagcaaagaaattgttgaaggaaagactgttgcctcggtacctgctactggatatgatacaggggcaattaatattaacatgaatgagttgctagtacaaagatctacttactcaatggcccctgttatgcctacaccaatgaagagtacctggagccctgctgatccttccgtggatccacttttttggagcaactttgttttgccatcgagtcaacctgttacaatggcgacaataacaacaacaacgtttgcaaagaatgaggtaagttcaagtgatccattccagagccaagagtgactgcacgagcttactgaagcaggatattttagattggtcaaagacagcatcccgtgcgtcaactagattctttttgtcaagcttttgatgtcgcaactttgtgagcaatactccttgtttatccatacttcataggacatgaatagaaggtatgacaagtgcaagcatagttatgtaatatacagtggctagttgccagaaaatgagatttagttgtgtagagctgtttgtacatattgagatggttgtttcagttcaatctcaacaggtttgaggaaaatatccaacgaaatgatacagttttaatgctaaattagttattttgtac

SEQ ID NO: 135630 - DNA, 2037 bp, Zea Mays
ccctgtgccagcccactgggctccacgcgtccctatcgcctatcgccccgaccccgcggccccacccccaccctgcttcttccacaccatttcaaatcccaccaccacccacgctgcccccaaacggtcacccgttctacgcttggcttggctgcgctgcgctgcgcacaccgaacccctcgccgtcgcggctcgcctcggctccgccccgaccgaccgatcgatccggccggcggtgggcgccatggcctcccccaaccccgaggccgcggggctgcaggccgtggctgtggcgggggcaggggagggcggctcgtcctcgtcgctcagcgccgttgcgggagcggctgcgttgtccggggagctggtgcccaggagggcgttggcgctgcgcaaggagcgcgtgtgcacggccaaggagcgcatcagccgcatgcctccctgtgcggcggggaagcggagctccatctaccgcggggtcacccggcataggtggacaggtcgatatgaggctcacctttgggacaaaagcacgtggaatcagaatcagaacaaaaagggcaaacaggtatatctaggtgcatatgatgatgaagaggctgcagcaagggcctatgaccttgctgcattaaaatactggggagctggaacacaaataaatttcccagtatctgactatgcaagagaccttgaagagatgcagatgatatccaaggaggattatctcgtgtctcttaggagaaagagcagtgccttctacagggggttaccaaaatatcgtgggcttcttaggcaacttcataattccagatgggatacatctttgggactcggcaatgactacatgagccttagttgtggcaaggatatcatgttggatgggaaatttgcaggaagctttggtctagagaggaaaattgatcttacaaattacatccggtggtggctaccaaagaagacaaggcagtcagatacatctaaaacagaagaaattgctgatgaaattcgagctattgaaagttcaatgcaacagactgaaccctataagttgccttctcttggcttcagttctccatcaaagccctcttcaatgggcttatcagcatgcagcatattatctcagtctgatgcctttaaaagcttcttggagaagtctacaaaattatctgaagaatgtagtcttagcaaagaaattgttgaaggaaagactgttgcctcggtacctgctactggatatgatacaggggcaattaatattaacatgaatgagttgctagtacaaagatctacttactcaatggcccctgttatgcctacaccaatgaagagtacctggagccctgctgatccttccgtggatccacttttttggagcaactttgttttgccatcgagtcaacctgttacaatggcgacaataacaacaacaacgtttgcaaagaatgaggtaagttcaagtgatccattccagagccaagagtgactgcacgagcttactgaagcaggatattttagattgttaataaagctttggacatttcaatcgatgaacaacaggtcaaagacagcatcccgtgcgtcaactagattctttttgtcaagcttttgatgtcgcaactttgtgagcaatactccttgtttatccatacttcataggacatgaatagaaggtatgacaagtgcaagcatagttatgtaatatacagtggctagttgccagaaaatgagatttagttgtgtagagctgtttgtacatattgagatggttgtttcagttcaatctcaacaggtttgaggaaaatatccaacgaaatgatacagttttaatgctaaattagttattttgtacagatgattccaatgctcgcatgattctatggcaaacatcctttgctataaaaccatagctcgtaattttgtaatgggacatagcagttttgattagcttaattacaagtgtagacttatagaagaataaagaacaagggtagccaaggttatctgttgaaataaaatagcagttgtcagtcgtttgat

SEQ ID NO: 135631 - DNA, 1685 bp, Zea Mays
cccgttctacgcttggcttggctgcgctgcgctgcgcacaccgaacccctcgccgtcgcggctcgcctcggctccgccccgaccgaccgatcgatccggccggcggtgggcgccatggcctcccccaaccccgaggccgcggggctgcaggccgtggctgtggcgggggcaggggagggcggctcgtcctcgtcgctcagcgccgttgcgggagcggctgcgttgtccggggagctggtgcccaggagggcgttggcgctgcgcaaggagcgcgtgtgcacggccaaggagcgcatcagccgcatgcctccctgtgcggcggggaagcggagctccatctaccgcggggtcacccggcataggtggacaggtcgatatgaggctcacctttgggacaaaagcacgtggaatcagaatcagaacaaaaagggcaaacaggaataacataggtgcatatgatgatgaagaggctgcagcaagggcctatgaccttgctgcattaaaatactggggagctggaacacaaataaatttcccagtatctgactatgcaagagaccttgaagagatgcagatgatatccaaggaggattatctcgtgtctcttaggagaaagagcagtgccttctacagggggttaccaaaatatcgtgggcttcttaggcaacttcataattccagatgggatacatctttgggactcggcaatgactacatgagccttagttgtggcaaggatatcatgttggatgggaaatttgcaggaagctttggtctagagaggaaaattgatcttacaaattacatccggtggtggctaccaaagaagacaaggcagtcagatacatctaaaacagaagaaattgctgatgaaattcgagctattgaaagttcaatgcaacagactgaaccctataagttgccttctcttggcttcagttctccatcaaagccctcttcaatgggcttatcagcatgcagcatattatctcagtctgatgcctttaaaagcttcttggagaagtctacaaaattatctgaagaatgtagtcttagcaaagaaattgttgaaggaaagactgttgcctcggtacctgctactggatatgatacaggggcaattaatattaacatgaatgagttgctagtacaaagatctacttactcaatggcccctgttatgcctacaccaatgaagagtacctggagccctgctgatccttccgtggatccacttttttggagcaactttgttttgccatcgagtcaacctgttacaatggcgacaataacaacaacaacgtttgcaaagaatgaggtaagttcaagtgatccattccagagccaagagtgactgcacgagcttactgaagcaggatattttagattgttaataaagctttggacatttcaatcgatgaacaacaggtcaaagacagcatcccgtgcgtcaactagattctttttgtcaagcttttgatgtcgcaactttgtgagcaatactccttgtttatccatacttcataggacatgaatagaaggtatgacaagtgcaagcatagttatgtaatatacagtggctagttgccagaaaatgagatttagttgtgtagagctgtttgtacatattgagatggttgtttcagttcaatctcaacaggtttgaggaaaatatccaacgaaat

SEQ ID NO: 135632 - DNA, 718 bp, Zea Mays
ggaataatattaatgtcatttacatacagataaatgcttaagcataagctatggaattttgtttttcttgaacatgtaggagagtaacatttcattaatataaaaaaatacaaacgaggtagagaatggtaataaaaacacaaaccaagaccaccaccactcacatttgtcctggcaacttgatttcagtagggacctcgttaggaaattcccatgcttgcagtgggtgtaggatactatcaaactgataggcacaaagtgctccccattttaagattagtaagaactttgtagatacccgttgacttatgcacgagaatgactactaactattatgtcattgattcttgattttatttgtattatatttctagtttgctatttacagttaataaagctttggacatttcaatcgatgaacaacaggtcaaagacagcatcccgtgcgtcaactagattctttttgtcaagcttttgatgtcgcaactttgtgagcaatactccttgtttatccatacttcataggacatgaatagaaggtatgacaagtgcaagcatagttatgtaatatacagtggctagttgccagaaaatgagatttagttgtgtagagctgtttgtacatattgagatggttgtttcagttcaatctcaacaggtttgaggaaaatatccaacgaaatgatacagttttaatgctaaattagttattttgtac

SEQ ID NO: 135633 - DNA, 1758 bp, Zea Mays
gttaggcggcgcgctccgccttccccttcttcgacctcccgacgcgtgctcacctcctcttcggatcgtggatccgctgctgcgctgcacgaataatcaattccgagtgaaataaattacatatagccatctagaagagagtcctttctagagccgacgcgacgggatcaagatttgtatttgaacccggacgacgggaggagtacgaggcccagtcatggaggaggagaagcaagtgatggagggtgccgctacggcggcgaggcggcggctggtgatcggggtggggttctgggtgcagggcttccggctcttcccgtggctgggcgtcaatttcttcctcaaggacggcatgggcgttgctgcctcctcgctgcagatcctccaggcctccgccaacctgcccatggtcgccaagccgctcattggcctcctctcggatgccgtccccatacgcggccatcgccgcctgccctacgtcgccatcggcgctctcttgcaggcaatttcatggctagcaattgcactttggcaagatatctctcttcaagttcttaccatttttctcctcttgagcaactttggtgcttccatatgtgaggttgccaatgatgccattgtagcggagtctgggaagaaagcggcctcttcctcaggatcaggtcagcttcaatcgtttgcttggatgttcggctcttctgctggtgctttaggaaacctcctaggtggcattgctctcagctatttttctcccaaagtcatgtttctgtttttcgcaatccttctcctgctccagttcttcacaactgtggctatacctgagggctctctcaaactccctaaggtagctacttctaccaatctatcagcactcaccagcatccgtaagcaagtcaaagagctgtcatgcgccctatctatgcctgaaatgttttggtcaattatatggtttacagcgtcatacgctgtcataccttttctacttgggaccatgttcttctaccagactgaagtgctaagactagactcctcggttatcggcttatcgaaggtgtttgggcaagtggctctattggcttggagcatgtcatacaacaagtacttcaagacaatgtccgcccggaagctcctgtcagttctgcagttcgtcacagcgctcgtaatgttgtcagatgtgttgttcgttcagggagtatacaggaaggtgggaattccagactccatatacacgattgtcttctccgggctgctcgagggccttatgtttttcaaggtcctgcccttcagtgttcatgttgcaaaactttgccctgctggctgtgagggatcagtgatggcctttgtcatgtctgcgcttgcccttgcgactatcgtcagtggctaccttggagttgctcttgctgccttcatgggagtgtctggagatgatttctcagcactgccagcttgcctgttgattgaggctgcgtgcacaatgttgccactatgttgctcgtccttgatcaaagagagaagagaaaaggagaaaaaacaagagtagattacatatatattatctgaagatgatgtaaagctcattgttgttaccctcgtcctcatggtgtcatttcagtttgttatgtgatcatagcttgcagaaacaaaataggagatgattacacatttacacttgtccggtgttaacacctctaaggcttgtcaagaactacagtcaaacgagcatatatgtacatacatgcgtgccgctaccattcttct

SEQ ID NO: 135634 - DNA, 817 bp, Zea Mays
cgcgctccgccttccccttcttcgacctcccgacgcgtgctcacctcctcttcggatcgtggatccgctgctgcgctgcacgaataatcaattccgagtgaaataaattacatatagccatctagaagagagtcctttctaggtgagtaggtgtcctcttacgcgtgggtgagagaacccactaggagccacagccacctcacagtctgttctcctgttggatcgggaggagcagagccgacgcgacgggatcaagatttgtatttgaacccggacgacgggaggagtacgaggcccagtcatggaggaggagaagcaagtgatggagggtgccgctacggcggcgaggcggcggctggtgatcggggtggggttctgggtgcagggcttccggctcttcccgtggctgggcgtcaatttcttcctcaaggacggcatgggcgttgctgcctcctcgctgcagatcctccaggcctccgccaacctgcccatggtcgccaagccgctcattggcctcctctcggatgccgtccccatacgcggccatcgccgcctgccctacgtcgccatcggcgctctcttgcaggcaatttcatggctagcaattgcactttggcaagatatctctcttcaagttcttaccatttttctcctcttgagcaactttggtgcttccatatgtgaggttgccaatgatgccattgtagcggagtctgggaagaaagcggcctcttcctcaggatcagttcttcacaactgtggctatacctgagggctctctcaaactccctaaggtagctacttctaccaatctatc

SEQ ID NO: 135635 - DNA, 1877 bp, Zea Mays
cgcgctccgccttccccttcttcgacctcccgacgcgtgctcacctcctcttcggatcgtggatccgctgctgcgctgcacgaataatcaattccgagtgaaataaattacatatagccatctagaagagagtcctttctaggtgagtaggtgtcctcttacgcgtgggtgagagaacccactaggagccacagccacctcacagtctgttctcctgttggatcgggaggagcagagccgacgcgacgggatcaagatttgtatttgaacccggacgacgggaggagtacgaggcccagtcatggaggaggagaagcaagtgatggagggtgccgctacggcggcgaggcggcggctggtgatcggggtggggttctgggtgcagggcttccggctcttcccgtggctgggcgtcaatttcttcctcaaggacggcatgggcgttgctgcctcctcgctgcagatcctccaggcctccgccaacctgcccatggtcgccaagccgctcattggcctcctctcggatgccgtccccatacgcggccatcgccgcctgccctacgtcgccatcggcgctctcttgcaggcaatttcatggctagcaattgcactttggcaagatatctctcttcaagttcttaccatttttctcctcttgagcaactttggtgcttccatatgtgaggttgccaatgatgccattgtagcggagtctgggaagaaagcggcctcttcctcaggatcaggtcagcttcaatcgtttgcttggatgttcggctcttctgctggtgctttaggaaacctcctaggtggcattgctctcagctatttttctcccaaagtcatgtttctgtttttcgcaatccttctcctgctccagttcttcacaactgtggctatacctgagggctctctcaaactccctaaggtagctacttctaccaatctatcagcactcaccagcatccgtaagcaagtcaaagagctgtcatgcgccctatctatgcctgaaatgttttggtcaattatatggtttacagcgtcatacgctgtcataccttttctacttgggaccatgttcttctaccagactgaagtgctaagactagactcctcggttatcggcttatcgaaggtgtttgggcaagtggctctattggcttggagcatgtcatacaacaagtacttcaagacaatgtccgcccggaagctcctgtcagttctgcagttcgtcacagcgctcgtaatgttgtcagatgtgttgttcgttcagggagtatacaggaaggtgggaattccagactccatatacacgattgtcttctccgggctgctcgagggccttatgtttttcaaggtcctgcccttcagtgttcatgttgcaaaactttgccctgctggctgtgagggatcagtgatggcctttgtcatgtctgcgcttgcccttgcgactatcgtcagtggctaccttggagttgctcttgctgccttcatgggagtgtctggagatgatttctcagcactgccagcttgcctgttgattgaggctgcgtgcacaatgttgccactatgttgctcgtccttgatcaaagagagaagagaaaaggagaaaaaacaagagtagattacatatatattatctgaagatgatgtaaagctcattgttgttaccctcgtcctcatggtgtcatttcagtttgttatgtgatcatagcttgcagaaacaaaataggagatgattacacatttacacttgtccggtgttaacacctctaaggcttgtcaagaactacagtcaaacgagcatatatgtacatacatgcgtgccgctaccattcttctacagatttaggccatgtttatttccctcttggatc

SEQ ID NO: 135636 - DNA, 156 bp, Zea Mays
atctcccgcagcggttccccctaaatactccccctataccccactaccactataaaatatcattttctataccaactattaattttttatctactaacaattactcgtggacccacagcatagtgtttagggtgatgaacagtgacacgctagatc

SEQ ID NO: 135637 - DNA, 2230 bp, Zea Mays
tattatcggacgaggagtaaccatccaatcagacaacacttcatcgacgcaaggacgcatgacatcgggcaattttaccgaaccatctctctcttgtcttcctcccttgcttttagccaagctacgctagcgtctgaagacgaaggaagctacagcggccgaggtccccgtttctgcgcccaccgaggcgtcgcgcatgcggccacccgcacccaggcgctggcacgggggagtgaggtgtggaggtcgagcaatggcgggcagccttcgccggcccgtggatctgtaggcgcggcgcggggggggggtgttggctggtgcgcgatgggatctgggagcagcaaggccaccacctcctcctcctcgcccacggcggcggaggcgggcggcgaggttaagaggccgaatgggagcgggaaggggaggagggggaggagcctgctgccactgccgagctcctcctgcttccgtggctccacgacgccgtgcgaaggcgacgctgccgcagcagcggtggacttcgagtgtaacaagggaggggagactgcaagcctgacttcactcactcacactgtaaagtctcatgaagatgttcttgcaatgcctaaatctcatcccagtgaaggggaagcaccaccttcatcagatagcgaaagagatcaagatgatgatgtgctacagaatgctgccactagcacatcaacagcggccaatcaattgccaaatccttctaggaggtcaaggccacgttttggtgtcaactttggcttgagtagagcggtcagcttgggttcatcagtagcctgctctattctgtcatctggcctcccgccgtctgctaatccaggtgaaggtcggggagatgtgcatgactcttctgagacaggcatctcacagcagggtagtgcaccgacttctgggattgattcaactctggatatgcttagagatagtgtcacggcacaagctagagcagctcatcaggctaggagaaatctgatagaatctgaagatgctagcttcaggagctcctacagaaggatggggtctcatgaaccttttgaaggcagtgtccggtttagccgaacattaagtgttgggcggcttcgggacagagttctcaggcggcctccattctcagatgggctattcaccccttcacttctttatgatagggcagtatggccgtctggaaatgctagtgctaggcaagattcagcagtaatgcaaaggactaattcagacaggagttcagaaccacggtctgatccttcaaccagcgatatgtacaactcgagctctgagaggcaggctagcaacggcgatctactggagcgcagatcagcttttcttgagaggaggaggaggataagatctcaggtcagagctctacaaaggttgggcagcaggtttgaaaatttatctggtcatgagagatcctgcatactatctggtcagcatagaacaggaaattgcaactgcagaacaggtagtcgacaaggcaatcctgatgaagaaactagcacaagggctagcatatcgagaattgttatgttagcagaagcactttttgaggttctggatgaaattcaccaccaatctgccgcattatcgtcatcaagaccatcattttcttcaattggatccgttcctgctccaagggagattgttgagcgtcttccttcaaaagtgtataggaaaccattgaaataccagagcgaggaagcagcacaatgctatatttgccttgttgaatatgaagagggagattgcctccgtatacttccatgccatcatgaattccatctaacatgtgtagacaaatggctaaaggagattcacagggtttgcccactttgtcgtggcgatgtttgcagatctgatgcacccattggaaagaccagctgattctgtctcttgagaatggagcttcttacagaaaattggagatcttggcatggttctcatccaattccgatagaaccgccaaacttctgcagctgttattttcatttccccctctcttaatggtcagtacagcatcgcagtcatcctattatgaaactgatgacgacatgccatggtgaatttaggattcttgtgtggtggggcgagtttgttgataatggattattggcttccgtttgggcgattgatgtcgggtgcagccattctggccaactttggttccacgtgtttcctactatttgaacaggggactaaaatcttc

SEQ ID NO: 135638 - DNA, 941 bp, Zea Mays
ttctcatactactaggagtgtaggtaaggagtccacacacgagtttgtaaacaccatgtgtaagggagttcaccaacgtgatgtgcctcacctacaggggtgctgctttgtcaccacccttgtgccttgtccaggtgctgcttaccagcctcttattttgtttctgaattcaggatcttatgttggtcctacaagtaacattaaagtacttccctccctgttggcattaaaacccctagtgtggttgttgtgttgtactgttgtttgtactaggcgagcatcacttccaatttgttgtagtagctttttcttgctacttcatggatcttgggtcttcggttgttgagttatttgcttcagcaattaggcttctgacttagagcttttagatttgtaggcattgctggttgtcttgaagaagatgatggtgggctcttcccaccaccagcagctatagaagaaggggaagtctgtggctgacaagggtccgcccccgcaactgtggtggcagagaaggtggtggcgcggttagggcagccacaacaccccatcatctggctgttgagtgcaagaaatcacatgcaagctggattgtgttagacaagatttgaagcatgaggagaagcattgtgggggagaagcttcagtgcaacattgttgttctatagggatcaacatcctcaagaccgcttggaaaactttcacaaaaaactcataatgcaagcatatgttttattggaaaagttttccaagctgaatttctgaaagcctcctcactgctttagttatgctaaattggaatttgcaactaggggtttctaacaagtaaatttcttagctaaaggtggattttggtctgttcatcgacgtgtcctttctgatggtggcgttgtttgttagctacaaaatcatcaatcaaagattgtaattatattgcgtta

SEQ ID NO: 135639 - DNA, 393 bp, Zea Mays
atgggagctgctcctccgacgactctcgtcaccgacactcccgctcgcttcggcggccctacccagcactcctcagggggcaccggctccggaggcggcaaaggcgatggccatggagcttcctcctcatccaacaagggcggacgtggaggccgcggtgaaggcgacaagagcggcaacagggatgagcgcaaatgtggtggctccaagcctgctgcgggaatctccgatagtccatggcccacgtactacaatccctggctcatcgtaccaaaggccttgtccacctgcgccacatcacaagcaggcgcttctggcacagcagcaacaggcgttgccgcccaacaccagcagccacagggtccccctccttgtagcctactaagatggtaa

SEQ ID NO: 135640 - DNA, 2512 bp, Zea Mays
cccccaccccctcccggcctcccctccctcagtccctcctcagccagtctatcgtggcccctcgcctcgctcctctgttcacacacgagcgcactcccctgtctcggtgtctcctcccctctcgctctccatgttcgcggcttccaacgccacggccacccgcctcatcctcccgcgtccttcagtcccgttccgcgcactcctcattccccgccggcggggtcgcctccgccgcgcggtccacgccaacgccgtcgcaggtggcggaggaggcagcgagggcgttgcgaaggagccgccgcggacgctattccccggcgggttcaagcggccggagatccaggtgccagcactcgtcttacgcgtcggcaccgaggaggcgctgcggtgcggggatgaggtggccgacgccgtgtcccggggcgtgggcatcgtcgtgctcgaggccggagaggagggtggaggcagatcgtacgaggccgctcgcgctctcagggccacggtcggggaccgcgcgtacctgctgatcgcggagcgcgtcgacgtcgcttccgcagtcggtgcgagtggcgtcgtgctcgccgacgacggtattcctgctattgttgcaaggagtatgatgatgaaatcaaatgctgactccatatatctccctattgttgctagaaggatacaatctgcaaactctgcattaagcgcttcaagttctgaaggggctgattttctgattgtaaatactggcagtggtgattttgtggatgttataaatgatgttgttggtcaacatgtgaagattccgattttcgtcacgttgaatcatttaagtgaaggaacttattctgacttcacatccaggttgctccaatctggtgcatctggagttgttacatccttagctggcatggaactcctcaatgacgatcttataaaaaaagacttcacaaaggtgggctcagctgaggaactcccacaagcgagttactcttctgctgggatgctggaagatgttaataatgtaatggtcctaactcgtgattgcgagaagactaaagttgctggatttacaaaattggatgaagaagtgataaagttgatagaaatagaaaagcctattctgaacgaagctatcactattatccgcaaggcagcaccaatgatggaggaggttgagcttctagtggatgctgcttctcgcctgagtgagccatttttgttggttattgtgggtgaatttaactcaggaaagtcaacttttataaatgctttacttggaaggcagtatcttcaggagggagttgtgcctacgacaaatgagatcacactactatcatattctgaggttgaatctgaaaactttgaacgatgtgagaggcatccagatggtcaattcatgtgctatttatctgttccaattttaaaggaaatgaatctagttgatacacctggaacaaatgttattcttcagaggcagcaacgactcactgaagaatacgtgccacgagctgatttggtgctctttgtcctatcatcagatagaccattaactgaaagtgaggttggatttcttcagtatgtccagcagtggaagaagaaagttgtatttattctaaataaattggacctctatcggaacagcaatgagcttgaagaagctactgcatttgtcaaggaaaatgcaatgaaattgcttaccgcagaggatgtcacactgtttcctgtatcttcacgctctgctctggaagccaaactttcatattccaaaaacagtgatggaaagcattcaaccgaagctatgtataatgatcctagatggagaagcagcaaattttttgaacttgaggattacttactgagtttcttagatagttcaacggaaaatggaaaagaaagggtccggctgaaacttgaaacaccaataggcattgcagatcgattgttaacttcgtgtcaaaggctggtgaaactagaatatgaaaaggctgttgaagacttagcatccatcaaggatcttgtttatggtgcaaacaattatgccatcaaacttaagtctgatagcagttcctggcagaaccagatttcgtctctcattgagagagcaaaaggtcgagcagttacactcatggaatctacacttcagctgtcaaatattgaccttatttttgcatacacgatcaaaggaaaaacaggcagttccatgagagccacatcatttgttcagaatgatattctgagtccaacccttgatgatgctgtgaatttactaggtgactactcgacatggttgagttctagcaatacccgcgaagcaaatgtatatttggagtgtttctgtgaaagatgggatgcactggttgctccggaagaaagggctctgttagatccaaatgggcttgttaatgaaggggagaaactcaccataaaggcactggaaggcttcaatgccagtgctgccgccaaagattttgaagaggaaattcgagaattggtatgccctattaatggccttgatttc

SEQ ID NO: 135641 - DNA, 1027 bp, Zea Mays
ctgttttctaatagagctaaacatggtttcttgtaacctctaggttggatttcttcagtatgtccagcagtggaagaagaaagttgtatttattctaaataaattggacctctatcggaacagcaatgagcttgaagaagctactgcatttgtcaaggaaaatgcaatgaaattgcttaccgcagaggatgtcacactgtttcctgtatcttcacgctctgctctggaagccaaactttcatattccaaaaacagtgatggaaagcattcaaccgaagctatgtataatgatcctagatggagaagcagcaaattttttgaacttgaggattacttactgagtttcttagatagttcaacggaaaatggaaaagaaagggtccggctgaaacttgaaacaccaataggcattgcagatcgattgttaacttcgtgtcaaaggctggtgaaactagaatatgaaaaggctgttgaagacttagcatccatcaaggatcttgtttatggtgcaaacaattatgccatcaaacttaagtctgatagcagttcctggcagaaccagatttcgtctctcattgagagagcaaaaggtcgagcagttacactcatggaatctacacttcagctgtcaaatattgaccttatttttgcatacacgatcaaaggaaaaacaggcagttccatgagagccacatcatttgttcagaatgatattctgagtccaacccttgatgatgctgtgaatttactaggtgactactcgacatggttgagttctagcaatacccgcgaagcaaatgtatatttggagtgtttctgtgaaagatgggatgcactggttgctccggaagaaagggctctgttagatccaaatgggcttgttaatgaaggggagaaactcaccataaaggcactggaaggcttcaatgccagtgctgccgccaaagattttgaagaggaaattcgagaattggtggtcaagcttcctgctgatagctttctagatgatgaactacttgtgccttga

SEQ ID NO: 135642 - DNA, 399 bp, Zea Mays
gcttttggaacatttggagggctaggtattgctggactgtcagcttctctgttgacatctgttttgtcaactacccttgaagatcttcttgcccttgctctttgctcagctggcggtttttttgttttatcaagtttccctggtcggcggaagcatgcaatagacaagattaacaaggctgctgatgaactctctcgaaaagttgatgaagctatccaaaaggatatctcacagagtgctaataacctaatccgcttcgttgaggttatcagcaaaccttaccaggaagcatgtcagcgaaaaatagattggttacagggcgttcagggtgagctatctgctgtcgagcgtaagctccaaactttgaaagttgaaatccaaaatcttaatggatcataa

SEQ ID NO: 135643 - DNA, 82 bp, Zea Mays
atttgccgcagtttatttcaaaaatgaactagtgggtgacaaatattcgataacgaagataatactaagtaaaactacggaa

SEQ ID NO: 135644 - DNA, 876 bp, Zea Mays
gagtgcggattgatcccagtgatccttccttgtggccagagccagcgtctctctcccgtcgcgatcgccgccacaatccctgccttccgatcggctcctctccgaacctttacattacacctgctgtgtcctgtgttctccacaccaccctcggggcgtccggtgtgtgactgtgtgtttacatccaccatgccttcgctgctcgactcgccaccacagatcccggctgccgcctccgcctggggctcgctgtacgctgtccaagagccgcccgttaaacctcgtcacgtgatggtcgtcccggcggctgcagctgccaagaagccggcgtacgggtacggcggcaggaagaagaacctggagatgtgcaccgaggcgctcgggtgtgagaccggcgccgtcgacgccgcgccggcctgtggcggcgccgagatggaggctgagtgcgccgagaggaagcggcgcgcccggggaaaggatgagatggaggggaaggcacgccggtcggcgcgccggcctctgcccccgccgctgacgacgcttgcgcgcggcgccagccgcgttcggatggttcacgagcggcgcgacggccgactggccgtgtacgcggtgcccacgaccgggatagaggccgagcggagcggcgggcgccttcgcatgcgcctcatctccctctccgacgactccgccgcttgccgtcgacaagaaccgcaggaagcagaggcaaagaaggtggtagaggaaggggaatgcggcgtttctatgtacgtgcgcggcggccggtgcgtggaaccggaaggtgctgccgccgcggcgaggtccagcaagcagtgggagctggagcaggctgccgcgttctgggtcgccacctcctga

SEQ ID NO: 135645 - DNA, 2221 bp, Zea Mays
ctcatgacaccgtagcttccttcctcgccgtcgccaaatgctgcaggccgcctccatgaggtgctagggttccctggccgacgccacgaccgtcgcacccggccgcctccgtccctgcgggccttcgccaccgccctcgccaaacgtcccgagctagggttcctcacagcttctcccaagcgccctccagtctcaccaacccttctgcggttctgcccttggcgccgcgcccatgagcctcaccgaggcgccgtccccgtccccgtcgtcgtcgagcgggagcgatgacttcgcggccttcctcgcctccgagctcgagctcacctccggtgctgactccgccttccctggtgacccctcctccgttttccccgccaccgacgacgagggcgaggacgaggatccggaggagctagaggttgaagccatagaacaaaacggtaccaaaaggcgtagagtagaggaacaatgccaagatcaaggaacatcagttaggcctgacaaaatccccactggcgcatctaaaattgttcaggttgaggcatgtccacatcctggacattttggtggactttgcattatctgtggcaagccacaagacgaggaagatgtttcaggagttgcttttggttacatccacaagggcttgaggctaggtacctcagaaattgacagactacgtggtgctgatttgaagaatctgttgcgtgaaagaaaattagtactcattttggacctggatcacacattgatcaactccaccaaactccaagacatttcttctgccgaaaaagatttgggtattcagtctgctgcttcaaaagatgatccaaatagaagcatcttcgcactagatttaatgccgatgctcacaaagttgagaccatttgtccgagaatttctgaaagaagcaagcaatatgtttgagatgtatatatacacgatgggtgacaaagcctatgcaattgaaattgcaaagcttcttgaccctagtaacatatattttccttcaaaagtgatttcaaactcagattgcactcagcgacatcagaaaggtcttgatgtgattcttggagctgaaagtgttgcagtgattcttgatgacactgagtatgtatggcagaagcataaagagaacctgattctgatggagagatatcatttctttgcttcaagctgccgccaatttggttttggtgttaggtctttgtcagaatcgttgcaagatgaaagggagagtgatggtgctttggctaccgttttagatgtcttgaagcgcatacacgctactttctttgacatggctgctgaaactgatctttcttcacgggatataagacaggtgatcaagacgttacggaaggaaatactgcaaggatgcaaaatagtcttcagtcgggtgttcccaaacaatacacgcccacaggagcagatggtctggaagatggccgagtatctgggtgccgtttgcgttaaagatgtggatcccagtgtcacccatgttgtaactgtggatctgggaacagagaaggcccgctggggtcttaacaacaagaagttcttggtccacccacgctggattgaagcagcaaatttccggtggcataggcaaccggaggaagattttcctgtcactgcccctaaggaaaagagcaaagagaaagatagtgataatgatgtggctggcaagaaggaaacgagcgaggataaagagaatactgcagctggcatgaaggaaacgaggaacgatgaaggaaatgtaaccggtaaagacaaagctgatgccaaagaaaacgttgtgaccacatctgctacgtgtcctgcagactcgtagtctgtgttgggctccaaaggtatctgacacattgtgtaggcgtgcaggtttggtatgggagatgaaaattcagcttttcttatccgttcgtgcaggctttagatctgtccataaaaaaaagacgttacatctgctccattgcaaattttgctgctgacctgaagctgattgggcctccggccatataacttacgctacgatgaaactataggagttgaagcaaactgatgtctttatgggacaatttttggtgaatccgtgcgactatgtgcgcagatgtacttaagtttgtgcctgcttcggtaggtactgccccctgatgtaagcattcgtgatcgctagtggaactacgttattctagttgaaaaaaaatgttccacacattaa

SEQ ID NO: 135646 - DNA, 3115 bp, Zea Mays
atgtccgtggccgtggggaagcgggtgctcgatacgggctggctcgccgcgcgctccaccgaggtcgcgctcaccggcgtccagctcaccaccacgcacccgccggcagctgaccccgccccagccgcgccctggatgagcgccgccgtccccggcaccgtgctggggacgctgctcaagaacaagctgatccccgaccccttctacgggctgaacaaccaggccatcatcgacatcgccgacgccgggagggagtactacaccttttggttcttcaccacgttccagtgtgccctgtcaggaaatcagcatgcgactttaaacttccggggaataaactactcagctgaaatgtatttaaatgggcacaaggaggtactaccaaaaggaatgttccgaaggcacaacattgatattactgatatcctccatcctgatggtaacaatctgcttgctgtccttgttcatcctcctgatcaccctggcaaaattcctcctcaggggggccagggtggtgatcatgagattggaaaagatgttgctacacaatatgttgaaggatgggattggatgtgcccaataagggatcgaaatactggtatctgggatgaggtatcaatttccatatctgggcctgtgaatataacagacccccatctggtttcaacttttcatgatgattttaagaggtcatacctacattgtacacttcagttggagaacaaaagttcttggattgcagattgtaccttgaaaatacaagtttcaactgaacttgaagggaacatttgtttggtggaacaccttcaaagttatgcaataacagttcctcctcaatcagatatagagtacaccattccttctttattcttctataagcccaacttgtggtggccaaatggcatgggaaagcaatccttatacaacattgagattagtgtggatgtaaaagggtttggagaatctgattcctggagccattattttggattccgcaagattgagagtacaattgatgattctacgggtgggaggatcttcaaggtaaatggtgaacctatttttatccgaggagggaactggatattgtcagatggccttcttagattaacaaagaagcgatatatgaccgacatcaagttccatgctgacatgaacttcaatatgcttagatgttggggtggtgggctagcagagaggcctgacttttatcatttttgcgatgtctatggtctgatggtatggcaagaattttggataactggagatgttgatggccgaggaattcctgtatctaaccctaatggccctttggatcatgatctctttcttttgtgtgctagagataccgtgaaattactcaggaatcatgctagtctagctttatgggttggtggtaatgagcaagttccaccggttgacattaacaaagcactgaagaatgatttgaagctacatccaatgtttgtaagttaccagacatcaaaaagtgaagtaatatatttatctgaagaatcaactgaccctagtaaataccttgatggtactcgggtgtatgtgcaaggatcaatgtgggatggttttgcgaatggtaaaggggacttcactgatggtccatatgagattcagtatccagagagttttttcaaggacagcttctacaaatatgggttcaaccctgaagttgggtctgtaggggttccagttgccgcaacaattagggccacaatgcctccagtaggatggagcattccgattttaaagaaaagaattgatgggtacatcgaagaagtaccaaatccaatatgggactaccacaagtatattccatactcaaaaccagggaaggtccatgatcagattgaactatatggagccccaaaagacctggatgatttttgtgaaaaggcacagctggtgaactatgttcagtacagagcacttttggaaggatggacttccttcatgtggacaaagtttacaggtgtcctaatttggaagacgcagaatccttggactggactaaggggccaattctatgatcacctccaagaccaaacggctgggttttatggttgccggtgtgctgctcaacctattcatgtccaactgaatttggttacctattttgtagaggtggtaaacactacagctgatgaactcaaagacatggctgtcgagatttcagtgtgggatctagatggtgcatgcccctattacaaagttaccgagaaaatagttataccgccaaagaaagtgaagcaaattatcgagatgaaatacccaaagatgaaagatgccaagcctgtgtattttctgctcctcaagctcttcaggctgtcagacaatggaacaatctccagaaacttctactggttacaccttcctgggcaggactacaaatcgctggagcagtatcagcagaaaaagattccattaaaaattgattctgatgtttcagtctcaggcacgaggcacaaagtaagaatgacagtagagaacatctcaaagaagtccgtagtagacagcacacgttcagtatcagcaatggatctaggtgatgcaagtggttcccacagcactcgcaaagaaactactcggaagggaaacgggagcgacggactgtggaggaaaatacgcagtggcctcggggtcgcaagaccaagcgacaaccgaagaacactggaggtcagcgggaccgattcaggggttgccttcttcctccatttctcagtgcacacctccgaatcatccacggacggggaggaatacaatgacacaagaatcctcccggtccactactcggacaactacttttcgctgacgccgggggagaacatggccgtcgacatctcgttcgaggctccccagggatccagtcccagagttgtcctcagaggctggaaccatcatctggaccacgccgtgatgatctgagatccgtgtaataaaataagcacgtaccgaataaagtgcagacatcagatcgtgttcgtgcctgttgttggattataattaggcttgtcctaattttattttattttattaaataaatcgtacgacctaaattgaattctaggttaaatggcttcaaggtactctatatccttcgtaa

SEQ ID NO: 135647 - DNA, 327 bp, Zea Mays
atgaaggcggagcaggggagggaggcgaccgaccgcgtctcctcgcgggcctccaggccgttctggttcgacggcaggtgggtcttgagcgcctccaggtcctcccgcctttccacgcgctctgaatcggcggtggacacgacgagggaggagctggggatgcgaagcacggtgacgacgctgtacacggtgagcaccagcaggggcacgaggcggcaggcataccggctcctcccgacgccgcccgctctcttgtgcggcggcggcgacggcggcggggacctccggatccacgacgagcagcaggagtgggcggagggcttctga

SEQ ID NO: 135648 - DNA, 2119 bp, Zea Mays
gttccgtgtcgtgtcggaccccaccacaaccctcttctccgtttcgtttcccgaccaggcctcgccggctcaccgcccccgccgcgcccgccatggacttctcggaacaggacgtcgacgtcttcggcgaggactacgacgtccacgacggcggcgccgaggccgaggccgaggccgacggcggcggggactcgtcgggctcctcctccccatcatcgtcctcgtcgtcctctgccgccgcgtcctcctcatcctcaagtggcggctcaagcctcagcagcagcggcggcgctgccggtgagggcgaggatggcgccgatgcgggggacggggaggaatacgattcgtccaacctcatagccacaaggagcgccggcgccgccggctatctggacgatgagaggagggaatatgagaaccaggaggtagaggaggagagagatttgttcggctcagataacgaagagtacgtcagaactccggcgcgcagccactacctagtcccagtgcttcctccaattcggaacactaataatcattctcgaggaggctttggaggacgaggtggtagaggcccaccacttcttccaaggccaggaggccatccagggcgacataactttggttacgggagattcgggaatgggcgtcatgttgaaggtttagtttcagatatgaagcttaataagagcgaagaaacattgtctagaaaagctgttacttttcaggagccttgtgagattgcatgcttaagccgtgttgagggtggagaggtgtattttgatgatcgcagcttgaggctcttcaaacgtgaaatctgtgaataccgcggtgcagatctcaataaaggattcgagtcatatatagagaagagagatttgggttctgaaggatttggcgatctactcgcatgcatacgaaattccaacatacttcttcagaatactatacattttgtgacataccgcaacaatcttaataagatattggccactgcttacctaagagaaccatggaagatgggcgttcataaaagaaggggtgttgtatatcttgatgttcataagctccctgaaagaccaaaaagtgaagttgagcgtaagagatgttattggggctattcttttgaaaaccttgccactgagaactcattcagcgacgatggaaggggtatcgatgcaaatgtagagttttgttctgtaataaagacaaaattgggtgcccatcggattgtcatgggtgctgagatggactgctgtgatgcaactgatgatggcaggaggttctatgtggagctgaaaacaagcagagagctggaataccatacagtggaagcatatgaaaaagaaaagctacttagattttggattcaatcgtttcttgccggtgttccttatgttgttgtgggattcaggaatgatgctggcatacttgtacggacggaaagactaagaaccaaagatattacacaaaaggtgaaggcaaagaactactggcagggtggcgtttgccttgcctttgccgatgaagtcttatgttggttgtatgggactgtcaaagagaatgaagactatgttcttcaatttgtacatccatttaaccgcctcgaacttctgcgtgcccagtccccctgtccggaagccataacgttgcatgtgcagcagctctcaggtgcagcggactagattctagcagtgacctcggcggggactacttgccttggagaaaaacccaattctagcagcagcactgaacaatggttgatctggcaacttactcaaccccaattaccaagcagatgtgctaatgcatcaaagaactgatgagatcgatcactggtctagctacatccatggtttacactcttgaatggccaaagagattttgaatccatcaaacatgtatttccattgtaacattattacataataaacaatacagacagagctactagtgctgtgctactgtaacattattgcatcaaatcctgtaaacttcagcaagggatggatgttcttaaacatccgaattgtcagcctttataagtcataatatgtaagcagaactttttcgtactctagcgttttgaaataataaatttcattaatgacgattagaa

SEQ ID NO: 135649 - DNA, 2978 bp, Zea Mays
atggacttctcggaacaggacgtcgacgtcttcggcgaggactacgacgtccacgacggcggcgccgaggccgaggccgaggccgacggcggcggggactcgtcgggctcctcctccccatcatcgtcctcgtcgtcctctgccgccgcgtcctcctcatcctcaagtggcggctcaagcctcagcagcagcggcggcgctgccggtgagggcgaggatggcgccgatgcgggggacggggaggaatacgattcgtccaacctcatagccacaaggagcgccggcgccgccggctatctggacgatgagaggagggaatatgagaaccaggaggtagaggaggagagagatttgttcggctcagataacgaagagtacgtcagaactccggcgcgcagccactacctagtcccaggtccgcttctcgtcaatcctaaagttggtaccaatgccctaaaatatgtttctagattgaatagtagtagcttctgtgttgccattgaattatctaggaggccgatactgaatcctgccaagtttatccaatggttttatttgcttcctccaattcggaacactaataatcattctcgaggaggctttggaggacgaggtggtagaggcccaccacttcttccaaggccaggaggccatccagggcgacataactttggttacgggagattcgggaatgggcgtcatgttgaaggtttagtttcagatatgaagcttaataagagcgaagaaacattgtctagaaaagctgttacttttcaggagccttgtgagattgcatgcttaagccgtgttgagggtggagaggtgtattttgatgatcgcagcttgaggctcttcaaacgtgaaatctgtgaataccgcggtgcagatctcaataaaggattcgagtcatatatagagaagagagatttgggttctgaaggatttggcgatctactcgcatgcatacgaaattccaacatacttcttcagaatactatacattttgtgacataccgcaacaatcttaataagatattggccactgcttacctaagagaaccatggaagatgggcgttcataaaagaaggggtgttgtatatcttgatgttcataagctccctgaaagaccaaaaagtgaagttgagcgtaagagatgttattggggctattcttttgaaaaccttgccactgagaactcattcagcgacgatggaaggggtatcgatgcaaatgtagagttttgttctgtaataaagacaaaattgggtgcccatcggattgtcatgggtgctgagatggactgctgtgatgcaactgatgatggcaggaggttctatgtggagctgaaaacaagcagagagctggaataccatacagtggaagcatatgaaaaagaaaagctacttagattttggattcaatcgtttcttgccggtgttccttatgttgttgtgggattcaggaatgatgctggcatacttgtacggacggaaagactaagaaccaaagatattacacaaaaggtgaaggcaaagaactactggcagggtggcgtttgccttgcctttgccgatgaagtcttatgttggttgtatgggactgtcaaagagaatgaagactatgttcttcaatttgtacatccatttaaccgcctcgaacttctgcgtgcccagtccccctgtccggaagccataacgttgcatgtgcagcagctctcagatggttttatgctcacaaggcatcgtggattgcaatgtgaacctgctgtaatacgagctttaaaggtcaccttttgtcattgtttgtgtaggcgctgtggaattgttcatgatgagtcccggtcccgctgcctgtcccaagaacatctcgcttctcgcacgggcacagcaggtcaacgctctacacgcctcgacgccttgtccggcctgcaaagctgcagccccgctgcccagccgcctgcctcaaccctctccctctatcttcgtgagccagcggggaaggaaggaagcaacacccagggtaggatgggggtaggcgagtgcaagagcaacgactacggcgccgccgcatactgggacgcccgctactcctccggctcgccagcttccgccgccgccggctgtgggttcttcgactggtaccagacgtacccggcgctgcggccgctcctccgcgcccgcgtcccgacctcctcccgcgtcctgatgctcggctgcggcaactcccttttgtcggaggatatggtgaaggatggttacgaggacattgtaaacatagacatttcatctgtggtcatcgagcaaatgagagagaaacacaaggagattacacagctaacatatatgcagatggatattagagacatgggatttttcggtgatgagtcatttgattgtgtccttgataaagggaccctggatgctatgatgtgtgctgatgatgctcctcatggtgctttcaaaatgctagcagaagtggcaaggcttttgatgcctcatgggatctacttattgataacatatggtgctccaaaggaacgtgtcccacttctggaccagtccggatgcagctggagtattgcactctacatcatgcccacagctggataccaactgagaatgagtaaaggtgctcaacatcttataatggaggaggttacactcacagagggtggccaactgccacctgactatgttctcaaagatccagattcacatttcatttatgtttgtgagaagttggaagagaaagggactaattgcagagatactgatccaaaggaatcaacaaatgcaaattaactcactaccaacttcagatttcattttgattattgctggggaagtttgttgttgcaaaggcatagtcggagctcgtcttttgaatcatgtgttacccttcgtatgaaaaacctggctggcttcgccccgactgggtgtttggtttaaagaacgtgttagtatcttttcacttctca

SEQ ID NO: 135650 - DNA, 2119 bp, Zea Mays
agccggaaccaataaagtgaacgtaaaccaaaatcaatccatccccggtgcagaacgcccaacgggcaacggctgtgctgccaaaagtccggaccacagctcgcgctgcccgccgcgccttgcccagacgtgcgctcccttctcccgcgccgtcgcctctgccctggccgacccgctgggcccagtgtgcgcagccctcccgggttaaggcggaggtgcttggggacccgctcccatggcgagcgccggcatcagcggcagcggggacgacgatgcaggagggaagctcttggcggatcgctaccagaagggcgaggtcctcggcgagggcacgtacggagtcgtcttcaaggccatcgacaccaagactggaaatacagtcgcggtaaagagaatctgggtagggaaggacaagaaggaaggtgttaacttcaccgcattgagggaaattaaactacttaaggagctgaaaggtcctaatattatagagctgattgattgtttcccttacaaggaaaatttgcaccttgtatttgagtttatggaaactgatctggaagctctcataaaagataagaacataatactgtctccagctgacacaaaatcatatctccagatgctgttaaaaggtctatcgttctgtcataagaaatgggtgatacacagggatatgaagccaaataatttactcattggtgccgatgggcagctcaagcttgctgactttggtctggcccggatgtttgggagtccaagaaggaacttcactcaccaggtctttgcacgttggtaccgggcaccagaattattatttggttcgaagcactatggatctggggtggatatttgggccgctgggtgtatttttgctgaactgcttactcgcagagcctttctccagggttctagtgacattgatcaacttgggaagattttcgcagcacttgggaccccaaaatcttctcaatggcctgacatggtgtatcttcctgattatgttgaataccaatatgttgctgcaccaccgctacgtacattgcttccgatggccagcgatgatgctttggatcttttgtcaagaatgcttacgtatgatccgaaagcaagaatcagtgctcagcaggctctagagcacaggtacttttcatcgttacctgctccaacaagaccatcacagcttctaaggtcacggtggaaaggagatcaagggaataacaagatgcccgatctgaacctgcagcatggccctctggtgctctctccgccaagaaagttacgtagggtgatagcgcatgaatggatggaaggtatgcacagagcagataaagtggacgagcatccttctgggatgaggcacaccgatgacatgcccagtcagaagagttctagaattccaatgtcagttgatgttggagctttgtttggcacacgacctgcacctaggccaacattgaacagtgcggacaagtctcgtttaaaacggaaacttgatatggatccagagtttggatttgcggagtaaaagaaactttgttaacgtgcaccattcttttcttactgagatgttggtttcgaaaatattctttgggagatatttccacagttcactcagagaagaggattgcattgaagccacaaaactgcaccgaaggattctgacacgatcaactgggctgttaccgtcatcggctcacgaagaggaaaactaaggagaggtcattctgatttatcctgagtcgcatggggtattatagctaaccgattccgtaaagaaggctcttagaaacagcatgctctatgccatgcgagtggagagtgttatgtggaattgggggcatagaaacgctcgctccagttagaaatgtgtgtttgtgctaaatgtgatctactagtcctccattctccgtggtttcaatttccttcaattcttgtacggacacttagctttgagcattcttcactcagccactctacgtatagtgatttttattgtaactaagagcagtgattttattgtaactaagggcagtgattttattgtaactaagagcaattgttgtgttctcgaaccaacattcaaaactgaataacacgatatcagcgcaatgtggacgat

SEQ ID NO: 135651 - DNA, 1095 bp, Zea Mays
agcatcagcaaaaacccgcaccggaagacagaaaaccacaatacaaggcacgcaacgaatccggtccgaaattccccaaatccccacgccggccgcgtcatgctccggccattcctctcccgtcaccgctctgccgccgccgcccgtgccgccaccgcagcagccgcgggcgccgcggttatgcgacccgcgtcctcctcccgctcctctgccggtggaggcgggggccaccaccactatcacaatcacagcggcggccacaacgtctccgtctcgccgccgacgtgtacgacgtgcaggcacgctccatcgtcggccacgctcgatctcctcatcctgctgctcgtgctcttctcgctcgccttcctgctcgcctcctcactctcgcacgtcgcgcgctcgctctccccgctgctcgccacgccacccgccgtcgccgcgctcgcccacgccaccgccgcgctgccctacttggccgcggcggccgtgctcgccgccaccgcgttcctttcttgcagccggctcccgcggcgccggtgccgcaacccgcgctgccgtggcctgcggaaggcgctggagttcgacgtccagttgcagaccgaggatgccgtgcgcgcttgtgccgggagcaccgttggcggcgccgacgcatccatgtggcgcgagatcgaggcgctgccgtggaagggcggccagggcggaaacaacccagactacgagtgccttcgcgccgagctgcgccggatggcaccgccaaacggccgagccgtgctgctcttccgcagccggtgtggttgccctgttgctaagcttgaaggatggggcgcccccaagaccaagcggcgcaacaagaagggcacgcaaggttcgttcaatgaccgaggggtgaggtgaacacaagtctgatctcgccagttgcaacaatgttgctttagactgccatgttaaataattctccgagcaaaagatacacccattacaatttacaagtgggttgccccatgattgtattgttagacgggagttcggtgaaccccaacagttatactgatacaaagacaaaagacgtaataaaggacaatcaaagcgtaaaca

SEQ ID NO: 135652 - DNA, 1304 bp, Zea Mays
aggattattccgacctttttcatcccacgcccaaacgccaaactccatctccatcacctcgcacttatcggtgaaaccgcgcgatgattacggcggcgcccgcgctgcccatgttcctccggctgtgcccggcctcgcccttcctcctccgccccagcctacacgtccccagctcaaggcgccccactccgtcgcgcctgagctcttttcgccctgcaaggccactcttccccatctcagctgtggagaaaaccaacgaggctgctgcggctggggagggtgagctcgaggggatgccgcccgagttctacgacgaggagtggcaggcccgtcagcgggagaggactaaggagtggcatgcatatcggcagaaagaggaggccgaggaggaaagaataacaaatgagtaccgagagataggcatgcgcctgaaagcttatccgcaagaagaagttcgcaaagctaggattttagtttcaagtttcataagagctggtggagatgttgaggaggaaattgagaaggctgctgaaagaggagagcttactgaacttgtccttatggtcatctggaatcgacttgatattgctcggcgtgatgatgagcgggatgccatcagaagccttgatctcttgtatagaagggtagagacagagattctgaagagtgaagcaactcctgccatgagattgctcaatgatcttcttaatcttcatgatggaggcgacaatgagaagtggttaaagaaatgtagaaagcgcatgcttgaagtctttccaagagaggacccattcactgtggtctttcctgctgggttcaacatggagaatcgtgaagggcgaattgagctaccgcctcaggatgatgatcttcttctgagagtggactttgtcagggaagttgatgagctgctgaaagaggttcgtgctgtggaagacaagaacaagcaacaaattgggtttgacccagaatcagttgcatatatgctgaagcagcaggagaagatgcagacgatgcgtcaggtggaatctctcctggacttggcgtcctccttgaaatggtgaggattgagtactatcgaacaactgaacaactatgctgtttgcttggaagctagacgtcattgacttgacatttatactcaacagttagagggggtatctgttttcagctagttagaccaataaccgttctgggtagagccatgcagtttacttggacatccatgtacatttgtatgtgtagagatatcttactatatatcaatgtatgtctacacttctaatgaaaaaactatctgaccc

SEQ ID NO: 135653 - DNA, 342 bp, Zea Mays
cgtaaaagaaaactcgatcgtaactaaaacattaaaagtagatatgacgctttatttagatcctgaactacaaatctaattgtgagaaaaaatatgtttatattatttacaattgaagccaaaaaagaaaaaataaatgcaatctaactaaatagcctcaaatccacactaatctttgatggaacaaaaacatcatgaagaaaattagtgcacatatagacagcactttaaatggccgagatataaagactacacatgtccccaggaccacttccaaagaggcattagtctagtgtggttttatttacaatcaacatttaagccaacactcacactgcaacg

SEQ ID NO: 135654 - DNA, 2381 bp, Zea Mays
cccccttctccgctccgctccacatatcccgtgctcgtgcggtcgtgcccccactccctggcatagcacgcgatgcccaccgactgctcgacgcaattctccagccgctgatcgcgccgcactctttcccacccgcgcccatcatggcctcctccctccccgcgccgccggcctcgccctcttcctcctggcgcggactcacgccccgctgccctccgcctcgctgcggtcccctcctcgcccgcgcggtagcgcgttcttaccgttaccgcttccgaaccgacgacgacggcgtggtggacgtggccgtcgccgggaaagacggcgatgcggggtatgtggtcgctatcgaggctcctacccatggacagaggggcggtcttgtgctccgccccgccggctccggcgagggcgtccctctggccccagccgcgccgggaggtgccctcgtggctgagttgtcctacgacgtggcccgcgcgccgttccacgtctcgttcacgctggccgacgcgatgggagcggagatacggacacaccgcgggacgagcttccgcgtgcctgttggcgtcggacggggctgcccctcgccgctcggcctgtcccagtccaaggatggggccgctaacttcgcggtttacagcaagatcgccaagggcatggtgctctgcctcttcggtggtggcggcggggacggacccgcgctggagattgagctcgacccgtacgtccaccggaccggcgatgtctggcacgtctcgatggagagcgtggaggggtacgcccgctacggcttccgcagcgggctgttcgcaatgtttggcattgaccgcccgctactcgacccgtacgccaaggtgatcggggacttcgtcgctggcgactctgttgatgaggatgggctagctgtgccatccataaggtgtctcgcgtccttgaagaatgcacccaactacgattggggcagggacaagcacccatgcttgccattggagaagctggtggtctaccgggcaaatgtggctttgttcaccaaggataggtcgagtcggctggcagacaatgccgctggtactttctccggcatgtctgcaaaggtggaacacttcaggcatcttggtgtcaatgcagttttgctggagccagttttcccattccaccaagtgaagggaccatattttccataccattttttttcacctatgagcttgtatagcagtgaatgctccagtgtttcagctatcaagtctatgaaggatatggtcaaaacaatgcacagaaatgggatagaggttctcttggaggttgttttcacgcatactgctgaaggaggggcggagtgtcagatgatatcacttcgaggcatcgatggttcctcgtactacattgctgatggaatcgctggatgcaaggcaagtgtgttgaattgcaaccatccagtgactcagaagctgattttggacagcctccgccattgggtgctcgacttccatgttgatgggttctgcttcatcaatgctcctttcctcgtcagaggtccacgtggtgagggcctctcacggcctccacttctggaagccatagcatttgatcctgttctttcaaagactaagatcattgcagatccttggtctccgcttgacatatctaatgtgcaatttccattccctcattggaaaagatgggctgagatgaacacaagattctctatggatgtgcgcaagtttcttaagggagaagcacttatcagtgatcttgctacacgtttgtgtggcagtggggacttattttcctcaagggccccagcattttcgttcaattatgtatccaggaattctggactcactcttgttgatctagtgagcttcagcagtgatgagcttgcttctgagttcagctggaattgtggtgaagaaggaccatcggagaacaacgcagtccttcaaaccaggctaagacagatacgcaacttcttgtttattctattcatttcccttggtattcctgttcttaacatgggggatgaatgtggaaactcagctgctggttcaacatcatacaaggatagagggcctctgaactggaaagccttgaagaccgcttttgttaaggaagttaccgggtttatttcgtttctatctgcactaaggagtcgacgagcagacattttccagagatgcgagtttctaaaacttgaaaatatacattggtatgggagtgatttatctgagccatgttgggaggatcctactagcaactttctttgcttgcacataaatgcagagctggacgagaagctgccagattcgactggaggtgatttgtatatgtgagatccaacgaggagtcagcgagtgctacttaccagctatgcagaagga

SEQ ID NO: 135655 - DNA, 832 bp, Zea Mays
gttcctggacggctggacctgcttatacggtgcctatgcccacgcatcgggctgtgggaggcgggctctgtttctgactcatcggccgagggcgatggcggcggcggcggggaaggcgcgggcgatgagcctggcggcggctgtgcgtgtggtggcggcgacggcgcggccggcatcgagcgcagccgcggcggcgggtgtgggtgcgatggcgttgatcgtgcagggcgaggacacagccttcgggtcgctggagtggtgggcgtacgcgggcatctccttcttcctcgtgctcttcgccgggatcatgtccgggctcacactggggctcatgtcgctcggcctcgtcgagctggagatcctccaacgcagcggcactgacgccgagaaggctcaggctgctgccatccttccagttgttcaaaagcaacaccagcttcttgtcaccctgttgttgtgtaatgctgctgccatggaggcacttcctatatttcttgacagaatgtttcatcctgttgttgctgtggtattgtcagtgacatttgttcttgcctttggagaggttataccgcaagcaatctgtaccagatatggcctagcagtgggtgctaactttgtatggctcgtacgcattctcatggtcatttgctatccaatttcttaccctattgggaaggtcctggactgtgctcttgggcacaatgagtctgcactttttaggcgagctcagttgaaagctctagtttcaatccatggcaaagaggtaacataaccatatcactctgctttagaagttttcatgttcaaccagggttatgtcacagttagagct

SEQ ID NO: 135656 - DNA, 835 bp, Zea Mays
gttcctggacggctggacctgcttatacggtgcctatgcccacgcatcgggctgtgggaggcgggctctgtttctgactcatcggccgagggcgatggcggcggcggcggggaaggcgcgggcgatgagcctggcggcggctgtgcgtgtggtggcggcgacggcgcggccggcatcgagcgcagccgcggcggcgggtgtgggtgcgatggcgttgatcgtgcagggcgaggacacagccttcgggtcgctggagtggtgggcgtacgcgggcatctccttcttcctcgtgctcttcgccgggatcatgtccgggctcacactggggctcatgtcgctcggcctcgtcgagctggagatcctccaacgcagcggcactgacgccgagaaggctcaggctgctgccatccttccagttgttcaaaagcaacaccagcttcttgtcaccctgttgttgtgtaatgctgctgccatggaggcacttcctatatttcttgacagaatgtttcatcctgttgttgctgtggtattgtcagtgacatttgttcttgcctttggagaggttataccgcaagcaatctgtaccagatatggcctagcagtgggtgctaactttgtatggctcgtacgcattctcatggtcatttgctatccaatttcttaccctattgggaaggtcctggactgtgctcttgggcacaatgagtctgcactttttaggcgagctcagttgaaagctctagtttcaatccatggcaaagaggctggcaagggcggagagcttacccatgatgagactacaatcataagtggagccttggacctgaccgaaaag

SEQ ID NO: 135657 - DNA, 1135 bp, Zea Mays
tattttcatagggaagcgattgggaaaattcttgcccgtggtcatagtcgtgttcctgtatactcaagaaaccctaaaaacatcatcggtctcctattggtgaagagtcttttgactgttcgtgctgaaacggagacgccggttagtgctgtttcaattagaaggattccaagggttccttcagacatgcctttgtatgatatactcaatgagtttcagaaaggaagtagtcatatggctgctgttgtgaaggctaaacctaaaactgaaccaccgcctgacagaactgaaccaaatagggaagcagttgggccagcacaattgactgttaccttgttatctaatgctgaagaaagtgcagacaatgtggttgtggatatcgaaagaccacataacaggcagattaatgggatcccagcatctaacgcagtgcctaggtcatcagaggatattgaggatggtgaggtcgttggaatcatcacacttgaggatgtatttgaagaactcctacaggaggaaattgtggatgagactgatgaatatgttgatgtccataaaaggatccgagtagctgctgctgctgctgcatcatcggttgcaagggctccatccgttaggagattaacgggccaaaaggctgcaaaccttcagggagcacagaatcgccaaggacagcagcctcctggaattctcaagaaacctactgagggtgattcaaactcatcaaaacaagtgaaccttgtcgaacctcttcttgaaaagaggaggtaactctaaaaacgtagccgataaaacgcatggaatcaagccggaagagcctatggttcttgctattataacaagaggtaaatatagatgaactcgttgttgtaaattccaacaggagcttttggtgtcatggacattagtcatgaattctctctccccctctccccttctcccctctttggttatggactgcgaaagtagaatggccactcttgaatttatttatcaccgctcaccgcagtagcaactgcattatatatatgcttcaaatccctagattcctagggtttatagctatgcataaggcctagtttaggaaccctattttttccagggatttttattttctcaagaaaaaataaactaa

SEQ ID NO: 135658 - DNA, 110 bp, Zea Mays
atgttatttttgctccaaaaggccatgctttcatttagtgtttttggcttgttggaaatgggcgaagttgagatgctaactctccttgcttctctcttattaagaccaac

SEQ ID NO: 135659 - DNA, 1220 bp, Zea Mays
acgcacccgccgacgcccgcgcggccacgcactaggcggcaccgcagcgacggtcgacgatcgccacacccggacaccccacacaggcacccagccacgcgagcggcgaaactgcgggagccaatcagaacctacagcgatgcaatgatcgccgtcgcatcgtccttcccctcgcgcgcccacgcggctccgttcggctcggggacactgccaccgccgtctacgcggcgcagcacgtccctccgccacccgcgcgtctcggcgctcggtggaggcctcgaaggagagccggggaagatactggatccgcgcgccacgccgttccagatcctcggcctcgacgccgccgccggctactccgccgccgaactcaaggccgcctttcgcgcccggtgtatctaaacaacttggcgtacctccatgatctcctttaatcatggattgtgaaaccaccatttttgggtgttggttacttcgtgacgaggggaagaagacaccgagtggcacggttaaggaattccatcctgatgtttgcaaggacccagaaaatgcagatttaataatgaggcgagtgatcgaggcctatcagatgttatctggcaaccaagaaatgatgtttgaaaggaacaatgttgacccatttgatgaacctgagtgtgaagctcgtgacatatttgtcaatgaacttctatgcattggcactggatgtccatattcttgtgttaaaagggcacctcatgtattttcattttcagatgatactggtacagctcgtgcaatatctcaaggtaatggagaagatgatcttgttcagctcgctgttgggcagtgtccaagaaagtgcatatactatgtgacgccttgccaacgcactattttggaggatgttcttgctagtgtgttgatggtgccttacgatcttgctgaagcagcagttctggattccctcctttcaaaagcgaagttcgagaataacaggtataagaagccccaaagaggagcaaaatcatcctccgattatgttgattggatgtgatctgatcccgagacacaaagaggatgccagattcagccgaaggcagttcggtagatttatgctggtttgcctattctccttggtcagttgcccgatagtttataaaatggaatacgtttacgtggacagactgctttgtttgtggtatacggttatgatttctataatatttctttctgccaga

SEQ ID NO: 135660 - DNA, 1218 bp, Zea Mays
acgcacccgccgacgcccgcgcggccacgcactaggcggcaccgcagcgacggtcgacgatcgccacacccggacaccccacacaggcacccagccacgcgagcggcgaaactgcgggagccaatcagaacctacagcgatgcaatgatcgccgtcgcatcgtccttcccctcgcgcgcccacgcggctccgttcggctcggggacactgccaccgccgtctacgcggcgcagcacgtccctccgccacccgcgcgtctcggcgctcggtggaggcctcgaaggagagccggggaagatactggatccgcgcgccacgccgttccagatcctcggcctcgacgccgccgccggctactccgccgccgaactcaaggccgcctttcgcgcccgggttaaggaattccatcctgatgtttgcaaggacccagaaaatgcagatttaataatgaggcgagtgatcgaggcctatcagatgttatctggcaaccaagaaatgatgtttgaaaggaacaatgttgacccatttgatgaacctgagtgtgaagctcgtgacatatttgtcaatgaacttctatgcattggcactggatgtccatattcttgtgttaaaagggcacctcatgtattttcattttcagatgatactggtacagctcgtgcaatatctcaaggtaatggagaagatgatcttgttcagctcgctgttgggcagtgtccaagaaagtgcatatactatgtgacgccttgccaacgcactattttggaggatgttcttgctagtgtgttgatggtgccttacgatcttgctgaagcagcagttctggattccctcctttcaaaagcgaagttcgagaataacaggtataagaagccccaaagaggagcaaaatcatcctccgattatgttgattggatgtgatctgatcccgagacacaaagaggatgccagattcagccgaaggcagttcggtagatttatgctggtttgcctattctccttggtcagttgcccgatagtttataaaatggaatacgtttacgtggacagactgctttgtttgtggtatacggttatgatttctataatatttctttctgccagaattttactccgtcttttcttggcataagaaactcctaggattgactgggagcttaataatgttttggtctaaaaactcacaagtataataatgtatagctattccgtgcaata

SEQ ID NO: 135661 - DNA, 849 bp, Zea Mays
aacaatgctgtactccttattttacaagcagaacacattacacataggattgtgttccttcctttgatgcaaccgagctcgttcagtttcctagtttttatagactttatagtctatacattagggacataggccttccatgtagttgttcaccacaaatcgtgtggacatattttgtcaactttatccggcaaattacaactgttgatggctactgcaggatgtccatattcttgtgttaaaagggcacctcatgtattttcattttcagatgatactggtacagctcgtgcaatatctcaaggtaatggagaagatgatcttgttcagctcgctgttgggcagtgtccaagaaagtgcatatactatgtgacgccttgccaacgcactattttggaggatgttcttgctagtgtgttgatggtgccttacgatcttgctgaagcagcagttctggattccctcctttcaaaagcgaagttcgagaataacaggtataagaagccccaaagaggagcaaaatcatcctccgattatgttgattggatgtgatctgatcccgagacacaaagaggatgccagattcagccgaaggcagttcggtagatttatgctggtttgcctattctccttggtcagttgcccgatagtttataaaatggaatacgtttacgtggacagactgctttgtttgtggtatacggttatgatttctataatatttctttctgccagaattttactccgtcttttcttggcataagaaactcctaggattgactgggagcttaataatgttttggtctaaaaactcacaagtataataatgtatagctattccgtgcaata

SEQ ID NO: 135662 - DNA, 769 bp, Zea Mays
cccctccccatcttcccaaaccgccccacgcttcatcctcgcaagcctccccgaccccccagctcaacgagatccggcgagcgaattccctcttccccgaccaccagatcgcagcgatggagccggatcgggtcgccgcgggggcatcctcctcgccgcagccctcaccagcgccggccatgttcctgccggggcaaacgcgagaccatgagcggggagcggtcgactgcgcggatcccggcggagacctgaatcccgcaccgccgccatcgcctcagcaggctacagttgaggatgccgcggtgggcggcgatgtggagcaggaggagccaaagaaggaggcgatggcaggagtaggggaggctctccggagcttcatggaggagtttggggatcaaggagaggactccattatcttgtcaccgcggctgcaggagatttgtactcctgaccgccccactgccctgcgcttcttaggtactggctctccaagaaagttggaatgtcttataatttggaacggagggagtacaagcaactattatacacatgctttgcttaagtcttcaaagtatttttattcgtataattatttgtggttggtctttgtttgtgtgtagggaagaaatataataacctcatggagagatacaagaagcaggtggtcaagtgttctgaggagtgtgaccctagatataacggcttgaagaagaagtacacagacgagtgtgcagagaggcggcgtctgtacaatgagcttattgagcta

SEQ ID NO: 135663 - DNA, 2877 bp, Zea Mays
cccctccccatcttcccaaaccgccccacgcttcatcctcgcaagcctccccgaccccccagctcaacgagatccggcgagcgaattccctcttccccgaccaccagatcgcagcgatggagccggatcgggtcgccgcgggggcatcctcctcgccgcagccctcaccagcgccggccatgttcctgccggggcaaacgcgagaccatgagcggggagcggtcgactgcgcggatcccggcggagacctgaatcccgcaccgccgccatcgcctcagcaggctacagttgaggatgccgcggtgggcggcgatgtggagcaggaggagccaaagaaggaggcgatggcaggagtaggggaggctctccggagcttcatggaggagtttggggatcaaggagaggactccattatcttgtcaccgcggctgcaggagatttgtactcctgaccgccccactgccctgcgcttcttagggaagaaatataataacctcatggagagatacaagaagcaggtggtcaagtgttctgaggagtgtgaccctagatataacggcttgaagaagaagtacacagacgagtgtgcagagaggcggcgtctgtacaatgagcttattgagctaagaggtaacattagggtgttctgcagatgcagacctctgagctccaatgagctcgcccgtgggtgttcatcagtagttgagattgactcatcacaggagactgagctgcagtttgtccccaatgaaaaagaaaggaagccctttaagttcgaccatgtttttggcccagaggatgaccaagaggccgtgttttcagaaacagtgcccgttgttgggtcagtgatggatggtttcaacgtatgcatctttgcatatgggcaaacaggaaccgggaaaactttcacaatggaaggggttccagaaaataggggtgtaaattatagggctttggaagaattgttcagaatctcagagaaaagaagtgcatctgttgcatacacattttccgtaagcatcttggaagtttacaatgaaaagatcagggatcttcttgatgagagcaatgatcaatcaaaaaggttggatattaagcaaaatgctgatggaacacaagaagttcatggtttggttgaggctccaatttataacatagatggtgtgtgggagaaactgaagtttggcgctcaaaataggtctgttggctcaaccaatgctaatgaactcagcagccgctcccacagtttggttagggtcactgttaggagcgagcacttggtgacttatcagaggagcagaagccacatgtggttggttgaccttgctggaagtgagagaatagctaaaactggggtagaaggagataggctgaaagaatcacagttcatcaacaaatcactatctgccttgggtgatgttatatctgcccttgcctcaaaaaattcccatattccatacaggaattccaagctgactcatttgctccaaagctctttaggcggagattgcaagactctaatgttcgtgcagataagcccaagctcaatggattcaggagaaactctcagttcactcaattttgcgagtagagtccgagctgtagaacatggccctgctgctcgtaagcaagcggatccagctgggagtttgaagttaaagcagatgactgaaaaacttcagcatgaggaaaaggagaatgcacagctgaatcaaagcttgcagctgatgcaactgaagtatgcttctcgtgagaatgtcttcaggacactaaatgaaaaggtgaaggatgctgaacaagcatgcagaaattatcagcagcggattagagagctggaaaatgaattaggcaatgagaagagggcttctagggattctgctagatcctcaaggcccccacttgttcctacgagacagagacaacctcagggaaggactaacagcttcgcaccaccttcaggcccttctagatggaggctcaaagcccccgcaaaacacaacaaagagaacattcctgtggcgatgaataaaccaaatgctggggatgatcctaataagcctgtcggcagagcaaggcgtgtttcacttgctccggtgattcgacaaatccccatccagcccaagaggcgatcttcgatggcagtgctaccatccgtgagagagcatctttctgtgctaaacgacaagaaagcaggatctcgactgtcgcaagccaacatggcaagaggatcacttggggcatttggcttgaatttggttccaggaacacccctagcaggacatggtggacctgttgatgctacaccagatggagcaaagttcaggagatttgatttcggaagcagcagcaagttcacaagccctgccccaaatgtgggcatgtggaacaaaatggtcacgccgcagcagaagctgggaatggcaccggcaggagcgaagctgtgtttcagcatccagaaaagagttacgcctccacatgttcgggcgaaacctggattgggcatcttcgacccagctctgcgtgagaatatggtcgtggggagagccggcaatgcgctgcgggtgctcaaccccaagcgaaggcaatctgttatctaactcttgaagccaaaggtacagcagatgtttggacgttcaaacggagcgtgtggttcttagtgaaaccgtgaagatgttcttttcagcatctttaaatggattctgcttggttgttactagttgataggaaagctatgttaatactgttaatggaagttgttaattgtatttgttcgttactaagaatcgcttcaactgttgagcaattttaggacttgtttggtagagtcccgcttcacaattctctaatagagtgattctgattgattctctaccgaaa

SEQ ID NO: 135664 - DNA, 2015 bp, Zea Mays
ccctgttccattaccacgccgcgtcccgtccctctgcgtgcactccagccgcagggaaaaggaaaacggtgcagcagctcgccagctctaaccgctacggtgcagtagattgggcgcgagcttcagcttctactctacgctacgctagcgctagtccccttgtgcaccagcacaccttgtagcaagctagtagtatatctgtagtacgcagtacgctcttcgccttccttatctgtctgtccacacgctgcgtcttcattcactgccctgtcctggctacgtacccggccggccatcgttcgtcgtcgaaaggctggattggaatgaaggacgccttctccccgccttcgccgccgccggcaccggcaccggcaccggccccagactccgcggaggacctcgcggacgcgcggctcgcgccgtggacgttctccccgtggccggcgccgcgccgggaccacgccagcggcggcggcagcggcagcggccggccgaacccgctcttcaccatactgccggtctcggctctggccatcggcctcgtgctgctcgtcgccgtggccgtcatcctgctggcggtgacccggcgcgcgaggccgcccaaggcggacggcgccagcggcagctgcaacggcgacagcggcaagccgggcgcgccgacgtccagctgcggcagccatgtcaccagcaggtgcggcggctacgccgccgccggcacagggtgcatatacgccggccggctggggttctcggcgcagccgcggagccgcggcgcgcaggtgttcacgtaccgcgagctggagcgcgcgacggactggttcagcgagtgcaacgtggtggggcggggcgcctccggcgcggtcttccgcggccggctcgccgacggcaccaccgccgccatcaagcggctgcggctggaccagcggcggcagggagagcgcgagttccgcatcgaggtggacctgctgagcaggatggactcgccgtacctggtggggctgctgggctactgcgccgaccagagccaccggctgctggtgttcgagtacatggccaacggcagcctcaagagccgcctccaccacccggcgcccgccgcagccgcagccgcgggcccgccgccgccgccgccgctggactggcagacgcggctgggcatcgcgctggactgcgcgcgcgcgctcgagttcctgcacgagcacagcagccccgccgtgatccaccgcgacttcaactgcagcaacgtcctgctggaccataactaccgcgcccgcgtgtccgacttcggcatggccaaggtcggctccaacaggacagacggccaggtcgtcacccgcgtgctcggcaccacaggctacctcgcgccagagtacgcgtcgactgggaagctgacgaccaagtcggacgtgtacagctacggggtcgtgctactggagctgctcaccggccgggtaccggtggacacgcagcggccgcccggagagcatgtcctggtttcctgggcccttccgcgacttacgaaccgccagaaactcgtgcagatggttgaccctgccctgaaaggccagtttgccctcaaggatctgatccaggtggccgccatcgcggcgatgtgcgtgcagacgaaggcggagtacaggccgctgatgacggacgtggtgcagtcgctgatccccatcgccaagaccaccccggcgatgtcctgctcctccacgccgctcagaccggccctgcagcacgtcatcttcatgggcccgcagtgcggcgacgacaaggcatcctcctagccctagtcctgccatggaggtaccctacccaccactgcctggatcggagcgtggtggagtcggtggccatcgactatagcgcgcgctaagaattctcgttccttgatgtatagagctcctcccctcttctccaggatctgcagacgcaacgcatcgttgcagtagtgcatcgtgattgtattcgggcacaagcgtacggcgtgtcatttattggtacggactgtttta

SEQ ID NO: 135665 - DNA, 1429 bp, Zea Mays
gagggcggcggcgaggggaggcggatagcggtgaccgctgcggcggtaaggggtgaacagtaccccctatagcgtgcacagtgataggggagggggtgcgaaggggggagcgctgcagatagtctcaagtccgcttcctgtgctggtccgccgtcgctctctgttcgccgtccgccgtgccgtccatccgccccgctccacgcagcttgggaataacggatcgccgctcgctatccctcgacctcggtagaaagttccaaacgaccacgacgtcctcttggtctcccgctgtcatcagtccgcaattccgcatttctattgtcctttttccgtcgcatccgtttcgtctctttgctcgcatctggcctcaagcccctcaggcctcagctcaccaccacgaaccaaccgacagaaagagggacgaatggcgagctctcagtgctgcgataacccgccggccctgaacccggcctgcggggagggcaaggtcgtcgacagcttcggcgggctcaaggcctacgtcgccggccccgaggactccaaggccgccgtcgtcctcgtcgccgacgtcttcggattcgaagcgccgattatgaggaagatagccgacaaggttgcttcgtcagggtactttgttgtggtaccagatttgtttcatggggatccttatgcacctgagaatgttgagaagccctttcctgtgtggataaagtcacatactccggaaaaagggtttgaagagacaaaacaagttattggggctctaaaggagaagggagtgtctgctgttggagctgcagggtattgctggggtgcaaaggttgttgtggagttggcaaaagctcatgagatccaggctgctgtgctgttgcacccttcttttgttaccgttgacgatatcaaagaggtcaagtgcgcaatttctatcctcggagctgagattgacaaaatgtccccaccggagctaatcaagcagttcgagcaggtcctttctttgaactcaggggttggccacttcgtcaagatcttccctggtgtggcgcatggatggagcgtgagatacaaccacgacgacgcagctgccgtgaagagtgctgaggaagcctttgcggacatgctcgactggttcaacaagaatctgaaataaactctgcaattgcatcctgccttgtaataatgcgtgttccagtgccctgggatcgaatctgctgtgtttgggcttttgcatggtcaggctattcagagttgtcatggacttagggttgtgttagtagattggttgcgctgaatctataataaaaacgaggtaaactaggacaatgatgatgtggccgtgtgtatttaatgtattctgttcacaattatgtttcgtgctctttttttttactccaattctctcctaccattttttttgacctgggatatttga

SEQ ID NO: 135666 - DNA, 1116 bp, Zea Mays
ccctcgacctcggtagaaagttccaaacgaccacgacgtcctcttggtctcccgctgtcatcagtccgcctcagctcaccaccacgaaccaaccgacagaaagagggacgaatggcgagctctcagtgctgcgataacccgccggccctgaacccggcctgcggggagggcaaggtcgtcgacagcttcggcgggctcaaggcctacgtcgccggccccgaggactccaaggccgccgtcgtcctcgtcgccgacgtcttcggattcgaagcgccgattatgaggaagatagccgacaaggttgcttcgtcagggtactttgttgtggtaccagatttgtttcatggggatccttatgcacctgagaatgttgagaagccctttcctgtgtggataaagtcacatactccggaaaaagggtttgaagagacaaaacaagttattggggctctaaaggagaagggagtgtctgctgttggagctgcagggtattgctggggtgcaaaggttgttgtggagttggcaaaagctcatgagatccaggctgctgtgctgttgcacccttcttttgttaccgttgacgatatcaaagaggtcaagtgcgcaatttctatcctcggagctgagattgacaaaatgtccccaccggagctaatcaagcagttcgagcaggtcctttctttgaactcaggggttggccacttcgtcaagatcttccctggtgtggcgcatggatggagcgtgagatacaaccacgacgacgcagctgccgtgaagagtgctgaggaagcctttgcggacatgctcgactggttcaacaagaatctgaaataaactctgcaattgcatcctgccttgtaataatgcgtgttccagtgccctgggatcgaatctgctgtgtttgggcttttgcatggtcaggctattcagagttgtcatggacttagggttgtgttagtagattggttgcgctgaatctataataaaaacgaggtaaactaggacaatgatgatgtggccgtgtgtatttaatgtattctgttcacaattatgtttcgtgctctttttttttactccaattctctcctaccattttttttgacctgggatatttga

SEQ ID NO: 135667 - DNA, 1150 bp, Zea Mays
cgatctataaataccagctacgtgcctcccatatttccgcaccaaaccatcgacgctctcaatctcacacacacttgcaccgtcgttgtgcacgcacatccaacacaatagcgaccacgatcgagaacccatggcgcccaagctccccgtcgtcctcctcgctgcctgcgccgtcctcctggcgctcgctaccccgctgctcgccggcgatcccgacatgctccaggacatctgcgtcgccgactacgaatcgcttgaaggccgtgagtcacccggcccgtagtcgctctaagggtccgttcggttattcaggaatgtactctaggaatgatttcagctggaataattgtataatttgtagtataaattggtaacctggaatagttcttagtcttgttccaggctatccgaacggggcctaattaatgcgtgtcggccatttcacttttgttcatcgttgcgtgcgcactgatttcttgttgctgtaataattggccgctcagcgctgcgggtgaacgggttcccttgcaagcgtgaggcgaacgtgacggcggacgacttcttcttcggcgggctcgccgcggccgccgacgtgtactcgggcaacccgatggggtcggcggcgacggcggcggacgtgtcggtgctcccgggtctcaacaccctgggcgtgtccatggcgcgcacggacttcgcgccgtcgggcggcgtcagcccgccgcacgtgcacccgcgcgccacggagatcctcttcgtcgtggagggcaccctcgaggtgggcttcgtcacctcggcaaaccgcctcttcagccgcgccgtcggcaagggagaggtgttcgtgttcccccgcggcctcgtgcacttccagcgcatcgtcggggcggcgcccgccgtggcgatctcggctttcaacgcccagctgcctggcacgcagacggtcgccggggcactgttcggcgctgcgccggcggtgccgacggacgtgctggcgcgggcgttacagatcgacggtggagcgatcgagtacatcaagtccaagtttgcgcccaactagggcatgtctcgaattgcaaatgctcaggtgatcgaaaagagggtacgaacgaacataactactaaataaagtctcaagtgaacaagtcatttcagg

SEQ ID NO: 135668 - DNA, 776 bp, Zea Mays
gtccaacgcagccaggatgcgacaatgcgaggcaggctgcttcatgcgtgaaaccaatcgtttcttcggcccggcacatgcaagcagccatgggcgagaaagaataggaccgccgccgccgctttgtccctccgttcacaaccttgtcgcacgagtctcttattcggtgagttcttcgcttctcctctcctctcttctctcgctcccccctcccctctctctatcacacacacagttccctctctatggtcagtcccatccggtcctctttctgggcttcaaatctctctttgttgttgcaatcggtattcgatttgctgctggattgcaaccgttgtttggaaaaaaaaacaaatattccccccaaatccatttccttcactgtgtattattttgcaccaaactgtaaatttgtcatctttctctttgtcaaatatgcattataggcttggatttgatctgttgcagcaactggacctgttttgtttaacaaatttaaatatcctgcatggagatagtggaaagggtattatgcagactttggaaagggaaggcgttatcagtgatctattattcagttgttagcttggctctttgggcatgtaagctgaatgtacgggatttttggtacccttgaacaagttgactcctgctgttttttgtcgaacagtggtgcttcttgatctgtaaaccatgttaacttcatctttatgcaatattgtggactaggactagcccctttaactcttcaaataaaaggtctacttgtgatctaa

SEQ ID NO: 135669 - DNA, 1428 bp, Zea Mays
gtccaacgcagccaggatgcgacaatgcgaggcaggctgcttcatgcgtgaaaccaatcgtttcttcggcccggcacatgcaagcagccatgggcgagaaagaataggaccgccgccgccgctttgtccctccgttcacaaccttgtcgcacgagtctcttattcgtgacgaggatgacatcaacatgtgcggcaagggtaccgtctctgcggtgggcgccacaacgtggctgggtgggttcgtgggtttcagtacgcccagcgaaatgcaggacatcgggaggacatgccgttgtgtgcgctgctgttagcttcagaccatgcattgacattcacaagggaaaagttaaacagattgttggctctactcttcgggatttagcaaatgatagcatggaacttgtgacaaactttgaatcagacaaatctcctgcagaatttgctaaattttataaagcagatgaacttctaggaggacatgttataatgcttggcgcaaatccttcaagccaggctgctgcactggaggcactacgtgcatatcctggtggtttgcaagttggaggtgggataaatttggagaatgcaatgtcttaccttaatgaaggggccagtcatgtgatagtgacctcttatgtgtttagtgatggcaagatgaacactgaaaggttaagaaaacttgtcgagctggttgggaaacagaggctcgtgctggacctcagttgtcgaaaaaaggatggccgatataccattgtaactgacaggtggcaaaagttcagtgatgtgtttgtggatgaaccaacattagaatatctcgctgcctttgcagatgagtttttggttcatggtgttgatgtggagggcaaaaggttaggaattgatgaggaacttgtggaactattggggcactattcaccaatcccagtcacttatgctgggggtgtgtcaacaatggacgacctagagaggataaagaaagcaggcaaaagtcgggtagatgtaacaattgggagtgctctagatatatttggaggagatttgccttacaaagatgttgtcctttggcacaggaagcaaagtatggttggtcaagtgtgaagaaacacaagatcctctatctcatctcctatttcaaactattttgcgtcccctattttacactacactggagacagtcttcagtgatgtaattcaaatctgaggagcatgacttgtttgggtttggacaccagggttggcgctaactcaaaaggtggtcaatttgtgagtaatgtactgttcttgacagtttctgacctcgatttgtctattgtaactgaataggctgaattgatgctgatagatacattttgcctgctacaacactgacattctgatttttaagttcctcgtttgagaaaataataatattgatgcaaattttggctc

SEQ ID NO: 135670 - DNA, 1530 bp, Zea Mays
gtccaacgcagccaggatgcgacaatgcgaggcaggctgcttcatgcgtgaaaccaatcgtttcttcggcccggcacatgcaagcagccatgggcgagaaagaataggaccgccgccgccgctttgtccctccgttcacaaccttgtcgcacgagtctcttattcgtgacgaggatgacatcaacatgtgcggcaagggtaccgtctctgcggtgggcgccacaacgtggctgggtgggttcgtgggtttcagtacgcccagcgaaatgcaggacatcgggaggacatgccgttgtgtgcgctgctgttagcttcagaccatgcattgacattcacaagggaaaagttaaacagattgttggctctactcttcgggatttagcaaatgatagcatggaacttgtgacaaactttgaatcagacaaatctcctgcagaatttgctaaattttataaagcagatgaacttctaggaggacatgttataatgcttggcgcaaatccttcaagccaggctgctgcactggaggcactacgtgcatatcctggtggtttgcaagttggaggtgggataaatttggagaatgcaatgtcttaccttaatgaaggggccagtcatgtgatagtgacctcttatgtgtttagtgatggcaagatgaacactgaaaggttaagaaaacttgtcgagctggttgggaaacagaggctcgtgctggacctcagttgtcgaaaaaaggatggccgatataccattgtaactgacaggtggcaaaagttcagtgatgtgtttgtggatgaaccaacattagaatatctcgctgcctttgcagatgagtttttggttcatggtgttgatgtggagggcaaaaggttaggaattgatgaggaacttgtggaactattggggcactattcaccaatcccagtcacttatgctgggggtgtgtcaacaatggacgacctagagaggataaagaaagcaggcaaaagtcgggtagatgtaacaattgggagtgctctagatatatttggaggagatttgccttacaaagatgttgtcctttggcacaggaagcaaagtatggttggtcaagtgtgaagaaacacaaggtattgatcagtattaccagttcatttgattcaagcttctgcacaaagtatattttctgaacatttttgttcaaataattcagttaggctatctccaacagatcctctatctcatctcctatttcaaactattttgcgtcccctattttacactacactggagacagtcttcagtgatgtaattcaaatctgaggagcatgacttgtttgggtttggacaccagggttggcgctaactcaaaaggtggtcaatttgtgagtaatgtactgttcttgacagtttctgacctcgatttgtctattgtaactgaataggctgaattgatgctgatagatacattttgcctgctacaacactgacattctgatttttaagttcctcgtttgagaaaataataatattgatgcaaattttggctct

SEQ ID NO: 135671 - DNA, 1619 bp, Zea Mays
gtccaacgcagccaggatgcgacaatgcgaggcaggctgcttcatgcgtgaaaccaatcgtttcttcggcccggcacatgcaagcagccatgggcgagaaagaataggaccgccgccgccgctttgtccctccgttcacaaccttgtcgcacgagtctcttattcgcaatgttgccaccaccgccatgccattgccgccacagccagtccgtcgctcttgccctatcctgttagccgtcaacgacacctgtggtgtgacgaggatgacatcaacatgtgcggcaagggtaccgtctctgcggtgggcgccacaacgtggctgggtgggttcgtgggtttcagtacgcccagcgaaatgcaggacatcgggaggacatgccgttgtgtgcgctgctgttagcttcagaccatgcattgacattcacaagggaaaagttaaacagattgttggctctactcttcgggatttagcaaatgatagcatggaacttgtgacaaactttgaatcagacaaatctcctgcagaatttgctaaattttataaagcagatgaacttctaggaggacatgttataatgcttggcgcaaatccttcaagccaggctgctgcactggaggcactacgtgcatatcctggtggtttgcaagttggaggtgggataaatttggagaatgcaatgtcttaccttaatgaaggggccagtcatgtgatagtgacctcttatgtgtttagtgatggcaagatgaacactgaaaggttaagaaaacttgtcgagctggttgggaaacagaggctcgtgctggacctcagttgtcgaaaaaaggatggccgatataccattgtaactgacaggtggcaaaagttcagtgatgtgtttgtggatgaaccaacattagaatatctcgctgcctttgcagatgagtttttggttcatggtgttgatgtggagggcaaaaggttaggaattgatgaggaacttgtggaactattggggcactattcaccaatcccagtcacttatgctgggggtgtgtcaacaatggacgacctagagaggataaagaaagcaggcaaaagtcgggtagatgtaacaattgggagtgctctagatatatttggaggagatttgccttacaaagatgttgtcctttggcacaggaagcaaagtatggttggtcaagtgtgaagaaacacaaggtattgatcagtattaccagttcatttgattcaagcttctgcacaaagtatattttctgaacatttttgttcaaataattcagttaggctatctccaacagatcctctatctcatctcctatttcaaactattttgcgtcccctattttacactacactggagacagtcttcagtgatgtaattcaaatctgaggagcatgacttgtttgggtttggacaccagggttggcgctaactcaaaaggtggtcaatttgtgagtaatgtactgttcttgacagtttctgacctcgatttgtctattgtaactgaataggctgaattgatgctgatagatacattttgcctgctacaacactgacattctgatttttaagttcctcgtttgagaaaataataatattgatgcaaattttggctct

SEQ ID NO: 135672 - DNA, 1699 bp, Zea Mays
gtccaacgcagccaggatgcgacaatgcgaggcaggctgcttcatgcgtgaaaccaatcgtttcttcggcccggcacatgcaagcagccatgggcgagaaagaataggaccgccgccgccgctttgtccctccgttcacaaccttgtcgcacgagtctcttattcggttttggccataactacatcacacatcacaccacatgagccggaaagtcattgaaaccctcttattaaaaaaaactgaagcaatgttgccaccaccgccatgccattgccgccacagccagtccgtcgctcttgccctatcctgttagccgtcaacgacacctgtggtgtgacgaggatgacatcaacatgtgcggcaagggtaccgtctctgcggtgggcgccacaacgtggctgggtgggttcgtgggtttcagtacgcccagcgaaatgcaggacatcgggaggacatgccgttgtgtgcgctgctgttagcttcagaccatgcattgacattcacaagggaaaagttaaacagattgttggctctactcttcgggatttagcaaatgatagcatggaacttgtgacaaactttgaatcagacaaatctcctgcagaatttgctaaattttataaagcagatgaacttctaggaggacatgttataatgcttggcgcaaatccttcaagccaggctgctgcactggaggcactacgtgcatatcctggtggtttgcaagttggaggtgggataaatttggagaatgcaatgtcttaccttaatgaaggggccagtcatgtgatagtgacctcttatgtgtttagtgatggcaagatgaacactgaaaggttaagaaaacttgtcgagctggttgggaaacagaggctcgtgctggacctcagttgtcgaaaaaaggatggccgatataccattgtaactgacaggtggcaaaagttcagtgatgtgtttgtggatgaaccaacattagaatatctcgctgcctttgcagatgagtttttggttcatggtgttgatgtggagggcaaaaggttaggaattgatgaggaacttgtggaactattggggcactattcaccaatcccagtcacttatgctgggggtgtgtcaacaatggacgacctagagaggataaagaaagcaggcaaaagtcgggtagatgtaacaattgggagtgctctagatatatttggaggagatttgccttacaaagatgttgtcctttggcacaggaagcaaagtatggttggtcaagtgtgaagaaacacaaggtattgatcagtattaccagttcatttgattcaagcttctgcacaaagtatattttctgaacatttttgttcaaataattcagttaggctatctccaacagatcctctatctcatctcctatttcaaactattttgcgtcccctattttacactacactggagacagtcttcagtgatgtaattcaaatctgaggagcatgacttgtttgggtttggacaccagggttggcgctaactcaaaaggtggtcaatttgtgagtaatgtactgttcttgacagtttctgacctcgatttgtctattgtaactgaataggctgaattgatgctgatagatacattttgcctgctacaacactgacattctgatttttaagttcctcgtttgagaaaataataatattgatgcaaattttggctct

SEQ ID NO: 135673 - DNA, 1152 bp, Zea Mays
atgcgtttctctgcgctgctcctcatcgtggcgctgctctgcctcggcggcggcggtggcggccgcgtgacggcgtccaccgaattcaacttcccggcggtgttcaacttcggggactccaactccgacaccggcgggcgcgtggccgccggcttcgagtccatcttcccgccctacggctccagcttcttcggcgggcccgccggccgcttctgcgacggccgcctcgtcatcgacttcctcatggaggcaatggatatgccactcctcaacgcgtacctggattctctaggcacgccaagctttcggaccggcgttaattttgctcaagctggatgttcgatcacaccagcaaagccgacatcagtcagcccattctcatttggtctccagatcaagcagttcttcgccttcaagaacaaagtcactaagctcctgtctgaaggagatatgcacagccgatacattcctcagcaagattacttctcagagggactctacacgttcgatattgggcagaatgaccttgctggtgagttctattcaagaacagaggaccaggtcatcgcatccattccaactattttgctggaatttgagaatggtctcaagaaactgtatgaccaaggtgctaggaagttctggattcacaacacgggccccctcggttgcttgcctcaaaacattgccctcttcggcaaagacccatcccaactggacgagctccactgtgtggcgaagcacaaccgtgccgcaaagcttttcaacttacagctgcacgcactttgcacgaagctgagggcagaattcgatggagccagcatcacttacgtggacatccacacgatcaaatacagcctgatcgccaactactctcgatacgggttcgagcacgccactcaggcgtgctgtggatacggaggcccacccctgaactacgatggtaacgtaccatgtggacacacggtgtctctggatggtaagatggtcaccgcaaaagggtgcagcgacactactgaattcgtcaactgggatgggatacattacacggaagctgcgaatttccatatcgcctcgcagatcctgaccgggaagtattctgatcctccgttcgtggataagatgccgttcgtcataaaacctagattctga

SEQ ID NO: 135674 - DNA, 219 bp, Zea Mays
catctcctttcacaagtctttacaacccttatataaatgcagtaatgggccgttacatactaaccacacttactcactcaacttacggcccaatgggcgactccgacacggcctcccttccctattcacctctgcagccttcggcttcatcttcccccttggcaccaacaggcgtgacatctgcccctcctgcaattcctgcttgaccccaagcagggg

SEQ ID NO: 135675 - DNA, 632 bp, Zea Mays
gactgtacatacgactgacggatgatccctgggtgggcaggcactcgatggagtacccctacggacagtggccggccggccgggcaccggaatccgatgccttctctttccatctgggccgcccgtgcaaagagctccttcgcccacgtaccagctagcaatggtgtgatggctgatgagccagcgcgcgcgagcacgtacacgggacgggactgctactagcaggtatagcagccgggtgctggtatcgcattcgcatcattcagctcatcatcatcatcatgcgtccagttgttgatgcatgactgccacgacgatgcgcagtaagggattggatagatgcaaaagcgaccgagagctccatatatgagtctggcgtagaaatgtcccagggaaaacgacgacatggaacagtccgagtgaccgcggccggcagatgaattctcgcttcccctgtacgacgtctcctggcgacacagctgggtggcaccggccggccattgcttcgctttcttcgtccttcatgtttttacttaccagtcagtaactgtattggtattagtcataggagacattgagattgttattgtcctcgacgatggatccatcgttattgaacagtacgtatgtag

SEQ ID NO: 135676 - DNA, 159 bp, Zea Mays
atgaccacaattgtttgcagtgttgacacgagtgggctcacacaatacatatgtcgcacgtcgatcccgtcctctaacaaccagagcacaggaccgcatttaccatgggggtataccgtgttcgatcaagaggctagttgtcggattgcatgctcctga

SEQ ID NO: 135677 - DNA, 233 bp, Zea Mays
ataactatgttcaaaaatttgttaaacaaacaatgattgcaactgttgtctggtgtaattgcaactgctggtctggtgtgattgcaacttctatataactatgtccaaaaatctgttaaacaaacaatgattgcaactgttgtgtggtgtgattgcaactgctttctagtgtaattgcaactgctggtctggtgtgattccaacttctatataactatgtccaaaaatctgtt

SEQ ID NO: 135678 - DNA, 1607 bp, Zea Mays
cgcgttccccaccgcgctatattgcgtgccgctgatacgagtccacatcgctatcgcgtcccacacgctcacagtcacagcatggcacgccaccctctcgcggctgctgtcctcttcctctgcctgctgtcggtctgccgcgcggccggcgccggcgccggcgccgctggcaaaggcaaaccgagcgccgtgttgctgccggtgagcaaggacggcgccacgcagcagtacgtgacggggttccggcagcgcacgccactggtgccggtgaaggccgtgctggacctggcgggagccacgctctgggtggactgcgaggccgggtacgcgtccgccacatacagccgcgtgccgtgcgggtccagcctctgccgcctctcgcggtcggcggcctgcgccaccagctgctccggcgccccgagcccgtcctgcctcaacgacacctgcggggggttccccgagaacacggtcacgcaggtcagcaccagcggcaacgtcatcaccgacgtgctggcgctgcccaccacgttccgcccggccccgggcccgctcgccacggcgccggcgttcctcttcacctgcggggccacgttcctgacgcagggcctggcggcgggcgccgcggggatggcgtcgctcagccgctcccgcttcgcgctgcccacgcagctcgcctccacgttccgcttctcccggaagttcgcgctctgcctgccgcccgcggccgcggcgggcgtcgtcgtctttggcgacgcgccctacgcgttccagcccggggtggtgctgtccgacacgtcgctcagctacactccgctcctcgtcaacccggtgagcacggcaggcgtgtccaccaggcacgacaagtcggacgagtacttcgtcggcgtcacgggcatcaaggtgaacggccgcgccgtgccgctgaacgccacgctgctggccatcgacaggaagggcgtgggcgggaccaagctcagcacggtggcgccctacaccgtgctgcagtcctccatttacaaggccgtcaccgacgcgttcgcggccgagacggccatgatcccgcgggcgccgcccctggcgccgttcaagctgtgctatgacgggagcaaggtggggagcacgcgcgtgggcccggccgtgcccaccatcgagctggttcttgggaacgaagccacgtcgtgggtggtgttcggggcgaactcgatggtggccaccgagggcggggcgctgtgcctcggcgttgtggacggcggcaaggcgccgcggacgtcggtggtgatcggcgggcacatgatggaggacaacctgctgcagttcgacctggaggcgtcgcggctcgggttcagctcctcgctgctgttcaggcagaccaattgtaacaacttccacctcggctagctgacggtgcaaccagccgtctgagaccaaagaagatgatggtcttggcgattttgacagtcgctgtctcaataaattgttcctctctggtacggtgatatcgtaccaaacaacaatgttcaactctagttttagttttaggcctgcttgcactcgacaaagtggcggataggctgagcaccgacggcccggcacagttgagctcgctt

SEQ ID NO: 135679 - DNA, 2319 bp, Zea Mays
tggaaggactggaggaggggagtagcgtgatagtgatgccgtagtggtcgagctcgcggcggagtagagaccagagagtgagagcgagcagagcaaccaaagcgtaggcgacctcaacgcgaagcggaattgattgcgcccaccaccacgtcttctccccctccgtccgacccgtcctcaagtcaccaggccaccatcattgccgccatcgcgccgcccggccgcgggagcccagctacgcattcataactgtttctctcttggcttctcggcgaagtgttgcggttgcgggtactggagtgcggagagcagcgcggcgcgagggaggaagccaccacccaccaccacctccattaaaggcgctcacgcgccgcctccgcctccgcctccgcctccacgagagagctaggcgagaggggcgtacgagacctcagctgactcctgtcgtcaaggccatcgatctctcccctcacgggggcagccacgtacaaaggcaggcagctcgccaacgcccagcaccctctcgccgcgccaccccacgccgtgcgcctttaaagagagcgcacgacaagcttaaaggttcccacgccgccgctcgcgcttgtcttggcgccgcgacacagctggtcggtgcctttgatccgttccttccttttccagctgcagaggtgacagagtgccgagccgtcgcgcgcgcgaaagcagaggagcggcaatggcagtggccgcgcggctcggcgccgtcgtggcgtgcgtcatcttagcggccgtggcggtggcgccgcggccggtggcggggatcctcgacccggtcgacttcctcgcgctgcaggcggtgcggcggtcgctggacgacatgcccgggtccgcgttcttcgacgggtgggacttcaccgccgacccgtgcgggttccccggtgtgttctgcgacggggaccgggtggtggcgctcgcgcttggcgacccgcgggcggggtctccggggctgacggggaggctggacccagcgctgggccggctgtccgcgctcaccgagctctcgctcgtgcccgggcgcgtcgagggggagctcccggcgtcgctggcgtcgtgctcgaacctccgcttcctggccgtcagcaagaacctcctctccggccagataccggacggcttcagcgcgctgtccaacctgcggacgctcgacgccagcttcaaccagatctccggcaccatcccgccgtccatcgccgcgctgccgtcgatcaccaacctcatcctctgccacaaccagcttaccggcggcgtcccatcgttcccggactcgtccccgctcctgcggctggatctcaagcacaacgcgctctccggcggcgtgcccaccctgccggccgggctgcagtacctgtcgctgtccgcgaacaagctcaccggtacggtcgaccaggtgctgcccgggctgcacgggctcaacttcctcgacctcagcatgaaccagctggagggcccgatcccggcgtcggtgctctcgctgccgctgtccgtactgcagttgcagcgcaacttcttctctgggccggtgcagccgtcgagcgacgtgacgatcccggtggtggacctgagctacaacaggttctggggccagctctcgccgctgctggcgggcgtcgggcagctgtacctgaacaacaaccggttcaccggcgaggtccccgcgcggctggtgcaggagctggtgggctccggcggcctgcaggtgctgtacctgcagcacaacttcctgacgggcatcgcgatatcgccgtcatcgtcgctcccctccaccgtctcgctctgcctgatgtacaactgcatggtgccgccggtgtacgcgccgtgcccgatcaaggccgggtcgcagaacacgcggccggcggaccagtgcccggagtggaggggctgagcctgatgtcggggtgagcttgatcgtgtctcagcaacgccagtgccaatgccggatcgcctccgatcaccggttgggaatagcgggaaagcagaactgaaggtcactgattctttgattgatttgggtatagttacaggcaagtaagtgccttaataatccggatttacaggtgtgtgtttttgtttagttggtgtatgtgcgtttgtgtatctctgtgctgtatagtgagcagtactccctcccggagcttctatcgcactgccgcatgatgacgctgtttgcatctgatgatggatggtgttagtaagaggcagtgaagttattatttatcgaatcatgtcgctgatcaattcaatatatgaccaagcatgcactgtgcttgattttgttcgcaa

SEQ ID NO: 135680 - DNA, 2232 bp, Zea Mays
gactggaggaggggagtagcgtgatagtgatgccgtagtggtcgagctcgcggcggagtagagaccagagagtgagagcgagcagagcaaccaaagcgtaggcgacctcaacgcgaagcggaattgattgcgcccaccaccacgtcttctccccctccgtccgacccgtcctcaagtcaccaggccaccatcattgccgccatcgcgccgcccggccgcgggagcccagctacgcattcataactgtttctctcttggcttctcggcgaagtgttgcggttgcgggtactggagtgcggagagcagcgcggcgcgagggaggaagccaccacccaccaccacctccattaaaggcgctcacgcgccgcctccgcctccgcctccgcctccacgagagagctaggcgagaggggcgtacgagacctcagctgactcctgtcgtcaaggccatcgatctctcccctcacgggggcagccacgtacaaaggcaggcagctcgccaacgcccagcaccctctcgccgcgccaccccacgccgtgcgcctttaaagagagcgcacgacaagcttaaagctgcagaggtgacagagtgccgagccgtcgcgcgcgcgaaagcagaggagcggcaatggcagtggccgcgcggctcggcgccgtcgtggcgtgcgtcatcttagcggccgtggcggtggcgccgcggccggtggcggggatcctcgacccggtcgacttcctcgcgctgcaggcggtgcggcggtcgctggacgacatgcccgggtccgcgttcttcgacgggtgggacttcaccgccgacccgtgcgggttccccggtgtgttctgcgacggggaccgggtggtggcgctcgcgcttggcgacccgcgggcggggtctccggggctgacggggaggctggacccagcgctgggccggctgtccgcgctcaccgagctctcgctcgtgcccgggcgcgtcgagggggagctcccggcgtcgctggcgtcgtgctcgaacctccgcttcctggccgtcagcaagaacctcctctccggccagataccggacggcttcagcgcgctgtccaacctgcggacgctcgacgccagcttcaaccagatctccggcaccatcccgccgtccatcgccgcgctgccgtcgatcaccaacctcatcctctgccacaaccagcttaccggcggcgtcccatcgttcccggactcgtccccgctcctgcggctggatctcaagcacaacgcgctctccggcggcgtgcccaccctgccggccgggctgcagtacctgtcgctgtccgcgaacaagctcaccggtacggtcgaccaggtgctgcccgggctgcacgggctcaacttcctcgacctcagcatgaaccagctggagggcccgatcccggcgtcggtgctctcgctgccgctgtccgtactgcagttgcagcgcaacttcttctctgggccggtgcagccgtcgagcgacgtgacgatcccggtggtggacctgagctacaacaggttctggggccagctctcgccgctgctggcgggcgtcgggcagctgtacctgaacaacaaccggttcaccggcgaggtccccgcgcggctggtgcaggagctggtgggctccggcggcctgcaggtgctgtacctgcagcacaacttcctgacgggcatcgcgatatcgccgtcatcgtcgctcccctccaccgtctcgctctgcctgatgtacaactgcatggtgccgccggtgtacgcgccgtgcccgatcaaggccgggtcgcagaacacgcggccggcggaccagtgcccggagtggaggggctgagcctgatgtcggggtgagcttgatcgtgtctcagcaacgccagtgccaatgccggatcgcctccgatcaccggttgggaatagcgggaaagcagaactgaaggtcactgattctttgattgatttgggtatagttacaggcaagtaagtgccttaataatccggatttacaggtgtgtgtttttgtttagttggtgtatgtgcgtttgtgtatctctgtgctgtatagtgagcagtactccctcccggagcttctatcgcactgccgcatgatgacgctgtttgcatctgatgatggatggtgttagtaagaggcagtgaagttattatttatcgaatcatgtcgctgatcaattcaatatatgaccaagcatgcactgtgcttgattttgttcgcaa

SEQ ID NO: 135681 - DNA, 788 bp, Zea Mays
cccggccgtttcccattccccgcatcgcctctatcgcctgtgccacctcgccgccgtcatgacaacagggtcaacaccgggttcgcccccctctcaaggctctcagagaaaacgaggttctacaaaagattctgttgccttgtacgcagtgcaatgctacaagtgctacaaatggcgtactgttccaaaagaagaattcgagacactccgtgagaacttcaccaaggatccatggttctgcagcagacggccagactgctcctgcgaagacgatgctgacatcgagtacgacagcagccgtatctgggttctggacacgcccaacataccaaagcctccaccagagacggagaggctagtgattatgggcggtgactacaccagaatggacacgtattacgtcatgcccaatgggaagcgtgcgaggtgtgctggtgacgtggacaagtttctggaggcaaatccagcgtacaaaagccgcatatctgcttcggatttcgactttgcaccgcccgaggttgttgaggagactgttgtttctcacaattttctgcctctgcaaggttgccaaggccaagaaacaggagaaggcagagaggcacacaaaataggtgaaagcagagaggcatcgatgctctgaactgtgcctgtgccctgtgctatgtaggtgatagtccgctcaagatcacgtcacgtctcgttcctatctagtacggttgtctatctcggctgaagttaatgtagtaggtcttcttgcgtgttaattcctggggaatatatgagatgtt

SEQ ID NO: 135682 - DNA, 603 bp, Zea Mays
gcaccgtctattcttgggctgtcggcctcacgttttccactgcttccagaggcttcctctcgagtccgcagtctctcttccctacgaagttcagaagttgtcacaatgactcatatccttggccacacattgtttttttttctgttcctgttgttctatcgattcttgtaagggcgggttttgcagttcgttgctcttttatgtcatggtggactcgttgttttttatgttttctgttggaacggcgtgtttcggatgatggttccgtttcgtccttgacctgggctgggctgcacgcggcgaccagagggaacgcgaccggcagagggcgcaggcgcggcggcccgcggccaaggggcgcgacgacgggctcaccccggagcagcggcgggagcgggacgccaaggcgctgcaggagaaggctgccaggaaggcggcgcaggccgcgggaggcgcctgcgccaagggcggcaagaacaccggcaagaagtagccggggtctttactctttagttcgcaggatctgctcgtgttggaagatctgtatttgcctagatctggaatgcaatgcgatttcgtgggcgttgtctcgagcagtgctga

SEQ ID NO: 135683 - DNA, 451 bp, Zea Mays
gtctattcttgggctgtcggcctcacgttttccactgcttccagaggcttcctctcgagtccgcagtctctcttccctacgaagttcagaagttgtcacaatgactcgcggcgaccagagggaacgcgaccggcagagggcgcaggcgcggcggcccgcggccaaggggcgcgacgacgggctcaccccggagcagcggcgggagcgggacgccaaggcgctgcaggagaaggctgccaggaaggcggcgcaggccgcgggaggcgcctgcgccaagggcggcaagaacaccggcaagaagtagccggggtctttactctttagttcgcaggatctgctcgtgttggaagatctgtatttgcctagatctggaatgcaatgcgatttcgtgggcgttgtctcgagcagtgctgaaacaacggttcacagtaaaatttgtagcaaagattta

SEQ ID NO: 135684 - DNA, 333 bp, Zea Mays
atggcgaaccagttcgccgggtttcaggagatgatgaagacgacgcgggatacgttgagcgacctcgaggcttggtgcacgatcacagagacatcgatgatgcagcaatcgaaggagacgacagcgcgcgttcagcaaccggagacaacccggcgcagcgtttcgactccaacctccgcccaggtggatcgatttgaacgccgcgccattgctgtcgcggccgggctgggcatggcctgcacaacgaccaccgggcaggctgctctgctggcgtcggaatcctctgatcctcgccgacacacccggtcacaggtgtataggattcgcccgtag

SEQ ID NO: 135685 - DNA, 2043 bp, Zea Mays
cctccatctctccctcgccccctgtgcccccgcctcacacaccacagcctacagcgcttctgctccagcgcccgcctcgcctcgcctcttctcctcgttctgccgcccgcgcgcgccagcctggtgctcgttccccttcttggctcgtcgagcccagaggttggtggcgtcagggatttgtattggagcggaggagaagggggctttgccccgaggagatcggggacgcgggagggcgcggcgctcgagccgagctcggttcagcgggatcacttggcgtggccggtcctccggggcccatgccgtgagcaaagccaggctttgttgcccgggggagagatcttgcgcttgcaagcggcgcccgcccaccgccatggccggcagcgacgaggtcaaccgcaacgagtgcaagggtgcggtgccgatccacacatgggtgctcatctccaacttcaagttggcgtacaacatgctccggcgggccgacggcaccttcgaccgcgacctcgccgagttcctcgaccgccgggtgccgcccgacgcacgggcccaggagggggtctcctcgtccgaccacgtcatcgacacgtccactggcctggaggtccgcatctaccgcgccgccactaacaacggcggcgcgggcgcggccgcggtcaccctgcccatccttgacttcctcggcggcgggccgtctccggacccgttcccggtgatcctcttcttccacggcggcagcttcgcccactcgtcctccggcacggccatctacgacaacctgtgccggcggttcgtgaagctgagcaagggcgtggtggtgtccgtgaactaccggcgcgcccccgagcaccggtacccgtgcgcctacgacgacggctgggccgcgctgaagtgggccacgtcgcagcccttcctccgcagcggcggggacgggcggccccgcgtgttcctgtcgggcgacagctcgggcggcaacatcgcccaccacgtggccgtccgcgccgccgacgccgggatcaacatatgcggcaacatcctgctgaacgccatgttcggcggcaccgagcgcaccgagtcggagcggcggctggacggcaagtacttcgtcacgctccaggacagggactggtactggaaggcgtacctgcccgaggacgccgaccgggaccatccggcgtgcaacccgttcgggccgaacgggcggcggctcagggggctccccttcaccaagagcctcatcatcgtgtcgggcctggacctcacctgcgatcggcagctggcgtacgccgagggcctccagcaagacggccaccatgtgaaggtcgtgtaccgtgagaaggccaccgtgggtttctacctgctgtccaacacggaccactaccacgaggtcatggaggagatcggcgacttcctcgcggctaacctctagcagcacatgcacacaaacttcacatgttatagcaagaagatgggtggtaagcttgactttatagttgtaccgatctgcatctgctgctgcttggggtggtggtggtgggctttgctgctgataaaactctctatctaggaaagaaaccacagtgactcttttttttttttggtttcgtcgtcgggttgctgatcacaaagctgcttgatgatctgcgtcgtggttgatggagggaagcctataatttcgccgtcaatcatctaacattctgtgtacagtggtggactgatggaccaacaaggaggtggacggccttttttttgttgctgtgtctgatgtagtagtatttctcatctttttatggatcggatgggatggtgcctgcctttcattctatgatgaatcgtactgtctgtctatctatctatctacccaatgccgtcgtggaacatgtttccaatctagtactactactactaggctagatgcagaggcataagaaaatgtgctactacacctctactgctggtgtgtggcttttgtctcttttcttgtccatctctgtatacaatgctgaactgctgctaaatatattgttgtaaccttgaatgcct

SEQ ID NO: 135686 - DNA, 100 bp, Zea Mays
cgccactgcatggcgcatgcactcctatcctgggctgggcccaacacgttggggtcccctggtcagtaaagattttcttctctccatatttcagtttgac

SEQ ID NO: 135687 - DNA, 683 bp, Zea Mays
aggtgcaaaaagttcgtggtcccgtcgtcttgccacgccgtcgcgaaccaacattacaagaaaaaaggcaaagagtgtcggcaaaaaatcacactcttaaacttagtacactcttaaacttactgatactcctttaaagttttcttgtagtgcaagatgctgccggcgagtgcagcaacgccgccacccgcctacgacaggctggataagaaggacgcggaggaggcgccgcacgtccgggcgcagttcctgatccacaaggtgctcaacgatgcaacgccgtcgtcgtcgcgggcggtaaggcctaggagcaggccaccggcgctggtgagagtgaagcaggcaagggtcggcgtccggctgaagaagctcagactcgccatccggggcgtgagggcgcgcgcccgccgcgccgtgcagaggcacctcaggaacctcaggaggctcatcgcgcgtggaggaggacggggatcgtcgtcagtgaggccggcagcggcagggcctcctccctcttgatggcttcgatttctccctgacggcaacgaggcatggagaccgccgtcgtgttgggccggttcgagcaatgcgaccactatgcggtgtggtagtggtctggtgtacaagcattttcgatgcgtataagtatatataacacactgtgtacaaccgtattatacatttca

SEQ ID NO: 135688 - DNA, 2296 bp, Zea Mays
ctggtacaagcccgtcctcccccgcggttttgatcgcctcctcgctttccttcaatccttcttcacctggtctctcacgcaatccgcggggaaccccaaaccctaatcctctccatccgaaccgctggagacagccgtgtgggagctcagttctcggggttctgcatcgatctctgttatctggggttctcagatgggcgatctcaaggaggttttccgctccctcaaagaactcttccctgaggttgatcatcgtatactgaaggctatcgcagttgagcaccgtaaagatgttgattccgcggtggttactgtccttgatgaagtcatgccgtccatgactggttcagctggaactttgtttacccataaagaagtgttgccatctatggatgattctgttgggaatttgtttgctaatcgcagcacacatgaagtgggtagttcatcatgtgcaggacatgagatacatatcgatgagattgatgtaagtgttcaccctgcacaacacacttcttctggggaggctaaaactggcaagcaagaaaacataaacaatgaatgtgtgggaagacttgcatcagtcgaaggggtcagtgagcaactaaatctacattctgatcctataccaaatggcagtcagcatgatttgattcccaaccttgatgtgctatcatcaaataccaatccagagaaaatgttggctaacatatataatgaagttggatatagtggattatcaagtgaatgtttttctcaacaactgactgggaaacatggtggtgatatcatagctccacaatcccatgatcaagatcctaataagatgcttccagttggggattacttttcccagaacagttcaatggagttcttcagtggctatgaggacatgcattttgatggtgaccttttgcctcctggttctaatgataaagtatcttctggaattttgggtactgaaaaagattcttctgtgcctgtgctggatgttcctggtcgaaataaagaagaatcccccgctgggacttctggatttatagaacagaaggacaccagcaatgttacgaatatgcttcctgatcttaatttgtatcatttggcttctacggcttcaactcactcaagccattctgttagtattgagtctcttgaggattctgttgctgatgccagaagcaataagaatgatctgttaccttctttggagttggttacaaaaatgatagaggatgttgagcttcttgaagaaaaggctaaagtagccaaacgtgaatcatctgttgctgggacaggcattctaaccaaagttgaggagctcagagaaatgttaactcatgcgaaggaagcaaatgatatgcatgctggcgaggtttttggcgagaaagctattttaaccacagaggcacgtgagcttcaatctcgacttcagaggctttcagatgagaggaataaatatctggtgataattgaagagatacgacaaactcttgatcaaagattggttgctgcacagcaagaaattgcagcagccgagaaagaaaagcttgaaaaggaggttgctgctcagacactactcaatgaacaggaaaatatgatgaattctattgttgaagaatcgagaaaactgcagaaagaagctgaggagaacctgaagttgaaggaattcctggttgagcggagccaaattgttgatatgctgcaaggcgagatgactgggatctgtgaggatgtttcgttgctcaagcgagtggtggatgagcgcctatcattgagcaagttgcagccctcagctatgtcaagcctctcttcttcactgcattcttctcatcacaagagctggacttcctctgataggaccaccgaagccaatgggtctctagataagcacacccttgctgaacctgcaagcccagcgcgcaaagatctgaatggcgacgagtgcactgtgcaggtgtcagatggcaacgacactggtaaaggcgttttgaagcgtgtggattccaaggacggcgatggatgggagctttgctgaaggtgttcaggaatagcgcggttgcgagtggatgctgaagcatagaaattactataaactagtaataatggtgaataaacgtttactagtgcgttgctaatctagtcgtaatgtgggaactgtgtcgtggaactgactcactagctcaccgcagtagtatgtgggatgggtccaactgcagcttgacgtggtatatataaatgtgaagaattcagctgcccctgctcctgtctaaattttatgttgtttttaattttgttc

SEQ ID NO: 135689 - DNA, 871 bp, Zea Mays
agtccccacccgccccactgtgacactgacaccgttcgaagcaaaaagagcgaacacgagcacgaacacaagcgcagagcagccaagcgccacacacacgccgacgcgaaccaaccaaccagctggtagtaggttcgccgcgctgacgatgatgcctcgccgcgcccttctcttcgccgcggtgctcctcgcggcctccgccgccgcggtctccgggttccacctgggaggggacgagagcggtctcgtgaggggtgtgctcgccgcgctccgcgagcgagccgaggccgaggacgccgctcgcttcgccgtcgcccactacaacaagaaccagggcgccgctttggagtttactagggtgctcaaatccaagcggcaggtggtgaccgggaccctgcatgacctgatactggaggcagctgatgctggaaaaaagagtgtgtacagagcaaaggtttgggtgaagccgtgggaagatttcaagtctgtcgttgagtttcgccttgttggagactctgaatctgaacccgagccttctgttgcttctgatgttagctctgggcaagatattgtacaagaagaggctcgcctgcacaccattgagaatgatgggctttccggcgatttcacatcatcatcttaggattccaggcaaggatggaaagcgtaaaggtttaaaatgaagatttaggtatttagagtatgtcaagctgaaatgctttgccttgtttattggaatatgtatgtttcgtttcaaacgtgggagcatagaactgtatatttcggtatttcacactgttcatttccatgtctgtatataaggaggttcttctggctatatatatattttgatcctcaagtactttttctc

SEQ ID NO: 135690 - DNA, 2043 bp, Zea Mays
agtccccacccgccccactgtgacactgacaccgttcgaagcaaaaagagcgaacacgagcacgaacacaagcgcagagcagccaagcgccacacacacgccgacgcgaaccaaccaaccagctggtagtaggttcgccgcgctgacgatgatgcctcgccgcgcccttctcttcgccgcggtgctcctcgcggcctccgccgccgcggtctccgggttccacctgggaggggacgagagcggtctcgtgaggggtgtgctcgccgcgctccgcgagcgagccgaggccgaggacgccgctcgcttcgccgtcgcccactacaacaagaaccagggcgccgctttggagtttactagggtgctcaaatccaagcggcaggtggtgaccgggaccctgcatgacctgatactggaggcagctgatgctggaaaaaagagtgtgtacagagcaaaggtttgggtgaagccgtgggaagatttcaagtctgtcgttgagtttcgccttgttggagactctgaatctgaacccgagccttctgttgcttctgatgttagctctgggcaagatattgtacaagaagaggctcgcctgcacaccattgagaatgatgggctttccggcgatttcacatcatcatcttaggtatgatttcatctctttttatcttcttgtgcaacgggtgccacttctggtctcttgctatttggttaaccgacctatgatcacacgagccaaggacaggctgccagtgatcccaatgactgtaaccatgatttgtttttatcttgcattggtatcttgtatagtaatggttcagtgcatgatgcaaactaaacaatgtctatatagttgcttttatctttgccatggctattgtgggaactgggaagtatctagtcctgatgtgggaccttatatgttggcatctggaagatggtttttactggatggatactgttagttgaattcgttgggattgctatttgtttttttatggaaaaccaagagtgatactcttcatgtaatcatgtgatgcattcgcactggtgctttgggcccatcaaaccgtgtactatcagtagacagcttgctgttcggattcttaacagaactttgtatgcaggcatacgaagttttgttaagaaactaaatagcaggaagcacacacctatgccagacactcctcgttccacaagacagcatttgcatcatgcagtgcttaacatagccatatctcattcgcagtgtttgtttatcttgtaatactatgtggaaaaacagtggcatagctcaggaatctaggccacaatcaaatccttttcaggaaccaggtgatatccaatgctttgatgaacaatagatgtttatgtgtggtgtgctgcggttgtatcagtcctcagaaaagaacttcccttttttaggaccaactggactcttatctctgtctgtttatttgctttctgatgcatacatcataaattggtatttttaacttgcaacccaagttacttgatattagataactgtcttgtttggtgtattaatgttaatagtctagcaaagaaaaaaaccatctttacttttctcatatgcaacattctgcaaagacaatgtgatataagttttggctcatccctcacttcaaacatacttggtgtgactaggattccaggcaaggatggaaagcgtaaaggtttaaaatgaagatttaggtatttagagtatgtcaagctgaaatgctttgccttgtttattggaatatgtatgtttcgtttcaaacgtgggagcatagaactgtatatttcggtatttcacactgttcatttccatgtctgtatataaggaggttcttctggctatatatatattttgatcctcaagtactttttctctgtcttctgtgtactttagagaatcagtcctgccgcgtctttggttagtgcgtaatatggaatagacgatgacaatatttaaagatctaattgaagaaattattggatgatatttttttcactaaaatctctattctcatttactaggaa

SEQ ID NO: 135691 - DNA, 693 bp, Zea Mays
cccactgtgacactgacaccgttcgaagcaaaaagagcgaacacgagcacgaacacaagcgcagagcagccaagcgccacacacacgccgacgcgaaccaaccaaccagctggtagtaggttcgccgcgctgacgatgatgcctcgccgcgcccttctcttcgccgcggtgctcctcgcggcctccgccgccgcggtctccgggttccacctgggaggggacgagagcggtctcgtgaggggtgtgctcgccgcgctccgcgagcgagccgaggccgaggacgccgctcgcttcgccgtcgcccactacaacaagaaccagggcgccgctttggagtttactagggtgctcaaatccaagcggcaggtggtgaccgggaccctgcatgacctgatactggaggcagctgatgctggaaaaaagagtgtgtacagagcaaaggtttgggtgaagccgtgggaagatttcaagtctgtcgttgagtttcgccttgttggagactctgaatctgaacccgagccttctgttgcttctgatgttagctctgggcaagatattgtacaagaagaggctcgcctgcacaccattgagaatgatgggctttccggcgatttcacatcatcatcttaggtatgatttcatctctttttatcttcttgtgcaacgggtgccacttctggtctcttgctattt

SEQ ID NO: 135692 - DNA, 797 bp, Zea Mays
cccactgtgacactgacaccgttcgaagcaaaaagagcgaacacgagcacgaacacaagcgcagagcagccaagcgccacacacacgccgacgcgaaccaaccaaccagctggtagtaggttcgccgcgctgacgatgatgcctcgccgcgcccttctcttcgccgcggtgctcctcgcggcctccgccgccgcggtctccgggttccacctgggaggggacgagagcggtctcgtgaggggtgtgctcgccgcgctccgcgagcgagccgaggccgaggacgccgctcgcttcgccgtcgcccactacaacaagaaccagggcgccgctttggagtttactagggtgctcaaatccaagcggcaggtggtgaccgggaccctgcatgacctgatactggaggcagctgatgctggaaaaaagagtgtgtacagagcaaaggtttgggtgaagccgtgggaagatttcaagtctgtcgttgagtttcgccttgttggagactctgaatctgaacccgagccttctgttgcttctgatgttagctctgggcaagcaattgccaaactctctcttgaagcagatattgtacaagaagaggctcgcctgcacaccattgagaatgatgggctttccggcgatttcacatcatcatcttaggtatgatttcatctctttttatcttcttgtgcaacgggtgccacttctggtctcttgctatttggttaaccgacctatgatcacacgagccaaggacaggctgccagtgatcccaatgactgtaaccatgatttgttttt

SEQ ID NO: 135693 - DNA, 2000 bp, Zea Mays
cccactgtgacactgacaccgttcgaagcaaaaagagcgaacacgagcacgaacacaagcgcagagcagccaagcgccacacacacgccgacgcgaaccaaccaaccagctggtagtaggttcgccgcgctgacgatgatgcctcgccgcgcccttctcttcgccgcggtgctcctcgcggcctccgccgccgcggtctccgggttccacctgggaggggacgagagcggtctcgtgaggggtgtgctcgccgcgctccgcgagcgagccgaggccgaggacgccgctcgcttcgccgtcgcccactacaacaagaaccagggcgccgctttggagtttactagggtgctcaaatccaagcggcaggtggtgaccgggaccctgcatgacctgatactggaggcagctgatgctggaaaaaagagtgtgtacagagcaaaggtttgggtgaagccgtgggaagatttcaagtctgtcgttgagtttcgccttgttggagactctgaatctgaacccgagccttctgttgcttctgatgttagctctgggcaaggtattgttggtcttcagtgtttggataatatataatgctaattatccaatataatccaacatgataaataaacgtggtgttgattttttccagcaattgccaaactctctcttgaagcagatattgtacaagaagaggctcgcctgcacaccattgagaatgatgggctttccggcgatttcacatcatcatcttaggtatgatttcatctctttttatcttcttgtgcaacgggtgccacttctggtctcttgctatttggttaaccgacctatgatcacacgagccaaggacaggctgccagtgatcccaatgactgtaaccatgatttgtttttatcttgcattggtatcttgtatagtaatggttcagtgcatgatgcaaactaaacaatgtctatatagttgcttttatctttgccatggctattgtgggaactgggaagtatctagtcctgatgtgggaccttatatgttggcatctggaagatggtttttactggatggatactgttagttgaattcgttgggattgctatttgtttttttatggaaaaccaagagtgatactcttcatgtaatcatgtgatgcattcgcactggtgctttgggcccatcaaaccgtgtactatcagtagacagcttgctgttcggattcttaacagaactttgtatgcaggcatacgaagttttgttaagaaactaaatagcaggaagcacacacctatgccagacactcctcgttccacaagacagcatttgcatcatgcagtgcttaacatagccatatctcattcgcagtgtttgtttatcttgtaatactatgtggaaaaacagtggcatagctcaggaatctaggccacaatcaaatccttttcaggaaccaggtgatatccaatgctttgatgaacaatagatgtttatgtgtggtgtgctgcggttgtatcagtcctcagaaaagaacttcccttttttaggaccaactggactcttatctctgtctgtttatttgctttctgatgcatacatcataaattggtatttttaacttgcaacccaagttacttgatattagataactgtcttgtttggtgtattaatgttaatagtctagcaaagaaaaaaaccatctttacttttctcatatgcaacattctgcaaagacaatgtgatataagttttggctcatccctcacttcaaacatacttggtgtgactaggattccaggcaaggatggaaagcgtaaaggtttaaaatgaagatttaggtatttagagtatgtcaagctgaaatgctttgccttgtttattggaatatgtatgtttcgtttcaaacgtgggagcatagaactgtatatttcggtatttcacactgttcatttccatgtctgtatataaggaggttcttctggctatatatatattttgatcctcaagtactttttctc

SEQ ID NO: 135694 - DNA, 885 bp, Zea Mays
cccactgtgacactgacaccgttcgaagcaaaaagagcgaacacgagcacgaacacaagcgcagagcagccaagcgccacacacacgccgacgcgaaccaaccaaccagctggtagtaggttcgccgcgctgacgatgatgcctcgccgcgcccttctcttcgccgcggtgctcctcgcggcctccgccgccgcggtctccgggttccacctgggaggggacgagagcggtctcgtgaggggtgtgctcgccgcgctccgcgagcgagccgaggccgaggacgccgctcgcttcgccgtcgcccactacaacaagaaccagggcgccgctttggagtttactagggtgctcaaatccaagcggcaggtggtgaccgggaccctgcatgacctgatactggaggcagctgatgctggaaaaaagagtgtgtacagagcaaaggtttgggtgaagccgtgggaagatttcaagtctgtcgttgagtttcgccttgttggagactctgaatctgaacccgagccttctgttgcttctgatgttagctctgggcaagcaattgccaaactctctcttgaagcagatattgtacaagaagaggctcgcctgcacaccattgagaatgatgggctttccggcgatttcacatcatcatcttaggattccaggcaaggatggaaagcgtaaaggtttaaaatgaagatttaggtatttagagtatgtcaagctgaaatgctttgccttgtttattggaatatgtatgtttcgtttcaaacgtgggagcatagaactgtatatttcggtatttcacactgttcatttccatgtctgtatataaggaggttcttctggctatatatatattttgatcctcaagtactttttctc

SEQ ID NO: 135695 - DNA, 877 bp, Zea Mays
cccactgtgacactgacaccgttcgaagcaaaaagagcgaacacgagcacgaacacaagcgcagagcagccaagcgccacacacacgccgacgcgaaccaaccaaccagctggtagtaggttcgccgcgctgacgatgatgcctcgccgcgcccttctcttcgccgcggtgctcctcgcggcctccgccgccgcggtctccgggttccacctgggaggggacgagagcggtctcgtgaggggtgtgctcgccgcgctccgcgagcgagccgaggccgaggacgccgctcgcttcgccgtcgcccactacaacaagaaccagggcgccgctttggagtttactagggtgctcaaatccaagcggcaggtggtgaccgggaccctgcatgacctgatactggaggcagctgatgctggaaaaaagagtgtgtacagagcaaaggtttgggtgaagccgtgggaagatttcaagtctgtcgttgagtttcgccttgttggagactctgaatctgaacccgagccttctgttgcttctgatgttagctctgggcaagcaattgccaaactctctcttgaagcagatattgtacaagaagaggctcgcctgcacaccattgagaatgatgggctttccggcgatttcacatcatcatcttaggcaaggatggaaagcgtaaaggtttaaaatgaagatttaggtatttagagtatgtcaagctgaaatgctttgccttgtttattggaatatgtatgtttcgtttcaaacgtgggagcatagaactgtatatttcggtatttcacactgttcatttccatgtctgtatataaggaggttcttctggctatatatatattttgatcctcaagtactttttctc

SEQ ID NO: 135696 - DNA, 2155 bp, Zea Mays
ctcgccgctcgccccaccgaaccgtttccaatcacggctgacggcccagcaaagatggcgagaacagcgcgttcgttttcaaaccctttcaaattcctctcttcgcaagccgcaataataccgttcattcgatagttccatcctcctccctcccccttcgccggcctcgcttcgtccctcccgctctcccccttttaaatcaaaccctctctcggctcctttataaatcctagtcgaagcaagggtgcgcgcacttcactacccaacctgaccccgaagatcgcgtccgcagagacagtagccgcgtcatggcgaccccgccgccgccgctcccgcccatgccgccgaggcacgtctcctgcggctcacttctacaggaactgcagcaggaactatggggagaaattggtcaggatgaaatgaaaagagataggatgatactgcaactggaggaggattgtctcaatgtttacaagcaaaaagtgaatcagactaggaaacagaaggcagacctgcttcaagagctgtcccttggcgaagctgatatagacaagatcctttctgctcttggagagagagaaacatttcctaggtcagagaagcttgggggcacattaatggaacaactcgctaagatagagccagtgctagaagatttgaggcgtaggagggatgagagagtaaatgagttcaaggctattcagtcaaagattgtatgtctacaagcagaaatttcaggagccattgatcatggggatcctgctgctcctgtggtagatgagaatgatttatccttgaaaagatcaggggaattgaaggagcatcttaatgatcttcagacagaaaagaatggaaggctgcaaaaaattgacatccagactaacagtattcatgaaatgtgcaacataatgtctattgatctcaaaatggcactaaaggatgttcatcccagttacgctgagctggggagaagcaaacccatgagtattagcaacagttcgcttgatagactatctgaaaaagtacatgcgttaaatcatgaaaagaaacaaaggcttcggaagcttcaagatcttggcagcacactcattgagttatggaacctcatggatacaccaactgatgaacagagattttttgaccatgtgacttctcttattaaagtctcaccaactacagcgatgccccaagggtgccttgcacacgaaataattgaaaaggtagagactgaggttaagagactgactaagttgaaagctagcaaaatgaaagagctagtcttcaagaaattgactgatcttgaggaaatctacagaagtgttcacatggatattgatagtgattctgagcggcaaaccctcaatgatctcattgattctggtagagcagatctttcagagttgctggcaagaatggatattcgaattgcggaggcaaaagaacatgcattaagtagaaaggatattttagaaaaggtggagaagtggacattggcatcagaagaggagacttggcttgatgaatacgaaagggatcaaaaccgatataatgctgtccgaggagctcacataaatctcaagcgtgcggagaaagctaggatattggtcagcaaacttccatctcttttggagaacttgactgctaaaattaaagcctgggaaaaggaaatgggtattccatttatatttaacaaggtgaggctgttggactgtttagatgaatacacctgtacaagacagcaaaaagaagaggaaaagcgccgatcaagggaattgaagaaactgcaagaacagtttgctacagagcaaggtgccaagttcggaacgaaaccaagccctatccgtcctctttcttcaaggaagcctcttgggcagagctctaatgccaatattattggtggaactccgaccagccgccgtgtttctacccccatgtcacggaagggtaggccatcttctggaagggtgcaggaagctgtcaagactgctgtggcaccagcaaactatgttgcccttcccaaggactgctcagacatttctaccctttgaagtgtaatcacctactctgaccatcgattgacttctcacttgatcgacctacatactatatagtcttgactccagtgtctatgcgtgtttccagactttgctaccct

SEQ ID NO: 135697 - DNA, 2202 bp, Zea Mays
ctcgccgctcgccccaccgaaccgtttccaatcacggctgacggcccagcaaagatggcgagaacagcgcgttcgttttcaaaccctttcaaattcctctcttcgcaagccgcaataataccgttcattcgatagttccatcctcctccctcccccttcgccggcctcgcttcgtccctcccgctctcccccttttaaatcaaaccctctctcggctcctttataaatcctagtcgaagcaagggtgcgcgcacttcactacccaacctgaccccgaagatcgcgtccgcagagacagtagccgcgtcatggcgaccccgccgccgccgctcccgcccatgccgccgaggcacgtctcctgcggctcacttctacaggaactgcaggaactatggggagaaattggtcaggatgaaatgaaaagagataggatgatactgcaactggaggaggattgtctcaatgtttacaagcaaaaagtgaatcagactaggaaacagaaggcagacctgcttcaagagctgtcccttggcgaagctgatatagacaagatcctttctgctcttggagagagagaaacatttcctaggtcagagaagcttgggggcacattaatggaacaactcgctaagatagagccagtgctagaagatttgaggcgtaggagggatgagagagtaaatgagttcaaggctattcagtcaaagattgtatgtctacaagcagaaatttcaggagccattgatcatggggatcctgctgctcctgtggtagatgagaatgatttatccttgaaaagatcaggggaattgaaggagcatcttaatgatcttcagacagaaaagaatggaaggctgcaaaaaattgacatccagactaacagtattcatgaaatgtgcaacataatgtctattgatctcaaaatggcactaaaggatgttcatcccagttacgctgagctggggagaagcaaacccatgagtattagcaacagttcgcttgatagactatctgaaaaagtacatgcgttaaatcatgaaaagaaacaaaggcttcggaagcttcaagatcttggcagcacactcattgagttatggaacctcatggatacaccaactgatgaacagagattttttgaccatgtgacttctcttattaaagtctcaccaactacagcgatgccccaagggtgccttgcacacgaaataattgaaaaggtagagactgaggttaagagactgactaagttgaaagctagcaaaatgaaagagctagtcttcaagaaattgactgatcttgaggaaatctacagaagtgttcacatggatattgatagtgattctgagcggcaaaccctcaatgatctcattgattctggtagagcagatctttcagagttgctggcaagaatggatattcgaattgcggaggcaaaagaacatgcattaagtagaaaggatattttagaaaaggtggagaagtggacattggcatcagaagaggagacttggcttgatgaatacgaaagggatcaaaaccgatataatgctgtccgaggagctcacataaatctcaagcgtgcggagaaagctaggatattggtcagcaaacttccatctcttttggagaacttgactgctaaaattaaagcctgggaaaaggaaatgggtattccatttatatttaacaaggtgaggctgttggactgtttagatgaatacacctgtacaagacagcaaaaagaagaggaaaagcgccgatcaagggaattgaagaaactgcaagaacagtttgctacagagcaaggtgccaagttcggaacgaaaccaagccctatccgtcctctttcttcaaggaagcctcttgggcagagctctaatgccaatattattggtggaactccgaccagccgccgtgtttctacccccatgtcacggaagggtaggccatcttctggaagggtgcaggaagctgtcaagactgctgtggcaccagcaaactatgttgcccttcccaaggactgctcagacatttctaccctttgaagtgtaatcacctactctgaccatcgattgacttctcacttgatcgacctacatactatatagtcttgactccagtgtctatgcgtgtttccagactttgctaccctaattttcttttcattagtcgcaaaaaattacggactgtttctttcccagc

SEQ ID NO: 135698 - DNA, 1515 bp, Zea Mays
gctcacctccctgccgcgcggcaggcgagacggcggtccctggtgcgttgcaagcagcacccagcaggcaatcgctaacagcgccggatgccgcctggccccgctaccacgcttgcctccttgaactccctcctcgcgtcgcttgcgcgctccggccgccctgcgcaagcgctctgcacgttccgggacatgctcgcgcggggcatcccgccggaccacttcaccctgccacccgtgctccgctcctgcactctcactggcgccgcgggcctagcttccacctcccacgcgctcgccgtcaaactcggggcccaggaaaaccttttcgtggcgtctgcgctcgtcctttgttacgctggcctgtcgaacctccccgacgcgcggaggctgttcgatggaatgcgcgagcgggatgctgtcctctggacttctatgctgtccgcctacgcgcagggtggggaaccggacgcggctatgcggttctttggtagcatggtggcagcagggatggagctggatgcggtggtcatgatcagcctgctgctcgcttgtggacagcttgggtggcgccgccatggaaggagtgtgcacggctgctgtatccggaggttcctagggatgccattgccccttgggaacgcacttgtggacatgtacgtcaagtgtggggactttgcattcgcccagagggtgtttgttgggatgcctaggcgggatgttatctcgtggagtgcgctgatccttggtcatggtttgaatgggcgttctgatgttgcattgggactcttcgatagaatgtcagccgaaggaatccgaccgaactcagtcacttttcttggggcattgtcagcttgtgcacattctggcatggtggacaaaggatatgctatcttcaaggggatgaaactgtcgggcattgagcctgaactgaaacattactcttgtatggctgacatgcttgggagagcagggcatgttgtcgaggctatgaagctcatagaggaaatgccttgtgagcccgacgaggccatgcttggaggtgtacttgcagcctgccgagtgcatggagaaatggagtctgctgaatgggtttccaagagattgatgggcatgtctcctggaaagagcggctactatatgagcttggcaaacatatattcagatgctgggaggtatagtgacgcagagacaataagaggattcatgaaagaacttaaagtcaacaagcttcctggatatagttcagttgaattagatgctgatagattccacatactgggcaatagagtctgaagtgtttgatcaaaatctactctgttggggcacacacttcactgcagtacatgcattaaattgatgggtaaagagaacatagtacgagtatacaatagtggaagaaagaatgaatggtagtttcagcatgagcataggcttagctttttctgttaggtcccgtttgtttccttttattttgaggaattagaatcttactaatgaaataggctatttatttag

SEQ ID NO: 135699 - DNA, 1112 bp, Zea Mays
aagctctgctcctcccgccatcccacatccatctccacctccctcatacaacgccgcgcgtgccctagtggtagcaccaattgcgggcctgtggcaacagtgatggccaatgccactgtccccgagttgcagccgcaggttcaagcggcgggtggccgcaaggtggtggacgaggtgtccggctggctgcgcgttctggacgacggcagcgtcgaccgcacgtggaccggcccacccgaggtcctcccgatgatgcagcccgtggcgccgtacgacgtgccccgcgacgggcacacgctgcacgacctcccaggggagcccaatttccggatctacctccccgaggtcgacgacgaccgcaagggcgggcgcctgcccgtcatcgtgcacttccacggcggcggcttctgcttctcccacccgtcctggctcatgtaccaccagttctactcgcgtctcgcgtgcgccgtccctgccgtggtcgtctctgtcgagctcccgctcgcgcccgagcgacgcctgccagcgcacatcgacacggccgtcgccgcggtccgccggctccgctgcatcgcgctgtcggaggacggagctcttggtgacaaggcaggtaagctcctccgtgaggccgccgacgtctcccgggtgttcctcgtcggcgacagctctggcgcgaacgtcagccacttcaccgccgcgcgtgtgggccaggacggcgctggcgtctgggcgcccctgcgcgtcgccggctgcgttctgatccaaccgggattcgtgcgcgcaacaaggagccggtcggagctggaggtgggagagtcggtgttcttcacgctggacatgctggacaagtgccaggccatggcgctgcctgttggcgccaccaaggagcacccgttctcgtgccccatgggtccgcaggcgccgcccctggagtccgtgccgctcccgccgatgatggtggccgtcggcgagaaggacctcgtccgcgacacaaaggagcacccttgcaagcatttagggggtgtttggtttgaagaattaattcattttagatgatgcgatgcatcatgagtttattccacaaattatataagtttggtttgaagaatcaa

SEQ ID NO: 135700 - DNA, 1080 bp, Zea Mays
atggcaacggccaatgtccagcagcagccacagccgcaggtggtagcggcggttggccgaaaggtggtggacgaggtttccggctggctgcgcgtgctggaggacggcagcgtggaccgcacgtggaccggcccgcgcgaggccctcccgctgatggagccggtggcgccgtacgcggtgccgcgagacgggcacacgctccacgacctgcccggggagccgaacctacgcgtgtacctccccgaggcgaacgtggaggccggcggcgcgcgcctgcccgtcatcctgcagctccacggcgggggcttctgcatctcccacccgtcctggctcatgtaccaccacttctacgcgcgcctcgcgtgcgccgtccccgccgtggtggtcgccgtcgagctgccgctcgcgcccgagcggcgcctgcccgcgcacatcgacgccggcgtcgccgcgctccgcaggctccgctccgtcgcgctggccgaggacgacggcgccctcgacgacccggcggccgcgctcctccgcgaggccgccgacgtgtcccgggtgttcctcgtcggggacagctcgggcggcaacctcgtccacctcgtggcggcccgcgtggcgagggaggcggacgcgggcagctgggcccccctccgcgtcgccggcggcgtccccattcacccggggttcgtgcgcgccacccggagccggtcggagctggagacgaaggcggactcggtgttcttcacgctggacatgctggacaagttccttgccttggcgctgccggagggcgccaccaaggaccaccccttcacctgccccatgggcccgcaggcgccgccgctggagtccgtgcacctgccgccgctgcttgtgtccgtggccgagaacgacctcatccgcgacactaacctcgagtactgcaacgcgctgcgcgccgctggcaaggaggtggaggtgctcatcaaccacggcatgagccactccttctaccttaacaagtacgccgtcgacatggactcaaccaccggggaacgagcccgagagctcatcgatgccatcaagagcttcatctcacgccattga

SEQ ID NO: 135701 - DNA, 1288 bp, Zea Mays
atggcaacggccaatgtccagcagcagccacagccgcaggtggtagcggcggttggccgaaaggtggtggacgaggtttccggctggctgcgcgtgctggaggacggcagcgtggaccgcacgtggaccggcccgcgcgaggccctcccgctgatggagccggtggcgccgtacgcggtgccgcgagacgggcacacgctccacgacctgcccggggagccgaacctacgcgtgtacctccccgaggcgaacgtggaggccggcggcgcgcgcctgcccgtcatcctgcagctccacggcgggggcttctgcatctcccacccgtcctggctcatgtaccaccacttctacgcgcgcctcgcgtgcgccgtccccgccgtggtggtcgccgtcgagctgccgctcgcgcccgagcggcgcctgcccgcgcacatcgacgccggcgtcgccgcgctccgcaggctccgctccgtcgcgctggccgaggacgacggcgccctcgacgacccggcggccgcgctcctccgcgaggccgccgacgtgtcccgggtgttcctcgtcggggacagctcgggcggcaacctcgtccacctcgtggcggcccgcgtggcgagggaggcggacgcgggcagctgggcccccctccgcgtcgccggcggcgtccccattcacccggggttcgtgcgcgccacccggagccggtcggagctggagacgaaggcggactcggtgttcttcacgctggacatgctggacaagttccttgccttggcgctgccggagggcgccaccaaggaccaccccttcacctgccccatgggcccgcaggcgccgccgctggagtccgtgcacctgccgccgctgcttgtgtccgtggccgagaacgacctcatccgcgacactaacctcgagtactgcaacgcgctgcgcgccgctggcaaggaggtggaggtgctcatcaaccacggcatgagccactccttctaccttaacaagtacgccgtcgacatggactcaaccaccggggaacgagcccgagagctcatcgatgccatcaagagcttcatctcacgccattgaataaggacgtattattccgcacgtacgtgcgggatactgatcatatgtgctacgtgatacgtgagctgcttggaatcaccaaatttgttccggtatataaatgctatcaacttcagttatgtgtggtgatatacctacatacaaccactggatggctccacatgctgtagcatatagtgatgcatttccgaatttcattcaaaactaa

SEQ ID NO: 135702 - DNA, 1057 bp, Zea Mays
catcctcgcatgcatgtgagggccatagctcactgtcgcatgccctgctctgcttcagcaccacacacacacaacaatcagtgtggccataacaagcagctagcgagagctccccgcgtccagccatggcaaccacgacgacggctggtaggaacaatggagaaggagaacagaagaggtggagggagaaaggaggcttcaagaccatgccattcatacttgggaacgacatctgcgaccggttcgccacggccggcttcggcgccaacatgatcacgtacctgacgcagcagctgcacctgccgctggtggaggcgtccaacctgctgaccaacttcggcggcacgtccagcctcacgcccatcctgggcgcgctcgccgccgactccttcgcgggccgcttcgggaccatcgtcgccggctccgtcttctaccagctcggcatgctcggcctcgtcgtgtccgcgctcctcccttcgctccgccccgcgccgtgccccggcgccccggccgcgtgccagcgcgcctccgggtggcagctcgccgcgctgtacctctccctcctctgcacgtccgtcggctccggcgggctgcggccctgcgtcgtggcgttcggcaccgaccagttcgaccgcgagcccggggagcagcaggtcaccgcggaggcggccggggaggtggcggagcgcaagcggcgctacttcaacctctacttcttcacgatgggggtggcggcgctgctggcgctgacggtggtggtgtacatccaggacaacgtgggctggggctgggggttcgggatccccgccgtcgccatgttcgtctccatcgtcgtgttcgtggtcgggtacccgctgtacgtccgcctcaagcccgggggcagcccgttcacgcgtctcgcgcaggtcgccgccgccgcctttaagaagcgccacgtcgccgtgccggaggacgcagggatgctgtaccaggacaaggagctcgacgccttcatctccaccaacggcaggctgctgcacaccgatcagctcacgtaagtccgtgtctctatctaatt

SEQ ID NO: 135703 - DNA, 1222 bp, Zea Mays
ttctcgcggagagggatgtgcagctattttccgacggaaattcctttgccatcactagtaacgacacagatgaaaactgtgttgatttatcttttcctctgtgaattaaggttcttggaccgggcagcgattgtgacgccgggtgacatctccgcttccgggcagccggacctgtggcgtttgtcaacggtgcaccgcgtggaggagctcaagtccattgtccgcatgctgcccatctggtcagcagggatcatgctggccaccgctggctcgcacaacggcaccttcaccatcttgcaggcgcgcaccatggaccggcacatcacccggcacttcgagataccaccagcgaccatgtcgatcttcgggaccgcggccatgctcgtcagcctggctctctacgaccgcgcgttcgtgccgctggcacgccgcgtcacgggcctgcagtccgggatcacctacttccagcgcatgggcatcgggctcgccatctccatcctcggcgtcgcctccgccgctctcgtagagaccaagcgccgcgatgccgcggccgacaatggattcctggacaatccggacgccgtcgtcccgatcagcgtgttctggcttgtgccgcagttcgccatccatggcgtcgccagcgccttctcgtcggtggggcacatggagttcctgtacgaccaggcgcccgagagcatgcgcagtactgccgctgcgctcttctggctcgccagctccatcggccactacctcggcacggtgctggtcacggtggtgcagcgcaccacccgcggtcgtggcgactggctccaggacaacatcaaccgtggaaggatcgacaactactactggctcgtcacctgcctcatggtgctcgaccttggctactacatcgtctgcttccatttctacaccatgaagccactagagatggcagacgaacaagatgatcatgacgaagagtgtgagctctccactgtcccgaaaaacggcatcggtgccggtgtggtgtaacgttgatttgcgggtaattaattaggatggacgttagatgttaatatatgggttagatactactacatggttaataccaccctccgcattacgacacaaaattcggtgcaacggatagggattattgatacctgtaacctgttcacacttaaaattgtccaatattagtcctcaaagtttgggttgtgcccaatgggccggcccgagc

SEQ ID NO: 135704 - DNA, 1704 bp, Zea Mays
ctcctcaccgctcaccatctccaatggcttaaaggtgtagtacttaacgcagatgaagaagtagacgaggttgaccacctccagagccacgactagccagtagtagttgtctagcttccctcggttaaggttgtccgggagccattgcccggttcgcttcgtcttgtcgtgcacgatggtcaccagcagcgtgccgaggtagctcccgatcgagaaggtcagccagtagagcgccgtcgctgagctccgcatgctctcgggtgcctggtcgtacaggaactccatgcggccgacgtccatgaaggcgttggcgatgccatggatggcgtactgcggcaccagccagaagacgctcatcggcagggtggccttgggagcgtcgagcagcccactcgcagcggcaacggacttgcgtctccgctcgacgaccgcggccaccacgttggacagcatggcgatcgtcagtcccacgcccgtgcgctggaggtgagtgatgccgttcgggcggccagtgaagcggcgcagcacgcggacgagcacgcgatcgtagaaggccagggtcagcagcataccgaagttggtgaagatgagcatggaggccggcgggatcttgaagtgtggcgtgatgtcacggtccatggtacgagcctgctggatggcgaagctgtgattgtgcgacgccgatgtcaccaggatgatgccggcagcacagatcggcagcatacgtatgatcgacttgagctcctcgatgcggtgcaccgtcgacagccgccatagcttcggctgacccgacggcagcacgtcgccgtccgtcacaatagccgccttgtctaagcacctaaggatcgggaagacgaatcagcacgtgcagatcaaatgtccgactcttatttctcatttaatcttaacttactttagctggtcggtgtgaagaaggcgtccggtggtggagatgccagcgtcgagctccttgtcctcgtacaggaggctcgggtccggcacgacggctttccgcttcttgtatgctgcggtagcgacctgcgccaaccggaccagggggctgcccccgggtggcatcctgatgtagagcgagtacccggacacgaaggcgatcaccgcggcgaccatggcgacggtaggcacgcctattccccaactccacccgacgttgtcctggatgtacaccacggcggtgacggccgcgagcttcgcgagctcgacggcgaagaagtagaggttaaagaaactccacttgggcttggcgccccggtgcctgtgcgcgttcagctcaagctggtcggcgccaaacgccatggtgcaggggcgcgtgcccccggtgccgatcgacgtgcagagcagagacaggtacagcacggaaatctggtaggaggacgcgcgctggcagtctgcagcgtgcttggcgcaggatggcgggtgcagcgaggggagcgcggcggagagggtaaggcagaccatgccgagctggtagatgatggagccgaatgtgatggtccagaagcggccggcaaaggagtcggcgatgagaccgccgatgagcggagtgaggttagcagtgccattgtagttggtgatgatgttggaggcctccacgagcggcaggtgcagctgcagggtgaggtacgagatcaggttcgtcgtgaaccccaccgaagcaagccggtcgcagaagtcattcgctgccgt

SEQ ID NO: 135705 - DNA, 858 bp, Zea Mays
atggcggcgttcggcgccgaccagtttgagctccacgggccgtgccacggcgagaagaagcggaggtggagtttcttcaacctctacttcttcgccgtcgagctcgccaagctggccgccattaccctggtggtgtacgtccaggagaacgtggggtgggagtgggggctcggcgtcccgatcgtcgccatgctcgtcgcggtcaccgcgttcatgtggggcaaccctctgtgctcgacgctgccatctctactgccggacggctgctccacacgaaccaactcagctttttttgaccgggctgcaaccgtgacggatggcgacttgacaagcagcggcgtcccgcgaccatggcggctgtccacggtgcaccgggtggaggagctcaaatcgatcgtccgcatgctgcccatctggggcgccgggatcctcctggtcacctcggcgcgcaccatagacatgcgcatcatagcgcacctcgagataccaccagcctccatgctcatattctcaaacattgccatgctcgtcaccctcgctcgcactctgctggtgccatggctgcgacgcgtcacggtgcagcccacgggcatcacgcacctccagctccagcgcacgggcatcggcctcaccatcagcatgctgagcaacgtagtagtgtcggcggtcgtagagggggagacgaagcggacggcatgggaaaaccatagcatcagatgctgcttagacggcttcaaaatcccaaataaggaaattatcgagtccaactattgtcgaacatgtactcccgaggccccatgcctcgaggacctaccttggctccgacaagggcagggggcatcatcctcgagagcttga

SEQ ID NO: 135706 - DNA, 1657 bp, Zea Mays
ccggaatcgtgcagacgggcaccgcttatcctccgcgcaggcaagagcagccagccgcttcgggatcgggacgcggagaggggaaaggcgagtcgtcgactcgtcgtccgggcagcttccctccctctcctctccgcccccgcttacctaggccggccccgcctacgcccccctcccgccgccgcacgatgagcacttctcccgccgccgccgacgtttcgcctttgccgcctactgctgccgccgacgaggccgcgcgggcgacagagacggtggtggtcgatgagagggtcgcctcacacgtggacccgttcctcgtcgaggcgctcgacaaccctcgccaccgtctcatggttctacggatggaactggatatacaaaactttatgcagaaccctcagctgcaggagtttgaattccagaactttccgacttcttacctccgctgtgctgctcatcgtgttgcacaacattatggcttagagactatagtagcagatagtttagtagaaggctcagttagcaggattgttgcaagaaaaacagcagaaagcaggtatcctgcaatttttttatcagaagttcctagcaatcaagcaagaaatgatcatgaaacagctgagaagcttaagtttgtcatttatcaaaggcccaaagcattccaaaatggaagcgctgattctagaaacaagagtggtgtaccaaaaactgttgatgagagaatagaggaatataataaagcacgagcacgcatcttcaatggttccatttctgcagattctgatgctgcaagtattatgggaactctttctactggcaaagatgaaccagtaaatgttgacccttctgttgatgaaaccaaagtcagcacaatgaacagtcgttccagagttgctgtttttaaggatactgaaaaggatcgtagtgacccagactacgatcgaaactacaaaaggtatgttaggagctcagtgcctggcttcaacttgagcccaggtgtttttaactttgttgtgcctcagtttatgcagtatgacattggttatgtgcaatctcctggcatgtccacaaaccagcatactatgtactttggccagcctgatctaacaatagggtcttctggagctgctgtttatcgacattggccaaccccaacaatgatgtatccccattgctatgataatgttagtccaatgatgtctcaggttcctctgtaccagtctttcaaccatgattaggagattctgcttgctggaaagttgggaacaattctctgttgaacttgctatgttgtgttgtcctatgttaagtggagttcctttagattcgagccgtttttattacaaaaaattgtataaggagtcctaattcgttgaaactatttcgtgaactagtctggaactgtgatgcttgtctaatgtctagttctcgtttgcaatttgctcccggtttatagttagtagtgtgctgcgactggtcttgaaccgtgtcgcgtggtcgtactggtagaaccaggttgctacttgccagcagtcattgctttgattccgattttttatttaacttctttttaatcaagtatttcaaataatctaccctagaagttacttttacatctagttgtgccagaccacaaggacgacaaaataagattgtt

SEQ ID NO: 135707 - DNA, 194 bp, Zea Mays
cacgtcgtctaccaacatgcacctgcctctgcctgtccaaggaaaaattaaataaatgcgatgcaacgccattcgatccccatctctctctcggtctctccatagcctaggacgagcgggtacttctctccgtatcattggactcgtcaacccagacccagagacgattcagagtctgctccgcctatggcaac

SEQ ID NO: 135708 - DNA, 1720 bp, Zea Mays
ctttctgtctcggggccacacagaaaagctctttttaagtcgcgcagatttacaaatgactgggtgggtgatggctacagctttttttgctacaacaaactcccaatcccatccagtttgagatgttctagggaggcagaaacacgctagtgtgatcgagttccgcaacccatatgctacatactagtactgtattattatcataataatagctcttacctccgtcaagggaagaaaatactaagctctggatctcccacccacgggatccgactatcatcatgccatgcacaatggttgcatcacttctttgacgggacgcgtgcatggcatcatcgttcaagagcagaggggtctcggccctgcaatcttttggcgcgatccaagtcttcctcccacgatggtggagaggcgagaaagttttgtcgagtcacaattccttgtgtacacctctaaaaatatatcatctctacggctctaacctttatgtcatcagcaacaagaaatggtggaaggaggacagatagatagcagcagtacgggaacatatcaacgggcaacaacaatggtgggccgggcccgggcgacgacgagacgggatgcttaggaggagaggaagaacgcatgggcggactgctaattcccaacaattcttggactctatgaggtatgagactgagccttgctcgatttgtaggccgattctgtggggagcagcggccggcgggttgcgcagcagagaggtggagagggcaggaagcaaacgaatttcgaattgtatatgtacccgaggtccatctcgtcggcgaaggaggcgggcgccatcatccccatcccggcgccgccgccgaccatgcggtggtgcatcccgggcggcccggcgggtggcccgacgcggctcaggaagccgtggtcgaaaccgcccacagcggcgccgccgtagtgggcgagcgggcgcgtggcggggtggtggaagtggccgatctggtggtgctggtggtggtgcgcgccgcccatgggggagaagggcgggtagctgtcggcggcggcgggcgcgcggtgacccggcgggaggaaggggacgggcccagtggcgaagaggtgctcggtggcggcgtcagtgccggagccggaggagtggcttccccccgcgcccccgcctcctcccccgccgccgccgccgcccagcccctgcatgcgcttgaggtacaggcggtacttctggaggtgggaggcgacgttctcgcgcgtgaggccgtcgacgctcatcagctgcattatggtcttgggcacggcgttcttgatgccgaggtgcgccacggcgtcgacgaatcgcttgtgcagctgcggcgtccacacgaggcgcgggcgcttgagcgtccgggccggctcgtcgccgccgccgcccccgccgccgccgctggaacccgctgccgacgacgcaccgccgccgttgatgtcggggccgcccgcgccgggccccgcacctgcgccccccgccgcgcccgtcccgccggcgccgtgcgtcgtgatgtcgaaggcgacggccagatggggcgtgatgagcgtttgcgtgagaggcatcagctcgtccggccgcaggagctgctgctcctcgccgcgcgcgaaccagctggcctcctcctcctccctcatggccgcggcttctcctcgcctctccctctcctggcgccggggaggaggtagcggcagcagcagg

SEQ ID NO: 135709 - DNA, 885 bp, Zea Mays
cctacgcctcgcatggtcggtcgcaccgaacagcacgaccagaccagttgcccggctcaccaaatccaggcgtggccgtgcgaccatccctcccctcatggcgtcatcggcggcgcgatccctcgcgctcgtcgcgtctgcctcggcatcgctcggcgtcgggcagcggtcgtgggctcgcttggctgtctcttcctcttcggctgggtcggccctccccaagctccgcgggctccgctcgttcgccgcctccgcagggggcgccgtgatggggaagccaggccccggggtcgttgacgccgacgccgggatggacgccgtccagcggcggctcatgtttgaggacgaattgctattgctacaactacaacttaggctatctcctcatattcaaacacgttgcaaaagagcgtagactacgttgcaaaacaatgttttggatgatctgttttggatgaccatataggtgcattttagtggatgaacaagacaatgtcatcggccacgagtccaagtataactgtacgtgattccgtgtgaatttgtccattccattcagttatgcacggttttgatattcaaaacaagaccgttattgatgctgactgttctttctagccgtgctcagtatgataagtatcccaatagcttgggccacagttctagtggagacagtatgcttaccaactctagaaacatcatgagcaaagtctttgatgcagccgccatctaaccatctgtctgaccagaataaaatcctgtttccatttccaaccaaccgaagattgaaagaacttccttacttgcactggcacaggcagctttaaaccatgccaaggtttgttagtatctgttttctccagccacaaccatttagcttgcagt

SEQ ID NO: 135710 - DNA, 670 bp, Zea Mays
cctacgcctcgcatggtcggtcgcaccgaacagcacgaccagaccagttgcccggctcaccaaatccaggcgtggccgtgcgaccatccctcccctcatggcgtcatcggcggcgcgatccctcgcgctcgtcgcgtctgcctcggcatcgctcggcgtcgggcagcggtcgtgggctcgcttggctgtctcttcctcttcggctgggtcggccctccccaagctccgcgggctccgctcgttcgccgcctccgcagggggcgccgtgatggggaagccaggccccggggtcgttgacgccgacgccgggatggacgccgtccagcggcggctcatgtttgaggacgagtgcattttagtggatgaacaagacaatgtcatcggccacgagtccaagtataactgccatctcatggagaagatagaagctggaaatgccctgcacagagctttcagtgttttccttttcaactccaaatatgagttgctactgcaggtattcacacaatactaactatggttgtcttgctttgagatgtaatgtaagttccacttcatgttccttgaatcattggctgcagttctgagttcactttgttcgttttccaattaagtaggatatacaacctttttgctattttgcttggagtaggctctgtgtgtgatttac

SEQ ID NO: 135711 - DNA, 1318 bp, Zea Mays
cctacgcctcgcatggtcggtcgcaccgaacagcacgaccagaccagttgcccggctcaccaaatccaggcgtggccgtgcgaccatccctcccctcatggcgtcatcggcggcgcgatccctcgcgctcgtcgcgtctgcctcggcatcgctcggcgtcgggcagcggtcgtgggctcgcttggctgtctcttcctcttcggctgggtcggccctccccaagctccgcgggctccgctcgttcgccgcctccgcagggggcgccgtgatggggaagccaggccccggggtcgttgacgccgacgccgggatggacgccgtccagcggcggctcatgtttgaggacgagtgcattttagtggatgaacaagacaatgtcatcggccacgagtccaagtataactgccatctcatggagaagatagaagctggaaatgccctgcacagagctttcagtgttttccttttcaactccaaatatgagttgctactgcagcaaaggtctgcaacaaaagtgacatttccacttgtctggacaaacacctgctgtagccatcctctctaccgcgagtcagagttgattgaggaaaattgtgcaggggtgagaaatgcagcccagcgcaaactatttgatgagctgggaatagtggctgacgaattacctgtcgaccagttcattccgcttgggaggatgctttacaaggctccttcagatggaaaatggggcgaacacgagttggattacctcttgttcatggttcgtgacgtgaagctcgacccgaatcctgaagaggtggccgatgtcaagtacatgaaccggcatcagctgaaggagctgctcaggaaagccgatgccggggaagatggcgttaagctctccccttggttcaggctggtggtggacaactttctcatgggctggtgggatcatgtcgagcaagggactctgcagggggcagcagacatgaaaaccatccataaattgtaaatcttctagatcgcttaagcacgagtcttgccctgttgaggaataagcgcttgtcctgctgtttggtgctggaggaataatcgataaaattataacagagtgatcttaattctggaacgtaactattaacattgaaccccatctgtgatgtgtaaatttctacctaagtatcgagacatacaaagaaaaagggggcacgccaagtcaattaggttaggcaaattgatacatactatacattcaaaggcaaaggccaaaggatgtttggaagtgaagtttcactgtcttgaaagaatactgcatgtttggaagtgaagtttcactgtcttg

SEQ ID NO: 135712 - DNA, 1201 bp, Zea Mays
ctttcgtgataacactactaaatcacttttactttcatgtaatgcctcacctaacatggaagagcatggatctctctggaaaattgtttatacttgtactaaagaaaatatttgtaacattttaggaaggaaaatgattagccattttggaattaaggtccttattaagagggcgcaatttcaattttaccacataaatttggctgagtagaacatatcttgctttcgctcaagagctgttagcgagtttctgctggtgaaatagttactgtccaataccagaccactggcttttaggattttgttcatgaatcttacatgtctttctgctctgtacgagaaatttactttatgttcagttatgtctcatcatatatgtaaacactaaacagtttcacacactccaaagcagaagctcagaacagtggacatgagtcatttgttgctggttcttctgcctttgttttatgttactgcattgctatttctctaaactagcttgtctaaatcaaagggtatttcctaagtctgtttaccgcagaagatattgtaaaatcatatcctttacagcaaaggtctgcaacaaaagtgacatttccacttgtctggacaaacacctgctgtagccatcctctctaccgcgagtcagagttgattgaggaaaattgtgcaggggtgagaaatgcagcccagcgcaaactatttgatgagctgggaatagtggctgacgaattacctgtcgaccagttcattccgcttgggaggatgctttacaaggctccttcagatggaaaatggggcgaacacgagttggattacctcttgttcatggttcgtgacgtgaagctcgacccgaatcctgaagaggtggccgatgtcaagtacatgaaccggcatcagctgaaggagctgctcaggaaagccgatgccggggaagatggcgttaagctctccccttggttcaggctggtggtggacaactttctcatgggctggtgggatcatgtcgagcaagggactctgcagggggcagcagacatgaaaaccatccataaattgtaaatcttctagatcgcttaagcacgagtcttgccctgttgaggaataagcgcttgtcctgctgtttggtgctggaggaataatcgataaaattataacagagtgatcttaattctggaacgtaactattaacattgaaccc

SEQ ID NO: 135713 - DNA, 811 bp, Zea Mays
aactctcgtccattcctggcctttaccctaacaccgacccgagaaacggccctccaagcacaacgacgagcgcacatgggtgacaacgcaaggcagcgcgacggcggggctgcggctactgcatagacgagcggtggctgctgccgctgcacagatctggccctccctcgcgcaaactccgttccgcgtggctccctcgcctcccaacgttccgtgcggctcccccgcctctggccaaatccaacaacgacatcgacatagtggtctcccactctcccattcgattcagtggctatcttctcaccggtttgaagattatgcgtcatcgaacacctgttctgttagactagcttgtgccggcgctgtccggtgttaggcctgccgccggctacaagattcgtgtcaatttctgcgcaagcttgtgcacactgaaaatcggtggattcgcgtcagattttgtacaagcttctgcacaggcctctgaacctgagctgtcaccaaccaaaatgttgttccaccactacaactgtggattgatgtcgatcaaacaagaactgagccatgtcgtcctttgcgagggagcctaggtttacaagttcgaagtaggcagacaagtaaggttgctgcctgcttgttgtagtgacgcattagggccttgtcaagttgaaaccgtgcttgtacaagcggcgatgagctgatcatctcatatccactagtaatactgcagttgtagtacaactctttaaaagtttattggtcaagctgaagtgcattgtcaggtcccttcatctgtatgccaagctgctattcc

SEQ ID NO: 135714 - DNA, 2222 bp, Zea Mays
agaggtaggaactactagcatcacattcccctccccgcgccgcccggacaggacagcgcaaaaggccacctttccttttcctccgacgaggccggccggagctttgggacttgggagtgattgattccatatcattgcgcattaggtgcgcgatctccgtcaacctccttgcctccactccacagcccacgcatccccctgccgctgcctgcgcctacatatctgacaaacgacctccgctctgcaccgtgccgagactgccgactaccgacagacacggtggtctgccactgccagtctgccactgccaggcgccgtcctgcagagatggcagcggcgctgaggccgaggctgctcgtgctgctcgcggtggcggccgcggcgaccgggccgtcgtgcgccggcgccggccgcgtcgacctgtggccaatgccggcgtcggtcgcccgcggcgcgcagacgctcctcgtcagcaaggacctcaggctgtccacggccgggagcagctaccccgacggcaagggcatcctcacggaggcgttccggcggatggtggccgtcgtggagctggaccacgccatcaacgggacctactcccggggcgcgcccgtgctcgccggcgtccacgtcgccgtccgctcgcccaacgacgagctcaacttcggggtggatgaatcgtacaggttgtctgtgcctgccactggggatccgctgtatgcccagatcgaggctcaaacagtttacggagcgcttcatgccttggagacatttagtcaactgtgcagctttgacttcaatgcaaacctgatcgaacttcattcagctccatggactatcctggacgctcccagattcccttaccgagggctcctcatcgatacttcaaggcactatcttcctgtcccagtgataaaaggtgtgatcgactcaatgaccttcagcaagctgaacgttcttcattggcatatcgtggacgagcaatcgtttccgctcgaaatatcttcctacccaaagttgtggaacggcgcttactcttattcagagagatatacagttgatgatgcactcgacatcgtacagtatgctgaaaaaagaggcgtgaatgtcttggctgagattgatgtacctggccatgctctttcatggggtgtcggatatccatcattgtggccatcagctacatgcaaagaaccgcttgatgtcagcaatgaatttacatttcaactgatcaatggaattctttcagatttcagcaagatttttaagttcaagtttgtccatttgggcggagatgaagtaaacacaagttgctggagtaccacaccacacattaagtcgtggttgatgcaacatagcatgaatgaatctgatgcctacagatattttgtactgagagctcaaaagatagcgatatcacatggttatgacatcattaactgggaagagacatttaacaactttggagacaagctggatcgcaaaacagtggtgcataactggcttggaagtggagttgcagagaaagtggttgctgctggtttgagatgcatcgtaagcaaccaggataagtggtacctagatcacttggatgctacatgggaaggattttacacgaatgaaccactgacaaatatctacaacccggagcagcagaaattggtacttggtggtgaggtatgcatgtggggcgaacacattgatgcatcagacattcagcagacaatttggccacgtgctgcagcagctgcagagcggctatggacaccaattgagaagctggcgaaggacacaagatcggtcactgcaagattggcacgcttcaggtgcttgctgaatcaaagaggggttgctgctgcaccactagctggttatggccgctcggcaccatcagaaccaggttcctgcttaaggcagtagatatttttcatagagtagattaataaacataattccaggcatccaatttacttctctgagcgattaaaaatagctcggatcgatgtaaggcgaacccgcagaatgttcctatttttctgatgcgctctattcatttggagatgtctggtcatgttttactttcagtgtaaggtcatgaatatcaagatttagtttcatacaccaatgaaacaaaaaaaataattagcatgtgttctaaagaaaggtgcttcaaaccttgcaagaaccaacattttagttcggatgttttaatggaaattgcatcc

SEQ ID NO: 135715 - DNA, 2188 bp, Zea Mays
agaggtaggaactactagcatcacattcccctccccgcgccgcccggacaggacagcgcaaaaggccacctttccttttcctccgacgaggccggccggagctttgggacttgggagtgattgattccatatcattgcgcattaggtgcgcgatctccgtcaacctccttgcctccactccacagcccacgcatccccctgccgctgcctgcgcctacatatctgacaaacgacctccgctctgcaccgtgccgagactgccgactaccgacagacacggtggtctgccactgccagtctgccactgccaggcgccgtcctgcagagatggcagcggcgctgaggccgaggctgctcgtgctgctcgcggtggcggccgcggcgaccgggccgtcgtgcgccggcgccggccgcgtcgacctgtggccaatgccggcgtcggtcgcccgcggcgcgcagacgctcctcgtcagcaaggacctcaggctgtccacggccgggagcagctaccccgacggcaagggcatcctcacggaggcgttccggcggatggtggccgtcgtggagctggaccacgccatcaacgggacctactcccggggcgcgcccgtgctcgccggcgtccacgtcgccgtccgctcgcccaacgacgagctcaacttcggggtggatgaatcgtacaggttgtctgtgcctgccactggggatccgctgtatgcccagatcgaggctcaaacagtttacggagcgcttcatgccttggagacatttagtcaactgtgcagctttgacttcaatgcaaacctgatcgaacttcattcagctccatggactatcctggacgctcccagattcccttaccgagggctcctcatcgatacttcaaggcactatcttcctgtcccagtgataaaaggtgtgatcgactcaatgaccttcagcaagctgaacgttcttcattggcatatcgtggacgagcaatcgtttccgctcgaaatatcttcctacccaaagttgtggaacggcgcttactcttattcagagagatatacagttgatgatgcactcgacatcgtacagtatgctgaaaaaagaggcgtgaatgtcttggctgagattgatgtacctggccatgctctttcatggggtgtcggatatccatcattgtggccatcagctacatgcaaagaaccgcttgatgtcagcaatgaatttacatttcaactgatcaatggaattctttcagatttcagcaagatttttaagttcaagtttgtccatttgggcggagatgaagtaaacacaagttgatgcaacatagcatgaatgaatctgatgcctacagatattttgtactgagagctcaaaagatagcgatatcacatggttatgacatcattaactgggaagagacatttaacaactttggagacaagctggatcgcaaaacagtggtgcataactggcttggaagtggagttgcagagaaagtggttgctgctggtttgagatgcatcgtaagcaaccaggataagtggtacctagatcacttggatgctacatgggaaggattttacacgaatgaaccactgacaaatatctacaacccggagcagcagaaattggtacttggtggtgaggtatgcatgtggggcgaacacattgatgcatcagacattcagcagacaatttggccacgtgctgcagcagctgcagagcggctatggacaccaattgagaagctggcgaaggacacaagatcggtcactgcaagattggcacgcttcaggtgcttgctgaatcaaagaggggttgctgctgcaccactagctggttatggccgctcggcaccatcagaaccaggttcctgcttaaggcagtagatatttttcatagagtagattaataaacataattccaggcatccaatttacttctctgagcgattaaaaatagctcggatcgatgtaaggcgaacccgcagaatgttcctatttttctgatgcgctctattcatttggagatgtctggtcatgttttactttcagtgtaaggtcatgaatatcaagatttagtttcatacaccaatgaaacaaaaaaaataattagcatgtgttctaaagaaaggtgcttcaaaccttgcaagaaccaacattttagttcggatgttttaatggaaattgcatcc

SEQ ID NO: 135716 - DNA, 832 bp, Zea Mays
catatcaaaatgtccaactgattctaataaccgtttctcatccttgtagggaagagacatttaacaactttggagacaagctggatcgcaaaacagtggtgcataactggcttggaagtggagttgcagagaaagtggttgctgctggtttgagatgcatcgtaagcaaccaggataagtggtacctagatcacttggatgctacatgggaaggattttacacgaatgaaccactgacaaatatctacaacccggagcagcagaaattggtacttggtggtgaggtatgcatgtggggcgaacacattgatgcatcagacattcagcagacaatttggccacgtgctgcagcagctgcagagcggctatggacaccaattgagaagctggcgaaggacacaagatcggtcactgcaagattggcacgcttcaggtgcttgctgaatcaaagaggggttgctgctgcaccactagctggttatggccgctcggcaccatcagaaccaggttcctgcttaaggcagtagatatttttcatagagtagattaataaacataattccaggcatccaatttacttctctgagcgattaaaaatagctcggatcgatgtaaggcgaacccgcagaatgttcctatttttctgatgcgctctattcatttggagatgtctggtcatgttttactttcagtgtaaggtcatgaatatcaagatttagtttcatacaccaatgaaacaaaaaaaataattagcatgtgttctaaagaaaggtgcttcaaaccttgcaagaaccaacattttagttcggatgttttaatggaaattgcatcc

SEQ ID NO: 135717 - DNA, 120 bp, Zea Mays
ctcttccttttattgattgtaaaagtaccaggttctaagctttccttttcgctttctaataaaatgcgcagtaggggttcccccctcctgatccttcaaaaagcttgtcaattcatattt

SEQ ID NO: 135718 - DNA, 350 bp, Zea Mays
tgacatgtggacaagtttcatgattttctgactttgtttgtgttttatataatttttaaacaacttgatggcaagttcacggtcatgtttagtgagcatggtgctcgaaaattccggtctggtcctgaaatcggtcgtaacttgtgttacctaacatggatatcatttttgtattcacgattttccatttttttgagtgacttgcaattcaaatatgaattatccgaagaaattcaattaaacgaagtaaatctaatagttatagcaaacaattttataattgtgtcagaatggaacattgaaatctacatagtgtaggaacatcccacaaaaagtttggttgggaaaag

SEQ ID NO: 135719 - DNA, 1868 bp, Zea Mays
gagcgcgcgctcctggagtggcagcgaatcttggaaggaaagcagggtcgagaacaggtgtacggacaatggcggaggccgacgagacggcggcgctgcagtacacaccgacgtggatcgtggcggcggtctgctccatcatcgtgctcatctccctcgccgccgagcggggcctccatcacctcggcaagacgctcaagaagaaccatcagaggccgctctacgaggcgctcctcaaggtcaaagaagagctgatgcttctggggttcatctccctgctgctcacggtgttgcaggggacgatccagaggacatgcattcctcccagctggacagactacatgctgccgtgccaaagaccggggcacgacgaggctcctgctgcggccgcctccatggcggcgcgttttgtcgccgccgacatcctcggtgggatcagttgggcacgcgtgctcagcgagggcgagggtgcggcggcccaagccgggctgtgcgagaaggaggggaaagttccactgctgtcccttgaagccctgcatcagctgcacatcttcatatttgttctggctgtctcgcacgtatttttctgtgcttcaactatgttgccaggatgtgcaaagatacgcaaatggaagaagtgggaggaggaaattcagaaaatcgctgcagaaaatggacccaagaaggtgttacctatgcatcaagtttcatttatcagagaacgttacaagggtattggcacagattccaagacgttgtgttggctgcattcatttcgtaagcagttttatggttcggtagctaaatcagactacgccgcaatgcgtcttggttttatcatgactcactgtcgcgggaacctgaaatttgatttccacagatacatggtgagggttttagagtctgattttaagaaaatagttggtacaagctggcacttgtggatcttcgtggtgatatttctgctgctcaatgtcaacgcctcaacggtttgcacgcatacttttggatagctttccttcccctggttcttctgctagccgttggcacaaagctggagcacgtaatagcacagctagcctacgacgtagccgagaagcagacggcgatcgagggcgatctggtcgtgacgccatcggaccagcacttctggttcgggcggccgcgtatcatcctgcacctcatccacttcatcctcttccagaacgcgttcgagctcgccttcttcttctggatactgatgacctatggattggagtcctgcttcatggaccatatcggtttcctggtgcccaggctcgttctcggggtcgtcattcagcttctctgcagctacagcacgctgccgctttatgcaattgttacccagatggggagctactacaagaaggagatcttcaacgagcatgtgcagcagggcgtgctgggctgggcacagaaggccaagaagagatcgggggtgaaggaggtcagctcgccgtccgaacccatgcacggcgaagatgcggcctaggattgggatgccgagggtaacgggtagctggcgaggacaatgatgcagcagttgtaaagcacagactagctgtaatttttttgcagatagaaccgtaaaacactgctcgtaatctttactattataaatcacaccagttttgacagtactcaataacaagtagcagcgagtttccatctaagtagaatgaaatattaaagaagatcggcaagagctttgagaggatatttcaaactaaattattcgaagacacgaaaagatctcataaactaggcttcaaaaagttgacaaaacaaattaaattagagtaggaagaagcaacaaaaaatgtggaagagaaagatgagaaagagaa

SEQ ID NO: 135720 - DNA, 1046 bp, Zea Mays
cagacccaggtgcaccacacctagacctggaatggaacaccacggaaggtacgtagagccgctggtactgctgctacaatggcatttgatctgcatacattgcatccggccttccaaatcttcctcgtctgtcctcctcccccgactagagcaatcccaggtcaatctctgcagccacatcagtatctccatcctcggccatcgagccactcgaatcaagatcgccttcgcttgattccacaacccattggcagtggcaggcaaaaaaattcgccttctatatgtgccgcggcctcccaactccagctccagctccagcgcttcaatttcagtcccaggattgcagtcggcagcagcgaggtactacccaagcaccgcccggccgagcgagcgagtccgtgcgtgcgtgcatggcagcagagaggaaggcggcctcccgcccggccgcctgcgggcgaatgcgcggcgccgagggtgccaagccgcggggccgtcaggcaaaggcagcgcgggcaccaccgggccaggggtacttcacggcggggctggcggcgctgttcctttgcctcaccacgctgctcgtgttcctgcctctcgtgctgccgccgctgccgccgccgccgttgctgctgctgctcgtgcccgtgggcctcatggctgtactgcttgcgctggcgctcgtgccgtccgacggccgggccgccgccgccgccgtcgcttcttcatcgtgcgtgtgctgaagacggacgacgcatcgcacgtgtgctagacacgccgagagactgtactgtaaaaatgtggcggtttaacatttgttttgttaatttgatataaggaatagtgatttcctacttctctctctgtgttctgaaatgatctttcagttgttaatcctgaggcagttttactgttttcatgctccaagataaaatggtagtagcgtagctatcacgccacatctgtgaaaagctctcggtcattggaccgtggtttttttaattttgaatcttcttaataatgttataataataaccgtatacaaacaa

SEQ ID NO: 135721 - DNA, 776 bp, Zea Mays
aagttgccatctgtaagcaattattattgctagcaactgatgagaaagaatcgcgaaaagatcacccgctgccagctgctcccatcaagaacgtcaaaacaaaccttgcactagctagcatggcatattatacaatctcgagttctccaacacgatcaaaatcaaataacgacacatatgtatgtacacatacagcttgatgagtgaccttgccatgctcgtgaacgaccgaccctaacgtacgcctacgcccgcgcgcgcgctcggttgggggcggcaatcaggcggcgccgatgcaggcgaaggcgcggacgctcctggccttgggcagcggcacccggagccgccggtcgggcgagagccccacctcgcccgccagctcctccagcgacaggttccgccggtgcagcggcgacccctcggccgccgccgccgccgccgccgccgccgccgccctcgccgtgtgggtgtggcccgcgtgcaccggggaccgcagctcctgctgcagccaccgcctcctctgctcggggtcgtccaggtccacgggcgcggaggagaggagggcacctccgctgcggtaggatcgcccaccgccgccggcgttgctccgccggtccttgatggccttgtagagcagcgggatgaggccttccatcaccggatcgcaacgcaacctgtgaggtgaacgggtttttgctggtggtctggttcaggggagtttggtctggttggctcggaccttctatgcaatgcaacacccctcttactctattatt

SEQ ID NO: 135722 - DNA, 2332 bp, Zea Mays
tctacctaaatgcttaccttgaacttatcctttaaaagccttccctttctttcgaccaagtttgagagttgtgagctacctatctcttccttgatttcttttcacttcatgtcaccttacaagttgtcttaattccatcttttgttgtgtttttatttgctatcgtcatcaccttatcatccatcgatcttgccttgatactcatctttattaatacccttcaaaaatctcctctcttccacctcaatttgagagcgacaattcacctatctggcccttggacgtaccctctccttttccatttgatggtctggtcttaactccattatttatggtacttgtatccttcgtcttatgcctatttatctcctctcatacatccttgtccgttattacctttaaaaccctcgtgatatctatgcccttgccttcctgcttaccttgaacctaccctttgaagccctctcttttccatcactgttcaaggataatgcctaatctatttcaccattgactgctcccccttctttgacaccttgcaagtcttgtctaaaatatatcttttattgtgtgtttgttcattataaccttaacccttgtcatccctcgatcgttaccttgatgcttatcttgtacctgcattttaaggccgcctctccaatttcatttcaagagtgatgtcttacccatcccgctctttttctttcccttttcctctgtcgcgttgcaagtcttagcttttgctcgatatcacccttacctttgtaatatctagatcttcccatgatgcttatattatgcctaccatttgactcatcatctttcccatctcgatttgagaattgtgttttacctatcctgaccttggttgcattctctccctttcggttccaatccttgctttagctccaccctttattatgcccatgcccctatcctacatttcttattattccccttgcctttcgatggccttagaatagtttccccttggtaaggaaagaccaccatttaattaaaagttacatatagcaacgagatatttgttgttgtatgcttgtgctgtttgtctttgtgttatgactgatttgcttcttcgggatgagtgttggtgtgttgtggcccttggtccacaatggaatctgtttactaggtgaatgccatagagttaagtatttgggttctccccctgctctctctaatccgtctatacctaccttttctcgctattctttcctcttgcacctgtccatttggcaacctccaactcctccaaatcaatcaagatcagagtcggcagcatcttcaccaagtgcatatcaacactcctattaagggggttagccgctaaccccaatgaagacaatgcgatcaacatcagcaaccaagatcaaagtggcgcagcggaagcgtgtgtggggtcctaacccacaggtctaagagatcctcaagaattgcatcgatcggtctcaagcatctgaaagtcaaagcaaaccagtccccaggttaagcttgcagagtcaaagtcaactcaagaaagtcgtggacaaccgatgaaccagacttgtttttcttgctagcttcttcttgaatctcgggggcgagattctgttaagggggttagatttgtaacaccctgaatttgggggtataaaatttcttttcaataatacaccaaattcaggtgttaccctcttctttcattgcctttctttctcttttcaaaatagtgaatgaatattttgcttttatgtaagtattagatgtattaatgaaactcaaaaggggtttttgattgttgcatcacatgctggagcattaatttttgttgttgttgattgagttgaaggagttttactattaaatttattctctttttttaagcctaatttaattaatatgagaaatttacctaaacatatttattgaatattatttggaaatattattattattatatttttttaatatttaaaaaaacatacatttatttatatattttgaataacttacatgaagaaaaaaagaaagaaaaaaagaatttcgaaataaaaaaaaagaaataaaaaaaatcaaccgttggccaacccagcccacgatccccctccccacgtgcaccaactcccaccccatccttttttctttttcttcatgcctatgacggtgggccctactagctcattttctctcccccacgtattcttctccctggttcgattcaccaaaaccgctcgtctctcagcctgtctcgccgcgccgtccatctgccggagctcaccgctaccgtacgtgctgattcaagacccaccgtccgtcgtcgcgagggcgaggt

SEQ ID NO: 135723 - DNA, 114 bp, Zea Mays
ctcccacgttcttcctcacatgcacggtaacaccctttctccccctttctattatttgagtaatagagagttatccaacaatctaaaccattggttttgatgatatgttaagtc

SEQ ID NO: 135724 - DNA, 270 bp, Zea Mays
atggagatctttgagtatgttcagaaaatggattcgtatccaaatatttcaatcgcttaccggatattatttattgtgcctgtaactgttgcatcagctgggagaagcttttcaaagttgaaattattgaagaactatttaaggtcaacaatgtctcaagaacgactcaacggattggccactttatgtattgagaagaaattattggacaaggttgatagcaacactattatcaacgacttcgcataagaaatgttagaagaaaatttt

SEQ ID NO: 135725 - DNA, 91 bp, Zea Mays
gctcgggccggccgacctagactcctctaatcggcgtagagtcgaagagaggcgaagaatttggggattgagaggctaaacctaaactaga

SEQ ID NO: 135726 - DNA, 313 bp, Zea Mays
attgccatctctaaacctcacccctccctagtatgcgaccctgtttcctgtctcctaccctcttgcggtcttgccagcgccccttcctcccttcgtctccgccgccgcggactcctcgccggaaccctaaatggaccccggcgccggtgcacactactccgcccgtaccgcggaggaagtcttccgcgatttccgcggccgccgcgcgggcatgatcaaggccctcaccaacgatgtggagaagttctaccagctgtgcgaccccggtgagtctgctcgacctcctcggggccgccgacagtcactttgctag

SEQ ID NO: 135727 - DNA, 1224 bp, Zea Mays
attgccatctctaaacctcacccctccctagtatgcgaccctgtttcctgtctcctaccctcttgcggtcttgccagcgccccttcctcccttcgtctccgccgccgcggactcctcgccggaaccctaaatggaccccggcgccggtgcacactactccgcccgtaccgcggaggaagtcttccgcgatttccgcggccgccgcgcgggcatgatcaaggccctcaccaacgatgtggagaagttctaccagctgtgcgaccccgaaaaggaaaacttgtgcctttatggctaccccaacgaaacatgggaagtaactttgccagcagaggaagttcctccagagatccctgaaccagctttgggtataaactttgctagggatggcatgaacgagaaggattggttggcgttagttgctgtccacagcgatgcctggttactagctgttgcattctactttgcagcccggtttgggtttgacaaagaggccaggcggcgactcttcaacatgataaataacttgcccacaatatttgaagtagcgactggggttgccaagaaacaaaacaaggagaaggaacccaataataccagcaaaagcaacaaaccaagttcgaaaatgacaacaagacccgagtctcatttgaaggcgacaaaagtggcgccccctaaggatgaagatgatgagagcggtgaagagtatgaagaagaggaagagcgtgataacaccttatgtggatcctgtggaacaaatgacggcaaggacgaattctggatctgttgtgatagttgcgagcggtggtaccatgggaagtgtgtcaagatcacgcctgcacgagctgagcacatcaagcactacaaatgcccagattgcagcaacaagagggcaagagcctagcaccaagccctgctgtgactctggagtgaagtaagcgccaaatcattgatgtctgcagatatatgcctagctgtctagcttgtagacttgctttccatttggaatgaacgctgttgattcactcggttgccctcagcagctcatgttgctcaggcttaattgtgtttaatgttttactagcgaaacaaaatgtgccagtgtgttgcatcggagcgtatattttattatccggtaatcgtacccatagcaaacttgtctatacgttgcaacaggacgtattattgtgcggttatttaaggctagccatttttgtttgactaaaa

SEQ ID NO: 135728 - DNA, 115 bp, Zea Mays
ggcatgtttggttcactacctcagttgccacactttgcctaacttttctgcctaaggttagttcttcaattcgaacgactaaccttaggcaaagtgtgacacatttagccacgaa

SEQ ID NO: 135729 - DNA, 1780 bp, Zea Mays
aggagcccggtgccacatttactcactcactccccaatccacccaccaaccaacccagaacctctctacattcctcttcctcctctatagtctatatacacacaccaagagcaggctgcagcaggctcacgccgcaacctagctagcctgcacgcactctcactgaccacgaccagcgctcagccttctgctccggaagctagctctccggccagccaccccaccccgtccacccgacaatggcggccgccgtggccctcctcctgctctccgccctcggcggagcggcggcgcaggtgttccctccgtggaacggcacgttcccgatggggcccgggttcggaggcgggagcagcagcggcggcgcggccgcgggcgcgggcgcggggacgggcgtgccggcgatgttcgtgttcggggactcgctgacggacaacggcaacaacaacgacctgaactcgctcgccaaggctaactacccgccctacggcatcgacttcgccggcggccccaccggccgcttctccaacggctacaccatggtcgacgagatcgctcagctgctgggcctgccgctgctgccgtcgcacacggacgcggcgtcgagcggcggcggcgacgcggcgctgcacggcgtgaactacgcgtcggcggcggcggggatcctggacaacacggggcagaacttcgtggggcgcatcccgttcaaccagcagatcaagaacttcgagcagacgctggagcagctgcggcgccggacgacgacgacgaggccgggcgcgggcgcgggcgggctggcgcggagcatcttctacgtgggcatgggcagcaacgactacctcaacaactacctcatgcccaactacaacacccgcaacgagtacaacggcgaccagtactccacgctgctggtgcgccagtacgccaggcagctcgacgcgctctacggcctgggcgcccgcaggttcgtcatcgccggggtgggctccatggcctgcatccccaacatgcgcgcgcggagccccgtcaacatgtgctcgcccgacgtcgacgacctcatcatccctttcaacaccaaggtcaaggccatggtgaccagcctcaacgccaaccgcccggacgccaagttcatctacgtcgacaactacgccatgatctcccagatcctaagcaacccgtggtcctacgggttcagcgtggccgaccgcggctgctgcggcatcgggaggaaccggggcatgatcacctgcctgcccttcctgcgcccgtgcctcaaccgcaactcctacatcttctgggacgccttccacccgacggagagggtcaacgtgctcctcggcagggccgccttcagtggcggcaacgacgtcgtctaccccatgaacatccagcagctcgccgcatggcagccgtgactcagtgcaaagctatcgatcgatcgatgcgtcgttttgtagcgctacttactgctatagcgtgtgtgtgtggtcatgagtaggagggagctgagcggagagttatggtacggtgtgtatccgaccagtctcctgttgtttggggggtcaacatcgtgtctcttttgtttttggttcatcatatcagttagttatctatcagtgtttgttcgcttattacctgtactgcatcacggagataagtggagttctatattgggttttttaaattggtgccctcagttttggtggtatgctcacatataaccttagttgtgttttttcttatgtggttgtctccatgtttgccaaagttagctccgatt

SEQ ID NO: 135730 - DNA, 3004 bp, Zea Mays
cccaaatacttctcatccccactccccagcgtcctctgctctgccgccgcacccaactaaagcgcagtgcgtggccagtagtgtggacgtgcggtggcttcacgctcgcaccgctcgccagcccggaccctaatccagcgtgcttggcgcgagcacggaaggaatccccgtagcgaggaaggaatcaccggcagcgggtggaaagcttcacggggcccaagcaggggctgcaggaggccgcgaccgggctgtttcggctcatgcctggatctgggggagagggacgcgcggagccgcgccgcgccggatcccgttcgtcggcgcccggatggtgatcagcggttccagggtttacaagtaacgtttgcacaacaatagtgaactaggtacacactacaagatgacaactgaggtcaatcaaaacttttttgcatggtcacaggaggaaacttcggtgcaagatctttcacagggaacatcacaaatgtttggtcatggttccatatcttttggaagatttgacttggaatcattagaatgggagaaatggtctgtatttaccaatgacaggcgtcatgaagagtttggaaagttcaatggattagttgcgaagaagaaggcatactttgaagaatactttaagaggattagggagcttaaggctttacagcaacaggaccagcaaactgaacttcatctggagtactgtggtgatggcagcgattctagtcaaacaggagaatatgaaccagctgcagcccatggagctcctactgaatctgaaacacttgttgaagattccacaaagcagacagcagctgcaaccacgtttgaacatggaacggaatgctacggttatcatgagaatgggagtttagttaatgaaatttctgcaccaacccatttttcacctgttggtgatttgcagcatataggcaaacaaatgaaaggaagtgttagtggcaaaatggatatattgaagcaagatgctaattccagccaagatgttcctatgatccatgagattatgatcactcctaacaaacgagcaattgagaaagactctcgggttggtcaggcttcaaaaacaatttcgaagactgtcaaggtgacttctagtaatgtttctgatcacacatacgtttccaagggaccctgttcaggcgagcctagtgtgataaaccagatggcgaaaccagaaaatatcctgtcattgcggaggccaagagaagcaaccagtgatttagttggcaccacagcaagaagtggtattacaggtgtaagaagaccttcagcagcattacaacggccctctaccaaagaacggcgacctgtcacaaaagatgcttcaaggaagcatgctgaagttaccaccccatgccgtccatctacttctgaaagacgcacggtgaccggagagtcggcactaaagcctgaaaacaatgctattccatgtcgacctgttaccgctcacagacgccctatcaccaaagaatcagcaacaaggcaatgcagcattgctacaccacgccggccttctactgctgacaggcgccctgccaccaaagatctaacaccaaagctatccaacattgctgccccacatcgaccttctactgctcacaggcgccctatatccaaagagtcggcaccaaagcatttcaatgttgctagcccacatagaccttctactgttgaaaggcacactagtggcagagatatgacatcgaagtatgttggtattgctacctcatatctgccatctgctgtcaaacagcgccctatcactggagagggtgcacataagcatgctgatgttgtcaccctgagctgttctactgctgataggcgccccattagagacgttgcaccaaagtatgccactttagctctgccaaggagaccgtctactgccgagaggcaccccattgctagagatattgcaccaaagaatggtttatcactcagaccttctactgcagagaggcgaaccattgctagaaatgttgaaccaaagcatgcaccggcacagaggccttctactgctgagagacgtcctgttaccagagagactgtactgaagcaagctaatgttgccaactcatgtttacctttgacgccagatagacgcctcaccaaaaaaggtgacatttccacccttgagtgcccttctacaggaggaaggtgccctatcaccagtggtactgcactctggtcaagaacaatgccgtactattcaaagggtgctttggtcacagaagttactccccagaagacaataactcccagggttgttagaaacagcaagctagaaaacctaagctatgcaaaagaaagggtggaacttcaagtggatagaaagcaaaagtcaagtctttttaacctgtcctcgaagaaaacattgacttccaacgttagagatgaccaaggtcttgaaatgttcaaaaagccaaacaaggaggggggagttcgggctcatgcatacaaatcaaataatgcaactacttcatggaccggaaatgtaaagacaaaggctcctgtgcctccgcctctgccaccgcgccgaccgtactgcactgagaagaaaccgaatgtcaacagttcacctgttggtggaagaaagacaaaggcctcagctccacactggcactgaccccattatctaggatcctgcagcataactctgaagccgtgaaggtaaaagctatgcgtctgacgtgacctagaaggctgcatccatcaagcaacgattgatgttatctattgtagcttaccagcagtcttgtgacttgtcacctgtgttagaataaccgtagtagttagtgtatgtagcaacgcgtagcatatatatatatatatatccactaatgtctaattgaaccgtagtagaactgccctggatttaactagaacattgtatatacctggaataattggagcttgagtatcgaaccaggagttatccgcacggttttgcaggtcacatcacatgctgctttgaacc

SEQ ID NO: 135731 - DNA, 1471 bp, Zea Mays
gccgaggcccccagccaaacgcaagacgcgtcccacgactacacgagatgccctagcacgcagcgcccgccgcccccaactgactgaacggggcgtggggctcccacgcttcccgcccacgcgccgcccacgtttccttattctccaagccacggaaaccttctcgaacctcccctttccccattctaccccttctccaccactcgcccttagcccttttcaggggcagttccgtacttgcgcgagctccacgcgcccacgcctggttctagtggtctacagaacaaccggggtccctccctgcgaattcgccgcaagtccaaaggcaaagggcaaagcagaagttgcggttggcctcgtcctcctcttctccgtcgcggctcagatctctgcgtgcgtcgatggcgtcgttctcggaggctccccccgggaacccgaaagccggcgagaagatctttaagaccaagtgcgcgcagtgccacacggtcgacaagggcgccggccacaagcaaggtccaaacttgaacggtctttttgggagacagtcgggtaccactgcaggctactcctactctgcgggaaacaaaaacaaggctgtagtctgggaagaagacactttgtatgagtacctgcttaaccctaaaaagtacattcctggaaccaagatggtcttccctgggctgaagaagccgcaggagcgtgctgatctcatcgcgtacctgaaggaagcaactgcatagttcattgacatgccttttgccatgaagagaaaaattgttttgcagtttaataaaaaacattttagacaatttgggtcaccctgtttgaacagggtgcaaccacgtctcattattttcgttcttatggtgtccgtatggaatgcctaggtgtttagctgtgcacaaataacagttaaactttgacggctcctatttcaagtgctggagaaatgccagtgccctatttttgaccaccagggtgtggaatggaaatcggctggtggcaatgggggctagaagggaggcgagaagggccctctaccgccccgcgcgaggcgataggcaggcgagagggagagagagggcgacgacactcacgcccggcgagagcgggcgatatcgcctcgctctcgcccgcgttggcgcgcgcgtctgggcgagagggaggcgagaggggggcgacgcactgacagggcgagagtgcggtggcgcgacgtgattggtccatgtgtgccacgtggactagccgttttttaccgtttggagtccaaaacattcgaaaaaaattgcaaaaaatcacaaatttcattcccaatccatctataaatatccctacctattggaggtcataattagatttatgtaattttctattaattgttatgtaattttttaattgtcatgtacttttcttttaattattatacactttgtaattttaaattcaataaaaaaaatattatgttgtgtga

SEQ ID NO: 135732 - DNA, 813 bp, Zea Mays
cgactttcttcggatcgagaaccaagccaccgtcatggcctccacgtgccgccccgtcctcctctcgctcctcctcctcaccgcgccggcgttcggctcgacgctcctccccgccgcagccggcggccccgggcccgccggcgggcaccagcgtcccggtcccggcccagccgagcgcgtacgagatgctggaggggttcgggttcccgaggggcatcctgccggagggcgtgaccgggtacacgtaccgcgcgtcggacggcgcgttcgaggtgttcatggacgacggggactgcgagttcgaggtggacggcggctaccgcctcacgtaccgccgcagggtccacggcaacgtcgcgggcggcagcatccggaacctcggcggcgtctccgtcaggatgttcctcttcgactggagcatcgaccgcgtcgccgtggaggacgcggcccgcctcgtgttctacgtcggcccgctctcgcaggagttccccgccgataacttcgggcagtcgccgcggtgccggcgtcgtcgccgaggtagcgggaacggcggcggcgtggcgccgatgtagggtaccgtacgtggcatcgggtatgtacatacatgtacgtgacggaggccggacgagagaatcagacgatggagatcgttgattcaattgtacgtgtacagattcaacttcgtgtttttgcaatgagacgcttcaattatattatatactccgtatatggctatcaagagattgcgtttgcaacattgtgatgttttagtggtttacctccgatcaaagtgacaatgattattgcgtaggt

SEQ ID NO: 135733 - DNA, 849 bp, Zea Mays
atgatcaagcttcttcccaactttaagggactggctctccctgttattggcaatggcagatcaatttcgttctgggatgatcagtggagtcagagcatcccgaggcaaaattttccagagttattctcctttgtcaaaaacacaaaattgactattaaagaggccaaagagcaggagcagtttgatggttcttttcatttgcctatctctgaacaagcgtatgatcaatatctggtgctgaaggtgtcttgggagcaaattgtcctcagtgacgcccacgaccgttggcggtacatttgggggtctgacaaattctcctctcaaaaagcttacagattttttatgggccagacgcagattcaccctatctacagactattatggaaaagcaaatgtcagcctaagcatagagtcttctattggttgtggcttaaaaataggctaaataccagagatatgctgagaaggagaaacatggagctggattcttattcttgcgagaactgcctatggaaaagagaggagactctctatcatctgttccttagatgcaatttcgcgaaagcctgctggaactcaattggcataactccgcccagaatttctaatcctgaggaggcatcagcgaaccttaaccaccagcttaacgttcccttctctatggagattattattctcatgacttggagcatctggaaaagccgaaacgagtggttgttttcaaacaaagatccttcggtacatcgctgtacgcaggaattcagcaaagagctgcggttgatcatacacagagcgcgggggaactttgacacctctatcccgaattggctaagtctgtggcaggcatag

SEQ ID NO: 135734 - DNA, 1420 bp, Zea Mays
tcatgcctttcgcgagagaaagtggtcgaatcggcggctgatttgacccggctcgctattagagctgcgaaagtgatccgagcagtcacggtttcggaagcggcgcgtcggccggaggagaaacgcaaccagctgtcgaggagctatgagcagcggtggcggaggcagagtgccggcggcggcggcggcgcagtcgcaggagctgcagctaccgccggggttccggttccacccgacggatgaggagctggtggtgcactacctctgccggcgctgcgccgggctgcccatctccgtgcccatcatcgccgaggtcgacctatacaagcacgatccctggcagctcccaaggatggcgctgtacggcgagaaggagtggtacttcttctccccgcgggaccgcaagtacccgaacgggtcgcggccgaaccgcgccgccggcgccgggtactggaaggccaccggcgcagacaagccggtgggcacgccgaagccggtggccatcaagaaggctctcgtcttctacgccggcaaggcgcccaagggcgacaagaccaactggatcatgcatgagtaccgcctcgccgacgtcgaccgcaccgcccgcaagaagaacaacagcctcaggttggatgattgggtgctgtgccgaatctacaacaagaaaggcgcgctggagaagccgaccggagccggcggcagggccgaggccagcagccagggcgcgctggggtccatgtccatgggctcgccgccggagcagaagccgtccgtgctgccgtctgccacggcaacggcaacggccgcggccgggacggggtacgcgccgctgccgttctcggagctggcggcgtactacgaggtccggccgtccgactcgatgccccgggcgcacggcgcggactcgagctgctcgggccacgcgctggccgccacgtcgtcgtgcggcggcggcggcggcgagcggcctgaggtacagagccagcccaagatcgccgagtgggagcgcactttcgccgccggcgccggcccgggaatcaacccggccggctcgatgctggggcttggcgggcatcagctcggctccgcggcggtgggggtagggctgcccgccggcgacccgctgctccaggacatcctcacatactggggcaagccgtactgagaaagatgactggtccgagccgccggcgatgaggccatgtcggcttgtgaatgatcatggagctggactacaggattattgctgctacgagttgaattaaactgtttatatgcgattgatttggtactgggatttttgtatacttgaattagtactctctctatatagagagacatacacatactcgagtatatatgttttgcttatatatagagtatggaataatatttatatctgctggtccatcctgcaacc

SEQ ID NO: 135735 - DNA, 2324 bp, Zea Mays
accgtttccgcccgcgtcctcgcctcttctttcttcgcctcttctgcaccgcgctctcgctcgcccctccgccgcttggcctccaccctcccgctgccggctccgccgactggacttccgcccgtcgctggccgtcggcgcgcccgttcctcgcaggtgaattgttcaggctgaattgatcggtggaagctgtgcattgactatttttttatctcagaatcaaagagataaattgaactgggaggctgggaatcgcgagagaagtgatgtctttcgttaggcaagcagacccatcagcatcctgtgcggagaccacttacatccacaaatttgtgccaccaggatcagttttcccagcacagagatttgtctctggcaccgacttgcttcaccacgggcctcaaccatataatgctgagggctacaagcagtctggtttcaatggcacagcgcctcatgcatttcagagcttttacaatactgatagctatgctgaatctcactttaatgaagcaccatattctcctgcaatcttcgatatatctcagcagaactctcaatctttatcggataaccaggcctctgatcttgtagagttcgatgaggatgagatgagagtaaagcttcaggagcttgagcatgctttactcgacgatggtgatgagatcttttttgacttgtcagggagcattaacgatgagtggaatgataacattaagacaaacaatgaatgggtcaatacaatgaagaatattgtgagccccgactctccaaaagaggcatcacctgagtcaagcatctgctgtcttgacaacaatgttggagaagcacggaacccgaaacagttgctttttgactgcgcagaagcgatatccgaaaatagcatcgatgaagcacagtcaatcatagcagaactacggcagaaggtggcaattcaaggagacccttctcagagacttgcggcctatctcgtggagggccttgctgccacactacagtcttcaggaaagggcatctacagggccctgaggtgcaaggaggcccctactttgtaccagctttcagccatgcagatcctctttgaaatctgcccatgcttcaggctaggcttcatggctgctaactatgctattctcgaagcctgcaaaggcgaagatgtcgtgcacatcattgactttgacatcaaccagggtagccagtacataactcttatccagttcctaaagaataacagtaacaagccacgccttttgaggataactggtgtcgatgatccagagtcagtgcacagagctgttggaggactgaatgttgttgggcagcgactagagaagcttgcagaggactgtgaggtacggtttgagttcagggcagtggctgctaacattgaagatttgactgctggaatgctaggtcgccgtcccggagaggccctcattgttaactttgcattcctgctgcaccaccttcctgatgaaagtgtctcaattatgaaccaaagggatcggcttctccgtatggtgaagggtctccgaccaaaactagtgacgttggtggagcaggacgcaaatactaacactaccccattcccttccaggttccgggaggtctatgactactattcggcactttttgattcactggatgccacccttccaagggaaagcccagatagaatgaacgtggagcgccagtgcctcgcacgggaaatcgtcaacatcttagcttgtgaaggccctgaccgtgtggaaaggtatgaagtggctgggaaatggagagctaggatggcaatggcgggctttgtgccgtccccatttaacagcggcgcggttgatggcataagatctctactgaaatcgtactgcgataagtacaggttcgagaaggtccaggacggcctccactttggctggggcgacaagacgctcgtcttctcttcggcgtggcaatagaagcttgcttgtagtattgccgatctgagcactttccagcgttttaggagcatctggtgcaagggctgtaaagagatttctgtcgccgtattgttgaagtacactcgtagctaaccttagcgtgttgcctgcctgtaggcttgtgaggtctacggtttacctagtttcttagatgaagtatgttgtgcattgtacacctactgaactacatgtagactgtagagtcgcgggtgtatttaattttgcccttcttttggaggggcagaatcacaatatgtcgacattgtttcgtgtataaagtactggatgatgatgatgctcttttgtactggtcatgagatgggataaaataacaaaaaaaatcgccaatcc

SEQ ID NO: 135736 - DNA, 101 bp, Zea Mays
agggattctgttgtgtgttattgcctgcctccggactcctgccgagaggactaagtattgttcacaacgggcacccacgtcacaacgctagtatgccaaac

SEQ ID NO: 135737 - DNA, 495 bp, Zea Mays
gcaggaagactcgttttggtcaaatccgtgttgtctgcacaacctgttcacactcttacgaccattaatgtacctaaggtggtgctcgaaaaaattgacaaatttaggaagcatttcctatgggcagggaatgagaacctcactggtggcaagtgcaaggttaactggccgacggtggcgaggccgttggatcttggggggctcggcgtacttgacatccatcgctttgcaagggcgctgcggctccgctggctatggcgggagtgggaggtcccagaggccccttgggcagggttacagaccccttgcaacgacactgataaactactctttgcagcagccacgagaatcgcaattggcgacggcgccaagacctccttctggcattgcgcctgggtcaacggtcgacgacccaaggacattgcgcctgacatcttcgctgcctcctctgactgcaggctctctgttcgggaggccttgactgacagcacgtgg

SEQ ID NO: 135738 - DNA, 100 bp, Zea Mays
attacgtaacctctatgtacccttcctgcggtgtctcttgggcactgcttcactctcttctttattaatagaaacgtgcacaatctcatgccgttcgttc

SEQ ID NO: 135739 - DNA, 581 bp, Zea Mays
ctaaccgcttccccctcgtcgcgctcgcgccgcgccgcgcctcgcctccaccagctacgccgtcacgcgagctcacggcccgggggcctcggaagcacaaccaccacgcgtccacgccgaagccacgaggagagcctgtctctcctccggggattctatcgccggctggtctcagcggcgccacttggagcaggcggcacccgctccgtactgctgctgatttggtgagcgcgggcagccgcgggatgggagatctggtggcgtgatggtgagcccgggcagtaaccggggcggcctgtcgcgcgtatcgacgcggggcggcgtcgccgggccggggagcccgcgcgcctctcctgccgcgaccgctttcgcggcgctacggcgcaggtggcggtgggcgcccccgggctcgtcgacgctggagcgcgcggcccgcgcgttcctgctggcctccgcagcgctcgtgctctcctgcgcgctctacctctacgtgctgcgctacgtcggccggggaggtcgcgccttcgccgcgcggcttcgtcgggacgccgtcctgggcctcggcgcgagccgtgcgacgt

SEQ ID NO: 135740 - DNA, 198 bp, Zea Mays
ttttttggatagatggtgttggaaggcagttgagattaatgatttggtctctcgaacgaatctactcttttctatgcacatgttatgtattagtaatatataatgatagagagccgacagtctatcttttccacacactagattttagggttttcctgtgaggctgtgaaaaaactctttatgtgaggaaaaatattt

SEQ ID NO: 135741 - DNA, 732 bp, Zea Mays
atgccggaggggtgcttggacagatccaccggctggctgtcctcgagccctggctccgccatccgaatcacgcacgcaacctcggcggctccgcgccacgaatccgcgtcgaatcagaggcctaaatggtggatcccgctgaagaactcacccgatgtggccgtgcggttcacggcggagcggtcgcagcggtcgtgcggagctgtcgcggcgggcatgcggagcagtcgcgagcatgcccctgcccccgcctccgtgacccccgcgcaccccacccccgctcaggtccgcccccatcccctccccccgcaggaacaaaggactcatctgagcgagtgggaggatcgatcgcctccccctgatgctctgattgttttggcatggcgagatcctgcaactgctcctcgagactgggcaccatcacgccaaatactagctgattccttggatttgagtggcagggcgttttggatctgctgcgtgcgtgggcgatccaatccaacagggctcaggtacgacgacagagaacgtatccttattgaggagaacaagggcctcctctctgcatcctccttcgacaggcctcgtgccagaaggcaagaggagggctttaatccctctcctgatgtaggctacatcagtgaaatattgaagcttatacatgaagagtttgaaccaaggcaaagtctactgtcactggtgtttgatgttcagttgctgaagatcatgtga

SEQ ID NO: 135742 - DNA, 1221 bp, Zea Mays
atggcgatgggtgataggttgcgtgccatggatctgtacgagatcctcctcttcgcgacacgactggctcgtagggcgacgacatcctcaatctatcgcgtggccaggcagttagttctagacaggaagagatcaccggtctatttcctgtattcaggtgcccaaaagctgaacagagctgagcttgaagtcgcttgtgaagattttagcaacatcaacacttttcctacctgtatcgtgttcaagggcatattatatggcggggtcgatgtcggcattgtctccactgtcatatcgtcgagcaaagactggtccaggagcgcaaaaacatgcttcaagaaaaaggatgagaagaaacctgaagatgcaccacagtctgaggttgagaaggacaaggagggcgcggagaatgaagaagaagaaaaggaacctgaggataaggagatgactctagaggaatatgaaaagggctctgacaaggacttgaaaaagaaagaaagtgctgaaagagaagaacggggcaagaagggctctgacaaggacttgaaaaagaaagaaagtgctgaaagagaagaacggggcaacaaggaatccatgcggcttggctcggcggcgaccaagcctgatggtcagccgacgcgtggggttctcaacctgcattgcctaatgttgtcatgccgaggtgcatggggatttgggaccatggtgagcagaggaaggagtactgcacaagataaatcccaacgccccagaagcatgtccttcagccctgagcgtgtccgtgttaggggaagatctccagcattcactgcattggcagctacttttgaaagttcaagcaacataaatctttcgactccacctgtagttaagaaactttacccgagatctgttacacctgattcatcgaatacttccaagtcatctgtaattgtcgctctggctggttctttggatcacccttctcaaactcctgctccagcattcatgaaagatgtaaaagaaaacgagccagaagatgaagacatccttcctatttacctgtatgaacgtctgaagaccacaactgctgatcctgtcactgaaattgatgtcatgaggcgagagacctacttatcttcgactgaattcagagagaagtttgggatgacaaaggaagcatttagcaagcttccgaagtggaagcggaacaagctaaaaattgctcttcaacttttttag

SEQ ID NO: 135743 - DNA, 1097 bp, Zea Mays
cgcgctgcagtcagccctcatggccgccgcacaatgccagtgccagaccttcaccacgggccgggcgtgcatggcagatcttccatttaggtagagtagtggacaaccaagcccaaggccaaagccattgcttgctcagcctctctgcactgcagggcgatgatgaggcaacggcaaactggcagcagcaagtactactagcgcttgctaaaggccaggagcccaggacccggaggtgctcgctgtcgctgatcaaccgcgcgccgtcgcaggcagcacagcaaccagcaacagccaacagctaggcaggtagtagtagtatacatgagcaggttcgcggggcagacgtccaccaggccgtgggtggggatggcgggctctggcgccaccgcgtccgagcctgccgccgccgacgtcgcgagggacgacgccacggcggccatgaggggcgccggcgccggcgccggcaccaacgccagcgccatctccttcggcttcgcggccacggcggtcctcgtctccatgttcctcctcatggccatcttcgagcacctcatcaagcccggcctggcttcctcctcctcccgcggcgcatcgggctcccatgaagacgccgccgacgacgatggcgaaggccgcggccaccgccaccgcatggggggatcacccccggctcgactgcgcgagcgcgacgacgcggcgccggacaagctctgtcacctgccaaaggtggaggccgtggtggacttgacggtgctgatgccggggcagcggtacccgacgttcctggcgcagccggcgccgctcgcgccgtgccacagggaaggcgtgctctggccttcccacgaccgtcgccgctcgtttgtgccaccgtgattttttccccccaccacatcgttctttctgtacagaggttattgtaaatggcagcgccctggcttattcgaggctgatatatcatatggctgttgtcacatgtgatgtggaacactgtttcggtatggtagatatagcgatggtaggatagatcttcacatgcgtacggccggtacgtagtttcagcaacttgctaattaggctgggaaatgtcgttgggt

SEQ ID NO: 135744 - DNA, 575 bp, Zea Mays
atgccgccgcccctgcagcctccactgttgctgcgccttcacctcctcttccgctctgaaacccaaattcctttactccggcgacgacccagctgcgacgcgccccattgccggaccaggaggtatatatccgttcgcgcctccgctgcacagctcgccgccgcggacgtctcgacggcgcagcagcttgaacttgggttggaggcggcggcagtgggcttcgtcaccggtaagaggaaggccaccgaggttctggagaaatattgttcagaaaggggatacggtggtcgatgccacatgcggccatgcgggaatgacaatgacacgctcgctctgcttaagatggtggctgacaaaacaggccgtggatgtgtttatgggatggacattcaagaatctgcgatagagaatacttcctcttttctgaaaatggccgtggatgatgaacatcatgtgtgggtttgaactatgaagcttttacctaatttcccctgaagaatgaaatagaaaggagacacttatgaattctgatttgacattattatttactattcagatacagaggatacttgtca

SEQ ID NO: 135745 - DNA, 251 bp, Zea Mays
gccactgcttgagtcaccccgatgtgcctggtcctggtgcggccggccacggtgtgcccaccggcgccgcggaagccgacgaggccattagcgctcaacagcaagagaaagcgttgctgcctgcagcgcgtcttctcccccatgccgctcgacctctccacggtgcagtgttcgtgctgcgtggccccgcggacaggtcgtcgttgccgccgcctagggccgccaagatccgcctgcatgtcgtggcctga

SEQ ID NO: 135746 - DNA, 110 bp, Zea Mays
atgctcttaagtggcacaccacagttgtcgttatggtccaaaaatagtcatgtgatgcaccatttatataagtttagagacgtgtggcatatcacttaacaagtttaaag

SEQ ID NO: 135747 - DNA, 1936 bp, Zea Mays
ccggaggaccaggccaacccatcagatgcgcggaggtgctcgtcgcggcacaccgcaacatcgagccgccactactaagctgctgcctgctggttgctagacgtgacggcgcgtgcactagagggcggggagaacccctagtcggttcctcaccgaccgccatgctccgttacagccgccggttcctcaccagaacacctcgccgccgccaacccaaaaccgccgggaaaacagagccatctcccacagccgcgccgacctatacccgtgacgtggtccgccgcgccactgccatcctccgcgaccagccctggtcggcggcgcgcccgctcctcctctccctccccggcctcgcctgggactcccacaccgtggcgcgcgtgctcaagacccacccgccgctccagaaggccttcctcttcttccgcctggcgaccaccgcctcgcgcaccttccgccacgaccgcttcacctacacctccatgatccacctcctcggggaggccggccgcgttccggccatgctccgcctccttgccgagatgctccgcgccgggatcgcgcccgacgccgccaccttcaccaccgtcatgcactggctcgcgcgggccggtgacgtcgacggcgccatgcgggtgtgggcggagatgaaagcgaggagcaggcctaccgtcgtcagctacaccgcgtgcattaagattctgttcgacgctcggaaggcagaggaggcgcggggggtgcttagagagatggtggctgaagggctgcgccccacctgcaagacctacacggtgctcatcgagcatctcgccgacacaggaaaatttgaagctactcttgagattatggacaagatgaaagaagcatgtgtacaaccagataaagcactctgcaatattttagtacagaaatgttccagggctggtgagacatcagttcttacttgcattcttcagtacatgaaggagcatttcattgtccttcgccgacctatttttttggaagcactacaagctctaaaagctagtggtgatagtgatgaacttcttcgggaagtaaaccctcacctttcatacgaaggcattgagaatgatccaatattgtctgatcaaggctatcttactgacaggagtattattctctaccttatgtctgcaaacaaatggtctgctatagaacaaatggttaatcaaatggccccaaagaatgtgaaaatggagacccatatcctgtctgatgttattgaggccagctgtgccgaccgtaaaccgtcttgtgggctcgcagttatgcgttatggtttaggagtaggctgtgaacttggtaggtctgcatattgttctcttcttggccagtacattagaactgattcatttgatttagtcttagagattgttgaggaattgattaaatctggttgcaatcttgggacatatgtatcatctgttttaatactcagattgggctatgctgggcagtctgcatgtgcagctcatatttttggattgttgactgcagacaagaatgtagtttcgtacacagcccttatcaatgcctattttcaagctggcaaagttgatggtgctcttgatctattcacacaaatgagaactaatagaatatctgcttgcttgggtacatatgaagtcctgatacatggcttagaaaaggctggcctgaaacaggaatcagattactaccgaagagaaagaatgaatatgcaatggcatcttcagtatcatggcccgcagtcacctgaagataccttatgtaaccatctgttttgtggcattcatgggtgatttttcaagatggattgatatacaatgttcttatcattagcacaattgttccagcttcatccttcctcagccttgaaggtaacacatgcccctttatatttgatttgatatgaaatcagataaaaaacatggat

SEQ ID NO: 135748 - DNA, 1053 bp, Zea Mays
ttgttaactccaatccatatgtattgggagtgaataggttttactcagacaagccataagatgactaacatttaagttttcttgagattagggcgtcaacatttcttgtcttatccccattgttcttctgtcctaagtaaatctaccgtagttatgatcactcaaagagaaaaccagttagcatactctaagtaaaccagtgacggacaggttaatattatgctattacaatgctcatattgttcttacgttggatggctccaatttattccgtgttatgtttgctgtcacacaggactaatagcttctcttatggtgatcgatttgtcttggtgctaactgcaacccaccttccaaaagcattcaactgcttgaggttgcaacaaaagctccacgtgatgaaggttggtgctactcagcagtctttccacaggctcaattaaacagttcccggctactattgcagaagggttttgccatgagactcagtgttaccagtcaaaagaatgtaaagatacaagctgcagaagcaatgtggtccaaaaaatagtcgagtattgacgagagcaaaactacatataaagtcatcacagattactgtaaagtgttttttgcattccaaccaaatgatctcaagtccaaaacccaaaggaagcgaaagtcgcaccgtgtgagctctcgaggaagatgaaacagacgtcttagattgggagtcacatgacattgaacggctaaaggattttctgtggaaacccctatgctgcctgctccttgacctttgtggctttggtgattgtgcatcatcggagactgcaagaaaaaaaaagattaaagaagccagcttttcagacgcatataaccacgttgcaggagatggttaggaaagaagacagctgtgcctcaaactaaattcaatctgttcagatccgtgaccttaaatggcatgtagatttttctcaggtgttctttaatcaaatgcaatgctaacctctataaggaacattatctgtttctagaacttttgtttttgtctttgatagatctgattgtata

SEQ ID NO: 135749 - DNA, 637 bp, Zea Mays
atcgacttgtctgggatttacaaccgattttaactccaatcggcgatctggatatcgaaatcagaggttaagttaaatgaattcgactaaaaccttcacacgagtggatggaatcttggggtgatatatacagaattccatggagtagacgtccgaacaagcacggcgacgcaacatgccatctatctaccggccaagcgagaaaaatagtttcctaacgaatcgagaagggaaccatgttcccctgaacaaatctgaaacagtgacgtgtcagaatctcaccttgcatgccctccctcctggcggcggtggcggcgctcatcccgctggaggccgacggcttgcagtctggcgggtcctcgaagagcgaccttcgacaggctcttgtgggctaacccgatgtcgaacagggaccctgggttcctggtcctggacgaggatgcccttgacggggagccagacgaagagctcctcttgggagaggccctccacgcctcggagcgcgccctacggcgatgccatggacgccgccatcgcggccgcgaagaatgaggggagtcggggtgcagggggtgtggacggcgccggatgttcgggggcgaggagtggagggggaggccgagatggaggcaagtag

SEQ ID NO: 135750 - DNA, 1248 bp, Zea Mays
cgcgcgggtctcgcagcagctctccacgccgagttcgtccgcatgaccgcatctccctctcctctctcatcaggagtatattgggcgggatccgagacggccgtgccgcttgcattgctcgatcgaggagggaaaaaaaacaaaagggaagcaggcaggtcgtcgagaggggaggatcggagaatgcagcagcagatggcggcgacggtggaggagcagatgatggtgaaggccatcagggaggagtcgtcgtgggaggtcctccccaagcgcatccaggcagcgctggtctccaaggaagaatggcaccgcagggttgtgaattactgtatacgtaagaggttgccatggagctcctgtttcgccagaaaagtatgcaaggaaggggactactatgaggacctgatgcgctatctccgcaaaaaccttgcattatatccataccatcttgcagacttcatatgccgagtgatgaggatatcacccttcagatattactgtgatgtccttttcgaagctatgaagaatgagcaaccatacgacagtattccaaatttcagtgctgcagatgctctgaggattacaggggtaggaagaaatgaatttattgatatcatgaataagtgcagatcaaaggtatttatcaactgtaccatgatctttcattaacattattgttggcatgtgtagtcttgctgtgatataggaatggacacacttgggttattatttcctaagggcatgttcgtttactctagaacggttaagtttatttagggctagcttggcaaccctatttttttgacgagatttttattttatcaaggaaaaaatagaaattacatggaaaaatagagttgccaaactaacccttatacctgacctcaatttgatctaaccgaacagggcctgaatggaattaacgagaacatactgaaaatgaccttttccatgttttctcctgttacaaaaataaccccattttcggatatttcagaagataatgtggaaactgaacaaatcaattgcgaaagagttgctcccagcagaacctgcagatttagcaatagaaccatggtggggcgttcgatttgtcaacttcacactggaagaatttaaggtcagatccattcatggtgatttttatttctgtcgattaagggcattgcaatttgacaggaaaaagaaaaaaagaaatacagtgctatcttcctatcacgtaaagcatacattgtttgctctcaatgc

SEQ ID NO: 135751 - DNA, 1872 bp, Zea Mays
catgctttcagcctccgatccttcctcgagtgcttgctgtctggcggaacttcaactgaaacagctgacctgactactagtgaagcaaataaccaggagagctctgtccaggacggtttagacaccacttgtgctaaggaaaacaagggaaacgacggtgtcgataatgctgctgagaactcgactcaaatttcagaatcctctgatggtggccaactatcactgcaggacaacaagatgggtgattctgatgctgcagatgcgaatagatcatcagcatcttcgacgatcgtgtctgaaggcaaggaaagcatactcaaacacgactgtgacagcgtccaggctccaaagctgggtgcttcagctgctaacggtccatcgtccaagagcaaaagaagttaccgagtcaacattcttcgctgcgagagcttagcttctctggccccatcgacgctagagagactccttgctagggactacgacatcgtagtgtccatgatccctctcccatcttcctcagtcctgccctgcccatctggtctagtgcattttggtccgccttcctactcttccatgacaccttggatgaaactggcgctgtacacatcagggacctgtggcccggtatctgccgttttcatgaaggggcagcggctgaggttgctgcctgaaccattggccagctgcgagaaggcgctgatatggtcctgggatcagtctgtggtgggcggactaggcggcaagttcgaagggaacttggtgaaaggaagccttcttctgcactacctgaactcgatgacaaagcattctgctgtggtggtgcagccattaagcgaacacgatcttgacgagacagggagcatcgtcaccatagacgtcccgctgccgctgaaaaatgccgatgggtcgattccatccacggtagtcggcaccgacttgccggaggaccaggtctcgagtctgatcctcttgttagaggacctgtccaatagagtcgagctgagcacggttgggtaccttcggttgctaaggcttcacagggcgaatgagtcgtccgagcacggaagctttgagtgggtgcctctgaccatagagttcggcatccctttgtttagcccacagctctgcgagaggatctgcgagagggtcgtcgagtcacagatgcttcagaaagacgacatcgctgagcactacgagacgatgcagaacgtgaggaggaggctgagagagctgtgcaccgagtaccaagcgaccggcccaacggcgaggctgttcaatcagcggggaggctccaagaacaactccccgcgcaaactggtgcagattgtcagcggcagatggagcccgttccatgatccgtctacgcccactcactccagtagcccccccgctgaacacgaaagagccaaaccagcgagacggcagagatgcttcaccgaagttctgagctttgatgggaggatcctcaggtcatatgcgctcactcctgtgtatgaggctgctacaagatcggtctccgaagagcagcctaccacgcccgcagcgaaaccggatcacgaggacgccaacaccaaggacgtggccttgccaggagtcaatctgatattcgatggaactgagttgcacccgtttgacatcgttgcctgcctccaagctcgccagcctctctcgttgatcgccgaggcgtcggccacatctttggcaatgaaatgacgacgagctgtccagtacgtactagtaaatttttcggtaggtgacggagtttagtagtgtatgccattgcattccttcttgctgctgtatgcagaattgcattcttcaagggggagcttctcaaagcaggcatttttctttaaaaaagaagcttgctgc

SEQ ID NO: 135752 - DNA, 2393 bp, Zea Mays
accttaccttcctctagtctcccgtggggttcctattcttagcctgacgcgcctagcgacgggcgcgcgcacgcacacgcacacggttcgttccatggccgcggccgcgacgacgtccacggcaaccagttgctcgtcctcgtccaccagccccggccctcaccgcaggcgccagcccaacgacatcgagcgcgacgacgactcctgctgcggctgcggcggcggcgccgatcaccacttcctacacgcctgtgcgcacgacgacgccgagtgcgacctccacgggcacgccgccgccgccacgccctgcagcgggagggcgctgcagttggcgcggaggaagcgagcgtgggccgtggcaggcgcgccaccccggacggcctggatgaggggcatcgtgctctgcctcctcggcctcgtcgccgtcattgggttcctgggatcgcaccggggcggcgggcgcacggccacgagcgcgggcggcgctggcaccgacgacggcgggaggctcagggtggaggtggccgacgccgacgtcatggagtggacggaggagaatttgacggcccttgcgcgccgctcgcctgaaccgccgatacctgggatatggatgaaaccagacagtgagggttacagccagtgcattgaacggccgaagaatcaccgcaggaaaaacaatgcatctgtcggttacctggtcgttgatgcaaacggtggcctaaaccagatgagaatgggaataagtgatatggttgcagtggcgaagatcatgaacgcatcgctggtgatccctactctggatcatcagtcattctggactgacccaagcgatttcaaagatatattcgacgtcgatcacttcaaggagtcgttgaaggaagacattgtgatcgtggattccctcccaccacattacagaagggtgaaaccgtacgtgagagcgcccacctcctggtccagggcttccttctacagagactttgcgaaaatcctgaggaagttcaaagtggtgaggtttacacacacggattcacggatcgtgaacaacggcctcgctccttcgctgcaaaagcttcggtgccgcgcgaactacgaggcgctccagtacaggaaggagatcgaagagctcggcaacacgctggttgatcggctgagaaacgagtcccagcattacatcgcgcttcacctgagatacgagaaggacatgctggccttcaccgggtgcaaccacaacctgacgctggatgaggcggcggagctgacggacatgcggttcaaggtgcggcactggaaggagaaggacatcaacagcgaggagaggcggctacagggcgggtgccccatgacgccccgcgaggcggccgtgttcctcaaggccatggggtacccctcggccaccaagatctacatcgtcgccggcgagatctacggggcgcacagcctggacgcgctccgggccgagtaccccaacatctacacgcactacagcctcgccacggtggacgagctggagccgctggagctgtaccagaacaggctcgccgccgtggactacatcgtggccctgcagagcgacgtgttcgtgtacacgtacgacggcaacatggcaagggccgtgcaagggcacaggcgatttgaagggttcagaaaaaccatcaaccctgacaggctgaagtttgtggagcttattgacaagctggatgaaggttctatgtcctggactgagttccagactgtggtgaggaagcaacatgagaatagactcggaggtccgtacgagagattgcgtggggcaagcccaaggcaggaggaatacttctactcaaacccgatccctgggtgcctctgcaaaagggttcagaggagtagatgatatggatttttctgggttccattgaaattgttcagtcttagaaacataccgtaccgacagcttcagcggctggagcgtggatggagatgaaccttcctccgcgtagcagagatcatcaccccgaagcgaagagcgagagctagcaaactgactttacactagcagtttcgattattttttttttcctaggctgacaggcaacacgtgcagctgagatatctggagagggcacagggtgtgcagaatgtgaagtgcgtcgtcaaaagagttgtgtaaaagcaaggaatgcagatgtgcaggtaatagggcgagccaaaaatgtttcacggtggctgctgtttgtagttgttggtgtttctgattaattcggtttagaaggtaccagtaccatacctttttttgatggatggattcatcgttgcctcttcttaagaataatgtataaatgctctctttgtagtaggcctgttgaaccagatgtgtacatagtaaagtaaagagtggacaactgatagttttg

SEQ ID NO: 135753 - DNA, 2411 bp, Zea Mays
gcccctctacaaatctctcctgctccactcttctccacgtccatcccgcgccccgaatttcccgagccaactccgccccgccctgtcgctttcccttccacacgcgccgttcgctttgatcgatcaggcaggcatggccgacgagacgaagcaagaagccgccgccccggcggccgaggtggtcgtgacggaggaggagaagaaggcagaagagaccgccccggtggcggaggaaaaggccgtggaggcggctgtagagaaggccgcggaggcggaggcgggggccgaggaaaaggccgcggaagcggactcggaggaggagaagaaggcggaggaggccgaggaggccgccgcgggcgatgaggcggccgtgatcgatggcactgggtcgttcaaggaggagagtaacctggtgtccgagctccccgaccctgagcgcacagcgctcgcgcagctcaaggagctcgtcgccaccgcgctcgctaacggggagttcaacctgccgccgccgccagccaaggaggaggccaagaaggaggagccggcaaaggaagaagctccggcggacaaggaggacgagcccaaggcagaggaggcggctgcccaagagcccgtcaaggaggaggccaagcctgaggagcccaaaacggaggcgccggcggaagcagcgcccgaggaggttaaggacgagacacccgtgccggaagagaccaagactgaggctcccgcgccggaggagcccaaggccgaggagcctgccaaggaggagctcaaggcagaggcggcgacggaagcggtcgccgaggagaccaaaccagctgagccggtgccggaggaggaggagaagacggtcgttgttgccgaggaggaggccaccaaaacggtggaagccatcgaggagacggtcgccgtcgccgtcgccgccgccgcgtccgaggagcccgaggcgggcgagccgaaggaggagctgatctggggcgtgccgctggcgggcgacgacgagcgcacggacacggtgctgctcaagttcctccgcgcgcgcgagttcaaggtgaaggaggcgatggcgatgctcaagtcggcggtgctgtggcgcaagcggttcggcatcgacgagctcctcctggacgccgacctcggcctgcgggagctggagggcgtggtgttctaccgcggcgccgaccgcgagggccacccggtctgctacaacgtgtacggcgagttccaggacaaggagctgtacgagagggccttcggcgacgaggagaagcgggagcgcttcctcaagtggcgcatccagctcctggagcgcggcatccgggagcagctcgacttctcgcccagcggcatctgctccatggtgcaggtcaccgacctcaagaactcgccgcccatgctcggcaagcaccgcgccgtcacgcgccaggctctcgccctgctacaggacaactacccggagttcgtggccaagaaggtgttcatcaacgtgccgtggtggtacctggcggcaaacaaggtgatgagcccattcctgactcagcgcaccaagagcaagatcgtcttctgcagccccggcaagtcggcggagaccctcttcaggtacatcgccccggagcaagtccccgtccagttcggcggcctgtacaaggaggacgacaccgagttctccacctccgacgccgtcaccgagctcaccgtgaaaccgtcctccaaggagaccgtcgagatcccagccaccgagaactccaccgtggtgtgggagctccgcgtgctggggtgggaggtgagctacggcgccgagttcacccccgacgcggagggcggctacaccgtcatcgtgcagaagacgcggaaggtccccgcccacgaggagcccatcatgaagggcagcttcaaggccacggagcccggcaagctggtgctgggcgtgaacaacccggcgtccaggaagaagaagctgctgtgccggttcaaggtgaggagcgccgccgcctgatgagggtcgttggtctgggtcccagcaggtacagcctgccagctgcttgaccaccagcccgacatgtataattcgatcgatcgccaaccaggtccataccgccaccatttgaatgaacatgctgcattgcattacatgataggagagagagagagagagagagaggacaataaagagtttctgcttcctagctaggcccgttccgtgtcctggtcgttctttgattatttgttggcttgctgttcttttttttccttggggggagggtcgcgtttgtatgtgtttattacttgaatgaaaacaaaagtgagcttgttatatgagatagccatggcttgttgaggtcaccgtggtccgtggtggggtgggggaagaagaacagtaacagttgctgcccggcctgtacatttctttc

SEQ ID NO: 135754 - DNA, 516 bp, Zea Mays
atggcgatgaagcggccggcgcgcagcgacccacacctgccacccgaggaggcggcacgggtggaggccgaggttcggagctacttcgacagcgtcgcgccgaggcgcccggccaagccgccgcgcagcgacccgtcggtggacaccttcgcggaacccgccgccgtcgacgccggggaccacgacttgccggagctccgcaagctgcgcgacctcgaggcgaagccccagaagctggtgttggacggagggggaggggacgtggatggcggggaggattacgtggagacgcgatactacgatggcctcataggcatcgacaagcagcatcacacgactgggacaggctttatcaaagtggagagatccaatggcagcaccttcagtgtgatgactaacggctacccacctgccagctctgtccgctgcacgagcaatcctgcgacaaatgattggataccatcttctgaatcgatcatccctgcttcgaacaagcccagcaggagcgactcctga

SEQ ID NO: 135755 - DNA, 2237 bp, Zea Mays
ataaatgtgcataaattatttagattaaagcggcagcagccgtgtccagcattgagacttgagagaagcggcaagcaaagcaacggccaataaagaaaagggcaaagggtccatcacgacgtcgccctgcgaccacacagaaagtataactcctccagcctggacggggacgaacacgctcttgcagtcgcgcacggggcaacgccgagcttcccgctgcctgctccgtgcgctctgcgctcgcggccgctgagccggacaaacacagcgagcttgagcatagtggcgggcgcggaagtgagaattcttttgtttttggttgggaggccacaagctccaccacggggcacgggccaatcggcatcgtcgaaggcgttgcctcgccgctttctttaatgcttaagcgctcccgcggtggaggacgaatcaccacctctggccactttggcatctgccgatgcgtccactgctcccggccccccgctgcataaatacctcctctcgcggcccattcccacctccccctcctcgccgctccgggctgaccaagggctcgccgcctcccgtgtcctccgactccgacagggaaaggcgaaaccttgggtcggctcgctagtggagtgcagggtacgttgatgacggagctgtggatggaggtgctgccgccgccctacttcgcggggcaggcggcgggcgggtggttcctgccggaccggcgggccgggcccggggcgtggacgctggaggagaacaagatgttcgagcgcgcgctggcgagggtcgactgggacgcgccggaccggtgggagcgggtggccgcgttgctgcccggcaggacggcgtccgacgtcgcggcccactacgacgacctggagtgcgatgtcggctgcatcgaggcaggcttcgtgcccttcccctgctacggcagcggcggcggcgcgtcgcagtccgccgggttcacgttcgactgggacgccggcgggctgggctttaagcgctcctgctacgtggtcggcggcggcaagcgcgagcgcgggccggaccaggagcgcaagaagggcgtcccctggacggaggaagagcacaagtaagcagccccaacagacggaactttcgcgctttgattggtgaaatttccatggctgctgatctcctctggttgccttgcctgccgcaggcagttcttgatgggcctgaagaagtacgggcgaggggactggaggaacatctcgcgcaacttcgtgacgagccggacgccgacgcaggtggccagccacgcgcagaagtacttcatccgcctcaactccggcggcaaggacaagcgccgctccagcatccacgacatcaccaccgtcaacctccccgacgacgacgcgggcggcaccgcctccgcctcgccgccctccgtgctcacctccgcctccgcgccctcgtccaccggcggcggcggcccggtcgtctccgagcagttcggcgtgctcgtcgacagcaagcccccggcgccgcaccaccacttcgtgccgcacccgtacggcaacgtgaagctcgagcccgtcagttcccaccacggcgggttcctggacgactctgtcctgatgcagatgcactgcgggcagctgcagcctctcggatgactggttgtttgtgcagcaacaatggtagaaagagggaaatgcctctcgtctctttggccagttacgaggggtggagggtaccataccgctctgttgcgttgcgcgtgtctgttgttggatttcaatcaggcaaataacatttgggtacagcacacattcttgtcaagggtggatggctcatacagacagctccgagctcagcgcagctcgcagccgagcgctagcgttctgctgcagctgaagtcactgaactgagctccctcgcgtgtgttccagagacgggaggaagagggtgaaaaagaaaaaaaaaacacacacacacacacagtagaagatatggacaatgggatctctgcatttcggctatgcatgtgtatacataagcccacgcccgctgtgaaataatttcctactgtgatttgtttcctgtgttatgggaagcacactgctagatgttgtgattgattacgctagctagccctttctttgtagtagtgaggtattggtcggttaacgtcatgtatttcgacagcgagtagcatcagcagcatgctgtctggtgtcttgtaatggttttttatctttataagctggggatgtatt

SEQ ID NO: 135756 - DNA, 1988 bp, Zea Mays
gcgagcttgagcatagtggcgggcgcggaagtgagaattcttttgtttttggttgggaggccacaagctccaccacggggcacgggccaatcggcatcgtcgaaggcgttgcctcgccgctttctttaatgcttaagcgctcccgcggtggaggacgaatcaccacctctggccactttggcatctgccgatgcgtccactgctcccggccccccgctgcataaatacctcctctcgcggcccattcccacctccccctcctcgccgctccgggctgaccaagggctcgccgcctcccgtgtcctccgactccgacagggaaaggcgaaaccttgggtcggctcgctagtggagtgcagggtacgttgatgacggagctgtggatggaggtgctgccgccgccctacttcgcggggcaggcggcgggcgggtggttcctgccggaccggcgggccgggcccggggcgtggacgctggaggagaacaagatgttcgagcgcgcgctggcgagggtcgactgggacgcgccggaccggtgggagcgggtggccgcgttgctgcccggcaggacggcgtccgacgtcgcggcccactacgacgacctggagtgcgatgtcggctgcatcgaggcaggcttcgtgcccttcccctgctacggcagcggcggcggcgcgtcgcagtccgccgggttcacgttcgactgggacgccggcgggctgggctttaagcgctcctgctacgtggtcggcggcggcaagcgcgagcgcgggccggaccaggagcgcaagaagggcgtcccctggacggaggaagagcacaagcagttcttgatgggcctgaagaagtacgggcgaggggactggaggaacatctcgcgcaacttcgtgacgagccggacgccgacgcaggtggccagccacgcgcagaagtacttcatccgcctcaactccggcggcaaggacaagcgccgctccagcatccacgacatcaccaccgtcaacctccccgacgacgacgcgggcggcaccgcctccgcctcgccgccctccgtgctcacctccgcctccgcgccctcgtccaccggcggcggcggcccggtcgtctccgagcagttcggcgtgctcgtcgacagcaagcccccggcgccgcaccaccacttcgtgccgcacccgtacggcaacgtgaagctcgagcccgtcagttcccaccacggcgggttcctggacgactctgtcctgatgcagatgcactgcgggcagctgcagcctctcggatgactggttgtttgtgcagcaacaatggtagaaagagggaaatgcctctcgtctctttggccagttacgaggggtggagggtaccataccgctctgttgcgttgcgcgtgtctgttgttggatttcaatcaggcaaataacatttgggtacagcacacattcttgtcaagggtggatggctcatacagacagctccgagctcagcgcagctcgcagccgagcgctagcgttctgctgcagctgaagtcactgaactgagctccctcgcgtgtgttccagagacgggaggaagagggtgaaaaagaaaaaaaaaacacacacacacacacagtagaagatatggacaatgggatctctgcatttcggctatgcatgtgtatacataagcccacgcccgctgtgaaataatttcctactgtgatttgtttcctgtgttatgggaagcacactgctagatgttgtgattgattacgctagctagccctttctttgtagtagtgaggtattggtcggttaacgtcatgtatttcgacagcgagtagcatcagcagcatgctgtctggtgtcttgtaatggttttttatctttataagctggggatgtattagcctctgattgacccgccctttttttaattaagtattaatcgtgatggtgatgaaagggttgtagttttcatcagctgtttcgtgtcgcttttgacgccataaaacc

SEQ ID NO: 135757 - DNA, 252 bp, Zea Mays
atggcggaggcacaaggcatcacatgctcacaggctcccctggcaagggcaccgccggcaccgagcccacaccaccgaaagaacaacaggcggacccgcgggtgcacgcgcacggtcgatgtcttcttctgttgccggatgctcctcggccccaacttgctcgcagattcactcggaacggcgtggtttctccaggccagtggtgagaaccaaatgcctccaggagagggaaaggggggctccctgatttga

SEQ ID NO: 135758 - DNA, 2077 bp, Zea Mays
gcaacgcgcgccaaatgttctagtcctactaatcgcaactcgtttcccacaacacaacgcccatctctttcgtctccgctcccttctgctcacccgcacgatggcgccggaggcgcgaggtgaggcggcgccggtgtacagggacgcattgacgccggtggaggaaagggtgcgagacctgctgggccgcatgacgctgcgtgagaaggcggcgcagatggcccagatcgagcgcaccgtcgcgacgccgcgcgccctcacggagctcggggccggcagcgttctcaacgccgggggaagcatgccctgcgagcaagcctcccccgccgactgggccgccatggttgacggcttccagcgccttgcgatctcctcccgcctcggcgtccccatcctctacggcaccgacgccgtccacggccacaacaacgtctacggcgccaccgtgttcccccacaatgtcggtctcggggcctgcagggacggagagctcgcgcgtaggatcggcgaggcgacggcgcttgaggttcgcgccactggcatccactggaccttcgcgccatgcgtcgccgtctgtcgggatcctaggtggggtagatgctacgaaagctacagcgaggacccagaaatcgtgcgctcgttgaccaccattgtcagcggtttgcaggggcagccgtcagcggaccatcctcatggttaccccttcctcgcttcgcctagggagaatgtacttgcttgcgctaagcatttcgcaggggatggcggcacggacaagggggtcactgaggggaacgccatttgctcctatgaggatttggaagcaatccatatgagaccttacccggattgtatggctcaaggggtggcaacagtaatgacgtcctactctaaatggaatggggagccattgcattcgagtcgctacttgttaacagatgttctgaagggcaagttaggctttaagggttttctcatttcagattgggagggcattgacaggatctgtgagcctcgagggtctgattatcgctattgcattgcacaatcagtaaatgcaggaatggacatgattatgatacctcataggtttgagaaatttttggatgatattgtgttcttggtggaggcgggggagataccaatgtctcgtattgatgacgctgttgaacgaattctgagggtcaagtttatttctggagtgtttgagcatccattttcagaccaatctctactggacatagttggttgtaaggaacatcgattactagcgcgtgaagctgttcgcaagtctttggtacttctgaaaaatggcaaggatcagaaggagccatttcttccattggccagagatgcaaaaagaatactggttgcaggaacacatgctgacgatattggatatcaatgtggtggctggacgatagcgtggcctggagacagtggaaaagtaactcttggtacaagcatattggaggccatacaagaattagtgggagtgcaaactgaagttgtgcatgagaaatacccaaccaaagctatgattgaaactgggggtttttcctatgcggtggtggttgttggagaggttccatatgctgaatggataggagatagaactgaccttagtatcccgtttaatggctctgaccttatcatccgtgttgcaagtaaaatccctatcctagtgattgttatttctggaaggccattgattattgagtcacaagttttggaaaagatagatgctctagtcgctgcctggctgcctggaagtgaaggcatgggaattaccgattgcctctttggagatcatgattttgtgggcacattgcctgtgacatggtataagtctgttgatcaattgcctataaatgctggagactctaactatgacccgttattccctgttggatatgggctgaaaatgtttcgaagtgatgatgattcaacataactttattattgattgggtacatttggatctctgtgatattaaatactctttatttactagctattggtacttaaaaccaaataatatattgttgtagtatgcattatactgtattggaaacattat

SEQ ID NO: 135759 - DNA, 2217 bp, Zea Mays
cccaacgctttcccttctttcctcgctgctattcccacacctcgtgcggcggtggcccaaccaaaggtcagccggggcgcttgaggcggtgagtcctcgtcctcgtccgatatcgcagcggaacaaggtcatgggcttccaggtggctgccgtggcaccgccgccgtgcgcgcgctcctcctccgccttatcgtcgccctcgacctcctcgcggccgttgcccgccttcctcggaggcggcggcggatgcgccgggctcgcgagatcccgggcacccgtaaactggggaaccggcgtgatggtgcggcgcccgcgcccggctcggacgccagcgaggtgcgcgctgagcgcgagtttggatgggatgggtggcggggacgcggagttcatgaagaggatcgaggagctcgctgcggcggctggggtgcagccggccggcccggcgggttgcggctggcccgcgagcgtggagctgagcgcgagcaacgtcgggctgccgctgtcgctgcggatgctgaagcggaaaaagcagcaacagcaggcgcagctgcatgctgtagcgcgtccttcacgctgggacgatgggctgctgggctccgccggggagtcggtgggccgcgccttctcctccatggtgctcatcgtgcgggagctgcagagcttcgcgctgcagcagatgcgcgacgcgctgctctgcgacgacctgcagggcgtcctggcgcgtgtgcagggcgagatgcacgactccttcgtctggctcttccagcatatcttcgcgggcacgccggcgttcatggtctccctcatgctcctcctcgccaacttcaccgtccaatcgatgggccgcagcgtcgccgctgcggccgccaccatcccgcctactgcgcctgctgtcgcccttgtcaacgcccagcgccccgagccgtcacgtccgcggttcgacgcggcttcggtgaagacgttctccgtcgaccggatggcctcggtcgggggggacatcggcggtggcggcaagaccccgcctgtcgcgggtgccaccggcgacggccggtcggacgagtccttatatcggctaagccgtgtgtcgccgcagcagccgtcggcaccccctgtggctgaggtcgcccaagacgctgcggacgcggacgagcaggccatttgggaaatgatgctcgcggaggccctgaaggccagcccgcgcaccgaggagctgagcgatccggacgtgctcagaagcctcgtcgcgccggtggaggcggagctggagaccgaggaccacgccgagcacacgctgacggagcagagatacgagcaggccgtcgccgctgagcccaacaatccgctcatcctcgccaacttcgcgcagttcctctacctcgtgcagaacgaccacgaccgggcggagcactacttcgagagagcagtgcgcgctgagccggcggactcggaggcgctgagccggtacgctactttcctatggaaggcgcggaacgacctcgccggcgcggaggacacctaccaggaggccatcgcggccgatcccgggaacgcccaccacgccgcggcctacgcgcacttcctctggaacaccggaggtgaggacacatgctacccactcgattgacgcgcgccatcggcaccgcagcggccgcgccgagggaccaacagggcccggccggccaagagagaaaaaaaataataataagagaattcaagaagtaaagttcttgcagcatgcacgggcacgggggcggaggccacgcggcgagacgcctagaccacgacatcacaccatggcccgggcggtggagtggagctgacacatgatatcgtccccctttttacttagtctgattagaagattgcgtgcgtgccgtgggcagtggagtgagttgtgatccaggaggacacggtggtggtggtggtggtggtgtttcttcccgcgctccgggaaccgcggcggagaaggacgggcctcggtcgtcgggaccaaccggcggccggaaggcatggacggctggctatagaaacgtggtagagcgcagagtcgtcgagggcgacgaggtggcatggatcagggatgggatgttctatggaatactctagtgtatagcgactcgcatcatgtaattatgtactagatgtggaaaaaataacacccgaataagaagtatcccggtaaagtaccgacctcggatctagcgtgtttgtaccccc

SEQ ID NO: 135760 - DNA, 2109 bp, Zea Mays
cccaacgctttcccttctttcctcgctgctattcccacacctcgtgcggcggtggcccaaccaaaggtcagccggggcgcttgaggcggtgagtcctcgtcctcgtccgatatcgcagcggaacaaggtcatgggcttccaggtggctgccgtggcaccgccgccgtgcgcgcgctcctcctccgccttatcgtcgccctcgacctcctcgcggccgttgcccgccttcctcggaggcggcggcggatgcgccgggctcgcgagatcccgggcacccgtaaactggggaaccggcgtgatggtgcggcgcccgcgcccggctcggacgccagcgaggtgcgcgctgagcgcgagtttggatgggatgggtggcggggacgcggagttcatgaagaggatcgaggagctcgctgcggcggctggggtgcagccggccggcccggcgggttgcggctggcccgcgagcgtggagctgagcgcgagcaacgtcgggctgccgctgtcgctgcggatgctgaagcggaaaaagcagcaacagcaggcgcagctgcatgctgtagcgcgtccttcacgctgggacgatgggctgctgggctccgccggggagtcggtgggccgcgccttctcctccatggtgctcatcgtgcgggagctgcagagcttcgcgctgcagcagatgcgcgacgcgctgctctgcgacgacctgcagggcgtcctggcgcgtgtgcagggcgagatgcacgactccttcgtctggctcttccagcatatcttcgcgggcacgccggcgttcatggtctccctcatgctcctcctcgccaacttcaccgtccaatcgatgggccgcagcgtcgccgctgcggccgccaccatcccgcctactgcgcctgctgtcgcccttgtcaacgcccagcgccccgagccgtcacgtccgcggttcgacgcggcttcggtgaagacgttctccgtcgaccggatggcctcggtcgggggggacatcggcggtggcggcaagaccccgcctgtcgcgggtgccaccggcgacggccggtcggacgagtccttatatcggctaagccgtgtgtcgccgcagcagccgtcggcaccccctgtggctgaggtcgcccaagacgctgcggacgcggacgagcaggccatttgggaaatgatgctcgcggaggccctgaaggccagcccgcgcaccgaggagctgagcgatccggacgtgctcagaagcctcgtcgcgccggtggaggcggagctggagaccgaggaccacgccgagcacacgctgacggagcagagatacgagcaggccgtcgccgctgagcccaacaatccgctcatcctcgccaacttcgcgcagttcctctacctcgtgcagaacgaccacgaccgggcggagcactacttcgagagagcagtgcgcgctgagccggcggactcggaggcgctgagccggtacgctactttcctatggaaggcgcggaacgacctcgccggcgcggaggacacctaccaggaggccatcgcggccgatcccgggaacgcccaccacgccgcggcctacgcgcacttcctctggaacaccggagcatgcacgggcacgggggcggaggccacgcggcgagacgcctagaccacgacatcacaccatggcccgggcggtggagtggagctgacacatgatatcgtccccctttttacttagtctgattagaagattgcgtgcgtgccgtgggcagtggagtgagttgtgatccaggaggacacggtggtggtggtggtggtggtgtttcttcccgcgctccgggaaccgcggcggagaaggacgggcctcggtcgtcgggaccaaccggcggccggaaggcatggacggctggctatagaaacgtggtagagcgcagagtcgtcgagggcgacgaggtggcatggatcagggatgggatgttctatggaatactctagtgtatagcgactcgcatcatgtaattatgtactagatgtggaaaaaataacacccgaataagaagtatcccggtaaagtaccgacctcggatctagcgtgtttgtacccccgatactcctcgtgaccgctgtcatcggcga

SEQ ID NO: 135761 - DNA, 2315 bp, Zea Mays
cacccagcagggaagcccaggaatgaaccgcgcgggggggcatcgacggcgggtctccattctccatcgctataagaaaaaagtgtcatgtgcttccctctcgcacctaaattctctgcgtcacgactcaggaagaggtcggagcgggagagctgtcaggcttccagccgagatcctgcaaaccgcgcggcggagttattccgggctctgtgcgagttctgcagttccggcgctgctcttctttcccgcgccgcctgcctgtctgcctgcaagaaagcgccgggggcgtgccgtcttttccccccctccacgcttcagcatcagcagcagccagcagcgcagtaaatttcgccggcgcgttgggcagcagcagcagcagttggcagccaacgtcccgctcccccgcccgctattacttccccagctccgcgacaagctaggcgcgcgtcgtccttgtgctcctctgcagcaaaacgagcttccggcgcttcgggttcagttgcgacttgcgaggatggcgacgggcgagcaggcggaggacgccatcgtggcggacgtcgtcggcaacggcaagggcgaggaggtgcgcgccatgggcgacgacgctgagcagcagcgcgacggcggcaaggtcagcatgaagagcctgctgtggcacggcggctccgtctgggacgcctggttcagctgcgcctccaaccaggtggcgcaggtgctgctgacgctgccgtactcgttctcgcagctgggcatgctctccggcgtgctgctgcaggtctggtacggcctcatgggcagctggaccgcctacctcatcagcgtgctctacgtcgagtaccgcacccggaaggagaaggagggcgtcagcttcaggaaccacgtcatccagtggttcgaagttctggacgggctcctgggcccgtactggaaggcggccgggctggcgttcaactgcacgttcctgctcttcggcacggtcatccagctgatcgcctgcgcaagcaacatctactacatcaacgaccggctggacaagcggacgtggacgtacatcttcggcgcctgctgcgccaccaccgtcttcatcccctcgtaccacaactaccgcgtctggtccttcctcggcctcggcatgaccacctacaccgcctggtacctcaccatcgccgcggccgtccacggccaggtcccaggcgtcacccactctggccccagcaagctcgtgccctacttcaccggcgccaccaacatcctctacaccttcggcggccacgcgatcactgtggagatcatgcacgcgatgtggaagcctcgcaagttcaagtacatctacctgctggcgacgctgtacgtgttcacgctgacgcttccgtcggcggcggccatgtactgggcgttcggcgaccagctgctgacgcactccaacgccttctcgctgctgccgaggacgccgtggcgcgacgcggcggtggtgctgatgctggtccaccagttcatcaccttcggcttcgcgtgcacgccgctctacttcgtgtgggagaaggcggtggggatgcacgtcacccggagcgtcttcctccgcgcgctggtccgcctccccatcgtcgtccccgtctggttcctcgccatcatcttccccttcttcgggcccatcaactccgccgtcggcgcgctcctcgtcagcttcaccgtctacgtcatcccggccctcgcccacatgctcacgtaccgctccgcgtccgccagattgaacgcagcggagaagccgccgtccttcttgccgagctggtcggggatgttcgtgctgaacgcgttcgtggtggcgtggatgctggtggttggattcggcctcggcggctgggccagcgtcaccaacttcatcaagcagatcgatacgttcgggctcttcgccaagtgctaccagtgcccgacgaagccacaccccgggtcgccgctgccggcgccgccgcatcactgaagcagcgagcgagtgccaaaggctaacgaccgtaaaccgagacattcccgggtggtttcggtcgtcttgttatatgcagcctttctaggagtgtacaacacagcggagcagcttgtgagttcactgacccgagatacctagactggactcgcatgtgtcgcgtggctttgatacattagtgggcctcagtgtcacttcctttgtcttggttgtttgcacatggttgttttaggttgttcggttcatggtacgtgccatctagtacaagacttgatacaatgatacacagtggtgtctattcttatcttttgcatccttaatcgatcttgatgacttg

SEQ ID NO: 135762 - DNA, 1606 bp, Zea Mays
gtgtcgtcgtccctgccacagtccgtcggggtcggcttgtcctcagatctcgcatgatttaggagcagcgacatcagatgttacggacgcgaggccatcaacgtcgccgccaccagcaccgatgtcggccccggcccggcggacccctccccggtggccctggctgttcttggctgatggcgatgcgggatctactggcatggagcacagacgacttaccggagatgtgctcatggagctgccatatgcgctttcatgcatggtcaagaagcttatcaaggagaaaaagaatgatgctggaatttctgaatatatcgatataaataaagagcttcaagagttcctcattgtcgcttggtttatctgggaggtttatggcacgatgattcatctcagagtttctgattcttatgttttgtcacaagggcaagacgacaagtcattttgctgctaaagtgttaatatgcaaactgtgtgtttgatcaagcgagaatttttccaccgtttttgtaagtaatgacttgttgtgaaaccgacatttgggctatatgatgcggtagtttgtgttgccctacagaagcacatagttgaatgtacatggcttacctcaaaaacttgtaatttacactataatgtatagataaggcgtcttcaataaatactgaaatgatttttgtttatacgatggattatataatgtgtttcctaattcgttacactattgagagacataaggattattaaatgtactatgtaacttgaaccatctgactctataagcttcggtacattgacaaccatacaatgccaaagcactgaaatatgttgtgttctgaaatatgacatataccaatggttcacagattgcttagtttctccagagcaacgccccacagatttctctctgtgtgtgtttttttctctgcaggtgatatcatatttcacaaaaatacagattttttctgatattgggcccctaactaatacatccactttggaaaacaactctttctctcaccatgcaatttctctatcctaaaatataagatatgctgggaattccagaacaaaatatggggtaaaagaaatgacacatgcatcctccttaatcatagggagatattgtgttacctatttttggctttgtgattgggttgactggaggcattagtggcaggtgcgcatgtgattggggcctaggggcattgataggtgaggagggggagttaataaacctacaatcctttataatttgtgacaagttggaatgcttcagttatttcaggatgaaggagtaccattgaaaagggaggagtttcttgtcgtgtataaatatgttagtttgttttgtgcgcagcaaaatatgttacttttaaaaattatgcaagtttatttcgaccatggtgttgaaacatgtaattcaactaatgttgttggctgaatagtttcataagtaaagcaaaaaaaaaacaatagtcatgtactaatttcaggacaagaatgattgtaggagtaggatctaggcatatttttcgtggtttggtggtgatcatccaatgaaaaggcgatgcttgttgtgtaaggtcttctacactggttcttgctc

SEQ ID NO: 135763 - DNA, 333 bp, Zea Mays
atgtcggccccggcccggcggacccctccccggtggccctggctgttcttggctgatggcgatgcgggatctactggcatggagcacagacgacttaccggagatgtgctcatggagctgccatatgcgctttcatgcatggtcaagaagcttatcaaggagaaaaagaatgatgctggaatttctgaatatatcgatataaataaagagcttcaagagttcctcattgtcgcttggtttatctgggaggtttatggcacgatgattcatctcagagtttctgattcttatgttttgtcacaagggcaagacgacaagtcattttgctgctaa

SEQ ID NO: 135764 - DNA, 129 bp, Zea Mays
aaatatgttagtttgttttgtgcgcagcaaaatatgttacttttaaaaattatgcaagtttatttcgaccatggtgttgaaacatgtaattcaactaatgttgttggctgaatagtttcataagtaaag

SEQ ID NO: 135765 - DNA, 527 bp, Zea Mays
agtattgccactatatctgcaacctactcaatcataaatcaagatcttgcacttggttgcttccccagcgtgaagatggtcaacattagactgcaatctaaattgtttactgtgaactagaacttctgcatacacatatgtggatttgtacatgtacaaaatctgcaatgcctcagattttatgtgccctcggcaactggcggaatccaaggtggcctgatagaaaaggggcttccctcgctcatcttgtaggctacagctacaaatcagataataaaactctattagaaaatgctagatgctgaaggtagggagaaagagaatcttgaagaagaaataggtgttttgagaagtcagttattgcatatgagtatggaagtcgatgagacaagaagtcttgataaaggagatgggcccaaaaaaatttcctggtttagattaattggtgtcttagactcgaggttcgcaacccagagagcagagcaatggactgaaacaaccaattgccaaattctttgaacaaggta

SEQ ID NO: 135766 - DNA, 287 bp, Zea Mays
gttagattggtaaattttgctcacgtcttaacatttgaccttttattttagagttaacatcagtggtctgagcttgccttgtagaagttattcacaagtcatcaagttacattagttcaggcttagaagatgtactgcttgacttgtattcgacctattgcagttctcatcgatagacccttccatctgtcatgcaaacatccacaaatatgcttacaatggcatctagagcgtagagtgcagtgagacgactacatggctgaatccttttaccaattgttcaggat

SEQ ID NO: 135767 - DNA, 191 bp, Zea Mays
gcgatcactcaagacatgtatactgcggaaacctggtggttgtcatcagatgtattttccttgatagtaaattgtatgtgcagatctgtaattttcttcatagtaaattgtatgtgcaaatctgtactcagtgaatttggtctctagctgagaaataacacatgagcggacaccagggcttatttgtggat

SEQ ID NO: 135768 - DNA, 1704 bp, Zea Mays
atggatcctgcttgtgtttcagaaggggataattcaaagaatctgcataaaatagatgttaccgtcaactcttatttcgccgttcttgatggtaaaaagagaaagatgtggattcatatttcaaatggggtagctgccaaaagccaattttctaggttgttgaaaagggtgacaaatggcaatttatttatgacaatgggaagatgtaaggagggagaggagacgctgcatgttatgactgatgtggtgggcaaggagatggctaccgcagccaatgtggacaaggtgaaagaaatgcttgctgtagtagcagatgtggtgagcaaagatatgcttgctgcagcatattcggtgggcaaggagatggatgtagacaatattgtctatgaagagatgcatgtagatgaggtgattggcacagcagacaatgatgaggagttttgtacttgatctttacttctctttttttgttacattttttcaggtggtcaaactttcagatttggacatgcacacttgttgtagttcagctacagtaaaggggcgagaggccactataaattggttggcacgtaggtctaaggacattgtgaaagaggatcattctcttagcgcaagaaagttacaaaaaaattggagaaacagtacaaccttgaattgtcatattggaaagtgtggtctgagaagaagtcaaccatgaatgatcttcatggtacttgggaggggagcttcacaatgttgtggagattcaaatcagcactggaagagtcttgcccgggaagcatcattgagattgattgccagaaggttaatgggagaatgcacttctcaaggatgtttgtgtgcattagagcatgtgttgatggatttttggctgggtgcagaccatatcttggtgttgattctactcacctcactggaaagtacaaagggcttgctgcagccactgcaattgatggacacaattggatgtatccagttgcgtatgccattttcttcaaagaaacaaatgacaattgggcatggttcatggccaatctgaaaaaagccatcgggactccacctgggttgacaattcatagtgatgcttgtaagggattagcatatggtgtcaaaaaaatattcaaggcggatgctgagcaccgtgagtgttttaggcaccttatgactaatttcaggaagaagtacaaaggggatgtgctgaagtttatgtggccttgtgcatgggcatgtacaactcgtaggcatgattaccttgtggaaaatattacagctgctgctcctaaagcaatcccttggttaaacaagcatcacaaattgatttggagcagatcaaaattctctaaaaagtgcaaagttgattatgtcaataacaacatctctgaatgctttaacaattggattaaggattacaaagaccttccagttgttgatctgatggataaaattagagagaagatcatggaaaagattgccacaaggcaagatattgccaatagacttgaaggccatatccttccaagtgtgctacatgagctgaacatgaaaagtagagggcttaattatgattttagcaaaagtgggttactagcagccgagatttctggaacaacaaatgaagggaagacatggaggtatggtgttgaccttaacaaaagaacttgtggctgtggacaatgggaggtgtctggaaaaccatgcact

SEQ ID NO: 135769 - DNA, 1675 bp, Zea Mays
ccttccaaaagaaaacgtcaacaccactaccacccacgccacttgactttgaccgttgactcgccgacgtcactccagcgttcttaaggcccgccacacactctctctcctccctcgtctctgaacagcactcataccttgctagccatggacgcggccatcgccgggcagcaggcgaggcgccggatccagccgccggaaccactcgtgatggccgggacgccgccaacgcccgcagcgttccggtgtccgatctcgcttgaggtgatgcggtcgccagtcagcctccccaccggcgccacgtacgaccgcgcgtccatacagcgttggctggactccggccaccgcacctgcccggccacgcggctgccgctggcgtccaccgacctggttcccaacctgctgctgcgccgcctcatccacctgcacgcggccacgctgccgccttccccgtcgcccgaggaggtgctgtcgcagctggccgccgcagacggggagcccgcggccgcggagaaggccgtgcggtcgctggcggccaagatcgcgccggagaaagggaagcgggcctcggtcgcgtccgcggtgtccgccgatctcgactccgcggtgccggcgctcctctcgttcgccaagggcggggcgggcgccgacgcgcgcgtggacgcggtgagggtccttgctaccgtggccccggagctggtcccttacctgacgggggatggcacggagaatcgcgacagggtgagtatggcggtggaggccctggccgccgtgctgtccgcggaagggatcgcggaagaggccagggagggcctcgtccttgctcttgtcgccgaggatctgggccgcgtcgtgacgacgctgctcggcgcgggcgcgaacggcgccgcggtccttgaggcgatgctgacgtcggcgcgcgtggacgcggacgccaagaccgcaatcgccgacaggccggagctgttcccggacctcgtgcggatcctcagggacgccgcgtcgcaggcggccatccggtgcatggtcgccgcggtgcaggtccgcggccggccggcgcgcgcgtccatggtccgggccggggccgtccccgcgctggcgctggccgtggcggccgcgcccacggccgccgcggagtccgcgctgcggctgctggcggaggcggcgcgctgtggcgacggcaaagcggccatcggcgccgacgccgcggaggtggcggccgccgtgatggggcggatgatccgggtggggccggcggggcgggaggctgccgtggtggcgctgtggctgtgctgctgcgcgggcggcggcgaccggaggatgcgggaggccgtggcttccgcgcccgaggcggtggggaagctgctggtggtgatgcagggggactgcgccccgaccacctcgcggatggccggagagctgctgcgagcggtgcggatggagcatgagaagaagggcatggccgccgcctacgacagccgcaccatccatgtcatgccgtactgatggatccggcggaaacgcatcgccctgcagcttcacagcttgcagctgtaatacaatctatggaaagcggtgtaagtaacgtaggggatcgatcggtcggattggagcgaatcatgtgctgactgctttgcaaaatatgctgcttgcatcggggaagtgagaaaaaaaa

SEQ ID NO: 135770 - DNA, 1435 bp, Zea Mays
catcgcatggggcacacacaccacatgcaccaacacccacccaagaaactagaagcaggggaaacccactcgtcttgttggcctctccccactgcccagtgcccacacatatataacgggccggcgcatccactcgaaactcgatctccactgacaaacgaagctctcctcgccgcactcgcgcctgctcgaccgctccaacaagaccctctcgcgccaccgcagcagcgtcgtcgtcgctacgcggatgctgtcttctcaccgcgagagcctgctgccctacgcgccggggcggcgggcggcggtgctgctcgaccaccggcggtaccgcccgaacgtcgaggtggcgcccagctgcccgcgctgcgactcgcccaacaccaagttctgctactacaacaactacagcctcagccagccccgctacttctgcaagggctgccgccgctactggaccaagggcggctccctccgcaacgtgcccgtcggcggcgggtgccggaagaaccgcagcaggggcaagccggtccgagccgtggccgtcgattccgtggcgcccagcagcggtggcgcggcggcgttcacgcaccgggcgtcggcgtcgtcgtcgtcggcgtcccccgccacgctgcggccggacatgctactggaaggcatgctcggcagcccaagcgagctgtgccagctgacggtgacggacgacgacgcagcggaaaacccggctgtggcgcccgatggacccaggatcgacctggcgttgctgtacgccaagttcttgaaccaacagccgccggcgcccgagcggcgcgccgtcctgccggaatcgctcgtcgtcgacaccttgagcgggtcgtcgtcgagcgacgtgggtcccgtcgtcccatcgcgggatcatcagccgttcacgacgcaagacgacgggctgggcgagctgtccgcggcggcgagcgcagagccgagcgctcctccgccacagtcgtcgtcgtgtgcggaggcgcttattggggcgttcggcatggaccagcgctgctacgactctctgggtttgccaccagacggcggggatctagtcctaccgtcgacgtggcctcttcttggggccaagtacgagctgttcgatccgctacctgaggacgccgtgagccttcaggacggcttcgccggcgacgaggacgtgtggagcggcgccttggcttgtcaagggctggaagcagctctctgcaggccgtaattttttttaactcgcctcttgattttcaccgtgcttgtgattgttttatgcgctcttttctttttcctggttgtgatcgtgttcaggagtaatttatatagagaccatatatacagcatgtccagatcatgcattatgatggatcaacgggtatacatgtgagatatagaaagaacttaataaaattttgacattttgtttgac

SEQ ID NO: 135771 - DNA, 3494 bp, Zea Mays
cggagcggagccgcgaggagcccgcgtgtcgcgagagagcagaggcggcggaccggcggcgtccaccgaacaggagatcttgccgtgacatcgtcccgtcgcctgttcccaccagaatcgaaggagaaacttcgtcgccgctgccgcggcatccggtcatcctcgccgcttgccaatgcaggtggagaccaccgcgagctcgcttaagatgtcgccgtgtttgaacctcagttggacctggtcaggacaaatgtgactggttgggctatatacggattgacgtacctgttgcgagttgctgctgctggactgtgattgttttgtcacgtattgaggctcatggagtcacggatggatcagtacgaaatcatggagcagattggccgtggggctttcggtgccgccatactagtcaatcacaaatctgaaaagaagaagtatgtgctgaagaaaatccgtcttgcgaggcagactgagcgctgtcggaagtctgcccatcaagagatggctctaattgctcggctgcagcacccttacattgttgaattcaaggaggcttgggttgagaagggttgttatgtctgcattgtcacgggctattgtgaaggtggagacatggatgagctgatgaagaaatcaaatggtacctactttcctgaggaggtattgcttaaatggttcgctcaattggtgttggctgtagattacttgcactcgaactatgtcttgcaccgtgatctgaaatgctccaacatatttctcaccaaagaccaggacatacgccttggagactttggcctggcgaagactttgaaggaagatgatctaacttcatcggtggtcgggacaccaaattacatgtgcccagagctgctagctgatattccctatggtttcaagtcagacatctggtctctcggatgttgtatgtatgagatggcagctcaccgccctgccttcaaggcatttgatatggctggattaataagcaagataaatcggtcttccatgggtcctttgcctgcctgttactcagtgtctatgaaaaccctaatcaaaagtatgttgaggaagagtccagagcatcgacctactgcatctgagatcctgaagaacccgtacctacaaccttatgttaatcaataccggcccctttatgattcttcaaacccaatgcggatgccagagaaacaattacatacttcacggagcagtcagagaagcatgtctgacagccaaagcagtagcatttccagtagtgacattgacagtgcccagtcaagtgacagaagcacatcaggtggaactacaagtactgacagaaagactattgatactgcaagcattcgagatgtggatcaaggtaagtcagatgaaaatggtgcaacacctgaagatgttagaggcaacaaagacaatggtagtgttcagtttaaaaggcaagattcattgaaatgcatacatgttgatcaccatcccagaccagagagcaaacaaccaaagatcattgagaagataatgacaacccttagagaggagagcaggctgagagaaatcaactgtcctgtcagaggtggtgtaaagccgaattctggccacagcaacaataatcaagtagagcaaccattacaggtttcaaggacaaacagtgatatgccatgcagcttaaaatctggcaacattctatcccatgatgaacatgtaaatgaagttgaagcatcaccacccttgaagaaactgtcacctattgttgaacatagcccaaagatgaaaaccgctgggccatcaactcctgaacctgccaaacaaatcacagaaaatggggctgcagcttcaggaagaactaagaacaagtcaccacttcctgctagacgacctagccctcagaggcaagctggagcagggacttcaagtttcccagtcacaatgacaagacgtactcataccaagttcataacagagagagagaaaactctagagggaccatcctgtagcccggataatactcttagagatcatccacaaagtttaatgatttcttcaaatccttcagaaggacagcatatgaaactggattcttcacaagcaaatccaacaaatctttgggagcttttcaccgtttcagcgaaggaacacagcagtgcttgctcaagttctacagttggttgtactgaacctatggaccagcctgaactatctgaacctaattcacctgtctgccttgtttcaccatgtacaggctgttcaccaaacacaaccgaagaggacgacaaaagcaccataccatgttcagaaattaacactgacaagaacattgcaactaaaaatggtggttcaagcctgaggtcagatttggagccatcctttctgagttctgaacaagagtttatttccaaagaagtgcagtctagcaagcatgagaagagcaacatcacattccaaagcggtgaagataagttcactgtccaggagctgctttcatcggcaccagaagttgctcctcctgtttcatcagcaccagaagctgctcattctattccagccacaaaaggaacactattggattcacccacttctcttcagtcatggaagaaacatgtagtttctcatttaaaccctccagttgatgatgctctacagactataagacacagcactttctgtctcagtgatgagcagccaacacaaggaagtgttcaaagagaagctcagagcgctgatatgatcaaactactggatgttgtaccagaagaggctgatgcaaggagcagctcgttaaacaccctgcttccagcacgatccccatcagttactgctacatcacaagtctcagaagccaatgttgctaccaaggcactagctgcctcggacaatacaaaatcatctgctgcctcatcggggaccagcaacggagtgcaggaagaggcatcccctactaaggaagtactcgatgttacatcgtttcggcagcgtgctgaggctctcgaagggcttctggagctttcggcagagctgctggagactcaaaggctggaggagctagccattgttctcaagccgtttgggaagaacaaggtgtccccacgagaaaccgctatctggctggccagaagtttcaaagggatgatgactgacgaagcaggtcgcacgtcactatgagcacgaatttttgtctgcctgtttgtttggtttcacttgagcagagttgtgctcggagtaaatcggtgccgctaggtttggtaatagcagtgctctgagttactcaaaattgattgaattgacagcagcttgtggagttgtattcttttttatttttatttttgagaagacagtttgtggtctccgttgccacttttttttcccatttccgattgctccattcttttggcgtatgttgtacatagccaagaacttagaactgtaaacagcaataaagcttgcctccggggtgtgattcaaaaaacaaaacactgttaagctaaatgaaccttgaa

SEQ ID NO: 135772 - DNA, 3410 bp, Zea Mays
agagcagaggcggcggaccggcggcgtccaccgaacaggagatcttgccgtgacatcgtcccgtcgcctgttcccaccagaatcgaaggagaaacttcgtcgccgctgccgcggcatccggtcatcctcgccgcttgccaatgcaggtggagaccaccgcggacaaatgtgactggttgggctatatacggattgacgtacctgttgcgagttgctgctgctggactgtgattgttttgtcacgtattgaggctcatggagtcacggatggatcagtacgaaatcatggagcagattggccgtggggctttcggtgccgccatactagtcaatcacaaatctgaaaagaagaagtatgtgctgaagaaaatccgtcttgcgaggcagactgagcgctgtcggaagtctgcccatcaagagatggctctaattgctcggctgcagcacccttacattgttgaattcaaggaggcttgggttgagaagggttgttatgtctgcattgtcacgggctattgtgaaggtggagacatggatgagctgatgaagaaatcaaatggtacctactttcctgaggaggtattgcttaaatggttcgctcaattggtgttggctgtagattacttgcactcgaactatgtcttgcaccgtgatctgaaatgctccaacatatttctcaccaaagaccaggacatacgccttggagactttggcctggcgaagactttgaaggaagatgatctaacttcatcggtggtcgggacaccaaattacatgtgcccagagctgctagctgatattccctatggtttcaagtcagacatctggtctctcggatgttgtatgtatgagatggcagctcaccgccctgccttcaaggcatttgatatggctggattaataagcaagataaatcggtcttccatgggtcctttgcctgcctgttactcagtgtctatgaaaaccctaatcaaaagtatgttgaggaagagtccagagcatcgacctactgcatctgagatcctgaagaacccgtacctacaaccttatgttaatcaataccggcccctttatgattcttcaaacccaatgcggatgccagagaaacaattacatacttcacggagcagtcagagaagcatgtctgacagccaaagcagtagcatttccagtagtgacattgacagtgcccagtcaagtgacagaagcacatcaggtggaactacaagtactgacagaaagactattgatactgcaagcattcgagatgtggatcaaggtaagtcagatgaaaatggtgcaacacctgaagatgttagaggcaacaaagacaatggtagtgttcagtttaaaaggcaagattcattgaaatgcatacatgttgatcaccatcccagaccagagagcaaacaaccaaagatcattgagaagataatgacaacccttagagaggagagcaggctgagagaaatcaactgtcctgtcagaggtggtgtaaagccgaattctggccacagcaacaataatcaagtagagcaaccattacaggtttcaaggacaaacagtgatatgccatgcagcttaaaatctggcaacattctatcccatgatgaacatgtaaatgaagttgaagcatcaccacccttgaagaaactgtcacctattgttgaacatagcccaaagatgaaaaccgctgggccatcaactcctgaacctgccaaacaaatcacagaaaatggggctgcagcttcaggaagaactaagaacaagtcaccacttcctgctagacgacctagccctcagaggcaagctggagcagggacttcaagtttcccagtcacaatgacaagacgtactcataccaagttcataacagagagagagaaaactctagagggaccatcctgtagcccggataatactcttagagatcatccacaaagtttaatgatttcttcaaatccttcagaaggacagcatatgaaactggattcttcacaagcaaatccaacaaatctttgggagcttttcaccgtttcagcgaaggaacacagcagtgcttgctcaagttctacagttggttgtactgaacctatggaccagcctgaactatctgaacctaattcacctgtctgccttgtttcaccatgtacaggctgttcaccaaacacaaccgaagaggacgacaaaagcaccataccatgttcagaaattaacactgacaagaacattgcaactaaaaatggtggttcaagcctgaggtcagatttggagccatcctttctgagttctgaacaagagtttatttccaaagaagtgcagtctagcaagcatgagaagagcaacatcacattccaaagcggtgaagataagttcactgtccaggagctgctttcatcggcaccagaagttgctcctcctgtttcatcagcaccagaagctgctcattctattccagccacaaaaggaacactattggattcacccacttctcttcagtcatggaagaaacatgtagtttctcatttaaaccctccagttgatgatgctctacagactataagacacagcactttctgtctcagtgatgagcagccaacacaaggaagtgttcaaagagaagctcagagcgctgatatgatcaaactactggatgttgtaccagaagaggctgatgcaaggagcagctcgttaaacaccctgcttccagcacgatccccatcagttactgctacatcacaagtctcagaagccaatgttgctaccaaggcactagctgcctcggacaatacaaaatcatctgctgcctcatcggggaccagcaacggagtgcaggaagaggcatcccctactaaggaagtactcgatgttacatcgtttcggcagcgtgctgaggctctcgaagggcttctggagctttcggcagagctgctggagactcaaaggctggaggagctagccattgttctcaagccgtttgggaagaacaaggtgtccccacgagaaaccgctatctggctggccagaagtttcaaagggatgatgactgacgaagcaggtcgcacgtcactatgagcacgaatttttgtctgcctgtttgtttggtttcacttgagcagagttgtgctcggagtaaatcggtgccgctaggtttggtaatagcagtgctctgagttactcaaaattgattgaattgacagcagcttgtggagttgtattcttttttatttttatttttgagaagacagtttgtggtctccgttgccacttttttttcccatttccgattgctccattcttttggcgtatgttgtacatagccaagaacttagaactgtaaacagcaataaagcttgcctccggggtgtgattcaaaaaacaaaacactgttaagctaaatgaaccttgaa

SEQ ID NO: 135773 - DNA, 1060 bp, Zea Mays
accactcacaaaccaagcgcgcgcgccaagccaaagcgacgaggccagttccaatgagcggcatcgactgatcgagtgaccttgcttgcatagttgcattgcgagcgtgcgcgctagcataacaaggtgctatcctatagccggcaccaagcaccatgtcgctggcaggtggaggtgatggctgtagtcggcggggtgaatgcggcggcaggctcgagttgccgcggcagcagccgcccatggtggtggatgtcggctgcaactgccgcgcgccgaggctgctcagctccctcatctcctcgctcaagtcccacgctcgcggcgtcggcaggcccaaccccaactcgtctaggcacgcctcatcgtcgtcctggtcgtcctcggccaccacggccttcacgtcatccacctccctcaccaccgccactactaccttctcgtcgctggaccaccacccgtcgtcgtgggtcccatcgacgtgcgccgcagacaccaacgcggccgtctacgtggtcgacgacgacgccgaacccgcaaggccggctcagaggcggcgccggcgtcggcagcggaggaggggcaggtgcgggagggcagcgacgtgggaggaggcggcggtggcggtggaggtggagtccgcggcgccgtacgaggacttccgcgactccatagtggcgatggtgacggagagggaaatgtacgcgtgggaggacctgaacgcactgctgcaccagtttctggcactcaactcgccgcgccaccacccgctcatcctctccgctttcgccgacctttgggctccccgcggcggccccttcggccctccgtcgccgtgcctctgaacttgtcgccaatgttggtcgacgtcgcccttgtaggaagcctgtacgtaggcctgcaagtgtgcaaacctggaccgcgcgcgggcgatatttgatattgcattgtaacgagtacgtacgggttataataagcttaataatctactagtgcatgcaatgtgatggtgcgcacgtactcgttcttggtaaaatgtaaatacttctcttgtctaatcaaa

SEQ ID NO: 135774 - DNA, 1115 bp, Zea Mays
atggcttgaaccaaataaatccctcgatccgtttgaaaactactactaccccgcccccagcacacctctctacctcttatcccccgggccggcttgctcctactcacgccagcgccacagctgcacacgtcgctgttgacatcagagctgacgccaatggtgagggggctacccttcagctccctcttgtacaccaccactaactcagcccaggacaccccgcaaccgtcaccgccgccagccgctcctccaccggcatggatgtggccgtcctgcaagcacccaaggacgagccagtacttgcggaccccatccgccaccgccaagaccatcgcgtccctcttcctggactccggggagtcgtccttcgccaactcgtcggcgcggacgacgcgccacgtggactgcgcgtccgacagccagtccaccgagtccgaggccccggcggccgacgacttcgcggacgccatcgtccgggggctccgctccgacgaccgcctcctcttcgagccccacgggccgtccagctccatcctggagaggaagcctccggcggcgcctgccctgcggccgcgagcggcggcgtccttcgttgatggcgtcgcggtggcgttcgactccgccgacccgtaccacgacttccgggcttccatgcaggagatggtggccgcgcacggcatgggcgactgggactggctcgagaggatgctggcgtggtacctcggcgccaacggcagggacacccaccccgccatcgtcaccgcgttcgtcgacctcgtcgtcaccatggccgcggcgtccgcctccgcctgcgcctgcagctcctccagccgcgtctcttctttcacgttcgccagcagtagcgagccggccgagagcagcagcgccggcggccatttctccttcggcctgaggtaaacggtaaaccaaagcaaaccagccggccggacgctattatctgggtcgtctcagtagctccggcgtgtatcaccatgcctgttgtcgtaactcgtgtgccagcaaccgtacgtgtgtgtgcgtgtgttgtgagatttatagttgtacctgatccaggttgattatatatatattttgcttgttgcggtacatataga

SEQ ID NO: 135775 - DNA, 102 bp, Zea Mays
tcggcgcggacgacgcgccacgtggactgcgcgtccgacagccagtccaccgagtccgggggctccgctccgacgaccgcctcctcttcgagccccacgggc

SEQ ID NO: 135776 - DNA, 396 bp, Zea Mays
atgcatcggttgcctaaggccggagactcgctgttgtacgaggagatgggcgcgcacaggcacacccgcgtgaacgacgccgccacgttcagcgacgaagacctgcgcagcttcccggggcccctcgccagcgccgcgcccttgccggcggccgtcacccccgatgccgccgccgccttcgtcggcgatgccttggccccgcacgccgccggctgcttccagacgaggaggaggagaacgcgatggcgaaggccgtggcgagcctggtggcaacgaggggccccaggacgctccaccgaggacctggccctggccggtggagaccagcacggcgaggttgaatgcctcgggctgggcaagggcggtagcacggtgcctgccacggagaggaagtag

SEQ ID NO: 135777 - DNA, 1253 bp, Zea Mays
gagaattcagaagagaggcagggtggagctagctaggaagcaacagggatttaaatgctgctgttcatggcagtaatgaaaaccatcacctcctcttcacctcaacgagcatcatcggcaacctccacaagacatcatcatcattatataacgcaaacgggagttgcaccaccgctccacaaatacccaggcaggcacaccgtcgaggtggcctggctccattccagtccagcagcaccacaggaaccaccacaagcacatgcgcgcaagagtggccgcggtctcctactctcctccccgtagctccacatccacagtgcatgcatacacgagctagctagctagctaagctagtactgatctcggttccgtgcgccgtgcggcagtgatcagtggttaattttactttgttggaagatgagcaggaacaacggcaaggtcgggtccaagctgcaggagctgcggctgagcctgtcgcggtcgcgcgggggcgctgggggctcgtcgggggcgacgacccaccaccacggcggcggcgggggctcgcccaggaggctctcgtcgtcgtcgtcctcgaccgcttctccgccgagctcgtgcgtgtcgtcggagggcagccccgaggcgggggcaggcggcgccggcgcgcccatgatcctggcggggtgcccccgctgcatgatgtacgtgatgctgtcgcgggaggacccccggtgccccaagtgctacagcaccgtgctcctcgacttcaacgacgcccccgccgatccgcgccacgccggcgccaagggcaagggcggcaagcgaggctgacgggagagctagcgtcgccggcaggcgcatgcccttgcatggctagcaactgccgtccgtcgtgtccattacgtacgtgggtgctccttgtgtccgtgtgtgttcgagttcgagttgatcagaaaggaattattgcgtagacccgttcttccatgggccagccatatgatgagaagctaaaagctcctaggtatgttggacatcaggggtgccaatggaacgggtctaggtaataattctgcgtccctcgctctctacctttctgtctgtgtgtgtcatgtctgcgcctctgcggagtgtagaggacgtgcgtcggttggtgtcatgtgggttgtgtggtctgtagtactgataaggattaagattttgtctcgcaggttttatcgaaagcattattaagagtttttataaatttaactctctaaattattattgggata

SEQ ID NO: 135778 - DNA, 408 bp, Zea Mays
atgacgcacacccacgaataccagacactgctcccccactctggtcactgttctcgaacaactccggatggcccgaccgtggcctcgggagaaacctccgcctcgcccgaacatggcctcggcctaaataacatcgacaaaaggacgcccgacgccaccaacccttccacaaagacatctgacaacaggatggctacaaaaactatagggctggtgtcaagtctactttatgccatacgggacaaattactaagtgcttttcaccatacttatcactatttcaacaactacggctcgaacaacacatccacaagatgggctcgggtacgcatccgagccctcgaccctggtctctgctctcttcttagtcaagatacgggatacaggggtcggacatccttccagtga

SEQ ID NO: 135779 - DNA, 756 bp, Zea Mays
caacagtggagcaggatgaaaaggactccattgaggaaacaaatggtttacatgtggaatatgatgaccaggaaaagatcaagtacctagcagaagggaagctggtttctttttgcggacaggttttgaaagaggcgtctgatttacagcctagcactggggacgctgccagtgtagacatacataatgtattagacttacgggcacctgttattgtcaaggttttgaaaggaatgtgcatcatggatgctcagatcttcaaaaggcacttgaaaaagttctatccattaattaccaaacttatctgttgtgattagatggatgttcgtggagcccttggtgatctctttagcaaacagcttactccactcatgtcttgaagtatggcagtatttcctccgttgcatatatcttgttggaatatattcgtcatcagcatttttgtgcaaacatggagcaccggtagggtgcttgacatccttaaggcactgtctggtgcaagtgcaacagctattccctaggaagttaagagctttgccagcgggaacggcaactccctaggccgcatatttttgaatgacgcaagggaagtagcttgattgtttcgcaccgtgttttccctagcgacttggatgatacgagggacgacgcttccattatacagtagagtagtgttggtgacatgtacgcattgttcaggacattgtacttgaggcctgttgttattttatggcaatagtagattatttgcggcaa

SEQ ID NO: 135780 - DNA, 702 bp, Zea Mays
atgacaatggaaggtctattggaagaacaacccaatgtttagcagaaaatatttgcaccgatcaagaaaggttgtccagtgatgactgtgattccagtaaccagggaacctccccctgttttccaatatatggagcatgatgcaccatatggaagacaaccattagcagatatgatttcagtatttgcatgtaagtttcctgatctaaatacatacaagagctgtgatcttctcccgtccagttggatctctgtagcctggtatcccatataccggataccaacaggacctacgctacaagatctagatgcttgctttttaacattccattcattgtcaacaacacctgacggtacgataagcggttgtcctgagacagataacttccataacagtaaagttgcttctattcctgggaagatcacactgcctctgatcggccaagcatcttacaaattaaatggttccttgtggacgtcaaatcagcaccatgagcagcagttgactacgtcgcttctgaaagctgctgatgactggctttgccagcggcaagtagatcacccagattaccgcttcttcctcacacactaaattggatgtccatccaaactacctacctactgaacatcacagctcgatgcccactattttattcaatgaacttacattatcgctttatatagtccacaatcactgcagtac

SEQ ID NO: 135781 - DNA, 2064 bp, Zea Mays
cctagctacctattcctcctcggccctcacttctctatagcccgtggaaaacagaaagagaagctgcctcatagggcgtgttctaaaggacacaagatcttctctggggcacactagtgtatgaaaaaccacaagggtgattcagcttaccactgtcggctccttctatgcatggtcctctctcttcaatatatcatgtatatatgtgaacctagctagctagctcactgatctccccttgcagctgatccctgctgctcactcccatggcgcaaggtgaggagagctcgtggtgcatggcgagcagcgatcatggtagagctgcaccattcgtccaagcagtcgcgtgtggaacccaaaggcgcgcttctgccgcacaacctgccaatttcttggagttgcaacctgcagcagctgctccttattactttggtgagttggaggaggccctttatccatggcacccgtacatctgttgatcacggcatgatcggaagtgatgtggacacagagcgtaagacagctggataccttgcagctaggccccccacactggagatcttcccttcatggccaatgagtcatctacagcagccatacagtggtaactcgcactcagtagggagcaccactgagtcgagctcaggtcagaacagtatgccacagaccgagctggtgtccccagggagcatgagggccgactctggacagcgtcaggagcttttgatggtgactgttgatgattacaactacgagcaaggactcggagccgcagcaaccacagctccaatctttcagcagcatgcagcaggccaagacaagggaaagcatggatccacaaggaaagacggcaggctgttagacgccaagaccgagaggcgattggcccagaacagagaagctgcgaggaagagcaggctgagaaaaaaggcctacgtacagcagctagagacgagtcggatcaggcttcagcaaatcgagcaggagctgcatggagcacgctcacagggtctgttcccgggaggaggtggtgcggctggagacttgagttcaggcgctgtgattttcgacatggagtacgcccggtggctagaagacgacaccaagcacatgacggagctccaggccgtgctgcagccccagatcatcgacgcgaacctgggggccatcgtcgaggactgcatgcggcactacgacgagctgttccacctgagggccatgctcgcaagatccgacgtgttccacctgatgaccggcctgtgggcgaccacggccgagcgatgcttcctctggatgggagggttccgtccttctgaaatcctcaagatgctgataccgcagctcgaccctctcgcggagccgcagctgatagggatgtacaatctgcaacggtcgtcggagcagaccgaggaggcgctcgtgcaggggcttcagcagctgcaccagtcgctggcggacgccgtgggcgctagtcctctcagcgacggcgcgaatgtcgccaactacaccgctctcatggccctggcacttgacaggctcgacaccctcgagagcttttaccgccaggcggacagcctgaggcagcagaccttgcaccagatgcggcggatcctgacgacccgccagacggctcggtgcttcgtctccatcagcgagtaccaccgccgcctccgcgccctcagctccgtctgggcatcgtcccgccctccaactcctccaagcgagggcgtcgttgcggccgcagagaatgttagccctacagggacgacgaccgagcaagctctccctccgtaccaccatagccagccgttccctggcttctgatcgaaggttcgatgcatgcatgcatgctggttgtcgcggctagctagggtacagattccgtcgtcagtggtggcgagcggacgacgaggcccggccgagggggacagattgtagtgtataacgttcttctatatatcattcgtcgagaacggaaacatgcatcatcagtcggtattcagtcagtgcatcatcactatgaaaaaaaaagaggacacacaaagggtctctgctctctttctc

SEQ ID NO: 135782 - DNA, 1994 bp, Zea Mays
cctagctacctattcctcctcggccctcacttctctatagcccgtggaaaacagaaagagaagctgcctcatagggcgtgttctaaaggacacaagatcttctctggggcacactagtgtatgaaaaaccacaagggtgattcagcttaccactgtcggctccttctatgcatgctgatccctgctgctcactcccatggcgcaaggtgaggagagctcgtggtgcatggcgagcagcgatcatggtagagctgcaccattcgtccaagcagtcgcgtgtggaacccaaaggcgcgcttctgccgcacaacctgccaatttcttggagttgcaacctgcagcagctgctccttattactttggtgagttggaggaggccctttatccatggcacccgtacatctgttgatcacggcatgatcggaagtgatgtggacacagagcgtaagacagctggataccttgcagctaggccccccacactggagatcttcccttcatggccaatgagtcatctacagcagccatacagtggtaactcgcactcagtagggagcaccactgagtcgagctcaggtcagaacagtatgccacagaccgagctggtgtccccagggagcatgagggccgactctggacagcgtcaggagcttttgatggtgactgttgatgattacaactacgagcaaggactcggagccgcagcaaccacagctccaatctttcagcagcatgcagcaggccaagacaagggaaagcatggatccacaaggaaagacggcaggctgttagacgccaagaccgagaggcgattggcccagaacagagaagctgcgaggaagagcaggctgagaaaaaaggcctacgtacagcagctagagacgagtcggatcaggcttcagcaaatcgagcaggagctgcatggagcacgctcacagggtctgttcccgggaggaggtggtgcggctggagacttgagttcaggcgctgtgattttcgacatggagtacgcccggtggctagaagacgacaccaagcacatgacggagctccaggccgtgctgcagccccagatcatcgacgcgaacctgggggccatcgtcgaggactgcatgcggcactacgacgagctgttccacctgagggccatgctcgcaagatccgacgtgttccacctgatgaccggcctgtgggcgaccacggccgagcgatgcttcctctggatgggagggttccgtccttctgaaatcctcaagatgctgataccgcagctcgaccctctcgcggagccgcagctgatagggatgtacaatctgcaacggtcgtcggagcagaccgaggaggcgctcgtgcaggggcttcagcagctgcaccagtcgctggcggacgccgtgggcgctagtcctctcagcgacggcgcgaatgtcgccaactacaccgctctcatggccctggcacttgacaggctcgacaccctcgagagcttttaccgccaggcggacagcctgaggcagcagaccttgcaccagatgcggcggatcctgacgacccgccagacggctcggtgcttcgtctccatcagcgagtaccaccgccgcctccgcgccctcagctccgtctgggcatcgtcccgccctccaactcctccaagcgagggcgtcgttgcggccgcagagaatgttagccctacagggacgacgaccgagcaagctctccctccgtaccaccatagccagccgttccctggcttctgatcgaaggttcgatgcatgcatgcatgctggttgtcgcggctagctagggtacagattccgtcgtcagtggtggcgagcggacgacgaggcccggccgagggggacagattgtagtgtataacgttcttctatatatcattcgtcgagaacggaaacatgcatcatcagtcggtattcagtcagtgcatcatcactatgaaaaaaaaagaggacacacaaagggtctctgctctctttctc

SEQ ID NO: 135783 - DNA, 2099 bp, Zea Mays
cctagctacctattcctcctcggccctcacttctctatagcccgtggaaaacagaaagagaagctgcctcatagggcgtgttctaaaggacacaagatcttctctggggcacactagtgtatgaaaaaccacaagggtgattcagcttaccactgtcggctccttctatgcatgctgatccctgctgctcactcccatggcgcaaggtgaggagagctcgtggtgcatggcgagcagcgatcatggtagagctgcaccattcgtccaagcagtcgcgtgtggaacccaaaggcgcgcttctgccgcacaacctgccaatttcttggagttgcaacctgcagcagctgctccttattactttggtgagttggaggaggccctttatccatggcacccgtacatctgttgatcacggcatgatcggaagtgatgtggacacagagcgtaagacagctggataccttgcagctaggccccccacactggagatcttcccttcatggccaatgagtcatctacagcagccatacagtggtaactcgcactcagtagggagcaccactgagtcgagctcaggtcagaacagtatgccacagaccgagctggtgtccccagggagcatgagggccgactctggacagcgtcaggagcttttgatggtgactgttgatgattacaactacgagcaaggactcggagccgcagcaaccacagctccaatctttcagcagcatgcagcaggccaagacaagggaaagcatggatccacaaggaaagacggcaggctgttagacgccaagaccgagaggcgattggcccagaacagagaagctgcgaggaagagcaggctgagaaaaaaggcctacgtacagcagctagagacgagtcggatcaggcttcagcaaatcgagcaggagctgcatggagcacgctcacaggttcaaagttctctagacgcatcaggagacaggggacatatatagaacatctgatctagtgtttgaatagcgttattaccaccatcaccatgcatgtttcagggtctgttcccgggaggaggtggtgcggctggagacttgagttcaggcgctgtgattttcgacatggagtacgcccggtggctagaagacgacaccaagcacatgacggagctccaggccgtgctgcagccccagatcatcgacgcgaacctgggggccatcgtcgaggactgcatgcggcactacgacgagctgttccacctgagggccatgctcgcaagatccgacgtgttccacctgatgaccggcctgtgggcgaccacggccgagcgatgcttcctctggatgggagggttccgtccttctgaaatcctcaagcagatgctgataccgcagctcgaccctctcgcggagccgcagctgatagggatgtacaatctgcaacggtcgtcggagcagaccgaggaggcgctcgtgcaggggcttcagcagctgcaccagtcgctggcggacgccgtgggcgctagtcctctcagcgacggcgcgaatgtcgccaactacaccgctctcatggccctggcacttgacaggctcgacaccctcgagagcttttaccgccaggcggacagcctgaggcagcagaccttgcaccagatgcggcggatcctgacgacccgccagacggctcggtgcttcgtctccatcagcgagtaccaccgccgcctccgcgccctcagctccgtctgggcatcgtcccgccctccaactcctccaagcgagggcgtcgttgcggccgcagagaatgttagccctacagggacgacgaccgagcaagctctccctccgtaccaccatagccagccgttccctggcttctgatcgaaggttcgatgcatgcatgcatgctggttgtcgcggctagctagggtacagattccgtcgtcagtggtggcgagcggacgacgaggcccggccgagggggacagattgtagtgtataacgttcttctatatatcattcgtcgagaacggaaacatgcatcatcagtcggtattcagtcagtgcatcatcactatgaaaaaaaaagaggacacacaaagggtctctgctctctttctc

SEQ ID NO: 135784 - DNA, 1386 bp, Zea Mays
tcttcttcgttcgtcccggccgtgacatgcacgccttgacatagacggcctcgctcgttcccttcttccttcttctccacaccaccaaacccggcacatcacatacaccaggccaagagatataaagcagccgcgcgcgcacactagcttgttgcgcttgccggccccgagaggcatatatatcgtgaggagcaaactgatctatatatggtggtgaggcgggcttgcgcgataatggagggtgctttcagcgtgccgtactacgagtggctcaagccacggtcgtcgccgtcgacgtcctgctggacgacgatgacgctctcaacgccatcatcgatggaccgattattagccgccgttgctggcggccacgacgacgacgaggagcgcgacgccacgatgtgcttgccgcttcttggtaggctcgaagggagggcaaggactcccgagtaccatagtcctgtcaaagaagagctgagcaataataataccaccaccaccaccaccggcgcgcggggagaggagagtcgtaccggcgccggtgttcacctgaccatcggcttgccggcgactggtggtggtgctggtgggggctacagcatgagctctgaagaggcgcccatggacgatgaagatgacgagcaggatgaggattatttcgagctggaggaagaggaccagaaggcaagcgaacatgacaacaagtgcaagatggaagcagctggtgaagcagagcaacgtcggcccgggggagaggaggagggtatcaagagcttcgtcggcagccgcggccggcggtactggatcccgactccggcgcagatcctcgtcggcccggtgcagttcatgtgccatgtctgcagcaagacattcaacagatacaacaacatgcagatgcacatgtggggccacgggcgcgagtaccgcaagggcccggagtcgctcaggggcacgcaggcggcgacgctggcgctgctcaagctgccgtgctactgctgcgcgccggggtgccgcaacggcgtggcgcacccgcgcgcgcgcccgctcaaggacttccgcacgctgcagacgcactacaggcgcaagcacggcgacaagcgcttcgcctgccgccgctgcgccaagcccttcgccgtcaagggcgactggcgcacgcacgagaagaactgcggcaagcgctggttctgcgcctgcggctccgacttcaagcacaagcgctccctcaacgaccacgtccgctcctttggaggcggacactgctccgtcacgcccgaccaccaccagcagcagcaggcgcctgtgcccgtgccgctgatcaacaagcagcccttggaccgaatgatcatacgcttcgatcagggagcgccatggacgtcccatgcatga

SEQ ID NO: 135785 - DNA, 1654 bp, Zea Mays
ccagccggtcctgcgctctcgagtcgagactccaccttccattcatttcatctgctccatctccctctctgttcgccggcgtataataagcttcccctttctgcaactgatctgatccgggctgccgtgagctctgctcgtcctgatggagttcaagagggatgtatggagcctgctcctcgtgctgctcctcgggcagctcgtcgccttctccatggccgcctcaagcttcgcctcctccctcattgctaatcttggagtcgatgccccactgacacagtctttcttagcctacctgttgctgaccttagtctatgtaccaatcgtcctgcgtcgacggcagaagctgcaaatagcttggtactggtacctagctctggccttctttgatgtacaggggaactatcttgttgtgaaggcgtaccagtactcatacattaccagtgtgactttgttggattgctggactgttgtatgggtcgtcatgctcacctggtacgcactgggcacaagatactcactctggcagttcgtgggggcagggacctgtgtggcagggctcgcccttgtgctgctttcagatgcaaaatctcaagatgagcaagatccgaaaaaaataccacttctgggggatgcccttgttattgctgggacagttggttttgcatttagcaatgttggggaggaatactgtgtcaagaaaaaggatagagttgaagttgttgcaatgcttggtctctttgggttgctgatcagcacagcgcagatacttgtatttgaaaggaagggcctagaagcagttacatggtctccaacaatgataagtctgtttgcaggatttgcagtggcaattttcgtattctacacagttgctcctttcgttcttaagatgagtggagctacattgttcaacctttcactgctaacatctgacatgtgggcagtcgccattcgagttttattctatcagcaagagataaacaggttgtactacctagcattcgcagttgtggccattggattaatcatctattcgttgaatgatagatcttcagatgatgaaacagctggaagtacagaagcaccggcccaatatcagcaacttccaattgaagacaattcaacaagaattggttctagttcaggtagccaagaaaggacacataaggaagaagttcatatctgttagtgggataataatgtattaatgtacgaagacacttcattgtcaatgcatggatttttaccaaatcaaatatggcatagagatatgcagagtaaaatgctggttgcttcatgtataggaaaacgtttaattggcccaagaagctaagcaagatgaggaagagaatcagaattaattttctttacaagtcagtccagcagattattcacaagagcagacccattgctgaaggctcccgcatcagtgagatctaaggaagggataatacatcgggtcaaaatgatctttgactagggattgtgaacaatcacagctggtctgcaaagcataatagcaacagtatgaacatgtaaagggagttactagtcactaaagctctttcaagaattgtctatgaaggaaaaaaaattctagatagtgtatggatagcttacatgctttactggaatgcagaattatgatttaatg

SEQ ID NO: 135786 - DNA, 1854 bp, Zea Mays
ccagccggtcctgcgctctcgagtcgagactccaccttccattcatttcatctgctccatctccctctctgttcgccggcgtataataagcttcccctttctgcaactgatctgatccgggctgccgtgagctctgctcgtcctgatggagttcaagagggatgtatggagcctgctcctcgtgctgctcctcgggcagctcgtcgccttctccatggccgcctcaagcttcgcctcctccctcattgctaatcttggtattcaatctttcacctctcattgagctgaccagaatacacagacttgttggtgtccatggtaatttacttgatgattcttatctggatagtggtaaattttgttacttaccatgaacatcgtgcaggagtcgatgccccactgacacagtctttcttagcctacctgttgctgaccttagtctatgtaccaatcgtcctgcgtcgacggcagaagctgcaaatagcttggtactggtacctagctctggccttctttgatgtacaggggaactatcttgttgtgaaggcgtaccagtactcatacattaccagtgtgactttgttggattgctggactgttgtatgggtcgtcatgctcacctggtacgcactgggcacaagatactcactctggcagttcgtgggggcagggacctgtgtggcagggctcgcccttgtgctgctttcagatgcaaaatctcaagatgagcaagatccgaaaaaaataccacttctgggggatgcccttgttattgctgggacagttggttttgcatttagcaatgttggggaggaatactgtgtcaagaaaaaggatagagttgaagttgttgcaatgcttggtctctttgggttgctgatcagcacagcgcagatacttgtatttgaaaggaagggcctagaagcagttacatggtctccaacaatgataagtctgtttgcaggatttgcagtggcaattttcgtattctacacagttgctcctttcgttcttaagatgagtggagctacattgttcaacctttcactgctaacatctgacatgtgggcagtcgccattcgagttttattctatcagcaagagataaacaggttgtactacctagcattcgcagttgtggccattggattaatcatctattcgttgaatgatagatcttcagatgatgaaacagctggaagtacagaagcaccggcccaatatcagcaacttccaattgaagacaattcaacaagaattggttctagttcaggtagccaagaaaggacacataaggaagaagttcatatctgttagtgggataataatgtattaatgtacgaagacacttcattgtcaatgcatggatttttaccaaatcaaatatggcatagagatatgcagagtaaaatgctggttgcttcatgtataggaaaacgtttaattggcccaagaagctaagcaagatgaggaagagaatcagaattaattttctttacaagtcagtccagcagattattcacaagagcagacccattgctgaaggctcccgcatcagtgagatctaaggaagggataatacatcgggtcaaaatgatctttgactagggattgtgaacaatcacagctggtctgcaaagcataatagcaacagtatgaacatgtaaagggagttactagtcactaaagctctttcaagaattgtctatgaaggaaaaaaaattctagatagtgtatggatagcttacatgctttactggaatgcagaattatgatttaatgatattttctatattactcattgttaaattctatgagaagtatcatgccccgtgaattggaagctaaaagggg

SEQ ID NO: 135787 - DNA, 1744 bp, Zea Mays
cgagactccaccttccattcatttcatctgctccatctccctctctgttcgccggcgtataataagcttcccctttctgcaactgatctgatccgggctgccgtgagctctgctcgtcctgatggagttcaagagggatgtatggagcctgctcctcgtgctgctcctcgggcagctcgtcgccttctccatggccgcctcaagcttcgcctcctccctcattgctaatcttggagtcgatgccccactgacacagtctttcttagcctacctgttgctgaccttagtctatgtaccaatcgtcctgcgtcgacggcagaagctgcaaatagcttggtactggtacctagctctggccttctttgatgtacaggggaactatcttgttgtgaaggcgtaccagtactcatacattaccagtgtgactttgttggattgctggactgttgtatgggtcgtcatgctcacctggtacgcactgggcacaagatactcactctggcagttcgtgggggcagggacctgtgtggcagggctcgcccttgtgctgctttcagatgcaaaatctcaagatgagcaagatccgaaaaaaataccacttctgggggatgcccttgttattgctgggacagttggttttgcatttagcaatgttggggaggaatactgtgtcaagaaaaaggatagagttgaagttgttgcaatgcttggtctctttgggttgctgatcagcacagcgcagatacttgtatttgaaaggaagggcctagaagcagttacatggtctccaacaatgataagtctgtttgcaggatttgcagtggcaattttcgtattctacacagttgctcctttcgttcttaaggttaagatctccaacatgtcaggcatgacatgagcttcacaaggaggaggcaacactagaaacttaggccctgtcaaatggttatggtttattaaaaataaacacagaataatgatgagtggagctacattgttcaacctttcactgctaacatctgacatgtgggcagtcgccattcgagttttattctatcagcaagagataaacaggttgtactacctagcattcgcagttgtggccattggattaatcatctattcgttgaatgatagatcttcagatgatgaaacagctggaagtacagaagcaccggcccaatatcagcaacttccaattgaagacaattcaacaagaattggttctagttcaggtagccaagaaaggacacataaggaagaagttcatatctgttagtgggataataatgtattaatgtacgaagacacttcattgtcaatgcatggatttttaccaaatcaaatatggcatagagatatgcagagtaaaatgctggttgcttcatgtataggaaaacgtttaattggcccaagaagctaagcaagatgaggaagagaatcagaattaattttctttacaagtcagtccagcagattattcacaagagcagacccattgctgaaggctcccgcatcagtgagatctaaggaagggataatacatcgggtcaaaatgatctttgactagggattgtgaacaatcacagctggtctgcaaagcataatagcaacagtatgaacatgtaaagggagttactagtcactaaagctctttcaagaattgtctatgaaggaaaaaaaattctagatagtgtatggatagcttacatgctttactggaatgcagaattatgatttaatg

SEQ ID NO: 135788 - DNA, 1126 bp, Zea Mays
ccccataaacctcactgattttattatctggaaactcattcctgcttttgtctttttcatttgttccagataagtctgtttgcaggatttgcagtggcaattttcgtattctacacagttgctcctttcgttcttaaggttaagatctccaacatgtcaggcatgacatgagcttcacaaggaggaggcaacactagaaacttaggccctgtcaaatggttatggtttattaaaaataaacacagaataatggtgatctgtttaaataatagtggttgactaaatattatcagactttttattgtaatttcaatcagttgaataatagtttagctttttttatttttgtgctcttttgcagatgagtggagctacattgttcaacctttcactgctaacatctgacatgtgggcagtcgccattcgagttttattctatcagcaagagataaacaggttgtactacctagcattcgcagttgtggccattggattaatcatctattcgttgaatgatagatcttcagatgatgaaacagctggaagtacagaagcaccggcccaatatcagcaacttccaattgaagacaattcaacaagaattggttctagttcaggtagccaagaaaggacacataaggaagaagttcatatctgttagtgggataataatgtattaatgtacgaagacacttcattgtcaatgcatggatttttaccaaatcaaatatggcatagagatatgcagagtaaaatgctggttgcttcatgtataggaaaacgtttaattggcccaagaagctaagcaagatgaggaagagaatcagaattaattttctttacaagtcagtccagcagattattcacaagagcagacccattgctgaaggctcccgcatcagtgagatctaaggaagggataatacatcgggtcaaaatgatctttgactagggattgtgaacaatcacagctggtctgcaaagcataatagcaacagtatgaacatgtaaagggagttactagtcactaaagctctttcaagaattgtctatgaaggaaaaaaaattctagatagtgtatggatagcttacatgctttactggaatgcagaattatgatttaatg

SEQ ID NO: 135789 - DNA, 454 bp, Zea Mays
tgatagatcttcagatgatgaaacagctggaagtacagaagcaccggcccaatatcagcaacttccaattgaagacaattcaacaagaattggttctagttcaggaaaacgtttaattggcccaagaagctaagcaagatgaggaagagaatcagaattaattttctttacaagtcagtccagcagattattcacaagagcagacccattgctgaaggctcccgcatcagtgagatctaaggaagggataatacatcgggtcaaaatgatctttgactagggattgtgaacaatcacagctggtctgcaaagcataatagcaacagtatgaacatgtaaagggagttactagtcactaaagctctttcaagaattgtctatgaaggaaaaaaaattctagatagtgtatggatagcttacatgctttactggaatgcagaattatgatttaatg

SEQ ID NO: 135790 - DNA, 2610 bp, Zea Mays
tgtgctctgagattgccacagcccaagcaagctcattcatcacagacgtaaaacacctatagagggctcaaaggcacgcgcgcgaaacgcggagcgaagagaagccaagggaggctgttcttcatcatggtcgcatatgcaaccacgtcatacgtcgcagctcaagccctggcgagctctttgcagccgcaggtggtggccgccgtcttcttcacgtcggccgcgtgcacggtagcgctcgccgtcctcctggcctcgctgcggctgcggccgccgtggtggtgcgcgtgtgcggtgtgcgaggcgtacgtgacggcgtcgtggacagccgagttcgacaacctctgcgactggtacgcgcacctcctgagccgcgcgcccgggcggaccgtgcacgtgcacgtgctgggcaacgtgctcaccgccaacccgcccaccgtcgaccacatgctgcgcggccgcttcgacaactaccccaagggcgcccccttctcggccatcctcgccgacttcctcggccgcgggatattcaacgtggacggcgactcctggctcttccagcgcaagctcgccgccgccgagctcgcctccccggcgctgcgctgcttcgcggcgggcgtcgtggcctccgagctgcggtgccggctcattcctctgcttcactcttcggccggcgacgagaagctgctcgacctccaggacgtgttccgccgcttcgccttcgactgcatatgcaggatctcgttcggccttgaccccggctgcttggagctgtcgctgcccatgtcggcgttcgcggacgcgtttgacacggcgtcgatgctctccgcgcggcgcgcgacggcgcccatgcatgtgttctggaagctgaagcggctactcaacgtcggggaggagcggcagctccgcgacgccatcggcctcgtcgacacgcttgccgctgaggtgatccggcagcgccggaagctcggcaccgccgcctcgggcgacgacctcctgtcgcgcttcatgggctccatcgacgacgacaagtacctccgggacatcgtcgtaagcttcatgcttgccggacgtgacaccgtcgcctcggctctgacggccttcttcctgctgctctccgaccacccggacgtggccaccgcgatccgggacgaagtctcccgcgtcaccggagacggagacggccacgccgccacctcggagaagctcaaggacatgcactacgtgcacgcggcgctgcacgagtgcatgcggctgttcccgccggtgcagttcgactccaagttcgccgccggagacgacatgctcccggatggcacgttcgtcgccaggggcacccgggtgacctaccacgcgtacgccatgggccgcatggagtccgtgtggggccccgattgcgccgagttccggcctggccgctggctccacgacggccggttcgtgccggagagcccctaccggtacccggtcttccagggcggcgtgcgcgtctgcatcggcagggagctcgccatcatggagatgaagtccgtcatcgtctccgtcgtgcagagcttcgacatcgaggcggtcagccgtagctcccaccggccaaagttcgcgccagggctcaccgccacgttcgccgggggcgtgcccgtcagagtgcgacggcgagctcgtgccagcgacgagctccgaccgccaagttaacgtcaccggccacggcacgcacgtcgtattgttcccattcgaaacagcgcaagcgtccgtcgggctagttagacgcgtgacgccgcgatctatgcgttagagtattcgcgaatcgcgacgacggcacagtttggcgagtgcggtgggttcttggcctccactggagtctgaagattcctccgataaggtcagatggcccagcggacgggattagtctaatccgatgcccgacggtactagttttcgcacatgcataattacaaggggaagggggcggctcaaagtcgcctctgcatgtcaccatgtgtgctattctttccaactttcaaagcagaactgtcgaaaagaaaacttggcagattcaaagttgcagaatgcaggctcgtctagatgttctagcttcctctcgtggccattttctatgagggaacttcaattattgcaacaagatggtcgtgcagccaattagaaaaatacagttgatattctttattccagctctgctcgttggttaggtttttacgctggaacctactatccaccaggttcgtttttggacgggtgaaaatgttctcgagaggtttgttgtcttcgactaactaacctatccagctcatcttctcttctcttgtcttcgagatgtgttcggagtgtgaatggacggtgtgttcaaagtggcgaaaaatgtggcgtaagcgtgcaagtgcaatttgtaatgtgtttcaagcaaaaataaaagaaaaaaatgtaactgagtttgattacattgaaatcctattgctaaaatataacattggatacgttaatacaggtagcgcgcatagagtgattgtacatatggttacacgagtatatgtgttttatatatgtttcttgaaagtgtaagtaacatataccattcaaaataaataaaaaaaa

SEQ ID NO: 135791 - DNA, 144 bp, Zea Mays
caattacatagaaataaacaacatatgtattctcgacatcaatatatcacaaatcatttgcacaaatgaatgccaccacaactatagacagacagatcacaccctacaatctaccggattttcccttccctatgcgtccaatgt

SEQ ID NO: 135792 - DNA, 2124 bp, Zea Mays
atggggatggcggcggacgcgacgacggccatgaccatcgacttcctccgcgcgcgcctcctctccgagcgctccgtctcccgcgccgccaaggagcgggccgaccaccttgccaagcggtcaatagtcaccgagcccgtcgccgcagtgcaggttgtggagctggaggagcagctccggacggtgacggcgcagcggcgcaaggcggagcgggcggccgcggaggtgcttgccatcctcgactcccagggcttcggccgcctctccgacgccgcggacgattcaggctcagagtacgaggccgacacgggcgatcccaatgccgtcgagagggacggaggcggcgggaatgcagcggaggacgcgctgtcggggtcggagctgggagccccggcggcggcggctgctgcctctgctgctcaggccgggggcttgtcgtggaggggccgcgccgcgagccccgaatgcgagaggcggcggccgcagcaccaacagcacaagggcaggcagctaaggcagaggcacggccacggccacggccacaggaggggttacttttactgccgcgccgcggattcgtcgcccaagtaccacccagggcagtcttgccggaagatcaagaggaaggagctgagatctcagacagaagaagaggagggcaacgacaatgcagtggagagcacggaggacgggcaggagagatcagattgtactgtttgcactgatcaaccggctgatgttgatggcgaggtgaaccaagatgggcatggctcttctagtaatggaagaggggaggatcgtgatgatcttgccatggtatatgagaaggatggggagatggagagggtactcgagaagcaggctgagctaattggacagttcgaggctcaagaaaatgctcagagggagtgggaggagaaattcagcctgagccgggattcagttatggataatgttaacttattaaacaacaagctaaatcaggctgaaaatgcttgtgggaggagggaaactgctcgggttgtagataaagaagtggtttgtgaacaggcaagatcaagtgacaataatttccattgcatcaacgacccctctgaatgtctaccaaatggccctgtttcagaattgccccaaaatgtagccaaagatagtgttactgaacaccggaaatttgatgggtttggtcatgattgtgtagtgactgctgcagcagtaatttcaagccacggagaactgcaggttaggaaggatgtgctgacaactaaaagctatcctgaaggaagtggcaataatcttgggaaatcagctctaccaccacaaggaagctgtggtagcagactaaatgcaggacatagaaatggtcaaggagatgaaagttcagacagtggttcaagctaccatgtgaatgctcgatcttctgagcaatacataaacacatcatcagttgggagccagctaagtgatactcctaaaagcgaagtctcagaatggagctcctcttgctttcataaccataccgataaccagcttgatacacaacttcatcaatcatcaaacaaagatgtaggaggggtgctagaggcccttcgacgtgccaagatgtctctcagagcaaagctgagctggccaagtctagccagcaagaacatattggcacttgaagcaccggatgatttgccagtcaatggcatggaactttcactctgcaggacagcccatgtcagtcaggaaatattcgcactaccaacaccaacagactaccttaacaaggtattaccgcatgatgatgtgaaggtaccaataggtcctgctggtttgtttcgtttgccaatagattcatttcccagagatgagatgaccacaagggatggctatggttcatggttcagtttgacctcggtgagtccaccctacgtgtcgccaagctatcatgctgatcatattatgccagctctatccttgtctcagtatggttctgggttgtcactaaatccatactatgatcctcatagttccatgttgctatccatgcccactgctggtgggcgtagcgtccctgtgtcagatttcagaataggggatggttccttcctccgagaagttccacggcctgacaattattag

SEQ ID NO: 135793 - DNA, 1226 bp, Zea Mays
cttcattaggcggcgacgcgtgaaactgtcgtcgctggagatgcttgcggaatgcccgtgcggtgacagggccatcatccgctgcctcggtcgaatctggtggctgttacatctctttcctcctttacccctttgtgtcactagcctcgtcgccggcgtggggccccgccgccgctagatccagccaccctggtgtcgggtcttcgtgccgacgggctctgcgcgcgatggcactcgtagcgcggcgcgcggcgtcgctcatggcgcggcaccagcagcttgcctagtgcgcggcgagctcacgacgccgcggctcgcgcgcgcaacggcgtgcccgccttgcggtggcagctcggccctcgccgctatagcaggcggcgggtgtccgcttccatggatccgacctcctggtcctcgtcttatcggtcgtcgtcaccatctgatctaggacccgatggcccgagcctcctccatcgtcgccaaacgaggcttgagggtaccaagcgaaagcaatgccagcgtgcagacgacgacgctgacctacttaggctaaattttcctcactatattaatttttttgcgtcatatcatcaacattttatcccctgcgtttttatctttcgcagcggttttctctatatttttcacctataccacactacaaccataaaatatcattttctatatctaatttttatctactatcaattttttatctactactcgtagatccactactacaagaatgaacaatgttgtaggtgtgtgaacagtgacacactatatcgagagggagagagaaggtgactgacgcgtaggggcctacagggggcagggctgcgagcatggggcgccccctgcatgcgccatgcaagggaagagggctggccgttgcagccagccttagaggcttcatcaagaaacctttctccttcctgcaggggcagcgctgcgggcgcagggcgccctctccatgcgccatgcaagggaagagggttggctagcggcaaccgctgcagccaaccttagaggcttcatcaaggaacatttctccttctttaggtccatttttatagttaatcgtcgcagcatgagtcctccatgatgacacctgaagaaggagaaaggttctctgatgatgcctctaagactgtctccaccaacgttctctaaattcaatcttctaaataattattctttgtcctttaaaagattatatcctttat

SEQ ID NO: 135794 - DNA, 606 bp, Zea Mays
atactttccaagagacaggaaagaatgatcaggatcccagaacaagtacttgcttgacaaacatttagggcttgtttaggagtaaagagagcctgcgcagagtcgcgttgggcaaatcatgaaggcagcttaacatttcttctgacgccgcccgccgccgccagccggaacgcaacaccgcagcggttacctgcagcggacggcaggaacctagtcctccagcgccatcagcgtccgcggtgggccatgatcgttggggccaaggttctttttagaggtacacactggcttagattctgggcccagctacaaaaggatgaagctgatggagttttaataaagaatgtctgtcgtcgcctggaatcggtggccatgcaattttgtgttaattttggttggaggttttctaataggattgccttgtaatcatctcactggttttattaagtttaaagaacctttagtgtgttagtgtgtggctgtgtggaggggtatgtcccttcattgagcagtgtgatataacaatttgtgttggctctaacctcttttgaggggaaagccggaactttctctccattatcaaaaaaaaaaaatcaatacccttca

SEQ ID NO: 135795 - DNA, 694 bp, Zea Mays
gtttatattcaaatatatggaaataaatctaaacacatatattaaacaatatttaatttgaaacggacgaaatattatttataatacaaaatagtattttggagaactatatacaccatctgacaccatatctccgagcagatagtctgacttactgcactggcttgcagtatagctgcatccaccgtcccttccgcgccccccggagacaggctaaaaagtgatgtgttgtgcacagtctaaagtccattttgttgctttgcccgcaacttttgcttgccacgatggaggccagatccagctcctgcctcttgggcgtccgtcatccttccatctcccgccctccctcgtcggagcacgagcaccaaaggtccccgtactgcccttacctctgctctccttttcttctcctgttcacccctcgtgccataactgggcgaccgccgctcccgccctacgccaggtgcccagatcttcgtcggccctgcccctgcttccttcaactccaccaccaggcgatgccctagacttaattgaatgggctctcttctcaccaggactggcgtcctgccatggctccacgccaagattgttgatcccatgctgcaggtcatcagaaggggagcagaacccaagcaactagccttctctgctgcccttggtatcacgattgggatctttccggtatgtggta

SEQ ID NO: 135796 - DNA, 826 bp, Zea Mays
gaggacaaaaagacccccatcctgctctggcacacctataagtacaacataaattaaattgactgtaaaagtttcccaaaatttcaatggtagtcatgctcaatcatgcctgtgtaatgggaaacagtaaccattatatcaactggctatccagccatatgttcctcaaaacatcatcacttatccttgagcattttgtgattccagggacaactgttattcttggtgctgttgctgtagcagtgttgggaagtcgttgcaatgctgttactgttatggttttaaatttggccgccactccaattgagctaagcttgatcgtccctttcttgcgtttgggggaaaccatcactggcagtgggcacttccccttgacagccaacgcactgaagaatgttctcactggtcatgcatcaaaggatgtgctgctgagcatcgtcaatgcgatgctgggttggcttattgctgcaccatttgtacttgccgtgctgtacgctgtttcgttcccttgtttcaaggtcctggttaacaggtttggcggcattccatcgagccccaggaccccactcaaggcggtgtaggtagtgtgtagcatgctgaatgctcctgaaattgtgtacaccaaattctttgtgatgccgttgggttgagatgggttccggcgtcatgttgctcggccatcccaggcactggcgaataaatccgacttgagaggcacgtgtcctctataattctgtatgctggcttggtaatcatatagtgagatgtgtatttatgaatttacaaactcttcatgaataaagccatgtttggataaaggattaaa

SEQ ID NO: 135797 - DNA, 1088 bp, Zea Mays
ctatgcacgaggcatgcaaattaacaagactcatacaagcacggaacagtgtgctgatggggcacaagagaaacacatgctcaggtcttaacatgtttggctttcgagcaaactttctccagaccccaaagaaatataatatccgatcagatgtgtcgatgctcatctcaacatactcccgtggcaacgcaccgacacacaactagtaaagaacacaagcctcgtgcgcttcggctttcttaccccctcggcttcctcgctcgctggttcgctccgggtctccgtctccctccacggtcagctcctcgtgtgatctcgtcgcgtggttagcagggaaacccagaggtggaaagaagctaacccggtgaagactctgaaggaatctgagccacctgcactccgatctgccatctgaaggacgcggaggaagccccgaatcggggaatttcgtccttccggcacgcccgccctgacgtgagttctctctcccccaagagctgtgatccgatttcgtgggttcatttgcctgatgcgtccattcccgcggtagagatcttgtgtccatctatttcgattttcgtagcccatcgatttgttccttaaaaggcctctcctttttatccaccactaccacccttgatgaatccgggggaaaaaagggtgggtggggatccttttgatcttttgacaacggaggtcggatcctaggataggaagtaggaatggggttttgccgtacggagacgacgtttctttcttgaaatgttgcaacatgccaccagaatgggttggtgtcgtggcgtgtgatgcgctgatacgacttgtccggaattaaaatgttctcgccgtcgcagctgcactccacgaatcctgttgtggtatatcagttttttttagtctatctatctaccactcactctcgagtgttttgagctcttctcatactcgattttcccccccttcaaatcttcatccctttcctcctcccgacgcgccgccgccccgtagggtctcccgttcctatcgtctgccttgcctacctcccgcaatttcttctaaggccgcgggagatggtgaagaagagaagg

SEQ ID NO: 135798 - DNA, 1878 bp, Zea Mays
ctatgcacgaggcatgcaaattaacaagactcatacaagcacggaacagtgtgctgatggggcacaagagaaacacatgctcaggtcttaacatgtttggctttcgagcaaactttctccagaccccaaagaaatataatatccgatcagatgtgtcgatgctcatctcaacatactcccgtggcaacgcaccgacacacaactagtaaagaacacaagcctcgtgcgcttcggctttcttaccccctcggcttcctcgctcgctggttcgctccgggtctccgtctccctccacggtcagctcctcgtgtgatctcgtcgcgtggttagcagggaaacccagaggtggaaagaagctaacccggtgaagactctgaaggaatctgagccacctgcactccgatctgccatctgaaggacgcggaggaagccccgaatcggggaatttcgtccttccggcacgcccgccctgacgtgcaaatcggcgattgcttttttttgtgtgtgtgtaggcacactgttctatcagtgagaaatttgccattatagaagtcctcagacgcggcttcgacgatttggaggcgtagacgagggattcgctgttataaaaaactagggactacccacactccaaaatgaacatgaccacgccattacaaggtaacgtctatgattaaaccattgatactcacgtcgtctctacatccgctatccttctccttctctctattctcgctaccaggcacgcaccctagcagccaccgtcgtcttgctccgtcctccgctcgccaggtctcgacgcgcgcgcagactctgcctcggcgtgccgctgccgtgccccgtctaagagctgccgctccggacgccacggacgcggcggcggccctcatggtcgcgcgcgccgaggccggggacttcgcggaggcctggtccctctgggcgcagctcctgcacagctccgccgcgccgtgcctgcccgccgtggcgccgcgccttctgccggcgtacgcgcgcctgggccgcttcgacgagatcctcctcgcagtgcgcgagctctcggcgcgggaccgcggcgcggcacgcacgctctacccgctcgccgtctcctgcctcggcgccgcgggcgagctggcgcgcatggaggacgccgtcctagaaatgggccgccttggcctccgcgtcgactccgcgaccggggacgccttcgtccgggcctacgcggccgccggaaccatcccgcagatggaggcggcctaccgccggcacaggaagtccgggctgctcatcacccgtggcgccatccgcgccgtcgcgtccgcgtacatctcccgacagaagtactacaggctcggcgcgttcgcggcggacgccggcctccgccggcgcgacgtcggcaacctgctctggaacctctacctcctctcctccgcggccaacttcaagatgaagtccctgcagcgcgcgttcctggagatggtggccgccgggtttcggccggacctcaccaccttcaacatccgcgccgcggccttctccaagatgtgcatgttctgggacctccacctcagcgccgaccacatgcaccgcgacggcgtcgcgccggacctcgtcactcacggctgcttcgtcgacgcctacctcgagcgccgcctcgcgcggaacctcacgttcgcgttcgaccgcctcgacggcgacgccaagcccgtcgtggctacggaccccatcgtgttcgaggcgttcggcaagggcggcttccacgccagctccgaggtgctgctggagaccgccggcgggaaggggcgctggacgtactacaagctgctcggcgtctacctcaggaagcagcataggagaaaccaagttttctggaactactga

SEQ ID NO: 135799 - DNA, 2229 bp, Zea Mays
tggcaaatttctcgcggcggcacggtggccaggaacaccttgccggcctgggtgctgaggaacacgcgggcggacccgtccgggtgcgccgccatgttgaggtaggagccgttgccgacgcgctccaggaacatgctgcggagcggcagcgccgccgggcgggtggagttgaacgccgcgccgccgccgtccaggcacggcgacctgccggcgccgcccagcgagccgcagaactcgcccgcggactgccacagggtaacggatgtagagacgacgtgagtatcactggtttaatcatagacgttaccttgtaatggcgtgatcatgttcattttggagtgtgggtagtcccctagttttttataacagcgaatctctcgtctacgcctccaaatcgtcgaagccgcacctaaggacctccataatggcaaatttctctctatcagtggagcaaccacggaggctgtcggaggacctccactgttacatacgtactacttggcaggctgaagccccaagtttcctgcgcctgttctagctagttggcgaagaaagatgtcgttccgcagcatcgtccgcgacgtccgagacagcatcggcagcctgtcgaggcgcaacttcgaggtgactgctgcagccgccgccggcggcctctccggacgcaccgccgcgcaacatcgcagggggaggtctcagagcacggtgcacgagctccgggacacgcgtgtcgtggtccagcaggacgagagccgctgggccagcctccctcccgagctcctccgcgacgtggtccggaggctggaggccagcgagagcgcctggccgaaccgcaagcacgtcgtgtcctgcgccgccgtctgccgcgcgtggagggagatgtgccgggagatcgtgctcagcccggaggtctgcgggaagcttaccttcccggtctctctcaagcagcctgggcctcgagacgggatgattcagtgtttcataaagcgcgataaatccaagtccacgtatcgtctctacttgtgcctgagtactgctgtgctcatggagaacggcaagttcctcttatcagctaaaaggagccgcagaacaacctgcacgcagtatatcatctcgatggacgccgacaacatatcgagatctagcagcacgtacatcggaaagctgaggtcaaacttcctgggcacgaagttcgtggtctcagacacgcagccgcccccatacagatacagcggggctgcaccccctccccctcgtgctgctgggcggcgggcaagccggcgattcgactccaggaaggtctccccgaaggtgccggccccgggcggtgccggtggtggcagctacagcatagcccaggtgacgtacgagctgaacgtgctgggcacgagaggccccaggcggatgcactgcgtcatgcgctccataccggcgtccgcggtggagccgggcggcacggtccccggacagcccgagcggatcctgccccgggcgctgctggaggaggagcaggaggaggaggaggaggattcgtcgttccgccgcaccggcaccggcaccggcaccacctccttctccaagtcgtcagcatccatcatggaccggtccgtggacttcggcggcggcagcagcagcagcttccgcgacttcagcagcgcccggttctccgacattgtcgacggaggcggtggagatggggggcaggatagggagaggccgctcgtgctccgcaacaaggccccgagatggcacgagcagctgcagtgctggtgcctcaacttccgcggccgcgtgaccatcgcctcggtgaagaacttccagctgatcgcggcggcgccaagcctgcaggctcaggcccccgctgctggggctggggctggggctcctccagccccgtcgtcacagccggctccgcaggaccaggacaaggtcatcctccagttcggtaaggtggccaaggacatgttcaccatggactaccgatacccgctctcggccttccaggctttcgccatctgcttgagtagcttcgacaccaaattggcctgcgagtaaaggagggatagaagcagtggaaccggagccttttttttttttttgcattttgttcgtgcatggttgtattctgcttcctgtctgttaacctggaaccgggaccctctttgcattttgttcatgggttcgatgggaatgtgactctttgtttgcgagtttcgcatgggtacttgcgtt

SEQ ID NO: 135800 - DNA, 1172 bp, Zea Mays
aggatggatcgcctccactgatccacccgcccgccatgtcgccgcaccctctccactcctcgtcgggcgtgtccgacatggacgagatggcggcgactcacgcccacgcccacgcccacgcccacgccgcgcgcgcccaggtcgtcgtcctcccctccgcgcggccctcctcccctccgcgcgcctccatccccgtctcctcctctgcctacgcgcctccacagactgctgccgccaagctcccattctccgcagcggtgtccgcacccacctccgcctcgggctccatcactgtcgctatcgcctccagcgggttgggccccgagcccagcacgctcaccgagcccgtctgggacaccgtcaagcgcgacctcgcccgtatcgtgagcaacctcaagctcgttgtcttccccaaccccttccgcgaggaccctggcaaggctctgcgcgactgggacctctggggccccttcttcttcatcgtcttactcggactcatcctctcctggtcggccaccgccaagaagtctcaagtgttcgctgttgccttcgctgtattagctgctggtgctatagttctgacactcaatgttctactgctgggtgggaacataatcttcttccaaagcctcagtcttctcggatactgtctgttcccgctggacgtgggggctctgatttgcatgcttaaggacagtgtcatactaaagatggttgtggtgacggtaacattggcatggagctcttgggcagcataccccctcatgagtgctgctgttaacccaaagagaaaggccctggcgctgtatcccgtgttcctcatgtatatctcagttgcctgtctcataattgctatagattaaggcgggcatggtttctacagaactatcagaagaattacaggattttgttttctaggtggatcatcaaaatgcatatcctttttttttggctgcgtatagatctgggttcacattgttattgtagtttttgctggctgcttcaataccttatttcattttgtttaagaaaaaaaaaatcgcagggatttagaatgtagtcaatcaaatgtatgaatgttgtatagccatacagatatcttgctgtttcgcatctatgtggataatctggaatggactgctgaagcctgaataagtgaattactctgtttt

SEQ ID NO: 135801 - DNA, 666 bp, Zea Mays
atgttcccggccggggcggtggaggcggagtctacggccgggtcttgtacggtggcgccggcagacactgaccagctagacctggaagccgcggagcagctcatccagctgagcgggggcgacggcgacggtgccgccgccgccgccgccgtctcggagagcaggagcgcggacagcgtcaagtgccagaggaaggagaaggaggcggcggtggagagccgcaggaggagcgccggaaggattcctcctcctgccgctggggggaaggatggcaaccgcggcagcgagtcaggtgtcaagggcgtggacagctccgcgtgcagcgccacggcggccgacgtggtggcggaggataataaggttgtagtggtggaaagctgtcggaggggcgctgatcaacggcttcccgcggggaaggatcgcaacggcggcttcgtccacggagaggcgaggaagaggccgaggtttcggtcactggcagccatttacagtgacacggaaccgagacggcttacggccggtggcggcgagcgccacgcggatcgtgatccacatccaccggaggaggaggaaggggaaaaaagagaggctcgccgggtgattgccgttgatgccgaggcgagcaaggcgagacgatcggtacaattagctcataggtctatgtaa

SEQ ID NO: 135802 - DNA, 115 bp, Zea Mays
gcatcctgcaaagaaaatttccagaaataccggttataaagcaggctctacaggctatgtttactttttttccaccccactgattctgacatctaccttattcaaaaacaaaaaa

SEQ ID NO: 135803 - DNA, 1731 bp, Zea Mays
cgccacaaggcactgactgtagggcccacctagcacccaccgtcccccgtgcatctcctatatataaacctccagcagggcgccacaccagaaagcgacacgaccgcgcccgaggagaccacaccacaccgcctcctccgcccgccgattcgtcgagctcgccctcccgctcgcctagctcccctgccttttcccttcctccccacctcctgccccgcgaacgtgctcccgcatgccaccgcgctgacgcgcgcggcggacgacggggtcgggatcatggacaagtacgaggctgttcgggacatcgggtcgggcaacttcggggtagcgcggttgatgcgcaaccgcgagacccgagaactcgtcgccgtcaagctcatcgaacgaggccaccggatcgacgagaatgtgtaccgcgagatcgtcaaccaccggtcgctgcggcaccctaacatcatccagttcatagaggtgatcctaactccaactcatcttgcaattgtgatggagtatgcggctggtggtgaactatttgatcgaatcgtagatcgtgggcgatttagcgaggatgagaccaggtatttcttccagcagttgatctgtggagtgagctattgccatcacatgcaaatatgtcatagagatttgaagctggagaatgttctcttggatggcagcccagctccacggcttaagatatgtgattttggctactccaagtcatcagtactacattcaaggccaaagtcagcagtggggacaccagcatatattgcaccagaggtgctttctcggcgggagtatgatgggaagcttgcagatgtatggtcatgtggagttactctttttgtcatgcttgtgggagcctacccgtttgaagatcaggatgatcctaaaaatattagaaagaccattcagcgaattgcagcaattcaatataatatcccagacaacattcgcatatctgatgattgcagacaactcatttcacgtatctttgtcagcaatccattaaggagaatcaccatgagggaaataaaaagccatccatggttcctaaagaacttgccgagggagctcacagaggcggtgcagttatcctacttcaggagggacaacagtgtctctgcattttcagaccaaacaaccgaagaaatcatgaagattgtcaaggaggcaagaaccttgccaaaatcgtcgagatcaggctatggttacagtgaagaatgctcagatgaggaggaaaaggaagtggagagcgaacccaaagaggaggaagaagaagctgagtgtgataagacagttagggaggttcgcgagagcggggagctggatatgacctcactgcacatctaaatgctgcctgtgaggctgtgacgtgtctgtagataattggctttattgtctgctgaatttggtagaacttatgcaattctggcgtcagatatagtggtctatataagccttttccatcctgtaatatatttgttttgttgaactgtatgtgtggtactccgtatatgggtttgttctaagggagcaaggctttgtacaggcacacctgattgtgtttttggataggaagttttaccgtctgtttgcacactgcagcaaacattttggagtttgtaagccatatgttgcggcatatccagtaaaaatggatgaaacgctgcaaattccgtcaaaatggcttgtataactttgcaaagattgaagataaaagatttt

SEQ ID NO: 135804 - DNA, 939 bp, Zea Mays
cacggagatgccgagaagatggacgcacggagtcaccacgaacctatcgactttttatctccagatccagattagctaccacggcaccgccagcccggacggctataaagacgaggcccatctcgaaatcgacggcgatgaagaagaccagttcccctctcctgatcgtcctgttcctcacagcagcagccatggcggccgagccggagaagcaggcggcccccgcggcacaggagacggccgtgcacatcgtgtacgttgaccgccccgaggacgccgaccctgaggagttccacatccgcaccctcacccccgtcctcggcagcgaacagaaggccagggacgcagtgctctaccactacaagaacgccgccagcggcttctccgcgaagctcaccccccagcaggtcaaggatctcaaggagcaaccaggtgttctccaggttgtgccgagccagacttaccagctacatggtcctgggtctggcactcaccagggcacgacacacaccttgggccttatgtgaaggcgtatgagaatcaagaagactgtgtttagtatggctgtatggcacaggtctgacgaatgtgtatagtacagtactatgtaagaataagggacgtatcgtctatatactgctttgcgcatgctcagccctgttctaaagcttgtaatgcaccaatgcgtatgttttcaatacaatgacaagtatgctatcttgtttggtgcttgatcggtccgtgtttgatccttgaatctggagtggagcactctgcctctctgcgtccgctttgtgttgcttatttgctatgttgttgagtttagggttgaaaacggaccggtaaaataccgacctgtatcgttttctatatttgacccgattgtatatttgatccgattgtttctatatttacggaaaaatatggaaacgggatgga

SEQ ID NO: 135805 - DNA, 1776 bp, Zea Mays
atgaaggctgcggtctccagcgccggcgagtcggcgggcgagctgcttctccgcgcggcggcgctggtgccgtggacgcgctacttcctcgcggcgctagccctggccgccgtactcctgtacaggttcctggagctccacttgctcggcgacctcctccgcggcctccgcggcggccgcgtctcgcttaccttccaccccgagtctcaagtgtaccaccgggtcgcctccaagtgccgctcgctgcacggcaggtacctgacgacgccgtggttagcgagtcctcatttgcagacgctgttcctgagcatatctggcagaccaccttcattcacctatcggaggcagttgtacactgttcgtgatggcggtaccattgccttagattggttactagcttctgatcttgaagatggagatattggcacttctgacggaaccatttctaaggatgattcaacaccccttcttgttgtgatacctggattaactagtgattctagtgctgcttatgtgaagcacttggtcttttctatggcaatcaaaggatggaatgttgttgtaagcaaccacaggggtcttggtggcatctccataacatctgattgcttttacaatgccgggtggacggcagatatgcgtgaagttgttagtttccttcatcaagagtatcctaaggctccactattcactgttgggacaagcataggtgccaatattgtggtcaagtatcttggagaagaaggtgaaaacacacctgtagctggtgctgcatctatttgttctccctgggatctgctggtgaccagcaaatttatttcacgcaagcttgtgcagcgatgttatgacagagcccttgcgattggtctaaaaggatatgcgaaactacatcaatcagtcttggcacgacttgcaaactgggaagctattacatcgtcacactctatccgggaattcgaccgccatgccacttgtgttgttgcaaaatacgagacagtggacacattctaccgcaagtgcagcagtgcaaattatatcggtaatgtgtcagttccactgctttgtatcagtgccttagatgaccccctctgcacaagggaggccattccctgggatgaatgcagggcaaacaaaaacattgtattggcaactacacctaatggcggacatcttgctttctttgaaggcctaactgctggaaagctttggtgggtacgacctgtttccgagttcctctgtgctctgcatgatggcccctacatgcatcggcagaaggcacaagggcacgatttgcactcatcgttggaatcatcaattgacaagagcccatatgtgaatttcatggaagatggaatggtagctgcattaacagatgatggtcctaacaacggtgactccttgcttaacgaggttcttggtgaaattgaacctaatgatagcgtggttgtccaacacgtaaaacagaaccaaaacaccagagctatacaaaatgagagtgacagttggttggatgataaaaacagctccgaagggaatgttcaagcccatggaggaactcaagaacagagagaagtgccatatgcgaataaaatcagtgatgccattggtcctgttaagaaatcaataaaccaactcagtcgatcccagggtaagtcaatctggttgcttgcttacattgctcttgtaacctcttggccgttgcttggggccctaggttttttcttcaggaaaaggttgagtaattctctgttatctaggaagctgaagaaatcgtga

SEQ ID NO: 135806 - DNA, 2300 bp, Zea Mays
aaacaattagctagactgtttgaatgtatttaactaattttagtagttaactattagctctagtcaatttaaacacccatagtgaaaagaaactaattcagtcatttgaattttaataatactacgaataaaattatttgaaaatttagtcgataaatagatgaaaagaaaaactaaatctcacatcccatcgatcactacttgcagagtactagcaagtcgcacggcacacccccttcctccgctgcgcatcatcctcctcccccagcacacagcaccaccgcgctagtcatccacttcgtcgtcccccagcacacacacacccttcctccgctgcctcagctatggcagcgccgagctggatccggctccggcaggcgcgtgcaaccctcctcatcctgctgctcctcgccctcaacatctccctttcctccgccgccaacttcgagggcttcgactccgacgaccttccctccgcggccggtggcctcgatgctgacgatgacgaggaaggtctcgacggcgtcgacctcccgccccctccgcccatctccctctccacctctgcgccatcacctcccgtcacgacgacatccgcgccgaaccctaaccccgctacgcgtacgcctcgggaccccaccccggcgctcgacctctgggacgaggacgagttcgagggcatccccgtgccggaagcgatcccctccgacgactccgccgcgccggccgaggccggccagtcagatccctccgccgaggctcctgccgaggcaattccggccgcgaagaggagcccagctgagctcctccgcgcgttctccgtcgagatcgcgtgtgtcagcttcctgatctgcttcgtgctcaactactttacggggaagcggcaaaacgagaacatcgcgctggcctgggccaccaagttcgccacgagggactccatcttcgacaagaacttcagccttcttggcacaggcgacggcaaggacacgccactcctgctcaaggaagggcaggacgtgttcaaattctacgccagtgggagacgcttctgccagggcatgctcgccaccatggagatgcgggcgcggcacgacctgctgtcaaggttcgtcgagctggtcttccctgggaaggacaccattacgttcgaggtggtaatgaacgaagaggccatggaccatgtggttctggccgtggcccggaagaaggcagccaagacgctgcagaaagaggaaagggatctgcagaggtttgccaacgttatcacttcggcgcctgctgggaggaagtgggtgtcagatgagcttgctgtggtggctgagtcgaaggaggttgctggggatatgatcactgaggctgtgcttgatcaggttcttggtgagaaggcatttgagaaatttgggaagtggttcatctcgcttcgtttttcagaccagttggcaggttcttacaagaaggtccttgcattcaagtttgtattgccagatgcaagcaacatgtcagagatgacaagattggttgctcttgtgccatactacattgatttggttggccgttataagctcagctctcatgctcgctctaaaactgatggagctagaacaaaggctgctcaggaggctttcagggaactacagagtgcccggcaggaggccctgcaaaggaaaaaggctgaaaagaagaaactcatcgaggaggcagatgccaaactaagcgctgagtcactcaggaagaaagaagaaaaggaaagggctcggcaaatgaagaagtctggacccaaagtgaagatgctccgctcttaacaacgtcatgattcaagaatctatcatatcttggcttttgctattcacctgttgattagcatatagttcagtgtctgctagactcatttatattctaatcctgtgagaatgagcaaaaaggatccaggagaaaagaatcctcactggcgtttcggcttttattggatgtgtgccagaattatccgtggccccacgcccccacgcaacttctaagaaaaattggttatgcaaaacctgtgctgtatgagaaatagaacttacatgattcaatgtgtagaatggtgatagaactatgatatgaaattctatgctcggattacatgctttcagattctagcaacttcgctgctcagcatccatttcggttgtttgtaatgtgtttggtttctttttttctcactcctgctgggactttggagtacaagcgatgtcatagcctttccgatatttggaaccctgggagtgaagtgctaatgtccaattgctggactgatgttt

SEQ ID NO: 135807 - DNA, 1632 bp, Zea Mays
atgggaattgtcgccgccgccgccgccacgactgccacgtcccgtctcctctaccgctacgcagccgctggcagcgaccgccataaccggcaccacctcaggtactacgcgagtccgtatcctctctcgctgcgctgcggctccggccggcgtgaggcggcggcccgggcgctcctgcccgaccgcgttaccccgttctcatacggcgtggatgaggacgcggatgaccacccgcgcgaggagtgcggtgtaatcggggtcgtgggcgacccagacgcgtcgtcgctgtgctatctggggctgcagaagctacagcaccgcggggaggagggggccgggatcgtcgccgtgggcggggacggcaagctcaagtccgtgaccgggctggggctcgtggccgacgtgttcgcggacccgtcccggctcgcctcgctcccgggccccgctgccatcgggcacgtgcgctactccacggccggcgccgccgcgtcgctgcgcaacgtgcagccgttcctggccgggtaccggttcgggcaggtcgccgtggcgcataacggaaacctcgtcaactaccaagctctgcggaacaaactcgaggccaggggatccatcttcaacacgtcctcggatacggaggtcattctccacctgattgcgacgtcgctgtcgcggcccctcctcgcccgggtctgcgatgcctgcgagcgccttgcgggggcctactcgctcctgttcctcacggccgacaagctcttcgccgtgcgcgacccacacgggttccgcccgctggtgatgggccgccgccggaacggcgccgtcgtcttcgcgtcggagacgtgcgcgctggacctcatcgacgccacctacgagcgcgaggtggagcctggggaggtggtcgtggtcgaccgccgcgacatgtcggtggcctcggcctgcctcgtcccgcaccgcccccgccgcgcctgcgtgttcgagcacatctacttctcgctgcccaactcggtggtgttctcgcacgccgtccacgagcgccgtaccgccttcgggcaggcgctggccgaggagtcccctgccccgggcgccgacgtcgtcatcccggtgcccgactcgggtttctacgccgcgctcgggttcgcacgcgcgtcggggctcgagttccagcagggtctcatccggtggcactacagcggccgcagcttcatccagccgacgcaggcgatccgggacctcgccgtgaagctgaagctcgcccccgtgcgcggcgtcatcaccggcaagagcgtcgtggtcgtggacgactccctggtgcgcggcaccacctcgagcaagatcgtgcggctgctccgcgacgccggcgcgcgggaggtgcacatgcggatcgcgagcccgcccgttgtgggctcctgcctctacggcatcgacactccgagcgagggcgagctcatctccaaccggatggaccttgatggcgtgcgccgggagatcggcagcgactccctcgccttcctctcgctggacaagctgcacagcatctacggcgaggagtcggggaactactgcgacgcgtgcttctcgcgcaagtaccctgtgctgcccacgctggccgatccggccgccgagctggaggattga

SEQ ID NO: 135808 - DNA, 1964 bp, Zea Mays
atggggggtctctgctcgaaggtctcagctgtagacaagtcaccgagcgacactgcgtttggccggaaccaggtcaccgatcatgatccgggggcgtcgttggagttggagaagcagccggtgtccggaaaggcagctgcaccggcaaagcggctggacgagcagcagcagcagcatcagtctttctcgttcctagagagcgtcgtccctggggttgcttttcatgcccgggctaatgctagcggcgaaacggggcccaggacctcgccgcaactgaccagatcgctgtcgcagagggatggcgtgggcaaggcaaaagccggtgctgacaaggtttcagaagtgagctcaattttaggtagagctagcactgttgggcttgaaaaggcagtggaggttctggacacacttggcagtagcatgacaagttttaattctagccgtggttttgtgtcaagttctgcagcaaagggaaacaaaatatccatgctggcttttgagatggcaaatactatagttaaaggctctaatctgatgcattctttatcggagcttagcataaagcatctgaaggaggtggtgcttcattcagaacttcagaaggtgttcaacaccttatatccaaagattttgatgaactgctcaagatggcagctgccgacaaaagggaagagttagaagtattcacaaaagaggtcattcgctttggaaaccgttgcaaggatcctcagtggcataacttggaccgctactttgaaaagctggcatccgaactagccccatgaagttatctgaaaggaaaagcagaatcagtgatgcagaaactggttacatgtgttcaaaatacagttgaattatatcatgaattgcatgctttggatagattggaacatgattatcgccttaaacagaaagaacaggatggcttgagtttaagaggagacagtctggatatactgaagcaggcagtgaaggtccagagtaagcatgttaaaagtatgaaaaagaaatcactttggtccaagaatttggaagaggtggtggtaaagcttgtagatattgtccacttcttacatttggagatatataacgccttcggtcatcctgacaaggaagagccacaagaacgtggcaaacaccataatagattgggaccagcaggccttgcgttgcattacgctagtatcatcaatcagattgacaatcttgtttctcaatcatgtgcaatgcctccaaatgcaagggatgcattatatcatagtttaccacctatcatcaaatctgctctccgctataaactacaatcgtttgaagtcaaggaagagcttacagcttctcaggtcaaagcagaaatggagaagactttgtggtggcttgtccctttggctagtaacacaaataaggcataccatggcttcggttgggttggagagttggcaaatacaggatctgaaatgaactgcaagctatcagggcagaaggacatgtcccgaatcgagacattgtatcatgctgacaaggagaagactgaagcacttatcctggagctggtcgtgtggcttcatcatcttatcagtaaatcaagacacgccagtggaggtgtaaggtctcccatcaaatctccagtcagctcaccaacacaaaatggcgctgcaatcacactgttgccgggcaaaacgaaaatttcatcaccgattctcacccaagaggatcaggatatgctaagggatgtcaagtacaggaaatttgtcccagggataagcaaaagtcaagagtttgacacaaagtcaagtcacagcaaacggagtaggttgagcaagagcaacagccagtccccagctagtggcaacaggaaataattgctcccagttaggaggtcttccatgcttccagttattgacttcgaaattcacaggaccaaagctttggatttaattgacaggcttgacaacctaaaaatacaa

SEQ ID NO: 135809 - DNA, 874 bp, Zea Mays
cctcggccgcgcgccttgccattcgtctgctctcgaccgatcggcgccacgagtgctttgctttctggctgctgggagcgcgccatggggaggtcgccgtgctgcgagaaggcgcacaccaacaagggcgcgtggaccaaggaggaggacgagcggctggtggcgtacgtccgggcgcacggggaggggtgctggcgctcgctgcccaaggcggcggggctgctgcgctgcggcaagagctgcaggctgcgctggatgaactacctccgcccggacctcaagcgcggcaacttcaccgacgacgaggacgagctcatcatccgcctgcacagcctcctgggcaacaagtcagtgagcgtgtgccgggctgccggcgtccttctgtctagctattactctattagctctcgtcgtcgctgttcctattcctagtcgatacggttaatacaacaataatgctcccggccgggcgcttcgatgatcgcctaacgccacaacgaacctgctctcttctcttaccccccgcaggtggtccctcatcgccgggcagctgcctggccggacggacaacgagatcaagaactactggaacacgcacatcaagcgcaagctcctcgcccgcggcatcgacccgaagacgcaccgcccgctcggcgccggcgccgacgccgccgcgccacccggcgtggtcgcgcaccgggcgctgctgcaccgcgcaggcgcagcccccgtcgagctcgccgtgaagccggcgccggcggagtcatccgacgacggcggccggagcagcgccagcgccagcagcggcggcggcgccagcgtggaggagccgcggtgccccgacctcaacctcgacctgtccgtgggcccgcca

SEQ ID NO: 135810 - DNA, 1156 bp, Zea Mays
cctcggccgcgcgccttgccattcgtctgctctcgaccgatcggcgccacgagtgctttgctttctggctgctgggagcgcgccatggggaggtcgccgtgctgcgagaaggcgcacaccaacaagggcgcgtggaccaaggaggaggacgagcggctggtggcgtacgtccgggcgcacggggaggggtgctggcgctcgctgcccaaggcggcggggctgctgcgctgcggcaagagctgcaggctgcgctggatgaactacctccgcccggacctcaagcgcggcaacttcaccgacgacgaggacgagctcatcatccgcctgcacagcctcctgggcaacaagtggtccctcatcgccgggcagctgcctggccggacggacaacgagatcaagaactactggaacacgcacatcaagcgcaagctcctcgcccgcggcatcgacccgaagacgcaccgcccgctcggcgccggcgccgacgccgccgcgccacccggcgtggtcgcgcaccgggcgctgctgcaccgcgcaggcgcagcccccgtcgagctcgccgtgaagccggcgccggcggagtcatccgacgacggcggccggagcagcgccagcgccagcagcggcggcggcgccagcgtggaggagccgcggtgccccgacctcaacctcgacctgtccgtgggcccgccagcggccgccgacacgcccacctcgcagtcgcagctggcggtgtgcctgtgctaccgcctgggcctccgcgccggggaggcgtgcagctgccaggctcaggctgacaacgcgggccagcagcggttcagattttcagatttcagaaccgagaggagagtcgttaagtagcttgatccactgcaatttgcaacacaggcagtttttttttcctaatggatattgctgcttcagaaacaaaacggcgggtcaaaagaaattgtgaccgcctcagatttttgttcgaaatttacagagtgcaaatccttgatttggcggcagaattcgtgagacacattatagataaatgcacaggtactaagggcctgtttgttagagagactaatctttaatcccttgtttttagtcccgtttagtctctattttgccaaacagaaaacctaaaataaggattaattggctttag

SEQ ID NO: 135811 - DNA, 86 bp, Zea Mays
cctgaccccagcagaaccaagattttccatgccgcgccccgttgacacgtttgccccgcggtccgcggcccccgcatgtcggtcga

SEQ ID NO: 135812 - DNA, 3012 bp, Zea Mays
cactgctcggtggaatgcctcactagtcactactctactcactagtagtagggctgcaggtccaaccgctcccccacgccgccgctccccactgagcaaaccccgcgcgccgccgacgagatgaagggagcaacgccgccgcggccgttcatggtgccgggccctgggggcccgatgccgcccccgcagcagcagttcgggctggtggagactcgccccccgctggccgccgtgctgcggccgcgcttcaacatcccgggcctccacccctcggcggccgccgccgccgcggcctcgggcgcgggcaagatcgcctccacctacgacctcgtcgagccgatgcggttcctctacgtgcacgtcgtcaaggcgcgcgacctgcccgcggtgtccgccacgggctccatcgaccccttcgtcgaggtcaagctcggcaacttcaagggcaccacgcccgtcagggcggccagccacagcccgtcctggcagcaggtcttcgccttctccgccgcgcacctccagtcccacctgctcgaggtcgccctcaaggccaaggacctcgccggcgacgacctcgtcggccgcgtcgcgttcgacctctcggaggtgcccgtccgcgtgcccccggactcgccgctcgcgccgcagtggtaccgcctcgagaccaagcgcggggagaagctgccccacggggagatcatgctctccgtctggctcggcacccaggccgacgaggcgttcccggacgcctggcactccgacgcgcacgccgccgcgggccccgccgccgtcgcgtccacgcgcgccaaggtatacttctcgcccaagctcgtgtacctccgcgtcgccgccatcgccgcgcaggacctcgtcccacacgacgcctcgcgcccgatgaccgcctgcgtcaagctgcagctcgccggccaggtgcgccgcacgcgccccggcgcgccgccggggacgcccaacccgatctggaacgaggagttcatgttcgtcgcgtcggagcccttcgacgagccgctccttgtcaccgtcgaggaccgcgtcgcgcccggccgcgacgagatcctcggccgcattgtcctgcccctcaaagcggcaatgccgcggcacgaccacttcggcaagcctgtggagccgcggtggtacagccttatgcgccactccgatgatcctgacaagaaggaggttaagttcgcaagcaagatacagattcggatgtcgcttgattttgggtatcatgttcttgacgagtccacctactacagcagtgatctgcagccatcgtcaaagcctgcaaggaaaccaagcattgggatgcttgagctgggagttctgggtgcccggaacttgataccgatgaagcccaaggatggacgcaccacagacgcctattgtgtggcaaaatatggaccaaagtgggtgcgcaccaggactattcttgacacactgaatccacaatggaatgagcagtacacttgggaggtgtttgatccttgcaccgtgatcacagtggtggtgtttgacaacgggcaaattgggagcaagaatggtggtggcccagatcagcgcattgggaaggtcaggatccggctctctacactggagacagacagagtgtacacgcatttctaccctttgctggttttacatccaagtggactcaagaagactggtgagcttcatttggctgtgcggtttacctgcacagcttgggtgaacatgatggcgctgtatggtcgaccgcttcttccaaagatgcactacacacatccaatcgcagtgatgcaattggactacctgaggcaccaggcaatgcagattgttgccgcaagactcagccgtgctgagcccccgctgcgcagggaagttgtggaatacatgctcgatgtggactcacatatgtttagtctccggcgcagcaaggctaattttcatcgcattacctcactgttctttggttttgtggcaatgctcaagtggtaccatagcatcaggagctggtgtaatccaatcacaacaatgctagtacacatgctgttcttgatactgatctgctatccggagctcatcctgcctaccatcttcctctacatgttcatgatcgggctgtggaactatcggtaccggccaaggcatccgtcacacatggatactaagctctcccatgctgagctgacacaccctgatgagcttgatgaggagtttgacacgttcccttcctccagaccagctgaaattgtaagaatgcgctatgacaggctgaggagcgttggaggtcgtgtgcaggctgtggttggggacctggcgacacaaggcgagagagcccatgctttgctgagctggagggaccctcgggccaccgccatcttcattttcttatccctggtgatcgccgttgtgctgtacgtgacgccgttccaggttttgatggtcatagccatgctttacctgctgcgacatccccggttccgcagcaggatgccctcagtgcctttcaacttctacaggagactgcctgccaagtctgatatgctcctttaagatccagtgtccaccataagagaaacaggtgcaagtcttacttatttatgtctgttccgctcggttccttctggttagcatcagatcagatgtgaatatacctgatgagttcatatattagaggtcattagtatccccggaataaggtgtcggtttaatggtttatttccttggttatgccaaagaaagggaacaactggatcccttttgagttttgggaaatagtgggaggaggattttggtgcagaattgtaatattaacttcaggttattagcatagaactaaaggcaggaacaatattatcccccgtgtattatgtttgtactatttgtgtcaattttgcttgtgtttcagtgatcttttgcctgcagctgggtcatgctgtttgtatttatgtgttcgaatccctcaccttgtttgggttcactggacatgcctgcttgctgcggttgtactccttg

SEQ ID NO: 135813 - DNA, 886 bp, Zea Mays
atctctagggttagtttaagccgcctccgctacgcgcaaggacgccgccgccgctcagcagagagcagaccgcactccgccccctcccaaattcccactcccacctctggttctcctccgcagctcggatcatctgctataatggcgtctgctgctggagacgcatcccgattcgtcggtgccattaaactggaaggattagagacggcaaaagctagtggtgcatgccagcttgttgtgaagtatctgaaagaataatttgttggtgaatatacatacccctgcttgcgtgctggtgcaatttatgaaagaaagtatttgctggggacttcaatggctaggcctgttattgctaaggcaatggttgatgttgccaaggaagttgatgcagattgttgcttgtggatgcaccgagaaaggcaatgatcaggtatcagaagattggcatcgtcgcaggtgttcctgtttgcatcaacggataagacgtgtcgcccacatccgtctcctcgctgagctcaatgaaattggtgggaagcatgggaggagacttcctcgtttgatgacggggaaatctataaccaggctgacgccgagggggggtcatcaggctctggtctcccgaccggggtccgggcgatgctggagaagggtatctgaatctttctttgtttgattcagagacaaaatccgttcttgggaaatcgttgttgggtcggtgatcacagacggatgggaatcatgtggaattttgtttacatgttgactaactatagttagttgaccgtgcatctgtttctatatatatcatatagctatacattggtttgatgggttatctaaaatatctatcttttatatatagtacaaaccaacacaggcttggttt

SEQ ID NO: 135814 - DNA, 1281 bp, Zea Mays
atctctagggttagtttaagccgcctccgctacgcgcaaggacgccgccgccgctcagcagagagcagaccgcactccgccccctcccaaattcccactcccacctctggttctcctccgcagctcggatcatctgctataatggcgtctgctgctggagacgcatcccgattcgtcggtaatccgcagctagatcgccccacttcgttccaatccgtcctgtcttttcttctcgttccgcccatgtttggcattgcgtgttttccggacagagccgtgttatttagacgcttagatatttctaggctttcgtacgtgttcgcactcgcacggcttccttgacaaaaccctaaaccctccgccgcgctgcagctccgacgtgcgccttaggttctagaacaaggcgagtagcacgcctttacctccccggctcgccttactacctaagcgtctcctaggcgacgcttgaatactatgtatatactttgtttcaatagttaacctggtagtttggatttttttttaaattctagctaacaatttgtttaatacatatgctgaactcttgttaaggtgccattaaactggaaggattagagacggcaaaagctagtggtgcatgccagcttgttgtgaagtatctgaaagaataatttgttggtgaatatacatacccctgcttgcgtgctggtgcaatttatgaaagaaagtatttgctggggacttcaatggctaggcctgttattgctaaggcaatggttgatgttgccaaggaagttgatgcagattgttgcttgtggatgcaccgagaaaggcaatgatcaggtatcagaagattggcatcgtcgcaggtgttcctgtttgcatcaacggataagacgtgtcgcccacatccgtctcctcgctgagctcaatgaaattggtgggaagcatgggaggagacttcctcgtttgatgacggggaaatctataaccaggctgacgccgagggggggtcatcaggctctggtctcccgaccggggtccgggcgatgctggagaagggtatctgaatctttctttgtttgattcagagacaaaatccgttcttgggaaatcgttgttgggtcggtgatcacagacggatgggaatcatgtggaattttgtttacatgttgactaactatagttagttgaccgtgcatctgtttctatatatatcatatagctatacattggtttgatgggttatctaaaatatctatcttttatatatagtacaaaccaacacaggcttggttt

SEQ ID NO: 135815 - DNA, 634 bp, Zea Mays
attggagaagccttccatggctgcatatgtgtttcagtgttattttatttgtagtggttttctctaattcataacatgttttaagtaattacatctccactgtaggcaatggttgatgttgccaaggaagttgatgcagattgttgcttgtggatgcaccgagaaaggcaatgatcaggtatcagaagattggcatcgtcgcaggtgttcctgtttgcatcaacggataagacgtgtcgcccacatccgtctcctcgctgagctcaatgaaattggtgggaagcatgggaggagacttcctcgtttgatgacggggaaatctataaccaggctgacgccgagggggggtcatcaggctctggtctcccgaccggggtccgggcgatgctggagaagggtatctgaatctttctttgtttgattcagagacaaaatccgttcttgggaaatcgttgttgggtcggtgatcacagacggatgggaatcatgtggaattttgtttacatgttgactaactatagttagttgaccgtgcatctgtttctatatatatcatatagctatacattggtttgatgggttatctaaaatatctatcttttatatatagtacaaaccaacacaggcttggttt

SEQ ID NO: 135816 - DNA, 1667 bp, Zea Mays
ctcggcctcccctaccggcaagcacaggcttttctttttctttctcgcccttttttcgccctcattgtgtgtgtgtgcagcacatataatccgctctctctcccccggtttctcttgtcttcttgctgcggcgatggaccaagaaacctcacgggaaccccactccttgaggagccgtccagtgccgcattagtgggttccattcttctttggatcgctgctcgcgatcgcattgcccgcgtttcttttggccgtcttggttcggtcttgattcttggacgaggtgggatttggagagccgagagcggcgcggcagaggcgggtttctcggtcgggctagattgtttccatcgagatggtgggcggcggagggcattcgtcgatggaccacactggcgccaaggaccttgagcgcggcgagcttcgccgtggtgcgcctgagtttgcggacggcgacgatggagacggggaagaaagccagtacttctcggacgcggaggaccggtcgtggccgtctcactcgcgccacgactccaccgcctacgaggactacgtctcgccgtgcgtgtccgcccgcgcgagctccgtcgacgccgacgccgacgccgacggcgaggccgtgagacaacactgcaggaagtcgtcgtgcgtgtcagagggctcgctggacgacgttgacctggaggccggactgagcgagatcatcaaggccagccctgagaagaccgaacagaactgtcgcatttgccaccttggcctggagagcgcggcggccgagtccggtgccggcatcacgctcggctgctcctgcaagggggacttatcctacgcccacaagcagtgcgccgacacctggttcaagattagaggcaacaaggtctgtgagatatgtagctcgactgcatccaacgtggtagtcttgggggatcccgagttcagcgaccagtggagcgaaacaaacagcgccgccgccgccgccgcgcaggcgccgccgccaccagccgaaccccggaggttctggcaggggcatcggttcctcaacttcctcctcgcctgcatggtgttcgccttcgtcatctcttggctcttccacttcaacgtccccggctaacaagttctttggcgcacatacatggcccccgaataaaaaaaaactccaaaaaagccattactccggacgccgggtcggtaagttagcggatctggaagaacaggctggtgggtgctgggttggttgaagtaaaagctcgacatggggccgggggacgatgatactgcatttttgtttatgatgaatgcctttgataaagatcaagagggtggcgatcccgcgagagaaaaaaaagggagcatgattgcgcggcgtttctctgacagtgtctaggtgtagttggaagcaagtagtagaagatgattgatgtgtgctgctggtgttttatcatcgcgagggttgctgctagcctagccatttttttttttggttctagctttcgaaaggttctctgtttgttgctttgcgtgttgtttcggcgtgtgatggattggatcatgttgaacattcctcgcgctttgttccgatgcttctgatccttgtggactcgtcggttcttgcttttgctgtagcgtgtctctggaggtaataaagggaaaaaaagggttgtcagatc

SEQ ID NO: 135817 - DNA, 2300 bp, Zea Mays
cactacctaacaaaaggtactcggaactatttttttaattattaggaatgtagctggagcgacgaccacgcgaaggctggctggctgtcgccggaatcttggtggtggtggttcccttcgtctgctccagtcggcggcgacatcactcaagaactgtggcacagtgcctgcgaggcagcccggcgcttctggctcgcaagcatggcgttgctcctactaatcaaggcctctgcagcggaagatggtaaacattagcagctatttcatttccggcacacagggtacgcttagaacagaacgaaggcgagcgaagagttggttaccgtgatcaagaacaaagccgcctgggtaacgaggctgcgcgccgaggtcgtcgaggttgagattgagagcctggacgacgcgagcagggacaagaaccgtcgaacaccctgcacgaagcggagggagagcacgtagtgatgagttgcatgttcaagcaaagaacagcagcgaggtatccagtggaagtgagcacgaagcggacagggaagatgatactccaccaccgacgcacctgtctttttcttcggctctgccggggcgccagccggcctgggaagaaacacgccagtgccgttacgctcgcgcttggggccggacggggtgaggaacacggcacgcatgccagaggccggagccgccggcgcatggtgggggtggtggtggtgctgcggcttctgaggcgggaggcacgccgccgggttcagaccaagcagcgcgtcgccgcgaacgcagccgacgggcttggcgcatgcgccctggcgcgcgctccacgccgcggcagcggcaagctggtggcgctccctctgtagcttgagcagttgctgttgcttcaggagatggaactgcaaagcaacggggggaagcggacagagaaggaagcgtcagggcaacaggaacagaacgaagggaacgaaacaaccggagaatcttagcgagaggacacgcacgcacctgagcagcctgcatctggcgctgcgagaccaagcgcgcgaacgggtcgtagtagtgcccaccggcagggactttggtggagggaggtgcgattggcggtggcgagggcttgcgtggcggcggcgcgaacccgctccggccgtggaaaccgttggcggccggcaccggcacgctgttggcggcgcgcatgcgcgcaacctgtccggccgcctcgtagagcagatcccacgggtcggcgggcctctggtccaggggcgatgacggcggcgaggtgcccttggacgccccgccgctggggctctcctgccccgacttgggcagcccgcacagcgtcgactgcggcgacccaaccgtcacctccgcctgccgcacaagaaacgcaccatcagaaactccggcacgcacgcacgcgccactaactacatacaaccagaaagaagcaaccgcgcatcacgcaggcaggcagatgaaaaacaaccttggccgcgggagccttacgctctcccccgtcgccgaggaggcccgcgaggcggcgcgagagccccgccaggctgtcctcctcgtcgctctcgctccgggccgccacggccgccttctcctcctcggagaagaagtcgtcgtccaaaaagtcctccggcagccagaactcctccccgaggtccgcgcactccgtggtcgacatttcctccactctcgacaccgtcgaagaagcctgaaaagcccaccgccgaccggtggaatgagcacagcgcccggaaccctggcggaccagcggcagcagcagcaacaacaaccactgcgtgcggctccctctccaaagcagagagaaaagcggcgggtggatggatggatggatggagtggggagtagcggcgtgcttatcagcgaaaagaggtgggagtggcacggcgagaaagagatgggggcgaggaaggcgaacggaatgtcgacgggcgacgagggggtattaaaaaccggccgaggccgacgcctgggactcttctactcttataaaaaaagaggacgccgaggagagagaaaacagcagccatccggaaaatcattttcttttcgagccattttgcgccggtgcaactcgaaggcgtggggccaccgagacgcgccgtagctcccgtatcgccctcccaaatgcctctctccagtccagtccccccggtgttcactgcgctagtttattgcgcgtatttttttttccccaccgcgacacgcaaggccggacggcgggtgggagagtactgtgcagaagttggaggagagtacggatatacgattggcgtccatta

SEQ ID NO: 135818 - DNA, 1050 bp, Zea Mays
aacccacctgctccattttatgcttcgccctcgctcgcctcgccctcgccgcaacgctttgcgatagagtttctgtctgctaccagcaccacagcctagcaccccaccgcgtctagggttttctgctccaatggccgccgcgagggcagacggggagcgcaggatcggggtggccatcgactactcggagagcgccaagaaggcgctggactgggccatcgacaacctgctccaccacggggacaccctcgtcgtcgtccacgtcctgcaccacggcgcggaggagaccaagcacacgctctgggccaagtccggatcccgtaagctccccccactcaagctctcgccgcatccatctctaccctacccttacccaaatgctcacccgctgcccgctggtgtctgtttcggtttcctgacggtcttggctcgtcggctcaatctgattcgctcgatcggtctcgcttgcttcgatccccgcagcgctgatcccactctccgagttccgggagcccgaggtgatgcagggctacggcgtgcgccccgacgccgaggtgctcgacgcgatcgacacggcagcgcgccagaagcagctgaaggtggtggcgaagctgtactggggcgacgccagggagaagctctgcgacgccgtcgaggatctcaggatcgattccctcgtcatgggtagtcgcggcctcggcccgatccagaggtatagtacaatcctaagactccattactactactatagtactattgaaatgttgcctcatcaggactggaatgcgctgttcagcctctgatagtaagttagtttctcgctttttctttttgttcggataagcgcgtcaattgagtgtctggaataaatggatatagtctagcgtgcatggatggctcgattgatgatagggatagcccgcatgccaagtcagtatgctggtgcagtactgaaatgttcaaacacagcacatctagttcttgttcttaatagcaatacttatctgaaaaatgctcttgttccttgtatcgttgcatccggtgattctg

SEQ ID NO: 135819 - DNA, 1398 bp, Zea Mays
aacccacctgctccattttatgcttcgccctcgctcgcctcgccctcgccgcaacgctttgcgatagagtttctgtctgctaccagcaccacagcctagcaccccaccgcgtctagggttttctgctccaatggccgccgcgagggcagacggggagcgcaggatcggggtggccatcgactactcggagagcgccaagaaggcgctggactgggccatcgacaacctgctccaccacggggacaccctcgtcgtcgtccacgtcctgcaccacggcgcggaggagaccaagcacacgctctgggccaagtccggatccccgctgatcccactctccgagttccgggagcccgaggtgatgcagggctacggcgtgcgccccgacgccgaggtgctcgacgcgatcgacacggcagcgcgccagaagcagctgaaggtggtggcgaagctgtactggggcgacgccagggagaagctctgcgacgccgtcgaggatctcaggatcgattccctcgtcatgggtagtcgcggcctcggcccgatccagaggattctcctgggaagcgtgacaaactacgtgctgtcaaacgcatcgtgcccggtgacagtcgtcaaggggaagtagtggcctgggcagcgtgccagtgatatgaatgaagatgctagcgtgcagtttgtgtgggttatagctaaacactatgttccgtcctgttgctgcatttcaataaagcatgtgtcttctagatttcacaaatctctctgaggctctgacctttgtcttattagctgtgaaactgtccgtacttcattcctgttcagatcgaattcgaggattggttcataccccttttactgtcgtgtcgtttgaactgctggttagtctgctcaatttgtatttctgattgtcttgcaccacgtttggattgcagcacagagtggtccgatcctaaaaccgactcttatcgttttgtttggtttgagtcacgacatgacgacgacgtcctctgaaatttacacagcagcactgttaattttgccggacacccaaactcaaatatgaaaccacccgaacaccagtttgggtgataatccaaatccgagaccaaacctcatggatccccgaaacctaatctcaaaggccaaaaccacaccaagcacagcacccctacagctcaaacggttaaacccaccaaaaggtccatgtttcacaactcaaaagcatgttccagctccacacatttgatctctctaccatacatactgaccatgatctgttgcggcgtgtagtagcgtgtgttactgacttacagtagcatcccagggcggtttctcttgttgccgcttgttgcggcgtctagtagcgtgtgtcaggattggacaccagatgttgatcggatc

SEQ ID NO: 135820 - DNA, 2504 bp, Zea Mays
cggcctcgcgccctcccctccgagtcgcagggtcgcacgagcagacaatcaccaacaccctttctgtctttcgctttcactgctcaccatttcgcgtccttgcctcgccctctcgccgtagcgagcagctctttttcgtctccctccctcatctgctacgcacctttgcagaaagaaaggcgcccggaggtaggggtagaggtagagcccgagagcccaacacctccaccagcagcaaagcaccaccaccagagccgagcgcacaaaagcgcgcggccgagacgcgggacaaagcaacgggcagcctgtactgcccgcttctagctgcagctaccctccagtcccagttccagccccggccaggcgctcgcaaagtgcggagccgccctctcttcgagtcttcgctcgtggtctctctctccaggtcgtgcagtacgatccatatcccggagctcttgcgcgagcgacatgtcctcggcggcgggcggtggatacggggctgcgggcggcgccgagcaccagcacctgttgctggggcaggcctcggggcagctctaccacgtgccgcagcacagccgccgcgagaagctgcggttcccgcccgacccggccgactcgcccccgcccactgcctggccggcgcctccacccttctactcctacgcgtcctcgtcgacgtcgtcctactcgccgcatagcccaacgctggcgcacacgcagctagtggcgcacgcgctacctgccggcgccggggcccaaatcccgagccagaactttgcgctctcgctctcttcggcgtcctcgaaccctccgcccgcgccgcggaggcagctcgccgcgggggtagccgctgggccgtacggcccgttcacgggctacgcggccgtcctcgggcggtccaggttcctgggccccgcgcagaagctactcgaggagatctgcgacgtgggcggacggcccccgcacctggaccggcgctccgacgacgagggtatgctcgacatggacgcggcggggggcgtggaccacgagatggacggcggtgactgcgctaccgctgaggcggtcgccgtctcgggcgccgagcagcagtggaggaagacaaggctcatctccctcatggatgacgtctgcaggcgatacaagcagtactaccagcagctgcaatccgtgatctcctcgttcgagactgttgcagggctgagcaacgcggcccccttcgctttcatggctcttcggacgatgtcgaagcacttcaagtgtctgaaggggatggtgatgagccagctacggaacacgagcaaggtcatcgccaaccatgggattattgccaaggacgatatggcgaacttcgcgctcatgggtggtggagcaggcctcctgaggggaaacagcgtgaacgcgttcagccagcctcacaacatttggaggcctcaaagagggcttcctgagcgtgcagtgtctgttcttcgctcatggctgtttgagcacttcttgcatccgtatccaactgatagtgacaagcagatgctggctaaacagacagggttaacaaggaaccaggtgtccaattggttcatcaacgcaagggtgcgtctctggaagccgatggtggaagagatccacaacctggagatgcggcagctgcacaagaccacatcggtggaccagaatcaactcggcatgcagcagcagaaccaccactcgtcggacggcagcgggaggccttcctccgacccttcgaactcccagcggggccaaagcagcggcatgacaagaaacctcagctctcgggcaccacgccacatccaggacgacgagctctcccagatgccccacgacatggcaggacaggtgagctttgcgtacagtgggctcccccccgcgcaccacggtctcgcgctgtcacaccaccaccacccccagcaagcgcaagctgaggcggttggtgttggcggcgtggccgccagcagcggcggcggcgtttccctcacgcttggccttcaccagaacaacaacaacaacagggcatatatcgccgagcccctcccggccgcgctcccgctcagcctcccgcaccggttcgggctggaggacgtgagcgacgcctacgtgatggggccgttcggcggccaggaccgccatttcagcaaggggatcggtggtgggcacaacttgctccatgactttgtcggttgatcaaattcgtccctggaagtgtttgtcggcatgtattgtattgttaggggtagtagggcagtggaagagagacgaccgtttggtccatctgcatccaagaacgctgtcgatatttgccaactcgaggtctatagagtggttgacgacataccgttgaagatgtgttccagttgtatgttgtagagttgaacgaaccctatctgttctaatcccagctggtgtggcgttaacacatgtaccgctgttccggccttcgacatgcaagtatgcaactgaaggtgaaggttgaaaactgtgtggttatt

SEQ ID NO: 135821 - DNA, 1890 bp, Zea Mays
ggggtccagccgtgcaacacataacacgcgcccgcgttggcgtattctattcgccaagagccaaggggattggggaggccgtccatgttgcgtgttgtttagacgcgccaaaaggcaaaagcgtggaggaggctcatcaagcacaagcacgccacgcgatccacacacggcaagcaacgcccagggctcgtgctcgccccgcgacccgcgaaagatctgtgctggttcgctcgctcgctcgcgccgcgccgccgcgtgggggtgccgatgagctgcgcggggcaggccggcgggtggctgctcgactacgcgctggtggaggaggagatccagggctccgagttcatctacatggtcgacgacccggccgtctccagcgtgatactggggtttgatgctcccaggaaggaggacggcgtccaggacaaccccggcgccaagaagaggcaatctttctcttcttccttcctttcagttgaccctcaacataaagttaagcttggcgaatttcgcatgcctagtaggagcttgcagagatataatcacgaatgggttgggatgtttcttgtttgtcgctagtattactattaccttaattgttgtgctggagtaatctggcatacaaattacttgattaccagtactccgctctgattgacacgagaggtagaactagtggggttcaggaattggcaaacatgtcaatcccgtcgctgtagaagaaaactcacagatttcaggttgtccagaaaggatgcagtgcttgcggacacgtctagcgaatttgctttctcgtaattaactccactttgagagctactacttgtgcgaattcaatggtcccattaatttcactgtactgtccaaataaagcggaaaagtgtccacatcacactaagtccaattctgttgcccctgaagtccgtgggcataatttgctgtgctttcctgtttccctttcttctacgcagatcccggccggagtccagcgcgccacccggcaccaaggcttgccgtgagaagctccggcgagacaggctcaacgaaaggtgcgtttcagagttcagactatcagttgccaccgcttcaccctagagaagatgtccaccgagtatgaccattccctatatccaggttcaacgagctctgtgccatcttggaacccggcaagccacccaaggccgacaaagtcgctatcctaagcgacgctgcccgtctcctgaaccagctgcagggcgaggcccagaagcttaagcaatcgaacgaatcgctccaggagtccatcaagagtcttaaggtatgtcaactgtcaaaacgcctggacaaccatccgtccaaagtgtatggaactctactccatagatttgccggttcaatatgtggcgctgcaggctgagaagtccgagctgcgagacgagaagacgaggctcaaggctgagaaggagaggttggagcagatgctcaagggcgtcgtcagccacgccgcggtggctgctccggggcccttcgtcccgcaccctgctgcggtcgctccatctttccaccaccacccggcggcgtttgctcaggctggaaagttcgtcccgtaccccagctacccgccgccggctgcgttctggcagtggataccgccgacgtccctcgacacgaccaaggaccccgcacactggccgccggtcgcctagccgacctaccacctcaccgtggcatcattcatcggtgatgcgttgccgtgtgtactgaatttgatcgaagcatgcctgaaaaaagaaaccttggctgctgctcgtgtcaaggacgtgatgtgctgaagttcaggcgatctaggtcggctggagaagtctatgtaacagccataatgctaaagcaatgaaagtgatatattaattg

SEQ ID NO: 135822 - DNA, 1298 bp, Zea Mays
ggggtccagccgtgcaacacataacacgcgcccgcgttggcgtattctattcgccaagagccaaggggattggggaggccgtccatgttgcgtgttgtttagacgcgccaaaaggcaaaagcgtggaggaggctcatcaagcacaagcacgccacgcgatccacacacggcaagcaacgcccagggctcgtgctcgccccgcgacccgcgaaagatctgtgctggttcgctcgctcgctcgcgccgcgccgccgcgtgggggtgccgatgagctgcgcggggcaggccggcgggtggctgctcgactacgcgctggtggaggaggagatccagggctccgagttcatctacatggtcgacgacccggccgtctccagcgtgatactggggtttgatgctcccaggaaggaggacggcgtccaggacaaccccggcgccaagaagagatcccggccggagtccagcgcgccacccggcaccaaggcttgccgtgagaagctccggcgagacaggctcaacgaaaggttcaacgagctctgtgccatcttggaacccggcaagccacccaaggccgacaaagtcgctatcctaagcgacgctgcccgtctcctgaaccagctgcagggcgaggcccagaagcttaagcaatcgaacgaatcgctccaggagtccatcaagagtcttaaggctgagaagtccgagctgcgagacgagaagacgaggctcaaggctgagaaggagaggttggagcagatgctcaagggcgtcgtcagccacgccgcggtggctgctccggggcccttcgtcccgcaccctgctgcggtcgctccatctttccaccaccacccggcggcgtttgctcaggctggaaagttcgtcccgtaccccagctacccgccgccggctgcgttctggcagtggataccgccgacgtccctcgacacgaccaaggaccccgcacactggccgccggtcgcctagccgacctaccacctcaccgtggcatcattcatcggtgatgcgttgccgtgtgtactgaatttgatcgaagcatgcctgaaaaaagaaaccttggctgctgctcgtgtcaaggacgtgatgtgctgaagttcaggcgatctaggtcggctggagaagtctatgtaacagccataatgctaaagcaatgaaagtgatatattaattgaatcgggctagtgtttcctgaaactacggttatttagacattgcctggaaggctagaacaatgcaaacttgggtaacattgtgacaaagatcttaagtagtttaccatctcc

SEQ ID NO: 135823 - DNA, 629 bp, Zea Mays
cgaacaagccacaatataataaaaaaacctctaattccccagacccggcaagcgacgccatcgcgcaccagcgctgctggaccaccgcccgtctgacgcaaacccagccgtccagaaccgtcgtcgccgccgcagcccgtccttccaccacgctcgcgccgttgcgcgctcttagggttccgcagggtcgggatcgccggagatggactggagcgcggtgacggcggaggacctggtggacgcgctgcgggaggtggactggtccacgccgccgcggactgtctcggagttcttctcccggttcaccgtcccacgctcctattccaagtggaccagccgcctcaagtgcaacctctactactacaggacaaactatttcatcttgatcatgttcatccttgggatgggcttcctttggaagccagttgctatccttgctgcttttatgactggacttagcatcgcatttctcaatgataggtaaattgtgccctgattcacttttctttgtattttttttcagttgttcagttattacacaggcccaaagtccaaacttctctttatactgaactaacaaagaatcaaagatattgtgacattcatacttcttttaataaaaagcattc

SEQ ID NO: 135824 - DNA, 1251 bp, Zea Mays
cgaacaagccacaatataataaaaaaacctctaattccccagacccggcaagcgacgccatcgcgcaccagcgctgctggaccaccgcccgtctgacgcaaacccagccgtccagaaccgtcgtcgccgccgcagcccgtccttccaccacgctcgcgccgttgcgcgctcttagggttccgcagggtcgggatcgccggagatggactggagcgcggtgacggcggaggacctggtggacgcgctgcgggaggtggactggtccacgccgccgcggactgtctcggagttcttctcccggttcaccgtcccacgctcctattccaagtggaccagccgcctcaagtgcaacctctactactacaggacaaactatttcatcttgatcatgttcatccttgggatgggcttcctttggaagccagttgctatccttgctgcttttatgactggacttagcatcgcatttctcaatgatagtcactttcaatgagaaagtcacaaggaccgtaagacagttttcaccacatttagctgcaaagatgaggccaccaataacacctgttcttcgtggtcgaccaaactcgaagagatcaattcatatttgtgggcgacctcgcagggtgtttgtcatattcttttctgcagttagctgtatactctggttgacctcatgcagtcttctcacagtcctctgggcactcctcattgctctatttgcaactgtgctccatgcaagcttcagaacaccaaatctgaaagcacgtctgaatacattcagagaggaattccgggctgtctggcggaattatagtgagctttaaggtctcatttgtttctctcatgttcattgtggtaaggaaaggtgtctagtgcagaaacgtccatgctgtttgtgagttgcactaggagatctagttgaaggtgaaacgccattggacactactacatggattatgggaggtgggatttgggttcggttggccgaatgcgatgttatgccttagcacgtgatccctcaagaacaataatttttctttcaggcttctccctaaccgaacattggagaggacagcatgtaaagaaatgtaaaaatgtaccggttctcgatcaaaacttatgttgtttgtagaaatttttactaattcgtattgcatcatcttttgaactatttgtttggtgactacaattttgcttgagcatttgtgtcaagttgagttacagcgagtagataatttctatgcttccttc

SEQ ID NO: 135825 - DNA, 1259 bp, Zea Mays
cgaacaagccacaatataataaaaaaacctctaattccccagacccggcaagcgacgccatcgcgcaccagcgctgctggaccaccgcccgtctgacgcaaacccagccgtccagaaccgtcgtcgccgccgcagcccgtccttccaccacgctcgcgccgttgcgcgctcttagggttccgcagggtcgggatcgccggagatggactggagcgcggtgacggcggaggacctggtggacgcgctgcgggaggtggactggtccacgccgccgcggactgtctcggagttcttctcccggttcaccgtcccacgctcctattccaagtggaccagccgcctcaagtgcaacctctactactacaggacaaactatttcatcttgatcatgttcatccttgggatgggcttcctttggaagccagttgctatccttgctgcttttatgactggacttagcatcgcatttctcaatgatagttttgcagtcactttcaatgagaaagtcacaaggaccgtaagacagttttcaccacatttagctgcaaagatgaggccaccaataacacctgttcttcgtggtcgaccaaactcgaagagatcaattcatatttgtgggcgacctcgcagggtgtttgtcatattcttttctgcagttagctgtatactctggttgacctcatgcagtcttctcacagtcctctgggcactcctcattgctctatttgcaactgtgctccatgcaagcttcagaacaccaaatctgaaagcacgtctgaatacattcagagaggaattccgggctgtctggcggaattatagtgagctttaaggtctcatttgtttctctcatgttcattgtggtaaggaaaggtgtctagtgcagaaacgtccatgctgtttgtgagttgcactaggagatctagttgaaggtgaaacgccattggacactactacatggattatgggaggtgggatttgggttcggttggccgaatgcgatgttatgccttagcacgtgatccctcaagaacaataatttttctttcaggcttctccctaaccgaacattggagaggacagcatgtaaagaaatgtaaaaatgtaccggttctcgatcaaaacttatgttgtttgtagaaatttttactaattcgtattgcatcatcttttgaactatttgtttggtgactacaattttgcttgagcatttgtgtcaagttgagttacagcgagtagataatttctatgcttccttc

SEQ ID NO: 135826 - DNA, 1322 bp, Zea Mays
aaaaaatgaaaaccatatagaacgtcgttcgcgaccccaccgtatccccctccctcgccccctcactgctctcgctttcgctcgccatccgccgtcccgctccgcacaccggccctgcccgatgccttcgcccgccgcggccgcggcggcgcctttccaccgcatcgcatgcgcgcgtcagcacctccctcaaacccgtctcttcttcctcccatcccgcgcgctgctcaaatccgaccgcctcaccgtcccggctccgctgcgcgtccacgcgctgaggctgcctccgacggtgccacgggcggcaagccacgatgccgccacgggcgtgagatcgcccacatctggcggccagatgctggtgttcgtcccgccgcacccgctcataaagcattgggtctccgtgctgcgcaacgaacagacaccctgcgtcatcttcaagagtgccatggcagagcttggtcggctgctcatatacgaagcatccagagattggttgcctacaatcacaggagagattgagacacctgtagctgtagctagcgtagaatttattgatccaagagagcctgttctggttattccaatactgagagctggtcttgcactagctgaacttgcttcatcagttctgccagccaccaagacttaccacctcggctttcgtagggatgaagaaacgcttcaaccttcaatatacctgaacaacctgccagacaagattccagagggtactcgtgtgctagttgttgacccaatgctggccactggtgggacaatggttgctgctattgacttgttaatcgagtgcggagttactagcaagcagattaaagttatatctgctattgcatcacctcctgccctgcaaaagctcaataacaagttccctgggctccacgtgtacacaggaatgattgatccagaagtaaatgagaaaggttttatagttccaggactgggggatgctggcgacagaagctttgccacataatcagactgcccaatttgattgggtcagtgttcgacctgcgagaatctttgcttgagtttcacagaaacggagcgactgccagtagcagtgtttattgctgtagattactttcgtttgagattttgttccttttttcagtgttatcagctgcctaccattttgtagcacccattctgtatgattgtgtagaatacaaggctagttcaaatgtccccagatggtaaaatgctcgagagaacaaggttccgttcaaaatgacggattattgaagtttctgctctctaatattttgccagtcgatggaataaacatacgtcattgtgcttaa

SEQ ID NO: 135827 - DNA, 2000 bp, Zea Mays
gcgaccccaccgtatccccctccctcgccccctcactgctctcgctttcgctcgccatccgccgtcccgctccgcacaccggccctgcccgatgccttcgcccgccgcggccgcggcggcgcctttccaccgcatcgcatgcgcgcgtcagcacctccctcaaacccgtctcttcttcctcccatcccgcgcgctgctcaaatccgaccgcctcaccgtcccggctccgctgcgcgtccacgcgctgaggctgcctccgacggtgccacgggcggcaagccacgatgccgccacgggcgtgagatcgcccacatctggcggccagatgctggtgttcgtcccgccgcacccgctcataaagcattgggtctccgtgctgcgcaacgaacagacaccctgcgtcatcttcagtgagtgcttctgagtggcttagtataggttggatatagtagcaattgaacaccactgtgtgggtattattagttggtggaccgaattttgtttgatcattgttggtactgtgggtgaagtcatagctaaataaacgaggcaataaatgagctcatgataggatttcactgagcttttgttcgatgctgtgatagagagtgccatggcagagcttggtcggctgctcatatacgaagcatccagagattggttggtaagttgaaatcttttgcctggttgatcatttttctgttattcttctttctcttctaatgttaacattaagctgtgctagtgaagtcggagtaaagctaagctgtaacatggtatgggcaattatatttgtagggaagaatattgagtgtaatatatgaatcaaaattcatcacaattttttagaagtcttcatggtcacttcttagtttcctcatgtactttaatcaaacatgtagctatgtatcgtttctgagaatactgaccacaacaccaaggcatgaacatgtttcctcatctttctatatcacgaacaatgtgttgcgccataaaaagatgtttggatcagtcattattagacagggcaatcaactcaatgaatagaacaccaggaatcgtgataaaccgttctgaacccttgcagcctacaatcacaggagagattgagacacctgtagctgtagctagcgtagaatttattgatccaagagagcctgttctggtaagtctgtttcttaacactagatattgtacatgtcatttgtagtgtatctacaattatatttagtctttctactagcatgtctaacaggttattccaatactgagagctggtcttgcactagctgaacttgcttcatcagttctgccagccaccaagacttaccacctcggctttcgtagggatgaagaaacgcttcaaccttcaatatacctgaacaacctgccagacaagattccagagggtactcgtgtgctagttgttgacccaatgctggccactggtgggacaatggttgctgctattgacttgttaatcgagtgcggagttactagcaagcagattaaagttatatctgctattgcatcacctcctgccctgcaaaagctcaataacaagttccctgggctccacgtgtacacaggaatgattgatccagaagtaaatgagaaaggttttatagttccaggactgggggatgctggcgacagaagctttgccacataatcagactgcccaatttgattgggtcagtgttcgacctgcgagaatctttgcttgagtttcacagaaacggagcgactgccagtagcagtgtttattgctgtagattactttcgtttgagattttgttccttttttcagtgttatcagctgcctaccattttgtagcacccattctgtatgattgtgtagaatacaaggctagttcaaatgtccccagatggtaaaatgctcgagagaacaaggttccgttcaaaatgacggattattgaagtttctgctctctaatattttgccagtcgatggaataaacatacgtcattgtgcttaa

SEQ ID NO: 135828 - DNA, 1186 bp, Zea Mays
ctaccacgctgcgccgctgcccatagcttcgttgacaacctgttttcccaagccatttcctccactctcgttttttcccttcctgtccaaagatggctgaatcctttgttctcaataccggcgcaagaatcccgtcggttggccttggcacatggcaaatagagcatggagctgtcagcgacgccatctatgctgctgttaaggctgggtatcggcacattgattcagctgtagcataccgcaatcagaaggaggttggactggctttacagaaactatttgaggatggcgtggtcaagcgtgaagatctgtttgtcacctctaagctatggccaggtaaccatgcacctgaagatgtgcaggaggatctttgctcggccctcgaagatttgcggctcgactacgtagatctgtaccttattcatggtccaatccgtatccagaaaggaaccatgtttatcccggaaaaccttatccctacggacatccctgctacatggggagcgatggagaagctataccacgcaggcaaagctcgcgcgattggtgtgagcaatttttcctgcaagaagctgcaggatctgctcgctgttgcgcgtgtgcctccagcggtcaaccaggtcgagtgccatccagtttggcagcaagacaagctacgcaagctgtgccagtcaacgggtgttcatctttctgcatattcgcccttaggctcacccggatcacctggatacagtgggccaaacgtccttagcaaccccgttgtcatgtctgttgccgagaggttgcagaaaacgcctgcccaggtcgctctgcgctgggggattcaaatggggcagagtgtgcttcctaagagtgccgacagaacaaggatcggagagaacttcgacatatttgattggtccatcccttacgatctgatggcgaagttctctgcaatcaaacaggttaggctgctaaaagtcgagtttgtagttcacccgaacagtggatacaataccttggaggatctttgggacggtgaagtggaatacgaggacgaaagaacagagaatcaggaccattctgatttcttgagatgcttttcgtgaacagtcgagaatatcgccttcttcgcatggagaaacccctgagaaataatggcctctctgctgctcctcttatatgctctgaatacaaggaaaaataa

SEQ ID NO: 135829 - DNA, 2166 bp, Zea Mays
cgatctcccgcgcttattctgcgcgccaccctgctgcttctgcacgcacgttacgtaatcccattcccaggcgcagccctctccctgcaagtcctaccgctccgcggccgcaggtgcggggtggttgacggccgcttacccgcaccggcgccatgcgcgcgcgctaggtggtcgaggtcaagccaaacgctgcccaccgcctctgcctcccataacccatataaccctcgtccacgtcctttgctcgactcgcaaaaacttgcttccttcgacggccgcatcagtcctccacgtacgtcccggcacgtcgatcacggcaaaagctagccagcgcacaggacctgcggaggagctcggttttcgatcagggtcaataatcaccacgccgacgctgatgacgccggcgtcccaggcggcaccgccgcgcgcgcggcggtccgtggtggcggagctggagggcgcgctgcttcggagcgcggacacgctcccgtacttcatgctcgtggcgttcgaggcgtccgggctgccgcgcttcgcgctgctgctggcgctgtgcccgctgctgcggctgctggagctggcgggccgtggcggcctggcgctgcgcgccgccgcgttcgtggccaccgcgggggtgacacgcgccgagctggaggccgtgtcccgcgccgtgctgcccaagttcatggccgacgacgtcgaccccgcggcctgggcggccttcgggagctgcgaggggaggcgcgtcgtcgtcacgcggatgccccgcgtcatggtcgagcgcttcgccaaggagcacctcggcgcgcacgccgtggtcggctctgacctcgagtacagccggctcaggcgctccacggggctcctcaaaggcgcctgccatgaggccgtcgccagccgtgcccgcgcgctgttcgccggcgacgacctgccggacctcgcgatcgccggctcagagatggcgcgctccttcacattctgcgaggagcagatcagcccgccgttcactggagaccacgggatgaacgccgccccaccgttccggccggtcatcttccacgacggtcgcctcgtgtgccggcccacgccattcatgtccctcgtcatcctcctctggctgcctctcggcgtgctggtcgccttcgtccgcatcgccgtcggcctcatggttcccatctggagcatcccctacatcgcgccggtcttcggcggcgccgtgatcattcacggccgcgcgccgcccccagtcaggcccagcgacgccgcggacgtcggctcgccgccctcgggggtcctcttcgtctgcacgcaccgcacgctcatggaccccgtggtgctggccaccgtgctcgggcgccgcgtggccgccgtgacatactccatctcccgcctctccgagatcctctccccgatcccgacggtgcgcctgacgcgagaccgggaagtggacgcggcacgcatgcgcgccgagctggccagtggcgacgtggccgtgtgccccgagggcaccacgtgccgggagcccttcctgctccgcttctccaagctcttcgcggagctcagcgacaggatcgtgcccgtggcgatgaactaccgcgtggggctcttccacccgacgacggcgcgcgggtggaaagccatggaccccatcttcttcttcatgaacccgcggcccgtgtacgaggtgacgttcctgaaccagctccccgcagaggcgacgtgcgcggcggggaagagccccgttgatgtagccaactacgttcagcggatactcgctgccacgctcgggttcgagtgcaccaccctcacaaggaaggacaagtacacggtgctcgccggcaacgacggcgtcctgaacgccaagccggcggcggccgggaagccggcttggcagagccgcgtgaaggaagtcctcgggttcctgctccactaacaattacaccttgcccagatctggactctggcacaaatacttcgctcaccgatttgtttgagtttatactttgttacatttatacatgtacgtaaaaataaaacatgtagtagtaaaatacagcagtgatcagcctttctttacataataagtactgtatattgtattgttctttattttacaattgttttggtgaatttttactgggtccaatcaaagatgaaagttgttcc

SEQ ID NO: 135830 - DNA, 1442 bp, Zea Mays
cgctttgctctctcgctgcctgccccctcccaggacccaggtccagcgagcgggcctctgctccttccgcccgctgaatctagggagcgcgagctcttcttaaacgggcgcacgccgcgtgcgcgcccgacccgcttgccccgcgctcggacgcgtcccgatgcgcctccgccggccggaaaaaccctactagtcctagggctcgcctcgccgccctgatggggggccggccggggtacctcaccctgccgatcttttccgtggtcgcggcgatcgggtacgtctactacaccacggtgttcgtggccgtgccgcggtggctgggcctgtccacggctgcgggggtagccaacgccgccgcgttcacagcgctagcagctgcctgcctcgccacctacgccgtcgccgttcgcagggaccccgggcgggtgcccccgggtttcgtgcccgacgtcgaggacgccgagagcaccgtccacgagatcaagcgcaagggtggtgacttgagatattgccagaaatgttgccactataaacctccacgtgcacaccattgccgtgtttgcaagagatgtgttctgaaaatggaccatcattgcatttggattaataactgtgttggacatgagaactacaagattttcttggtctttgtattatatgctgtggttgcaagcttctatgcattgggagcgttttgcatagtgttcctaaagatgagcagccaggcagcgattcttctcgaacatccattattatctgtggggtcattctttctccattagcgttagcgctggcagtgctcttaggttggcatatttacctcatattacagaataaaactacaattgagtaccatgaaggagttagagcgatgtggttggcagaaaaaggtggagacctctatcatcatccatatgaccttggtgtctatgagaatcttatttcagttcttgggcctaacatattttgctggctctgccctgtattgaatactgttggaaatggccttcggtaccgtacatcctatgatattccggtatctacaccaccaaaaaaaatagcagcacattcacaataggtagtagttgctaatttgtgaaaggatttcccattaagctgctagaacgtgtttggtctgaacgattccgaaggcaggtcgtgtaactctgcaacatacaggagatgatgactaccacagcctctcgccaggtgtttgtcctgaatcgagacatgaactcttaaccttgttttttatttcattcttgacatacttgataatgtctcgcttgtaatctggagtaggctgttcttaccaaaaagaaaaaaaaactgcaattctgttgtaaagttagttcgtatgtttgggggccatgtaatgtagccaagggccatgaaaccgattttcccagagtatttgtgtacatttgtttaaaatgaaa

SEQ ID NO: 135831 - DNA, 1455 bp, Zea Mays
cgctttgctctctcgctgcctgccccctcccaggacccaggtccagcgagcgggcctctgctccttccgcccgctgaatctagggagcgcgagctcttcttaaacgggcgcacgccgcgtgcgcgcccgacccgcttgccccgcgctcggacgcgtcccgatgcgcctccgccggccggaaaaaccctactagtcctagggctcgcctcgccgccctgatggggggccggccggggtacctcaccctgccgatcttttccgtggtcgcggcgatcgggtacgtctactacaccacggtgttcgtggccgtgccgcggtggctgggcctgtccacggctgcgggggtagccaacgccgccgcgttcacagcgctagcagctgcctgcctcgccacctacgccgtcgccgttcgcagggaccccgggcgggtgcccccgggtttcgtgcccgacgtcgaggacgccgagagcaccgtccacgagatcaagcgcaagggtggtgacttgagatattgccagaaatgttgccactataaacctccacgtgcacaccattgccgtgtttgcaagagatgtgttctgaaaatggaccatcattgcatttggattaataactgtgttggacatgagaactacaagattttcttggtctttgtattatatgctgtggttgcaagcttctatgcattgattctgatcgtagggagcgttttgcatagtgttcctaaagatgagcagccaggcagcgattcttctcgaacatccattattatctgtggggtcattctttctccattagcgttagcgctggcagtgctcttaggttggcatatttacctcatattacagaataaaactacaattgagtaccatgaaggagttagagcgatgtggttggcagaaaaaggtggagacctctatcatcatccatatgaccttggtgtctatgagaatcttatttcagttcttgggcctaacatattttgctggctctgccctgtattgaatactgttggaaatggccttcggtaccgtacatcctatgatattccggtatctacaccaccaaaaaaaatagcagcacattcacaataggtagtagttgctaatttgtgaaaggatttcccattaagctgctagaacgtgtttggtctgaacgattccgaaggcaggtcgtgtaactctgcaacatacaggagatgatgactaccacagcctctcgccaggtgtttgtcctgaatcgagacatgaactcttaaccttgttttttatttcattcttgacatacttgataatgtctcgcttgtaatctggagtaggctgttcttaccaaaaagaaaaaaaaactgcaattctgttgtaaagttagttcgtatgtttgggggccatgtaatgtagccaagggccatgaaaccgattttcccagagtatttgtgtacatttgtttaaaatgaaa

SEQ ID NO: 135832 - DNA, 1083 bp, Zea Mays
cagtcttccaagtgtgggaacagccatctccatctgtggtggtggtggccttacattacatgtcaagatgtgttgagcgccgccgacaggaacacttcttcgtcttttttttccccttccttacaagaacaacagcaaccgtgtgaaccagaagcacgccatggcagaggagaagaagaggcacaagcacaagcacaaggagaaggagaagcagccgggcggcggcacggagcaggcggcgcacttcaagccgtgcggcgacgtgaagggcatccggttcgggggccagttcatcgtgaagtcgttcacggtgcggcgggcgtcgcccctggagctgctgcggctgctgggcatcccgccgtcgtacctgagcgagtgccagagcctgccgttcccgtccaccaccgcctacatgcccacgggcttcaccatcctggcgcaccaggcgtggcacacgctgacgctgggcctgggcaccaacaagtccaaggcggcgctcttcgtgttcgagtccgaggccatgaaggcggccgtggaccgcctgtggcccgccgtcaccccgctcggggacgtcaacaggaggctcatccgcggcctcacgggcagcgagatggcgcgcttcaagttccgcaagggctgcctcaccatctacgtctacgccgtgcgccggctcggcgccgccgggttcatgcgcaccgacgacctcaggcgggtgctgcagtccgtcgtcgagctcaaggacttcctggaccacaccgccatgctcgccatcccgagccagaagagcatcaccctgcagtcccggacagcggtggctcactgagaggagatcgtcgtcaactcctttcatagcctcgagtctgatctgattctgatgacgccgcaagaacctcgatcggttcagcatcgcagaacagcctgaacaggtacggtcgtcggtttgtagctgtaatcttcagagggcctatctcattttttcccccatccctccctctctctcggttggattcgtttgttcagtgtcggtggtgcaagtgttcgcctcctctgctgggagagcagatgtatagatctgttgagcaa

SEQ ID NO: 135833 - DNA, 1293 bp, Zea Mays
atgcggagacagatccctcccgtctcctgcctcgtacccatcgcggtggcgttcgcgctgctcgctgcggcatctgcagcttcgccggcgccggtcaacgtcacggccgtgctctcggcgttcccggacctcaacgacttcacgcggctgctggcgtccagccccgtgctggcggagctcgcagggcggtcgtcgctgacgcttctcgccgtgccgaacggcaacctcccgcagtcgccgtcggcgttcgcggccgcgtcgggcgccgacctcgccgacgttctccgctaccacgtcctcctggagtacctcgcccccgccgacctccgccgcttgcccgcctccgggaagctcgtgaccacgctgttccagaccaccggccgcgcccccgcggacctcggcgccgtgaacgtcaccgcagcgggcgcctccctcgccgtggtccgctcgccggcaccgttcccgggctcgaacgccaccgtcctcggcgccattaccgcggtgccgtacaacctgagcgtgctggcggtgaacggcctcatcgtcccgtccgggttcgacctcgcggcgtccgagtcccgcccgcccgcggccgtcaacatcacccgcgtcctcgccgacgcgcgcgccttcaacgtggcggcgtccatgctcgaggcctcgggcgtcgcggccgagttcgaggacgacgagcgcggggcggggatcacggtgttcgcccccaccgacgacgccttcgcgggcctcccggcgggcgaccgcctccagtccctccccgccgaccgcaaggccgtggtgctccgcttccacgtgctccactcctactacccgctgggatcgctcgagtcgatcgtgaaccccgtccagcccacactggccaccgagttcagcaatgccggccgcttcaccctcaatatcacccgcgccaacggttcggtcgccatcgacaccggcgtcgtgcaggcgaccatcacgcggaccgtcttcgaccagaatcccgtcgccgtgttcgccgtctccaaggtcctcctgcccaaggagatgttcacccgcacaggcggcggcggcgacgacgactcctccatcgtggtcgccgccgccgccgcgtcctcccccccgccagccgcaacagccccggaggcctccgagagcgcgcagacgccgccgacaaagctctcctccccgcctgcactccgcggcggcgagcacgactacgacacggcgtcggcgcaagggatcggaatcggatggtggtgtatagcattggtgtatctacttccacatctcgtgtga

SEQ ID NO: 135834 - DNA, 300 bp, Zea Mays
tcgtcggtagccgtcggttcacttctccaggaaagggttcgtactcatggcgccgccgcagccaaagtcgggccttttcgttggcatcaacaagggtcatgtcgtcaccaagcgcgagctgcctccccgcccgtgccaccgcaaggggaaatcaacgaagagggtgtctatggtcaggggagcttctgaaggttggcaaggacaagcgtgccctgaagcttgctaagagaaagcttggaactcacaagagggcaaagaagaagagagaggagatggcgggcgtcctcaggaagatgaggt

SEQ ID NO: 135835 - DNA, 591 bp, Zea Mays
tcgtcggtagccgtcggttcacttctccaggaaagggttcgtactcatggcgccgccgcagccaaagtcgggccttttcgttggcatcaacaagggtcatgtcgtcaccaagcgcgagctgcctccccgcccgtgccaccgcaaggggaaatcaacgaagagggtgtctatggtcaggggcctgatcagagaggttgctgggtttgctccttatgagaagcgtatcactgagcttctgaaggttggcaaggacaagcgtgccctgaagcttgctaagagaaagcttggaactcacaagagggcaaagaagaagagagaggagatggcgggcgtcctcaggaagatgaggtcggctggtacgcacactgacaaaaagaaatagagagcatttcaagttcatggagctggctgccagagattatgttccagtgtctgattttccatacatgtagaacctaatagacatgtcaaagtattatgtatcgaaccagctcatgggattttgctccttccaatgcatccagggtttatgtatcgaaccaatttatgggatcttgctcttattctaatgcatccatggtttgtgaatct

SEQ ID NO: 135836 - DNA, 596 bp, Zea Mays
tcgtcggtagccgtcggttcacttctccaggtaaggaaagggttcgtactcatggcgccgccgcagccaaagtcgggccttttcgttggcatcaacaagggtcatgtcgtcaccaagcgcgagctgcctccccgcccgtgccaccgcaaggggaaatcaacgaagagggtgtctatggtcaggggcctgatcagagaggttgctgggtttgctccttatgagaagcgtatcactgagcttctgaaggttggcaaggacaagcgtgccctgaagcttgctaagagaaagcttggaactcacaagagggcaaagaagaagagagaggagatggcgggcgtcctcaggaagatgaggtcggctggtacgcacactgacaaaaagaaatagagagcatttcaagttcatggagctggctgccagagattatgttccagtgtctgattttccatacatgtagaacctaatagacatgtcaaagtattatgtatcgaaccagctcatgggattttgctccttccaatgcatccagggtttatgtatcgaaccaatttatgggatcttgctcttattctaatgcatccatggtttgtgaatct

SEQ ID NO: 135837 - DNA, 697 bp, Zea Mays
gacgatcccccagtcccctcccctcacggctgcatgcccgcatccggattccggtccatccggcagccagacgctgccgccgtaaattccccttccgcgtctgtctggccggtggccgctgtggttttgtaggctagtgcgtgccgtcctcggacctctcctctcgtcctccaccaccatgactgaggcccagtctccactatccgccaccatggcgaaggaggcccagtcgtcgccgtccgccaccgtagcgcaggcgacggctctgccgcagctcgtattattcaactccttgacgaagagggaggagcccttccagccccgggtggaggggaaggtagggatgtacgtctgtggcgtcactccctacgactttagccacatcggccacgcgcgtgcctacgtcgccttcgacgtcctctacaggtacctgaaattcttggggtatgaagttgaatatgtccgtaatttcacggatatcgacgacaagattattaagcgtgcaaatgaacgcggtgaaacagttacaagtttgagtagccggtttatcaatgaatttcttcttgatatgactgagctccagtgtttacctcctacctgtgagccacgtgtaacagagcacattgagcatattatagagttgataaccaagcttttgtcaggggatgagcttagttatggccatcaggggctatga

SEQ ID NO: 135838 - DNA, 1036 bp, Zea Mays
gacgatcccccagtcccctcccctcacggctgcatgcccgcatccggattccggtccatccggcagccagacgctgccgccgtaaattccccttccgcgtctgtctggccggtggccgctgtggttttgtaggctagtgcgtgccgtcctcggacctctcctctcgtcctccaccaccatgactgaggcccagtctccactatccgccaccatggcgaaggaggcccagtcgtcgccgtccgccaccgtagcgcaggcgacggctctgccgcagctcgtattattcaactccttgacgaagagggaggagcccttccagccccgggtggaggggaaggtagggatgtacgtctgtggcgtcactccctacgactttagccacatcggccacgcgcgtgcctacgtcgccttcgacgtcctctacaggtacctgaaattcttggggtatgaagttgaatatgtccgtaatttcacggatatcgacgacaagattattaagcgtgcaaatgaacgcggtgaaacagttacaagtttgagtagccggtttatcaatgaatttcttcttgatatgactgagctccagtgtttacctcctacctgtgagccacgtgtaacagagcacattgagcatattatagagttgataaccaaggtacagtattgctgcgagctaaaaaaggggcagaccctatgccggaggctttcacatgagtgaggtatagggaagggataaactgaggtaagtcttccctcacaattgcagagaggcttcttcgaacccgcaacatggtgggatagctctcaccactgcaccagacctgcccttagtattgttgcgaactaactgatgaaaatatatgttagttattgctttcatgatactttgcagcttttgtcaggggatgagcttagttatggccatcaggggctatgacccacccttgaaatttgcattcaacaatagttttctgtctaatagccagttgcggttgaagtcctttagtaattttcctggtgccccctgtctttgattgga

SEQ ID NO: 135839 - DNA, 1885 bp, Zea Mays
gacgatcccccagtcccctcccctcacggctgcatgcccgcatccggattccggtccatccggcagccagacgctgccgccgtaaattccccttccgcgtctgtctggccggtggccgctgtggttttgtaggctagtgcgtgccgtcctcggacctctcctctcgtcctccaccaccatgactgaggcccagtctccactatccgccaccatggcgaaggaggcccagtcgtcgccgtccgccaccgtagcgcaggcgacggctctgccgcagctcgtattattcaactccttgacgaagagggaggagcccttccagccccgggtggaggggaaggtagggatgtacgtctgtggcgtcactccctacgactttagccacatcggccacgcgcgtgcctacgtcgccttcgacgtcctctacaggtacctgaaattcttggggtatgaagttgaatatgtccgtaatttcacggatatcgacgacaagattattaagcgtgcaaatgaacgcggtgaaacagttacaagtttgagtagccggtttatcaatgaatttcttcttgatatgactgagctccagtgtttacctcctacctgtgagccacgtgtaacagagcacattgagcatattatagagttgataaccaagataatggagaatgacaaagcctatgctatggaaggagatgtttacttttcagtcgaaagttttcctgaatatctcagtttatctggaagaaaattcgatcaaaatcaggcaggggcacgggttgcttttgatacacgaaagcgtaatcctgcagactttgcactctggaaggctgcaaaggagggcgaacctttttgggatagcccttggggccgtggaagaccgggatggcatattgaatgcagcgcaatgagtgctcactatttaggacatctattcgatattcatggtggggggaaagatttgatttttcctcatcatgagaatgagcttgcacaaagccgagctgcttatcctgagagtgaggtgaagtgctggatgcataatggctttgttaacaaggatgataaaaaaatggcaaaatcagataataactttttcacgattagagatctttctcttgaggtcataacagttgtttttgtccagatcactgctctttaccatccattggctttaagatttttcttgatgcgcactcattatagatcagatgtgaaccattctgatcaagcacttgagattgcatctgatcgtgtctattacatttttcagactctatatgactgcgaggaagtattagctacatatcgtgaagagggtatttctctctcagtgccgttcgaggagcaaaatctgattgataagcaccattcagaattcttgaaatatatgtcgaatgatcttaaaaccacagatgttctggatcgttgcttcatggagctgctgaaggccataaacagcagtttgaatgatttgaagaaactgcaacagaaaatagaacagcaaaagaagaaacagcaacagcagaagaagcagcaacagaagcaacagcaattgcaaaaacagccagaacattatattcaagctctgattgcactggaaatagaacttaaaaataaactgtctatacttggtctgatgccatcttcatctttggcagaggtactgaagcaattgaaggacaaagcactaaagagagcggggctgactgaagaaaaattgcaagagcagattgagcagagaaacgttgcaaggaagaataaacagtttgagatatctgatggaatcaggaaaaaccttgctaccaagggcatcgccctgatggatgaaccttctggtacagtgtggagaccatgcgaaccagaggggccgcacccactcaacaaatga

SEQ ID NO: 135840 - DNA, 894 bp, Zea Mays
ttccaaagctgctctcgcccccataaataaagcagctcctccgggggcggcgaactactcctcgtcgccaaaaccctagccctgcttctttgccatggcgagcagcgctagccaggcgagcctcctgctccagaagcagctcaaggatcttgcgaagaaccccgtggatgggttctccgccgggcttgtagacgacagcaacatcttcgagtggcaggtcaccatcatcggaccgcctgacaccctatatgatggaggctacttcaatgcaataatgaccttcccccagaactatcccaacagcccgccatcagtaagatttacttctgagatgtggcatccgaatgtttatcctgatggacgtgtttgcatttctattcttcatccacctggtgaagatcccaatggttatgagcttgcaagcgaacgatggacaccagtgcacacggttgaaagtatagttctgagcatcatttcgatgctctctagtccaaatgacgagtctccagcgaatatcgaagctgccaaggattggagagaaaagcgggatgagttcaagaaaaaggtaaggcaatgtgtccgcaaatctcaggaaatgctctgaaggagaaacatatggggagttgaacgagtgctgcaacttcacaaccagttacctagccagcattcttttgcttttcccctgtatattttccattcagtgtcattcgtatggtggtgttgggtctctttagacaaactggggactgttgcttatcctaaaaattcgattgtattgtgtggcatgaaatgatcgatgtcaaagaatattttgaacatgctgccacctaattatacttttcatatgaacatcataaagaagtgatgtttgcattatgtgttctgccctcggaa

SEQ ID NO: 135841 - DNA, 1590 bp, Zea Mays
acaacatctcagacctccagtcttcgagtcctcgttgtgcctctcttgatctcctcgcgtccatggctcctgtgcgaggtgccaagaagaggaagcggccggagaagcccgccccggcgcctactccagggttgccgctgccgccgctgccggacggtagcgattggtggggcgtcttctaccgaagggttgcaggacattccccttttccaagagaacaccagaacatggagtctgtcctgaagatgtcaagaagaaccttcgactacatctgctcacttgttaagaaggacctgacaacaaagacatacggtttcagaaacttcagaacataggaatgtggtttggcatgaaccactctgccatctcgaacatcacatggcggttcatcgagtccgtggaggagcgtgccatctgccacctgaaatggccgagccctgaggagatggcgaccatcaagacaaggtttgacaaggtttacgggctccctaactgctgcggcgccattgacaccacacacatcctcatgtgttcctcggctcagcccaacagcaaggtctggctggacaatgagaacaaaaacagcatggtgctgcaggccgttgtggatgcagacttgcggttcagagacgtcgtcagtggctggcctgggagcatggacgacacgtgcatccttcgcacttcaggcctgtacaggttgtgtgagaagggcctcaggcttggggggcagatggagcttcccggaggttccgcggttagggagtacctagtcggagatgcaagctacccgctacttccctggctcatgaccccgtaccgggaacatggcctccaggcggccaaggtggaattcaacaagcggcacacggccgcggcggcggtggtgcagaccgcattggcgacgctcaaagggaggtggcgtgtcattcagggagagctgtggaggcctgacaaacaccggctgccacggatcatctttgtctgctgcttgataaccaacatcatcatcgacatggaagggactccaagcagagacgaactggtttcaggcaaccatgaccttggctacaagcagcagttcagtgacgccgcagatgacaatgcaatcaagcagagagacgacctgtctcgacatgtcgacaatgcaatcaagcggagagacgatctgtctcaccatgtcaccgccggcgagtaaacactcaccgtcaccctttgctttttgcacccattaatataaaaaacatggatacaaaattgtaaggtgaatttttggcagattccaataatgttttggtttcagggagacattaccatcttaaacaaagtgtagccctaatttgttaagttacaacatgccatcaagcatgctattttaccgtttacaacaggaagagattaaacaaaacgaccgataacgaaaccagtcaaaattagaagaaaaaaacatgctacacaactttgaaggcttacaaatgaaaattttggacacaacatgccattctacacattcaaagatttcagaccttttttttttttggtccactgctaaccaaaaaaaaaaactgtgttatccagacacagtaatagata

SEQ ID NO: 135842 - DNA, 404 bp, Zea Mays
ataacaagtttacaatataataagttcacaaggatcacaaatttataatataaaaagtttacaaagattacaagttcgcagtataacaagtttataaagatcacaagttcacagacttaaagttcacaattcacaatatccactcgatctagctgacatgtcatacttacttatgaaatattttttcctcacataaaaagttttttcacaacctcacaggaaaacctaaaacctagtgtgtgaaaaagacagactatcggctctctatcattatatattactaatacataacatgtgtatagaaaatggtggattcgttcgagagaccaaatcgttaatctcaactgccttccaacagcatctatcccaaaaaaatcttaaggcatccaaaaatacaaaaataa

SEQ ID NO: 135843 - DNA, 1725 bp, Zea Mays
cacttcccactcatctcgtcctcatcctccgctccccacccacccccacccccacccccaccccacagatctcgccgcggccaccgcttcctctatggccgcgccagcccgccgccttctcctgctcgtcgtcaccgtagctggagccctggcgctccccgtggcggcccagatcaaggaggagtccttcaaggaggacccgcgctcgtccatcatgttcgaaaaattcggcttctccgagtccggcgcggtgcggatcatcgtctcgggcgcctccgtctcctcccccgtcgcgcgggcggaccccaggcagctcgggttcttcctcctctccgacgagtccctcctccacgccatcgacgaggcgcaggaggggcccacgcgggagaagcgcgccgcggcgaccaatggcggcggggaggaccccgacggcggctccaccgggtgcgtgctcaacagcccctacgtcaagaagctcttcaccttcaagaacatgaagggcggccactacaacatgtccttcccggtcacccgccccgacgagtacaccctcttcttcgccaactgcgccccggaggcgctcgtctccatggccgtccgcaccgagatgtacaacgtcaacgccgacggctccaaggactacctccccgtcggccaggcgcccctgcccgccatctacggtttcttcgccttctgctacgccgcgttcctggccgcctgggggtacctcaccctctcccgcgcccgcgtctccgcgcaccagatccaccacctcatgtccggcctcctcgtcgcgcgcctgctctactgcctctccgcggccgaggaccagcactacatccgcgtcacggggacgccgcacggctgggatgtggccttctacctcttccagctcgtgaaaggtgtcatcctcttcgcggtgatcgcgctggtcggcacggggtggtcattcttgaagccggtgctgcaggaccgggagaagaaggtgctcatggccgtgatcccgctccaggtcaccgcgaacatcgccgccgcggtcattggggagaccgggcccttcatgcaggggtgggtgacatggaaccagatcttgctcttcgtggatgtcgtgtgctgctgcgcggtgctcttcccggtcgtgtggtctatccggtcgctcagggagacgtccaagaccgacggcaaggcggcacggaacctctccaagctcaccctgttcaggcagttctacgtcgtggtgatcgggtacctgtacttcactaggatcgtcgtgtatgcgctcaaggcagttgccagctacaagtaccggtgggtgagcatcttggcagaagagatggccaccctggcgttctatctgttcatgttctacacgttcaggccggccgagaagagccactacttttctctcgatgacgatgaagaagaggccgcagagatggtgctccgagaagaggaattcgagctatgaaagagatgcagcgactcacaagagtctccatgccacgtcactccctgtgatcttgatcatacctcaaatgcccggacacagctcatagtgttgtatgtaccgaagggatgtgagatcattttgtccgtcttctagaattcagattttagtattttactgatgaaacacagattacttaacttataccatgttcaagaagttttcttgcttgcaatgcaatcagagcagcaactcctgctttggcttagtttgaaata

SEQ ID NO: 135844 - DNA, 4309 bp, Zea Mays
atgagctcggggaccgtcgcggcctcggaccctgggggtggcgagacgaagctggtggcgggagatgacgtcacaatatcggaagctgcgggcgatatgcctgcgttcgccgccgatttgaaagtggaggagaaggctacgttgacgatggatgtggctcatgaaaggggagatatggcggtgagcgacccactctacgcgactgagtcggctgggatggttggtaccgaagggcacggagatgagcccgtggaggacgtggatgcggtgaacggagaggacggtggcgaggaggggacgcaagaagcaggagctggtggtctgctgactgagacggagaggaagccggttctagtggtagatgtgcctgctgctgctggttctgccgctcctgaacatgctgaagccggagagcagtttcctgacagtggaaatagcccagacagcaacttagaggctgctagtctggggaatgttgatcagggtgctagataccgcctcccacctcttgataaaggcaggtttcaagttgctgatcttgtctggggtaaagtgaaaagtcatccttggtggcctggtgaaatttttgatccaacagatgcatctgaattggcgctgaagcatcggaaaaagggcagccacttggtagcttattttggtgacagtacttttgcatggtgcgatgaatcccagttgaagccttttgtaacaaattattcacaaatggagaagcagagcagttcagatggctttgttgggtcagttaataatgcacttgaagaactgtcaaggcgggtactgtcaggtttgagctgctcttgtttggcagaagagcttgctgataatggtatgtcatatacggttgataatgctgggctcaaggatggagttacttgttctgcagttaatcggcctgagatcttgaactgtttcagtccagaaaaccttcttaattatattaaggagttagctctatttcctggccagggaggtgatctattggagttagtgatagcgtgttctcaacttacatctttctatcgatctaagggatgtcctgaacttgcatcatttcaaactagtgatgcgtgggttgaggatgatctggatggtatagacactttgtccacccagaatgtaatggtggaggaacctgtgattaacgaagtgcagcctactcaagataagcccaaaaggggcagggggagacctcggaaacaaaaggctggtcatgaccaggtggtgatggagaaaaggagcacatctaatcaggtcaatgatactagctacaatgagaagaaaagaaacctcaaatcatttgaagattcagagaagtcatcagctccaactggtggtggttctttcaagattggtgagtgtattcggcgagctgcaagccagctgacaggatcttcatctattatgaaggctcagaatgaaccaacagtctataataacgctgctgaaggagagaatggggaatttgatgtctctagtgatgatgctggtgatgaacttactgtggagaaacgagcaaaaaggaggcgtctgcacataaatcacgctgcagatcccagggaattactgtcacaactatgcttggttgcaacagagccaatgaatggatatagtttctcagcaatgataatcggttacttcaacgattacagaaactatattgtttctactactactgaagcaaacattgttgataaaggtacatctagaagagggaggaagagaaaagaagttataccttctcctgaggtagagacaacggatcatatgcaggactcgtattggtccggattgagcttgtataatcacccagttcatgacctaaaaagagagagtccgactacaaggccaagacggaaacggagatcctcaagacatgcatatatacctttgtcggaacttggggagccggttcctaaaaaacagatacaagtgatggaaagatctatcatccatgtcgatgagaagatggttgatgagttgaagcccactgcacttgttttgacctttggcaggtcagcgtctattccttcagaactggatcttgttaagatgttcagtctctatggtccactgaaagaaagggggacaaaagtacatagggaaacaaatactgttaaggttgtcttcaagaaacgtgtcgatgctgaaagggcttttagtgctgcaggcaagtatagcacttttggaccttcgcttcgaagttaccgtcttgtcagtatgccactttctccagagacacaatcagcaaataatcctgaaaatcatggcttggagattccaggtttgaatatgtccgaagctcctaaggattccatggaagttgacctggtgcagaaaacagataaagtaaaagttacaggagaactgtcatctgaagaagttgagactgtaaggcaaacatgtctagtggaagctgcagacagtacatttgtcagtgaagttgacaggcttgagaaagcaggaaatattgatgctgagctaattgtccatgtgaatcagattggggaaggtgcagaagctgcatctgtatctgaagagtcatctcagcaagtgggtgacattgagcaagcttacactcaaaaggcagcgtcagtcagtgatctacccacagagatagaaaccttacattctgatgctataataaaagagttgcctcagaaggctccagataatatgcaaactgatatagccacggccccaaaacagagtcacaatccaggagataatgctgtatttgaagctgtcactgaagtgccaagtactgcacaagatcatagtgaggatgatgttggggatgaagttccagaagagcacactgtatttcctgtgttacaaagtcaaacccctggtgagaagctagtggggcaatctgaaactgaacaaaaagtgggacctgaagatccaaagtcacaagctgaaaatttgactgttgaacctgtcgtacaaggtgcagtcgagcaagtagaaattgaactggaatccaaaactactgttgaagtgtcatgcgaacaaggctatagtattgagcagactgttaacatggaagctgtaattgaagcatcaggtggacaacttgaggtgggaagacgaatttcagaagatgaatctatggctgatgcaaatattgagcactctatggtcatggttgatgaaactgtggaggcaaaagtagtaccactcgaggagagtacagagaataatgctgctaccataggagtagttgaggagacagctgaaggtgaaactaaggaggaagcaccagacgagaaggggaaaatagaaaataatgaagatgctgacaaattagctggagagaccagggcaggtgaaattacagttgaggcaccagatgagaaaacagaaattaaagcagatgctgacacaccagctggtgagaccaaagaatgtgaaattacagtagaggcaccagatgagaaaatagcaaacaaaggtattgttgaaccaataatcagggagataactgaagatcaaactgcagctggagaaccagatgaagaagctacaacaactgaggaaacggtagaggatgttaaggtgctagatgataagtctacagcagatgggaaacctgtagagaatgccacagtcgcgacaaatgaggattcaacaacagttgagaatactctgaaggatgcaatggttgcgccaccaggtacaaataccaccaacgccgaagaaactgctctgggtgccacagttaaagcactagatgaggatgctctagcagtggagaagactatagaggatacctcggttgaggcatcagatgtacaagcaggcaggtgcaagtgagtaaaccagcttatcgaaccttgcgttcctgtcagtttctgttgatatcgacgtagtttgctcaactgattctctcatctagaactttagatgatgtgttctgtatagaaaacctgaaactactttagcatcataaggccattaggtattgacaactagggcatctatatccttctcccccttttttgctctataaacttcacctagttgtattgggcgcgtacgtgttggtgttgtcataaacacaatttcctcctatatgtcagttcaatgctcaggtgatcagtgactgagtgaaagccttgaatcaatagggggaaggcatgttcattactacatttaacggttaggcttgcgagtctttagattatctacttggatcaaatgattcttgtatcatttgccatttgtaaccaactgtgttctggaatccttttatcatattacgtagaatatttagataattctatcttct

SEQ ID NO: 135845 - DNA, 276 bp, Zea Mays
atggcggagacagcagcgacgacgtccttgaggatcttctccttgatctggcccctccgcggcggcggcggcaggcccgccctgctgccgcctctggtggcggcgcgcccagctactgccggcatggccggcgccggaacctggatggtctcggtggccatcagcgaggcagctggggactgggtggtggacgacaagaggaggagaggggacactgttggatttgattgcacaggacaggatcacaggagccggcactccagctgcctaaaatag

SEQ ID NO: 135846 - DNA, 776 bp, Zea Mays
cggcaagcaagcaagcaagcacttggcctctcaaccaacggggcgcgcacacgcacactgccaacgaggcaccaagaaggcaggaagggatggagtactgctaccagtacaacagcgtcagcaacgcggagaaggagaagaggccgccgctgaggaggggcggcgtcaagctccagatcgtgaagaccctcagcaacctcgtcgtggcgcccagcaacggcagcgactccaagcaagcggaccgcaacagcttcacaagggagcgaagctacaactgaaacgaactgtatcttcagtatttggatacagatgtcgaccttgtgtctgaagaactccgctttgggactcgagaggttttcttagcttgttggacttccttgtttgcttggtccactagtgatgaaatggaactgtatgataagttcgttcccgtctgtgttttgttttggaaaggaagcttctatggctcatacatagacaaggactaaacggtaagacgagtcttctaagtctaattagtccttacctagtttagtgattaactaagtttgtaggaactatgtgtggcgcaatatgtagcctacgcaatcaaagtaaaaaagttatagctctcgcctgatgtcgtacactatacgcaatcaaagtaaaaaagtggcattgtattcaaagacctcgccctagctacgatggcccagacccctagggcttcgagcttagccgggaatatttaggccttgttcggttaatcctgttactcatggattggatgagattgg

SEQ ID NO: 135847 - DNA, 2688 bp, Zea Mays
atggctcccagcctttcgcctcccagccccagccccagccccacccgccctgacgccatcaccctccgcagcccctcgccggaattcattccgaactcggcgaccaccccctcgaacccctccggtgcggcgctgggaatcgagccccgctaccctgcggcttctctggaaggacggtcaaagttccagcggtggagtaatgaaagtcccgtctcgtcctcttccggcggctcccagcgggcacctcgctcctttaaagaggccgtgctgcttaacgttggaagctcgtccgaggtggtgaaggaagcggactgtgggtgcacggcggacctgagtagggtcactgcgcgcccgtgtcaagaaggcgacggttggcaggtggtcgggaggaggcgcgcgcgccgtactgttcctcgtctttccccccctgtggatctccggggtagatgctttaattgcttctccccttcccactttgctgctgcttgtcggcggcctactcgctgctttgggtgcagggggcttggccaccgtgctcttgagtgccccatcaagtccgtggagaagaaggctgtgtggaaacctttgaagcagcagggtgtgcgagttccggtgtggcagcgcctttccgggatgcatggccccaggcaaccaggaagggcagccccggacatcatgcggaagggatcggtgtggcagcggatcactccgtcgcagccggcctgcggggtggagcctgtgccccccctgccaatggcgtcgggctccggactggttgctccaccggttcatggctccaggaggaagaggcgtagggccacgcgtcgaccggccttggggacggtctcacctgccttgcagcagatgtcctctgggtcggtttctgctgaagtccctgcccatctttcagctctggaacagagggttcctgctacacatgaaggcctgctggatgcttgcctgccggcgaggtccatgaggtcttcttgcgtcttggcgtttacgacggaaatggcgcgtgaagaagcagcattgcgtaaagccctgttcgtctcggtggtgggcaccaggcctgaagttcagggcgttgaggtgctggaagaagttgctctcagtttcggcatcgatgtggctgctatggcgattcatcaggccatgccggaagacttcctcctgtttctccccgatgaggacacagtttcgagggtccacgggggaggcaggcttttcagaggtccgcgcttcaatctacatttcaagagatggacgagatgtgctcatgcgtcggcagcaaacctcccggccctggtggacgtaaaaatccggggtataccgcctcatgcttgggcacgctctacggcggaacatctgctgcatggctcatgccttatttctgaactgcacccggcgacggtggagaagtctgacctctcgtccttcatgttaagggcatggtgcttcaacccggctcttctccatcgtgacatggatctcctcatcgtggaacctgggccagtagcaactgagatacgttgtctgtcatacaaaatcagcttggaggccttcccggtggacttttcggcggcggggggggaccctctccctcccccatcgacggacggcaaccctcccggcggcgacgatggccagcctccaggatccccgtcgcaactttcgaggcgcccggttcaccttcgactgggcccgcagcgttcggtccgtcaagggaggagagccgcggcgcctggggcaggcgaaccgatgctgtgtgcttcgggtgtcgggacggtggagctgtcttcggatccacagttattgctggctggtgcggcagccaggggtggaggattcgaggagtgcatgggggagattaacaggacagcaaatctctgggggacatcgccgtccacgcgtgttgatggggtccgggcggaggttgttgggccactggagaggcccgttcccaccttgccccgaccttttttgtgcggtgggcctctggacttggtgcggccgggaacgcctctgcagagaggtgcatcttgtccgcgtgaggggcctgttcaggtttcgtccctgcttatgtgtgttgggccactggagcagaggaatgcatcaagtccgcatgaagggcctcatcaggctgcagggtcgctggagctggtccatggtcaggctcccccactgaagtattattctagaaggcggatcaggagccagcatcaggtgcaagatgagcttgatcctacatccgatcacagcaacaactctcaagctttggttcagcaaggtatcacaccggtgcaatcgtttgtggctagtgttacaagaccaatctcttgcattcttccccatccgcccccacagaagagaaagtctgcgcagctgcctccggattttgttcctcgtcgtagcagccgcctggcaagcaagggttttaaatccagcaaagatgcgcctatcagacatatccagcaggatctcattagaaggttgggtattgctagtggaaatgaggctgttaccactgaagctcttgataagtatggacgtttcttctccaatccactatcggagtcccacatcaaggctctggtagctttatttggttggactgttcctgaaaacgtggagaacttggagaccattcagctcctcgcaggagatgccccgacggattctgtttag

SEQ ID NO: 135848 - DNA, 1928 bp, Zea Mays
accgtgtgccattcgtgacagcgacagactttcgtgtttgtgtgtctcttcggctcgcaatcccattggtcgcttcatgccgctcacgaactcccctccgagcccggccgtccaattatgatccacttggttaactagcataattaatcgcagatgaagcagcagttcatgaaggcaggaagcagctaaatcacccatataaatggtcgcgcgcgctagcatagcatagtagcgatagccaccaccgatcgaagcatgatggcggcgtcgggcgcgtacgcggcgcaactcccggcggtgccggagtggctgaacaagggcgacaacgcgtggcagctgacggcggcgacgctggtgggcatccagtcgatgccggggctggtggtgctgtacggcagcatcgtgaagaagaagtgggcggtgaactcggcgttcatggcgctgtacgcctacgcgtcgtcgctgctggtgtgggtgctggcggggttccgcatggcgttcggggagcggctgctcccgttctggggcaaggccggggtggcgctctcccagggctacctggtccggcgcgcctcgctctcggcgaccgcgcacggggccacgccccgcaccgagcccctgtacccggaggcgacgctggtgctgttccagttcgagttcgccgccatcacgctggtgctcctggccggctccgtgcttggccgcatgaacatcaaggcctggatggccttcaccccgctctggctcctcttctcctacaccgtcggcgccttcagcatctggggcggcggcttcctctaccactggggcgtcatcgactactccggcggatacgtcatccacctctcctccggcatcgccggcttcaccgccgcatactgggtgggcccgaggctgaagagcgaccgggagcgcttctccccgaacaacatcctgctgatgatcgcgggcggcgggctgctgtggatgggctgggccgggttcaacggcggcgcgccctacgccgccaacatcgcggcgtccgtggccgtgctcaacaccaacgtctccgccgccaccagcctcctcacctggacctgcctcgacgtcatcttcttcggcaagccgtccgtgatcggcgccgtgcagggcatgatgacggggctcgtctgcatcacccccggagcagggctggtgcagacctgggcggcggtgatcatgggcgtgttcgcgggcagcgtgccgtggttcaccatgatgatcctgcacaagaaggtggcgctgctgacgagggtggacgacacgctgggcgtcttccacacgcacgccgtcgcgggcctgctgggcggcgtcctcacggggctgctggccacgccggagctgctggagatcgagtcccccgtgccgggcctccgcggcgcgttctacggcggagggatccgccaggtcggcaagcagctggcgggggccgccttcgtggtggcgtggaacgtcgtggtcacgtcgctcatcctgctggccatcggcctgctggtgcccctgcggatgcccgaggaccagctcatgatcggcgacgacgccgcgcacggggaggaggcctacgcgctctggggcgacggggagaagttcgatgccaccaggcacgacgcggtcagggtcgccggcgtcatggatagagaagggtccgcggagcagcggctatcagggggcgtcaccattcagctgtaggcgcacgcccgacggtccataagacacgactttttagcggacatttttttttcatgggagaagagcagtgttttaggctttttattattagcatgaaaggttgtccatgtatcatatttggcccagagcacgtagtctctgctagtttataaagaaattaggtcatgtatttttcctcttaatctagtctacccgcaacatgtactaacaccgttccgtta

SEQ ID NO: 135849 - DNA, 870 bp, Zea Mays
tacagtaacgagcgttgttataaaccagttggtgtaggaagattagtggcaccacgtagtagtagcggtcaacggtgtaccactgggaaattgttctctctgggatctgtaattttttcccccttcctgtgcgcgcatgtcatgtgcagggctggtgcagacctgggcggcggtgatcatgggcgtgttcgcgggcagcgtgccgtggttcaccatgatgatcctgcacaagaaggtggcgctgctgacgagggtggacgacacgctgggcgtcttccacacgcacgccgtcgcgggcctgctgggcggcgtcctcacggggctgctggccacgccggagctgctggagatcgagtcccccgtgccgggcctccgcggcgcgttctacggcggagggatccgccaggtcggcaagcagctggcgggggccgccttcgtggtggcgtggaacgtcgtggtcacgtcgctcatcctgctggccatcggcctgctggtgcccctgcggatgcccgaggaccagctcatgatcggcgacgacgccgcgcacggggaggaggcctacgcgctctggggcgacggggagaagttcgatgccaccaggcacgacgcggtcagggtcgccggcgtcatggatagagaagggtccgcggagcagcggctatcagggggcgtcaccattcagctgtaggcgcacgcccgacggtccataagacacgactttttagcggacatttttttttcatgggagaagagcagtgttttaggctttttattattagcatgaaaggttgtccatgtatcatatttggcccagagcacgtagtctctgctagtttataaagaaattaggtcatgtatttttcctcttaa

SEQ ID NO: 135850 - DNA, 99 bp, Zea Mays
gcaggggacgaccaggttggggttcgcgtcgttcgccatggaggagtccggtcaggcgacaggcaaatcagcaacgaattgtgcttgtatcaggaataa

SEQ ID NO: 135851 - DNA, 732 bp, Zea Mays
atgttccttcaccagcagaagcagacttgggagcagctcagccgggagctcgaggccaaggaagatagggtcgctgcgatcgtcaaggaggcctttcgcaacctcaccaccagggcgaaggaagaccaggcgcgggaccaaggctgccgagaaggcagtcgccgcagccctggctcaagcggagggcatttagggttcttggttttgttcttgcttctcttcttggatccagagtatctggagcggcagccgatggtccagccacacaaagccattgccagtgccagccccatgtctcacgtccctgtcgtgcccaggacacaccggcacgacgacaagaaagggtggcagcaggaggaggagcagcagcgaaaggctgtcgttgtcggaaacgccggtggcttcgtcagcccggctggctcgtcccgctacttgctgaccggccgcttcgccgccaccgaggagatccaggaggtggagtctgccccggccgtcgacagcaagcccaagcgggaggaagcaggtgaagctgctgatgcgaagagcgcgcaggcgcaagagcaggtggttgtgctcaaggtatccatgcactgcaaagcatgcgccaggaaagtcaagaagcacctctccaagatggaaggtgtaacgtcgttcaacatcgacttctgtttaagggaggatgataattttacattttactgcaagttgccaaaactacactcatttttgtag

SEQ ID NO: 135852 - DNA, 441 bp, Zea Mays
cttgtagttgttgaagtccttgtagatatcatccaggtgcgcgatgtagggccggagagcagtgcagctcttgaacactgcacacaccatcgatccaatacaccatatcaacgcaacggaactggagtcggtgaccaatccaaccataatctcatatgcatccatgcacaggcgggcttactgagggaagtgaagtccttgaaggagagggacttgaggttggggttgtgctcaacggagttgtcctcgtagaaccagtgcgcctgctccagcaggaacaggatccgctcgaacgactccagctcctccttgggcacattcagaaggaaccggctgcagagatcgtcaagcagctcttgcggcggcagctgccccctcgatgaagaccggttcagtcccccgccacccgccatcgtcatccaccggccagcgcgccttcca

SEQ ID NO: 135853 - DNA, 135 bp, Zea Mays
gtgttgtccctcaaaattggaggggcgagagaggacgccaggggaagtccctgtcctaactgtcccgcaaccaaacgcacctgccaatgtaccccgattattttttgtattttagtcatttttccaaaaaaaaaa

SEQ ID NO: 135854 - DNA, 2469 bp, Zea Mays
ggcgctttgttcccgcaacaacaaaacctcgcgcacggaccgcgtgcttcccccttctcctcgcctctctctccaccggtccacccgcaccgttcccaattccccaccctcgccgccgccgccgccgcccccgcagccagccaggcagccaccaacttcacggcataacgaagtcatagccaccgacagcggccaccgcgaggaccggtgcccccctatgtgccgaacttcagctgcttccctcacctgccgcctgctccccgcgccgggccctggcatggtggggtggagctaggaaggcgtgagcttcgcaccgcgccggcgaaggaagaggtgtgggagcgctcgaaaactaaggtgggcgcctcgcccgccggatggccgctgatgacgcggcgcggagcagcagacggatggatctgaacctctacctcggcctcccccgcgccccgcgcgcccgccgccccgatctcggcttcgacctcgcgctcggcaccccgatgctctcttcatcgtctccctcgtcctcggctgcctccgcggacgcgccgccgctggagacggatccgctccacccgccctactcgccgtcccgtgccgacctgatgcgcccgccgaccccggcgcacgagccctacaacccgttcgcgcccgaggcgcacccgccctacgtgcctccgccaccactgccggttgcaggggctttacctgtgctcgctgatgagcttgagtttggtttttctgacgcgcaccttggtctggtcgagcgtttagaccggccttcgtcatcgacggcatcctcttctttccgcccggatcttgccgagcgctaccgccacttgatgtccttgggcgggtcacggttcttccggccaagacggttccggtccgaccttccacctctcagctcagagctccctagcctggagaatgatgctgcagtgcaaccacctgaaccggaagagcctgtccatgataccgtggaggagaacaaggtggttgcccatggtgcagttgtgggtgtctcagaggatgatggaacagagcatggtaagagtgccccaatgttcgagtgtaatatctgttttgaaatggctgatgaaccagtggttacctcgtgcggccatctcttctgctggccttgtttatatcagtggttgcatgtccactccagccacaaggagtgccctgtctgcaaaggagaggttactgaagggaacattactcctatctatgggagagggaattcaggttcggaaatggagaaaaaggttgcagaggatggaaaggcatctggccccaagattccaccaaggccacatgggaatcggctagagagcttcaggcagcagttccaccatttgcgacccatatctagaaggcttggtgaggcacatggttttttgtctacgtggaggcgcattcttgatcggcatttagcgaatagcatgagtagatttgaagggcctcctgaaccatctgtttcagaaactgctcagcatgcaagcagtcttggtcgaatgactactaggttgagagcaaggaggtggcaaagggaagcagaaaaccctacatccattgattcatctgcaccagatagcgggcagcctgtaaacaatacgttcgatctgccaaggcgctcttcaaatccatttccctcagaagggatggatttattgcgacacattgccttcactggtcttgaagactcagaaaggtttgcgactgctgtcagtgaacttaggcgaattgctagggcaagcccttatggggcatcaacttcatccaacccaccaaatcctgagccatttggtgaaactcaaattgccacggcactggctgcagatcaagcttctaattcgagcaccatggccgtgattcaggaagatgcagcttttactggaagtgctggagaacctagtaatgcagggtcttcaagacccctgagaagaagaggaagtgatgccttaggttctttggatgtggatggtggggacctacatcagaataagagaaggcggctgaactaagctgaagacaactaaaatgaagctagcaggttgcaccaatattctaatttgattggtgtgctctcctcagtttaacctttttacctctttggtaggtaatatctgttgtatgtggtatgaagaagttcctctcgtactagtttactagctagagcttagtcggttgccttaattctttcctacctgttcaatttatgtgatcgttatactgaggaaacctggcggtggtcatcatgaattttccttgatagtagattgtatgtccagatctgtattttccttcatagtaaattgtatgtgcagatctgtatttttcttcatagtaaattgtatgtgcaaatctgtactcggtgaaattggtctctggctgagaaataacaaatgtacttggtaaaaattgtatgtgcttctgattctactgatcattgacccaacagct

SEQ ID NO: 135855 - DNA, 273 bp, Zea Mays
atggcagatctcggtcatggttgggcagaacgcacgaacaagagcggggcggaggcgggggcgtggcggagcttgggcgttcggcctaaacagggagcaggggcgcacctcggcgcggcggcaccggccgctcgacggacgtctgaacgtggcgccggggaggagctcggcggtgctgtaatgcccccgtggtcaccggcgatcaccggcggcgtgtgctgtaatgcccccgtggtcaccagcgatcaccggcggcgtgaggtgagtaactga

SEQ ID NO: 135856 - DNA, 1199 bp, Zea Mays
gcgaagcgcccgcctctctcctccagctccaccaccaccagctcccacccccacccatcccttgcccgttcgtcctcctccctcccctctacggaacagaacagccctgcccaaccaaagaaccttgagagccttgaggtggggtagggtgtgtctgcctggcacagagagtagcagagcagtgcagagcaaagcagtcaggcaagcagcagcaatgccgtacacagctccgcggccgtcgccgcagcagcacagccgtgtactgagcggcggcggggcgaaggcggcgtcgcacggggcgtcgtgcgcggcggtgccggcggaggtggcgcggcaccacgagcacgcggcgcgcgcggggcagtgctgctcggcggtggtgcaggcgatcgcggcgcccgtgggggcggtgtggtcggtggtgcggcgcttcgaccgcccgcaggcgtacaagcacttcatccggagctgccgcctcgtgggcggcggcgacgtggccgtggggtcggtgcgcgaggtgcgggtcgtctcgggcctccccgccaccagcagccgcgagcggctcgagatcctggacgacgagcgccgcgtgctcagcttccgcgtcgtcggcggcgagcaccgcctcgccaactaccggtcggtcaccaccgtgcacgaggccggcgccggcgccggcaccggcaccgtcgtggtggagtcgtacgtggtggacgtgccacacggcaacaccgcggacgagacgcgcgtgttcgtcgacaccatcgtgcgctgcaacctccagtcgctggcgcgcaccgccgagcgcctcgcctagagagacgagaccagacgagacgagagccctgctggcggctggcgccggcgccttgtttcttgactccgtcgtgttcttttgccctccaaggggaggagatcagatcgatccgtgaactcgattgaggttctaggatagcctgtgtttcgttttctttttcttttctctgtttgcgacacagagtacaaatcattgtatgggtgttgcctgatatcattaacccttattcatcacatcacatacatgtacaacctttaaattagccgtctacctcccttccctcttggcataggtaaaccactacttgaggagaatgatattagatgcaaatttgtgctgtgtgtgttcctgcggttttagcaccgtttctgcaaagaaattt

SEQ ID NO: 135857 - DNA, 909 bp, Zea Mays
gctgcggctcaattcagtggagcggcttacagttgaagaatttgtgcaccacccatttctttctgaacatgctccagagaggaccttgagccggacattatctgaaataagagatggctttccaataaataatatcagtccaacaaggccttcaagccaaagttcacaagaagattgtatgccttttcctttggatgatgagtcaagtggacaggaggagggtccaattcctgacagtaagagtccgatgaaatcttatgggtttcccacaggtaaaagattggataaaacttcaggccagagtccatcaaaacataccagtctgttctccaggtatgtcttgggaaataatcatgcacctagtaaccaacaccatggccatactgataaaatgaccaaggaaagcaagattcatgaagtgcaaggtccaaaaggtgtttatccagaaggtatggaagtcattagtagtgcaattcctcatttttattatgaacaatccttactgaaattattatttcattactttgtaaatgtagatttccctatcattgattcattagagtttgtagatcaggaatatgtatttgtgtctggaccacacccagagggatcatcgtcttcaacaaatgcctctcagcagcttaacttaccggcaaaatatgataatttgtctgtttcaccaccgaagttaactttcttgagtgcaccaataccgataaacggtttgccgattaatagacaacaatctgctgggactggtagcttcgacaaccactattctcctgcatctgtcacttcatagggatctgcggatataagtgatgccatggatgagcccccatctgattatctgatgaggattagattgttggagcaatatgcatcagccatagcagggttggtcaggga

SEQ ID NO: 135858 - DNA, 90 bp, Zea Mays
ggggatctcaactctttgctcatattcacagctgctctaggacattgcagccactgctaactgaactattccactactgtcaatagcagg

SEQ ID NO: 135859 - DNA, 732 bp, Zea Mays
caacaagtcctaaccctagccccggtagccgccaccgccaggctctacgactacggcccggccgtccaccgctcggccgtccaccggtccaccgctctacgcgacggctccatcgctcggctgctccaggctccagcgccctccaggctccagcagatcccggaagcaccgaccacggtccacggcgagtcggcgagcagacagcacaggcgcacaacagtgacggcgagcagacagcacaggcgcacagcctccgcgcatccgcggtccgcgtccggccgtgcagccgcgcaggttagtccgttagtgcttttgcccttgcatcatttgtttgaatgttgaaattattgtttgaatgttgaaattatttctggtacaatggtattggaatgttgctgaaattttagtggacgggcgggcgggtaatggatacccgttggataacggatacccggcgggtacgggtacggatacagatccgtacccacgagcgtaaatgagtatgtgtatggatttggttttatctcgtgggtatgaatacgcgaaccatatatccgcgttctacccgcccgattgccacccctagctgtgcgttctccctcccgtgtccggcggccggatgttgtgtgcgtctctggtatccctcccgtgtccggtggctggcccttgttgagcgagcgccgagcagctaccggcgcctctgcctcccgcctctcgcccggtcacccgtcg

SEQ ID NO: 135860 - DNA, 1997 bp, Zea Mays
aaaccccccccccccccaagtggcctcggccttcctcacacagtccgatccagcccaaccgaacccaaaagtctagcatatgggaacctgagccctcaaaccccgccccttggcctcccctaccgtccacgccgaacacccgccgttctcaaaactgggctcctccccttttgtgattggacttaagtgggattcatatatcaggagtttggattcttctctttcctctgctggtgaggacgtcgatcttcttctttttgtgttgtttcccccctttatcttcacattcagcgatcttcaaattcaatctgttgtctgtcggattggcgctctagtctggtgggtttgctttcagatttgccgagtatcaatccgggtccccatttgttggtggttgaagctcgatttctccatggcgcttcgtgcagcttcatgaatccaggttctcaagtgtatttgatcatgattctataaacaaccatcttatattactaatctgtatgagtttttttacatgttggtggttcaagctgaaaaaattaacttaggacaaagctagattgtcttttacatttgtgattggaaggagtaaccgttttcagtatccagtggcagttataaacagttgttgcgcttgtgcagcttcaaatattttgggatgttgccatgttaaggtattagctttttgttgtttcagtatactggcttcctaaaggatcaatgtcggctatctctgatcagaagaaacgcaccttggaagcccttcagcaacagtatactgctgcaaaagctaagaaattgcaagatgaacaggttaagagtcagaagaagagcaattttaatacccctaagcctaaatgtgatgcaccaaggggaagcaaaggtccagaaatcactcctcgacgaacatatgcccaaccttctcataaaggtgtagcattttctagttctaattgtcaacaaaagccttccacgtcctcaggtgaagaaatcaatcctgtgtatgctgaactttcttgtgcttttcatgacactttgtccaaaggtgttgtctcggatttggatggcacagaggttgttcacaatgttatatatgacataattcagaaaggtggagatgctgggaaaattacaaagggtgccaaaaagttgaaactggaaaaagggatccttttggataattatgttcagaggggttctagattagtggattcccaagcaagatctttgttgattcattcaaagcgatcaaaaaggcacatgtctctaaaacaacataagaaatgtggttcatttgatttagatggtacattccacaagtacgacctctataagccaatgcatgagatgtggaaggactatatcagagagcttatggatctgagcccgaaaaagaaatttactgagaaccttctttcagcagatcttcatggggcccttctaatagtggcagaatgcaaagctgcttcatataaaggtgtaaacggcatcatgattcgggatactgcagagacgtttggaattatatccgaggacaaccgcttccgagttgtaccaaaagctggttcagtgttcgtacttcaagcagatcgctggaagttcacactgattggcgacaagctctcgcccagggagaagttgaaggaggatcagcgtcaacaacgtgcacaatcgctaatcagatagtttccaatgtgccagctgttctctcaaaatttttgctccacgaaatacttgcttttgtttagctgttttaccctttttagtttgcctctaacattgaaggtagataatgggtgtctgtttttgcaactattgattttattttacacagcaagatgtaactgcaacggccacgccgtcattgtttaactgtcattcatgctctccatgataaatatatagagttaataggaatgggaatgaggttgacctactaatttgtcactacagaatctgccttcagcggtccactaaaactttagtattgtacatat

SEQ ID NO: 135861 - DNA, 282 bp, Zea Mays
atgggtttcatcatggagttcgcagagaacctgattctccgtttgatggaggacccgtataagcgcgaccaggttcggcgggagcatgtctacaagatgaaggagcggtgcgagcgcaccaaggcagcgtggagcctcccgctgcgcccctacggcttctggaccttcgaccgcttcaactcgcagctctcctgggacccgcagatcagccaggctgccggtcgttgggacccttacgacgacctcatcaccctccactctggctccccgccgtcttcctaa

SEQ ID NO: 135862 - DNA, 963 bp, Zea Mays
atggggcagggcgggtcggggctggatcagggcaccgcgcgtcggaacggcgctcgagcaacccgtgcccaggaacaccagcgaagacgaggtggagagcaccgccgccgctgcaacagcaccgctgcaacacccacgccgaggataactggctctgataccactgtaatacccgtggctacaccggcgagatcaatccgggagccaattgggttggatagagtgggcttcggccttggcaaatgggcagccctcgtccccgccgcaggcgccggcgcgtcctcgcgcctctccatccccaacccgtctctcaaggacctccggtcgctgctggcgccggactccgccgccacagccccgccctccgcctccccgtcgccgcgcgtcttgcaccgcatccgcgtcgccgcctccgcgctccgggccctccgcacgctccaccagcccccgtcccggcctccggcggcgcccgttggcaaggacaaggagccggtgccgggcggcgggcgggtggtgctgtacttcacgtccctccgcgtcgtccgcggcacctacgaggactgccgcgcggtgcgcgccatcctgcgcgggctccgcgcggccgtcgacgagcgcgacctctccatggaccccggccacctgcccgagctcgccgcgctcctcccccgcgtggcgctgccccaggtcttcgtcggcggccgccacctcggcggcgccgacgaggtccggcgcctccacgagtccggggagctccgccgcatcgtcgcccccgctcccgggcccgcgttctccggcagctgcgcccgctgcggcggcgagcgctacctgctttgcggcgcctgcgacggcagccacaagcggtacagcctcaagggcggcggcgggttccgcgcctgtgccgagtgcaacgagaacgggctcgtccggtgccccgcctgctgcgtacccgttcccgtcgcctga

SEQ ID NO: 135863 - DNA, 291 bp, Zea Mays
atggaagtgccgaggaaggcgatggcttccagtctcgtcgtatggctactactcgtgcactcatgccgcctgcaggtgccgtgcgcgctcggagccgacgactgctgggtcctggaccgcgaccgctaccgcttctgcttcaggacggccaagtgcagggcggcgtgcgcggaggaccgcttcgtcgacgggcgctgcaagcacgggttcccctacctgctgcccctctgcgagtgtctgcgcccgcagtgcgcagcgcccggaccgagcagccattcggaactcggatag

SEQ ID NO: 135864 - DNA, 618 bp, Zea Mays
atgggagtgggactgaacaggcaggaaatggggcgggcggcggcgacggcggcggctccaacggcgagcgcagcaggaaggcagcaagccctggccagcaggagtgccactgccaagccgttcgccgaaaggtctcggccggcgcagcgagggatgggtggcccagacaacacgcgccacaactaccgcggtgtccggcagcgccggtggggcaagtgggtggccgagatccgcgagcccaaccgcggcaagcgccactggctgggcaccttcgacaatcccgtcgacgcggccgtcgcctacgaccgggcggccgtgtccatccacggcgcccacgcgcacctcaacttcccctgctctgccgccaccactgccgacgcatccctcgagcatgaggcaaagccgatggttgctgctgctgcgcttggcggcggtggcgcagaagccgtaagtcagcggcaggaggacgacgaccctcatgacatcgccatgtacatcgatttcgatgcggtgttcgacatggtgcccttttgtcatggcatcaagagagaggattgccagcatgaggggttcgatggcgacgccgttcactcgccgctgtgggcactgggtgactga

SEQ ID NO: 135865 - DNA, 654 bp, Zea Mays
atggcctctgcacccactccgccgcccctcctcccggtgacaaaccccgcccccggatcgtccccggccgccgccggaggctccgacgcgccgatcgctacgccggcattccggctcttactgagccggctctccgacacggcgcggcgctcgctgtccgatcgccggccgtggggagagctcctcgaccgttcggcgttctcgaagccggactctctctccgacgccacctcccgtctgcgccgcaacctcgcctacttccgcgtcaactacgccgccgtggtcgccttcgcgctgggggcctcgctgctggcgcaccctttctcgctcctcatcctcctgggcctcctcgccgcctggtgcttcctctacctcttccgcgcgtccgaccagcctgtcgccctcttcggccgagccttctccgaccgcgagacgctgctggggctcgtcggcgcgtccttcgtcctgctgttcttcacctccgtcgcgtcgctcatcatctccgggctgctcgtcggcggggccctcgtcgcggcgcacggcgcgttccgcgtgcccgaggacctcttcctcgacgagcccaacgcggcccccggcaacagcgcggcccaagggctgctttcattccttggcgcacccggatctggggtttga

SEQ ID NO: 135866 - DNA, 1726 bp, Zea Mays
ccccacttgcttacgcgagacgcgacaccaatacgccatccactgatccacctcgccttctgcttccttcagcggttccgcccatcgactcgacagatccttgttcacgacctcaccctattcagatcccaagcggccacgcccaagcccaaaccctacccacccatctcaagttctcaaccagcgatgatggcagcggagccctcgccgtcggttccctccaccgccgctgaagacatggaaaccctcgccctcgactcatcctcgtcgtccgccgccgctacggcctccgcctccgaccccctccttcggccacctacctccccgaccgccgccgcgagcgacgaccccttcgtcatcgacgacttcctcgacgaggacgacttcaccgccccgccgcccagcgtcgccggcccgccgcccgccgtgcttggcgatgcggcgtccccagtgttccccaagatcaccgtatccgatcccaagaagcacgccgagcctagcggcgggggtgctgccggtgtgatcccagggtccggcagctacttttcttacctcatcaccacacgttttgcgggcggcggtggggaagtccgcgtgcggcggcgcttccgcgacgtggtggccctcgcggacggccttgccgcagctcaccgcggcctatttgtcccggcccggcccgacaaaagcgtcctcgaggggcaggtcttgcaacgccacaacttcgtgagccagcggtgcgctgcgctccagcgttacctctgccgccttgccgcgcaccccatcgtcggccagagccctggtctccgcacgttcctcacggagcctggtgccatccccgccttccagagtgaggcaccgcggtactggacaaccacggtgaatgctgctgctccgatggttcagatgaaagctgggagggacttgtttgggatgtttaagggtctcaagcagacgatggtgaatgggatggttgcaacaaagcctccacctgtggagcaggagacagatacagagttcctggcgcacaaggccaggttcgaggacttacaacagcagcttaccacaacatcacagcaggctgaagcgctcgttaaagcccaagatggttatagagaaactacaggtcacttgggaatgacattgattaagctggcaaaatttgaaagagagcaggcaacatgtaactccctaagaagacggtctggtgaaatccataactttgcaaattctgttttgaagatgagcaggtcacagataaaattgaactctgaaattgtgaaacacctgggtagtatccatgaatatttggagatgatgatatcagttcatcatgcatttacagatcgctctaatgctttacattacgtgcaaattctgtcagcagatttgttttccttgcatatcagggcaaggagacttgaatcgtcgtcagcaagagatatggggcacgagtggtcaacatatcagaaagtagaggggttgaaagaaacaataagatcagcggaagcagccaaaagtgatgcagttagagaatatgaaagtattaaggttagttgcctgaaacaatgtaataataatgttccataaaaaactaaggagcttgaacttacctaggaaaattacgtaaacatacaccgaatggtattaggtgccgaaaaagaagtgtgcacctcttaccttctattgttgttgtgccatgattttaatctttacatcaaattagcag

SEQ ID NO: 135867 - DNA, 1978 bp, Zea Mays
ccccacttgcttacgcgagacgcgacaccaatacgccatccactgatccacctcgccttctgcttccttcagcggttccgcccatcgactcgacagatccttgttcacgacctcaccctattcagatcccaagcggccacgcccaagcccaaaccctacccacccatctcaagttctcaaccagcgatgatggcagcggagccctcgccgtcggttccctccaccgccgctgaagacatggaaaccctcgccctcgactcatcctcgtcgtccgccgccgctacggcctccgcctccgaccccctccttcggccacctacctccccgaccgccgccgcgagcgacgaccccttcgtcatcgacgacttcctcgacgaggacgacttcaccgccccgccgcccagcgtcgccggcccgccgcccgccgtgcttggcgatgcggcgtccccagtgttccccaagatcaccgtatccgatcccaagaagcacgccgagcctagcggcgggggtgctgccggtgtgatcccagggtccggcagctacttttcttacctcatcaccacacgttttgcgggcggcggtggggaagtccgcgtgcggcggcgcttccgcgacgtggtggccctcgcggacggccttgccgcagctcaccgcggcctatttgtcccggcccggcccgacaaaagcgtcctcgaggggcaggtcttgcaacgccacaacttcgtgagccagcggtgcgctgcgctccagcgttacctctgccgccttgccgcgcaccccatcgtcggccagagccctggtctccgcacgttcctcacggagcctggtgccatccccgccttccagagtgaggcaccgcggtactggacaaccacggtgaatgctgctgctccgatggttcagatgaaagctgggagggacttgtttgggatgtttaagggtctcaagcagacgatggtgaatgggatggttgcaacaaagcctccacctgtggagcaggagacagatacagagttcctggcgcacaaggccaggttcgaggacttacaacagcagcttaccacaacatcacagcaggctgaagcgctcgttaaagcccaagatggttatagagaaactacaggtcacttgggaatgacattgattaagctggcaaaatttgaaagagagcaggcaacatgtaactccctaagaagacggtctggtgaaatccataactttgcaaattctgttttgaagatgagcaggtcacagataaaattgaactctgaaattgtgaaacacctgggtagtatccatgaatatttggagatgatgatatcagttcatcatgcatttacagatcgctctaatgctttacattacgtgcaaattctgtcagcagatttgttttccttgcatatcagggcaaggagacttgaatcgtcgtcagcaagagatatggggcacgagtggtcaacatatcagaaagtagaggggttgaaagaaacaataagatcagcggaagcagccaaaagtgatgcagttagagaatatgaaagtattaagatatggcaaattcagcataagggcagacctagtaccggaggctccagaggcttggggtctggagaagggataaattgaggaaaacaacaagattgaaataaaaagatttgacaaggaaagacgccacgatttcatcgagatgctgaaaggttttgtgataactcaggtgtcttattcagaccattttgctaacatgtggacaaaggtaacggaggaaacagaagtatatgcaaacaggagcagctgatgtacgtatagggagtgtagaatagttgattttgatctatttaatttgctccaacatccaacgacaacaatcattcttattcttccccagttttgtcaccttgagttggttgtaaacttgtaatgccacatgagtcatgtgcagtcgtgaaattgggtcccggcagatgagcttctgtgctac

SEQ ID NO: 135868 - DNA, 1899 bp, Zea Mays
ccccacttgcttacgcgagacgcgacaccaatacgccatccactgatccacctcgccttctgcttccttcagcggttccgcccatcgactcgacagatccttgttcacgacctcaccctattcagatcccaagcggccacgcccaagcccaaaccctacccacccatctcaagttctcaaccagcgatgatggcagcggagccctcgccgtcggttccctccaccgccgctgaagacatggaaaccctcgccctcgactcatcctcgtcgtccgccgccgctacggcctccgcctccgaccccctccttcggccacctacctccccgaccgccgccgcgagcgacgaccccttcgtcatcgacgacttcctcgacgaggacgacttcaccgccccgccgcccagcgtcgccggcccgccgcccgccgtgcttggcgatgcggcgtccccagtgttccccaagatcaccgtatccgatcccaagaagcacgccgagcctagcggcgggggtgctgccggtgtgatcccagggtccggcagctacttttcttacctcatcaccacacgttttgcgggcggcggtggggaagtccgcgtgcggcggcgcttccgcgacgtggtggccctcgcggacggccttgccgcagctcaccgcggcctatttgtcccggcccggcccgacaaaagcgtcctcgaggggcaggtcttgcaacgccacaacttcgtgagccagcggtgcgctgcgctccagcgttacctctgccgccttgccgcgcaccccatcgtcggccagagccctggtctccgcacgttcctcacggagcctggtgccatccccgccttccagagtgaggcaccgcggtactggacaaccacggtgaatgctgctgctccgatggttcagatgaaagctgggagggacttgtttgggatgtttaagggtctcaagcagacgatggtgaatgggatggttgcaacaaagcctccacctgtggagcaggagacagatacagagttcctggcgcacaaggccaggttcgaggacttacaacagcagcttaccacaacatcacagcaggctgaagcgctcgttaaagcccaagatggttatagagaaactacaggtcacttgggaatgacattgattaagctggcaaaatttgaaagagagcaggcaacatgtaactccctaagaagacggtctggtgaaatccataactttgcaaattctgttttgaagatgagcaggtcacagataaaattgaactctgaaattgtgaaacacctgggtagtatccatgaatatttggagatgatgatatcagttcatcatgcatttacagatcgctctaatgctttacattacgtgcaaattctgtcagcagatttgttttccttgcatatcagggcaaggagacttgaatcgtcgtcagcaagagatatggggcacgagtggtcaacatatcagaaagtagaggggttgaaagaaacaataagatcagcggaagcagccaaaagtgatgcagttagagaatatgaaagtattaaggaaaacaacaagattgaaataaaaagatttgacaaggaaagacgccacgatttcatcgagatgctgaaaggttttgtgataactcaggtgtcttattcagaccattttgctaacatgtggacaaaggtaacggaggaaacagaagtatatgcaaacaggagcagctgatgtacgtatagggagtgtagaatagttgattttgatctatttaatttgctccaacatccaacgacaacaatcattcttattcttccccagttttgtcaccttgagttggttgtaaacttgtaatgccacatgagtcatgtgcagtcgtgaaattgggtcccggcagatgagcttctgtgctac

SEQ ID NO: 135869 - DNA, 1592 bp, Zea Mays
gtagttctgtaaaggaaggctcgcaggtccggctgttgcaaacgccaaaaagttctctctagagccagatgtttctcagagagtgatcaggggcgatatggtaggcaagatagtttgtttctcgaagaacttctttgtttcgtactggccagcagccagcagccagctatgtgctctggtatgttcgtccagtatactcgtgctccgtgcatgagaaagaggtgtcatcacgctgtgatgactagccacgtgtgcatggatactaatgcacgtggcatctattccaggagctgtctgcgcgtatatagggagcgcacttatctccacttctgtctgtgcgacaagcgactttatttcaagaagacagaagaagggagagtcgtactgaggtgtaagaatggcgagtgcacaggcagtggggcaaggagaacgaggccacttcgttctgaagagcggacacaccattccggccgttggtctaggcacttggagggccggctcagataccgctcactctgttcggaccgccatcgccgaggctggatataggcacgtggacacagctgcccaatacggagtagagaaagaggtcggtagaggacttaaagctgcgatggagggcgggatcaacaggaaagatttgtttgtgacgtcgaagctatggtgcaccgagctggctcctgatagggttcggccagcactcgagaaaacactcaaggacttgcagctggattacctggatctctaccttatccactggcccttcaggctgaaagacggggcgcacatgcccccggaagccggggaggtgctggagttcgatatggaaggggtgtggagggagatggaaggcctcgtgaaagacgggctcgtcaaggatataggtgtctgcaattacacggtcgccaagctcaaccgcctgatgcggtcagcgaatgttccaccggcagtgtgccagatggaaatgcaccctgggtggaagaacgacaggatctttgaggcatgcaagaagcatgggatccatgttactgcttactctccgctgggttcgtcagagaagaacctagcgcacgacccgctcgtcgaaaaggtagccaacaaactggacaagaccccggggcaggtgctcctcaggtgggcgctccagagggggacaagcgtcatccctaaatcgaccagggacgaaaggatcaaagagaacatccaggtgttcgggtgggagatccctgaggaggacttcagggccctgtgcggcatcaaagatgagaagcgcgtgctgaccggagaggagctcttcgtcaacaagacccacgggccgtacaagagcgcaaccgaggtgtgggaccacgaggactgagctgagctgccgtgccgccggatgcctcccactcccacctgatgaaccagaataaaggataccgacgcacctgtcagtcacctccttccccgtgccttgtgagagcggcagcctctcgcacagggaagatgctctgtgagagcagcagcctcgcacgagaaagatgtagaagagtgtgtgcgcaacacactcctgtactgtacgatagactgaataataaagaagaaaacgatcc

SEQ ID NO: 135870 - DNA, 670 bp, Zea Mays
acacgacgcgccaagcagcagccttcgaagaggagggcaggtatggggaacagcctccggtgctgcctggcgtgcatgctcccgtgcggcgcgctggacgtggtccgcgtggtgcacctcagcgggcgcgtcgacgagctgggctgcccgctcaccgcggccgacgtgctcgcggcgcaccccagccacgcgctcacggacgcgtggtccgcggccggcgcggcccgcaaggtcgtcgtcctggcgcccgactccgagctcaagcgcggccgcatctacttcctcgtgccctcctccgcgtgctccacgcccgccgccgccgccgccgacgagaggacgaagaagcgcaggagccgcgccagcagcaggaagaagcacggccaccggaagggcggtggcgcctctgtggcgccgtcgctgatgagcgcggcggagcaggacaactacctgcgcgagctcctgtcggagaagcgggaggcgagcctggtgagccaccggcggcggcggagcggcgcccgccccggcgtctggcgcccgcggctggagagcatagctgaggagccgtcagagtagctctggttcacgagttcttgtctctctgttttttttttctctttcgatcttccgatgtgaatactaagaatcaggggccgatgaggaagcgttttgg

SEQ ID NO: 135871 - DNA, 2613 bp, Zea Mays
gtacatgagaagaaacaagcgcaaatccctgaagcaaacggcgacgcaagtactcacggccagccgtcaacggataaacccatggaccacccaaaaccgcttgctataaacccaaaccggcaaaacatcacctcatcatcatctgcagtcctcttacctcttactatacaattccttcgtttccaacgacccaacggagcctttctcgctgccactgccacgcgggtcccggacccgcacgtcatccacgcgcgtcgccgactcaggagtcgataacgccctcgctttctctgctttccttcctccggttccattccaagtccacctgcccctcctccctccctatctatcctgtactctctctcagtttctctctccccccgttctccgttccacatcgcgtgcgcattgagacgacgagtttctagagcgccgtaccgcgcacggctcccgagccccaccgcaaagcgccggaatcgtgagcgcgtccggcctcgcctagctgctccgcgccgagaggcggccgaggaggacgggcgatgtacccggtggtgacgggcacgccgccggcgcggctgccggcggcgtcgcgggtggacaaggccacgagccacctgctgcagggccccgactgggccgtcaacctcgaaatctgcgacaccctcaacgccgaccgctggcaaacgaaggatgtagtaaaagctgtgaagaagcgattgcagcataaggatccaaaagttaaattctttactttgacgttattggagacaatgatgaagaactgtggtgaatatgttcattttgaagttgttgatcagcatgttttacaagagattgttaaaattgtccagaagaggcatgatatgcaagtgagggataaggctttgttacttctggattcatggcaagaggcatttggtggacctggtggcaaatatccacagtactactggtcatacattgaactaaagagggcaggagtaatgttcccacaacgtcctgtagatgctcctccaatatttactcctcctgcaacacatcaggcatatggttcacctagatatccttctggaagtctaaatgagagaatcacatctgaagctggaacgttgagctttgagggcttgaataatattagaaatgcaacggaactgctgtatgatatggtgaatgctttgaaccctgctgaccgcatggcagttaaagatgaaattattgcagatcttgtaaatcaatgtcgttcaaatcaacaaaagctcatgcagtttgtcagttccacaggggatgaagacctgctaaagcaaggactagaattaaatgatcgcttacagagtgtcctcacaagacatgatgctattgcttctggttctccattaccagttgagacaccgattagagaaccacagagagaggatccaaatcctgagccatctacaccaattacacatgataataaggctcaagttgaagaggatgaagatgatgagtttgctcaaatagcacgaagaaaaaacaaatctgtgatatgcggtgatgaggcatcatcgagtgctggtgatcaagccctggtacctgttgatccagcactttctgaagtttcttcggttgagagcaatgcaatagtacctctcggcgcaacttctgttagtggaaccaggacgaaggagcaggatatgattgaccttctcagcctcaccttgtacagtcctgaatcatcagaagactcttcaactcagaaccaaaatgggagtcagccgagtgtcacatcaaatggatcagaaacactgccaagctatcagcctgctgtggcgaacggggcaaattaccctgccaacacccaggtttatccaacaaatcagggatatgttccatacaataactatgtggcaccatgggcccaaacgggaccggttgcacagcctggggcatattcgactcaaacccagcaatatgtgtcgagcaatccggcacccccatgggctatgcctgcaagtgccaattcagctaatcctttccagcctgtgacataccaaacgccaaacactcctcctgctgcttctgttgccccttcagctgctccatcagcgcaacatgttccatctccagaaccaacaccggtgcaaagttacaacttctctattcctcaaacatacactggttcgaacgtggctacaaatgctcgggtgaacggaaatcagcggccaaaagaaactccagtggcagcagccagaccatattacatgccggacaatttgttcggagacctgatcgacgtgaagagttttggcgccggaagcaagatcagcaggtctaccagcatgccgagtccaaagggtggtggccagcctatgatcggtagaaacaaataggcctctgctgtttaagatagggatgagcatatatttagctggtagccactgtcgtttggtttgatgtaaatttgctgtcttttttcacgtgtcaatttgcggatttgttactttggtcaatttcggagttgctgcatgtttaactttactagagaattgtagagaagtcattgctccagatgatcagtgacatcattatcgtgacggtttgatgacggaaaccattgcctgcttcgtgttttcc

SEQ ID NO: 135872 - DNA, 368 bp, Zea Mays
ctgatactgaagaagaaactacaaaggtacaattcgtccaccttattttaaaaattgataaacacaagtacatttgtaaaatgagcgtataaaaatgctcctttttcccttctataggaccaaacaacgatcggtggacaactcaaaaggaaaaaaaataatatgccctcaatggaagttcctccaaaaaggtaacactcctacatacacatcttctgctcagtttcagtgtcgtttgcatggctggccattatttagttccctactcagattttgaaatgttaggcatccatacatgaaaatcctctagaaataaatgtgttgctcagtttgcattcagtaatagattatgtttgtgtgcacacaag

SEQ ID NO: 135873 - DNA, 1128 bp, Zea Mays
accggaggcgcggcgagcggagccccggcgcacggacgcgcgcccccctggcggcgagctaggaccttcacggatggagccgtggcgcgtggacaagaggagaatggggacggaggccgacgccgcagccgtggacctactccgaccgcagatcccgttccagatcgacggggagttcgttctcccgccgcgcgacgttggggtcgtcctcgtcgacctctgcaacggcttctgcaccgttggcgccgggaacctcatagctgaggaccataaggcatatgctgaagggaaggatgaaaaagtaaaggtattggagaggtcaattgaagaacttgagaatattgtttgtgttttagaaagcaaagtggaaattgtcaaggaagaagcagggtgacaaagaatgcagcgagaagaactagaagtggacctgcagaaagttcgggaacaaatgctagctgtacaaccctctgggaaagcaaggagatatatggaagatggaatggttgatttagctgattcatctaggcacccaatagatatgcataatgaactcctctgtgctcaagagactattagaatacttagaagggaggtttctgagaaggaatcagagattgctcagtgcaatgcacatatctcagagctaaacgttcatgttgaggcagtggcacaagaatacaagcacaaggtgagcgcttcgtgtgtctgtttgttttcaagaactttaacttattaatactcaaaacaaaaataaaataaaaatgctctggttagtttatggagctggaaatagatgaactcaaaacctcggggttcaggttctccatttagatgtatcggtatcggctttgtgcaacagatgaattctaagaaagatgaagagcttagtgctacgaaacaacgtattgtggaactcgagggcataacagctaggagacaaagggaggtgaggttattcttaatttttcacttctttttgcctaccttttttttatttttccaacttatattttttgttattttgtttgaggatattcatgttgaatgcgaaattagcaccagtagagagcatggcgcccatatggggttcgagatatgcttggggttaaaataaacatgacaacttgg

SEQ ID NO: 135874 - DNA, 547 bp, Zea Mays
acaagggtcgtcgttggagatggccacaaatgtcgtttttggcatgacgcttggcttgatggagaggcgccataccacttagctcctaacctatttgcgatgtccaggataaaaaacggatcagtccacgtggagctccgggataatcactagatcaacgcgatgtgaggctaaatcaccattgcaatccagatacaggagttcgtctcactttggatcagaacccaggacacccaccttacaccagccacgagggattgcatactctggagatggacggcagacagaacatactccgctcgctcatcatatcgtatcaagtttagaggctccttcgggctgtttcgatccaacctaatctggagagtacatgcaaaaaaacaagtgcaaggttttcgcatggacaatgacaatggaaaaattcctcatcgcggccaatttacaaaaaaggatctggcctcaccaagatcactgcgctctatgtaataggccactggaaacttgcatccatttggcattgctttgccctttcgccaaatctgtttgg

SEQ ID NO: 135875 - DNA, 444 bp, Zea Mays
atggttttttctgctcttgctttgtctcaatgcgaggtgatttggtacttccaacatgtggggattgcatcatcaaaatctactcgattgaaaactgttgacattgatgcgatagacccaactattggtttcttactagatggaataggcaaactttgttgcctggttaacaaaattggcagagattctatctcttatgtggagtcccttattgagtctatcatgggtgggttggaaggtttgaatttgataaatattctagattcagaaggtggatttggctcattagagatgcagctttccctagagcaaccagctcttcgcttaaataacacaagagcaaagggtgtttcaaacttgttaactccaggatacgagagctatcctgacaacagttcatcaattaagatgtcggtcaagttgttacttcacaccactatttaa

SEQ ID NO: 135876 - DNA, 1923 bp, Zea Mays
ctgttaaggttggacctttgtctagtgcttcggtcactgtattgacttaaacctcttgttattcttcttatcaatatatgttggcagacctcctaccttttaaaaaagggactgtatcataggaaatttcaggagaagatttcatagtacgatttagaactgagaactgcattcagcgaccatcaatcatagaatctcttctaagaagacatctgggcatcatccatctagcagagcagcatattggtatggaccttactgaaggcatacgtgaagtgctggtccatttcccaatcttcaaatgtttgagactccagtggggacacaaggagggggatctgccgttgagatgacatgcaactgatatattgagaatgtagtaaaggatgcttctcgcattggagttgcttttgatgcaatccaaaattgcttcaggagctcacaacctattggttgtggatgtttagctgaatcatttacagataaaagagaaatgaaatcacttgttcgtctttttggtggctatggaatagataaaatggataagatgctaagggagcatacgtctgcgcttttaaactgtatcgattcagcattgaggtcaaatcgtgatgccttagagggcctagctggaactgtaaattccggcgataggattgaaagggatgtgaacctgaagcaaattattgacctcgaaacactggctgacctctgtattcaagcagggcaggcaatgactttcctgttggttgaggctgttggagcagtccttgaagagaaaggagttatttgagtttgtaacactctcgtcgcgcggcttcgccactatattactccacagctgcgcatcgccaatttgatattatgcagcactcatccgcgccatattgggactgttatttttccgagctctgttaccgtgtgttttcttgcggttgatgaagtttgtgtaccccttcgtactaatctaccctccacgcagccgtctaccttaaggtgaccacgccgccgtctgccaccaggtgccagcgccgctgtctgccaacagctgcccgcgccgccgtctgccagcaggagcccgcgaccccgtctgccaccaggagcccagttgcaactccacgaggcgagccgcgagtggaactgtggaagcgtcgagcttttttcttctttgtcttgctgcgcaagaagaagggaaacgagaggagggcggcgatggccaagaggctgctcccgtcgctgaaccgggtgctggtggagaagctggtgcagcccaagaagaccgccggcggcatcctcctcccggaaacatccaagcagctgaatgctgctaaagtggtggctgttggccctggtgagcgcgacaaggcaggcaatctgatcccagttgctctgaaggaaggcgacactgttcttctgcccgagtatggtggatctgaagtcaagcttgcggctgataaagagtacctcctcttcagagaggatgacattttgggcacacttgtggactgattcagatcgcgagcaagcgggtggtgagatgcgtaggatttgaagctgggaacaaactccagaaagaactgtgccctgtcgtgatgtcataaatttgtggtgaaacatcatatcatgaggataaaatttgttgctttttttgtgatgcaattgagaaaactttcgaatttgaactggttcaaaaaaaatacagttgcaactgcacgtcaaaatgttcagcattcactacgaaacgaaaaggtaagagacacacacaaaaaaacaaagtcagcagcaaccagatccgagcaggaatgccttgaggaggtcgcccgtggtgcggacgacgtggcggaggtcagcgccgaggagcagcaacgggacggcagccggcaggagatactccatgaccgcgtcgtgcgcgggcgccccggg

SEQ ID NO: 135877 - DNA, 2293 bp, Zea Mays
ctatcctgtactctctctcagtctctctctctccccccgttctccgttccacatcgcgtgcgcattgagacgacgagtttctagagcgccgtaccgcgcacggctcccgagccccaccgcaaagcgccggaatcgtgagcgcgtccggcctcgcctgctccgcggcgagaggcggccgaggaggacgggcgatgtacccggtggtgacgggcacgccgccggcgcggctgccggcggcgtcgcgggtggacaaggccacgagccacctgctgcagggccccgactgggccgtcaacctcgaaatctgcgacaccctcaacgccgaccgctggcaaacgaaggatatagtaaaagctgtgaagaagcgattgcagcataaggatccaaaagttaaattctttactttgacgttattggagacaatgatgaagaactgtggtgaatatgttcattttgaagttgttgatcagcatattttacaagagattgttaaaattgtccagaagaggcatgatatgcaagtgagggataaggctttgttacttctggattcatggcaagaggcatttggtggacctggtggcaaatatccacagtactactggtcatacattgaactaaagagggcaggagtaatgttcccacaacgtcctgtagatgctcctccaatatttactcctcctgcaacacatcaggcatatggttcacctagatatccttctggaagtctaaatgagagaatcacatctgatgctggaacgttgagctttgagggcttgaataatattagaaatgcaacggaactgctgtatgatatggtgaatgctttgaaccctgctgaccgcatgacagttaaagatgaaattattgcagatcttgtaaatcaatgtcgttcaaatcaacaaaagctcatgcagtttgtcagttccacaggggatgaagacctgctaaagcaaggactagaattaaatgatcgcttacagagtgtcctcacaagacatgatgctattgcttctggttctccattaccagttgagacaccgattagagaaccacagagagaggatccaaatcctgagccatctacaccaattacacatgataataaggctcaagttgaagaggatgaagatgatgagtttgctcaaatagcacgaagaaaaaacaaatctgtgatatgcggtgatgaggcatcatcgagtgctggtgatcaacccctggtacctgtttttcgggcgctttctgaagtttcttcggttgagagcaatgcaatagtacctctcggcgcaacttctgttagtggaaccaggacgaaggagcaggatatgattgaccttctcagcctcaccttgtacagtcctgaatcatctgcagactcttcaactcagaaccaaaatgggagtcagccgagtgtcacatcaaatggaccagaaacactgccaagctatcagcctgctgtggcgaacggggcaaattaccctgccaacacccaggtttatccaacaaatcagggatatgttccatacaataactatgtggcaccatgggcccaaacgggaccggttgcacagcctggggcatattcgactcaaccccaacaatatgtgtcgagcaatccagcacccccatgggctatgcctgcaagtgccaattcagctaatcctttccagcctgtgacataccaaacgccaaacactcctgctgcttctgttgccccttcagctgcctatccaactatgtcaacaccgtatgctgctccatcagcgcaacatgttccatctccagcaccaacaccggtgcaaagttacaacttctctattcctcaaacatacactggttcgaacgtggctacaaatgctcgggtgaaagggaatcagcggccaaaagaatctccagtggcagcagccagaccatattacatgccggacaacttgtttggagacctgatcgacgtgaagagttttggcgccggaagcaagatcagcaggtctaccagcatgccgagtccaaagggtggtggccagcctatgatcggtagaaacaaataggcctctgctgtttaagatagggatgagcatatatttagctggtagccactgtcgtttggtttgatgtaaatttgctgtcttttttcacgtgtcaatttgcggatttgttactttggtcaatttcggagttgctgcatgtttaactttactagagaattgtagagaagtcattgctccagatgatcagtgacatcattatcgtgacggtttgatgacggaaaccattgcctgcttcgtgttcaaca

SEQ ID NO: 135878 - DNA, 671 bp, Zea Mays
taaaaaaaattaaatgttgtgttgtcagtaaccatgtatattctgacaaacaaagaaaaagtggcgcagctacatatatttgagatctaagagggcacaaaaaaatagttgcggaaattagagagttgttatatttcaggtgcccacctgaaatatagtatgttttcagacaacaaccttcactgttagttcatgagcatgtaaagctgagcatcttaatacaggaaaaaaataagcaaaaagatggatacagtatcttttgaagagaagatagaaatcaggcatctgaccattagtaaaaaagtggaaattaatcggtacaacctagattttctacaagtttgcaggcaaaactgggcagccacgtcattgcaatttgcaacaacccaggaaaagcctgtcacttattcatttgtcaacccatccggcatgttcatttggcaaaaggatctactattcactgaaaaaaaaacaatactcctgctgtcgacactcgacagcttgtggtactggtattacaagtttcttttattgattcacttaagactcctgttcgagtcatactgcctgcaatacagaatttgcggctgttgagtgctgacattttattgggttctgacacagatcttggttgcatacttttgtatatttatctcagatctcattttact

SEQ ID NO: 135879 - DNA, 373 bp, Zea Mays
cagcctccttggtgctcacactgctccaaatgtgataactgtgtggagcgctttgatcatcactgcccttgggttgggcaatgtaatggagagcttagtaatggtacttctattttgtttcttcaacggcaatgctttgtatctatgtatgtgcaatgtgtggattgtgcatcaggcttctcatgaatatgggtcattattcggtggggaaagccattaaagaatctccatcttcattggcattcatgacatattgtttcatttgcttttggtttatcagtggtctcactgggttccactcttaacttattgtgacaaacaagacaacatatgagaatatcaagtacaagtacaacaacaaaccaaacgtgta

SEQ ID NO: 135880 - DNA, 1683 bp, Zea Mays
acgcttcggcgtagcaagctagcggcagcggaagccgcacagcagaagaagaagaaaaaatcctccccactaacaatgtcgtcgtctccttcctcggcccactggctgagcttggtagggagcgtctggctccagaccgtcaacggccccaacgccgacttcgccgtctactcgtcgcagctcaaggagaccaagggcatctcgcaggtgcagctcaacttcctcgccttcgcctccgacgccggcaagctcttcggctggctcgcgggtgtggccgcgctgcgcctcccgctctgggtggtggcgctgaccggggccacgttcggcctcgtcgggtacggcgtccagttcctgttcctcgacagggccggcctcgcgtactggcacatgttcgcgctcacctccctcgccggcaacggcatctgctgggtcaacaccgtgtgctacctcctctgcatcaacaacttccctgcccacagccgcgtcgcggtcagcctggccacgagctacctcgggctcagcgccaagttctacaccaccatggcggacaccatccccagggcggcgagggcgaggtactccaccgcggaggtgtacctcctcctcaatgccgtcgtcccgatggccgtcgcgctcgtggcggcgccgtccctccgggtggtggaactcaaggagggccgccgcaggaggaccgaagcgccgttcctcgccatgttcgtgatcaccctggccaccggagcctgcgccgtcgtcggcagcgtaggggccaagtccatcgggctctcgtctagagcacacatggtcagcctctacgtgctgctcgccctgcctctgctgatcccagtgtggctcagagtcagggagggcacggccaagatacgcgagagtatgtgggagaaccgggtccacgatcacgactccgacgggcccgagtccgagacggcggtacccgcgccggtgtcggtggtcgagattcaggcggaggacaagcaggaggaggcaggggcggagctccaacgacagaataatggtcaacaagaggaggtcggcggcctccgcttgctgagactatttgacttctggctgtactttctcagctacatgttcagcggcactctgggtctggtcttcctcaacaacctgggacagatcgcagactcgcgaggactcaccgatgcgtccactctagtctccctgtcctcctcgttcggcttcttcggtcgtctccttcccgccttcttggactactacactgccaagagtggctactccctatcaagaacggcgtccatggcgtggctgatggcccccatgcccggcgcgttcctcctgctgctgcacccgaagaacatgtccctgtacgccagcacggccgtggtcggcacgtgcacgggcgccatcacctcggtggccgcatcgacgacgaacgagctgttcggcacgaagaacttcggcgtcaaccacaacgtagtggtggccaacatccccctgggctcgctctgcttcggctacctggccgcgttcctgtaccagaggggcgcgcacggcggcaaccgatgcctcggcgccgcctgctaccgggacagcttcatcctctggggcgcgacgtgcgccctgggcacggcgctgtgcaccgtgctgtacgtgcggtcgcgccgttcccccgggaggctacctcgctag

SEQ ID NO: 135881 - DNA, 2838 bp, Zea Mays
cgcgccgccttcatccctccccacccttgcccccaaatccaaatccgcccgcctgccgcagctcccattctcgcgccccgccttcttcctccagcagccccgctcgttcttccggcctcgcgttccgtctccgaagccgcaggcagccatggaaatcaacgaggaggcaatggcggcgcataagcgcgccttcctcgacttcctcgaccaagacgtcgggaagggggtttacatgcaggccgtccgcgacatggtccagaacaagcgccaccgcctcatcatcggcatggacgacctccgcaatcacaatctcgatctcgcccgcagggtgatccggacccccggggagtatatgcagccggcgtcggacgcggtgtcggaggtggcgaggaacctggatcccaaatttttgaaggaaggggagcgcgtgatggtgggcttctcgggtccgttcgggttccacagggtcacgcccagggatctcatgtcctccttcatcggcaccatggtctgcgttgagggcatcgtcaccaaatgctcgttggttaggccaaaagttgttaagagtgtccacttctgccctgtgactggggactttctctcgcgtgaatacagggacatcacatcttttgtaggcttgcctactggctcggtttatccaacaagggatgacaatggtaacttgttggttaccgagtatggaatgtgtgaatacaaggatcaccagacattgtccatgcaagaagtgcctgaaaattctgcacctggacagctcccaagaactgtcgatgttattgtagaagatgatcttgtagattgttgcaaacctggtgaccgtgtctcaattgtcggtgtgtacaaggctctaccagggaaaagcaagggaagtgttagtggtgtcttcagaactgtccttatcgcaaataatgtgtcgcttcttaacaaagaggcaaatgcacctgtctacactcgggaagatctgaagcggatgaaagaaatatcaaggagaaatgacacctttgacttactgggaaattctcttgctccatccatatatggtcatctatggataaagaaggcagtagtactgttgatgctaggtggtgtcgagaagaatctaaaaaatggaactcacttgagaggagatataaacatgatgatggtgggagatccttcagttgccaagtcccagctcctaagagctgtcatgaacattgcccctttggctatctcaacaactggcaggggttcatctggtgttggtttgactgctgctgtgacttctgatcaagagactggggagcgaaggcttgaagctggtgccatggttcttgctgatcgtggtgttgtctgcattgatgagtttgataaaatgaatgatcaagatcgagttgctattcatgaagttatggaacagcaaactgtaaccattgcaaaggcaggaatacatgcctcactaaatgcaagatgtagtgtaattgctgcagcaaatccaatatatggaacttatgatcgttcattgacaccaacaaagaatatcgggcttccggattcactgctttcccgttttgatttactttttattgttcttgatcaaatggaccctgagattgaccggcaaatctcagaacatgttgcccgaatgcatagatattgcactgacgatggaggagcaaggtctcttgataaagagggatatgctgaagaagatgatggtgatgctaatgcagccatttttgtcaagtatgatagaatgctccatggtcaggatagaagaagaggaaagaaatccaagcaggacaggctaactgtcaaatttctgaagaaatatattcattatgcgaagaaccttattcaaccaaggctcactgatgaggcatctgatcatattgcaacctcatatgctgagctcagggatggtagtgcaaatgcaaagtccggtggaggtacacttccaattacagcaaggacactggaaaccataattcgtctatcgacagctcatgccaagatgaaactgaggcatgaggttctgaaatccgatgttgaggctgcattgcaagttctaaattttgcaatataccacaaggaattgactgagatggaagagagagaacagagagaaatggagatgaaacagcaagctgatcatgatgcaggtgcaaccggtggcactgtggatgggcatggaagctctggcaatgatccaatggatgtggatgtaggatcaaatgatcagaatgtttccgcagagagaattgaagcatttgaagcacttctgggtcagcatgtgttggcaaaccatatagatcaaatgtcaattgatgatatcgagcagatggttaatagggagtcaactgcaccttacaccagaagccaagtagagtttattttggagaggatgcaagatgcaaacagggtaatgatacgagatggtgttgttcgaatcatataactaccagtctaccaggacgtttacctgtggatcccatggtcatgctgtgtcatggtgcctgtctgtctgtctgtaaccaacttatatgtcgaagtatttgtttcttagtgtttgtccacaaaggattgaggcaatcattgccccccttggtacttttagttcatgtgatgtattgcttacttacctgacctagtgatatctagtactcagtcacgtctggttgtgttcgagttaatttgcaaatgcagttgcattctgacgagtaaaattcacacgtgctgagttgctgacggcgtaggctttctaggtaccgatgccagatgagatttgttctgattctctgttgggttggcaacgtgatacttaattgtattgtaaaatct

SEQ ID NO: 135882 - DNA, 381 bp, Zea Mays
atggagaggctggcggtggccacgagggcgttcttcgcttcggcctccggcggcggcactggcggtgttgcattagatgtgaaatgtgatgatctaaatggggaggagaagatgcagcaacatgagatgccaaatactaaaaacgacgatggtgtcacgatattgttacccactattgttgcatgttccctcccatgcttggaggtcctaatcgagatgaaagtggtggcagccaagatgaaagtggtggtggccgcatcaaaggagaaggtgcaacaagacgaaccgaaagctgctatctcagatgtgaaatgtgacaacccaaaagaggagggcaatgtgcagcaaaccaaaagttgttgcctcagatgtgaaatgtga

SEQ ID NO: 135883 - DNA, 254 bp, Zea Mays
ggaggaagattccaataaaaatggggaactggaggagtgtaacaaatgtgtaatttatttttttccactctatatgctatcttagaagtttcaaaagttccttgtttgtgcgtaattcaaaatttactattagtcattgttcctgaacaacccttgattttatttcttgaatgtgcacctgattcgtctaatggaatcatagaaccacatgttgtgctactattttggttaagaattacaatgatcttaaggca

SEQ ID NO: 135884 - DNA, 99 bp, Zea Mays
gtctcacatcaagccaactgcatagtttcaatgacatacaaaaacatagttgcatacttgcatacacagtaacaattttggtcgataaacatttaggtc

SEQ ID NO: 135885 - DNA, 2934 bp, Zea Mays
tcttctcccatctcatcgtcccatcccatctccaactcgtctcacttgtccatccatccgtgtttcttcaccgccttctcttcggattgagattgtaatcagaatcggattgagattgtaatcagaatcggattccatcgttacatactcaaggcacatacagcagcaccaatgatgagcgacgcgtggccgtcatccccctactcctcgtcggcgcccgacggggaggtcctgcgctccctgcaccgcctggcgcgggacctgtcggcggccgaggcgccggcgccgttcctgcggccggtcttcgcagcggtggccaggcgggcgcgcctgctggccgccgtgttcgacgacctgctgctgtgcggcgcggccgcgggcccgctgctgctgctgctgctgccgcgctccgcgtccctgtgcctccgggagctcctgctcgtgctgcagcggttcaaggcgctcgtggccgactgcgccacgcgcagccgcacgcgcctgctgcttcagtcggatgaggtggccgcgcgcgcgcgggagctccagcacgacctcgccacgctgatcgacctgctccccgccgcggagctcgggctcgccgacgacgtgtcggacctcctggcgctcgcgtcgcggcagtgccgccgcgcggcggccccggagctggagctgaaggcgggcgtgctcgcgctgatccaggaggtggagcgggagatcgtgccggagcgggagaggcttgagggtatcctggaggacgtgggcatcaacgaccccgccagctgcagcgacgagatcgagaccctggagcgggagatcggcgaccgcgtcgccgagaggtggacgtcgtcgatgatcgccctcgtcggcctcctccgctacgccaagtgcgtcctcttcagtgccgccacgccgcggcccgtggactccaaggtggatctcgacgacgcggagccaccgtcgccgccgccggacttccggtgccccatctccctcgagctgatgggcgaccccgtcgtggcttctagcggtcagacgtacgaccgtgactccatcacgcgctggttcggctctggcaaatccacgtgccccaagaccgggcaagtgctgctgaatctggaactcgtgcccaacaaggcgctcaagaacttgatatcgcggtggtgccgggagaacggcatccccatggagagcagcgagtccgggaaagccgagccggcgccggcggtaggcgcgaacaaggccgcgctgaaggcggcgcgcatgaccgcgtcgttcctcgtgaagaagctgtcggcctctttctcccccgaggcgacgaagcgcgtggtccaagagatccggcagctggccaagtccgggtccgacaaccgcgcgttcatcggggaggccggcgccgcggggctcctcgtgccgctgctcctgtccgaggactcggctctccagctcaacgccgtgacggcgctgctcaacctctccatcctggaggccaacaagaagcgcatcatgcacgcggagggcgccgtggacgcgctctgccacgtcatgggcacgggcgccacgtggcgcgccaaggagaacgccgcggccaccgtgctcagcctggcggccgtccacgcgtaccgccgccggctcgggcggaacccacgcgtcgtcgagagcgtcgtgcggctcgcgcgcacgggcccctccagcaccaagaaggacgcgctcgcggcgctcctgtgcctgtccgccgagcgggagaacgtgccgaggatcgtcgaggccggcgccgcggaggcggcgctggccgcggtcggcgaggccgaggccgaggccgccgcggcggtgctggcgtcgctggcgaagcgcggcggcgcggaggcgatcgtcgcgctggacggcgccgtggcgcggctggtgaacgagatgcggcgcggcacggagtggtcgcgggagtgcgcggcggccgcgctggtgctgctgtgcaggcgcgccggcgccgccgctgcgtcgcaggtggtggcggtccagggcgtggagtgggccatctgggagctgctgggcaccggcacggagcgcgcgcgccgcaaggccgcgtcgctcggcagggcgtgccggcggtgggcggcggccgccaacgcggagcagagcacagagtgccctgccgccgccgatgcgccggcgctcacgtcggcggcgtgaagtgaaatccactactcaactactgcgcgatcagtagtagaagctccaagaacaagccgaagcatttttttcttcccaccacgaatgttgtacaaaatttgttcttggccgttaaggccttcccgattctttggtccgtggtagtgagtaattgatcaactgtaaatacaagataggtgtagtacgtacattttttttctttttcatcaaacattgttacgcattcattgtactgtctcaagaaaatacaaaggtaaacaacaaaatcactccatgcaagacagcttctccaatgattgtgtacaggtacagccgatgagtgcagctaggctggcatgtcgtcgtgggctcgtcgctgccggtgccggggacagagctacttccagccgtccgctcggttgatcaaaggagtggccgccagcgcacggtatcaaacgaaataacgaatgtgcgggtgcggctcagctggaaatgcttggcgagggaggctacacgggcgcagacccagcttgcattcgccggcttttgagcagaaaggccgccgctttgctttgctgccagccagtgtgcatctcgatgccaatgatatatctttgccgcgtcgcgtactcgcgttgcttcaacgacgctgcccttgcccttgccgttccctttgagaaagcaaagtccccttccctttctgaacgaacagatactcctgtatcgtattctaacgtgtggctgtccatgggtctgctctgagttctggtc

SEQ ID NO: 135886 - DNA, 108 bp, Zea Mays
gagtatactcttgaaatactcgttgcctcttgcaccaaaggttttggtaataattcttatctatattttatgagattttaagtagagtctgccatgtgacaatcccac

SEQ ID NO: 135887 - DNA, 1635 bp, Zea Mays
cccacgcttctcatccccgctcgcgcgctgccccgcgccgcgctacttatcagttatcccggcatctcctcacttggtccccggccaccacaccacctctccagccgccctcctcgtacgcgcggcgcagaggtccttcttcgccagcgcctcggggccatggggcgccgtaggttccggctcgccgacatgatgcccaactcctggttctacaagctccgcgacatgcgccgcccacggggtcaccctcctgccgttggcggctccggggccgcgagcgcaatgctgcagtcgtcggcggcgccgccgcagaggggggcaaggtctgccacgaggcctgggtccccgaggcacgggtccgtggcgctcccgcacaggacctcgtactactaccccacccgggaccgggagctcccggcgccggagccgaggggcgccaaggatgagaaccggcaggtcctcccccagcagctgtcggcgacaggttactccaggaggcggcacggggttgcgcgcgggctggaggctccggccggagcgcacgacgcttccaggagcaggcgggacatgtacgtcggggtcgggcgcgacggcagcgacgaggaggacgtcgacgaggtccggaggccgggggtgattgcgccatcggagtatagcgtgagcggtaaggtgatcgcgtcagaaacggacatcgtcatcgacctctgctccgagggcaccgccgagcgggtgctccgccctatcgtgacgaggcccgcgatgagggaggtggtccggtacgagccgaaggacaggcacgtcgacgtcgccgacacgtcgccgacacgcgccagctctgcctcggagcagggaagcaagggccacccgaggcggtcgtccgtgtccgtggggcgccgcctcaggacgcgcgtcagcagcccgcggctggcgtccgccaggtcgaggaagaacagcaagccgacaagcgcgggggcgtcgccacggaagacgaggccagcaccgccgccgcctctcgcggagagcttcgcggtggtgaagtcgtcggccgaccccaggcgggacttccgcgagtcgatggaggagatgatcgcggagaagggcatccgcggcgccgccgacctggaggacctcctggcctgctacctcgccctcaacgccgacgagcaccacgacctcatcgtggaggtgttcgaggagatctgggccagcctcgccagcgctaaacccatgaaaggaaacagaaacgacggccgcgaatgagctgaggtcatcgttcgtcgtcctcccctctcccgctgcacgcctgcatgctcgatgatcagtgcattcatttctagcagcggattaaactagctttagccttttagtcccttgacttgttattgatggatgattgcaataacaaaactccgcaagggaactcgagaaagggaaaaaaaaaagaaagaaagacattccggctcgatctgcgaaagtttttggttctttgcttgctcggtgatcgtgtgattcttctccctgggatcgcgtgcgtggtgctcgctgctttcttgagcgttcctagcgtgatcagtagacagtagaagggttgttgtggtgtgcactggacatcgccacttactaattacagattta

SEQ ID NO: 135888 - DNA, 500 bp, Zea Mays
ctctttagtcccacatcccactccgccgctgccgcaccgcgcctatgtcgctcgacggagtcttctccacgaccgaggccctcgcgcggctactagcccgctgcccgacgctccactccgacccgcgtctccacgagcttgcctcgtcgccggccgccgcgccccccgctcgcgacgacgtcaccgccgcgctcgccgagccactgctgcatccgcgctacaccatccccgtgctgggctgcttcctcccgcttgcgccggcccttatcaaccaggccgtcgcgctgctccgcgccagactgcacgcgtgcaacgatgacgctcgcgccaggctgcaggcgtggaatgatgacgccgcccacctggaggatgaggccggggagagggacgtccgcgtcattgagttctacctctccaggcgtaggctcctgcggctgcacgagatcgcgtgcctcgcgctagcgcgcgccctcgacctcgcaccctacttgctcaggtga

SEQ ID NO: 135889 - DNA, 3850 bp, Zea Mays
actgctggtaactgcagctgtattgattagctttgcaatcatcctgtggcagataatatccatgaactttatcaagaggctgacagaagattatagggaatatgttgatttgatccagccaattcaagttgctgtatatgaaatgaaacttggcttagcaattgctctatctggttctcttcagagggagtatttgaagaagattaaagaagatgatattaatagagttcttggagcaatttatgcttttatgcagtttccctctggatcttttactgaaagggttgtaactgacgtgactgatgatcttacaaattatacaatcactggccaactaggaaccctaaacagttgttctggagatgtagatatgttgaagaagcttgctgctatgtcaagtcagttgaatgtttgtaaagttgctggcaaagtgaagtccctgtccgagatgcttgcttcagtgcatcatatttttttagtaagaacagctgattgtgtcagctgttcccttgtcatggataagtcatcttatgcgtcattgaaggatacctttgatcattttacaagcatgtggatcaacatgaaataccgtttgaaggctaaagaaagcgatgattctcagtacttcaagttcaaatcgcgaatgatcagtatagacgacatctttaaagatgtgccgttgctttctgatatggaatcagaagacagcattttagataatgaagaaaaactagagcatgaatttttcaaaattacggaaagtattgatgacgataatggtgttgttgaagacaactgggatttgataccagagtctgctcttaaatgtattgtgaccatacatgaccaattgtttggttcgcccgatctttttgagaagcgccgcaaatgtcaagttagtgatgcacagaaagtccagtctttcatagaatcatatgagctgggaacaagaatacttaaagacctcccggaattaacatgttctatgtttgatgaaaagctcatgcctgagcacctatttcgtgtttgtcttgaataccaacgatcctgtgcaaaaacacatcaagattgtagtggttataatgcttacaaggatccaaatcctcctgtcttgtttaaaatggttgagtcactaactacacttcaggagagagttaatagctatctggatgaatggcctgatcatcctggtctcttgaaaatactggacctaatcgcttcccttttagcgatgcccctaagcacgccaatttcgaaggtcttgcttggattgcaattgctggctgggaaagctcaaacattgcaggaaaatgactccaagttctttgtaaaagatcatcttgcatcgatatttttgcttgtgtattcatggcaaaggctcgagttagattgttggcctatactgcttgaggaggtccagacaaagtatgagttgaatgctgcaaagctgtggtttccattgcgagccttacttactcaaacttctggtattccagtggatgatgatttgtctattatcagaagtgttgaggaatttgttcaaacatcaagtcttggagaatacaagagacgattgcatatcctctttgccttccatggtgagatttctgctggtgctagcttgggtagttattcaagtaatgcggtgaagaaaatccagaatattctgtacagtgtgtttggttactatatgcagtttttgtcactcgttcatgggaaaattgaagaaggtaaaaaaaacattgagaaggagttgaaagatcacgtcaagctttacagctgggagcaagcaccatatagcagcgcttctattgaaaattttaaaaggactaggcaaaagatttttaagcttctgcaacggttcaatgatattttgaaaagtcctgtcatctttctactgaatgaagaagccacatcaaggaagattccatgctggcttgatcctcagaggcctgaatcacaccttcctgttgactctgaaaaatttaacaaaaggtttctgtggtaccacaagtgggcaagtgagacgtctttatcattacaaacattgcagcaatcaaatggtagtactgttggagttcctactgccaaagaatatgcagatatggtatatgatgtgaagcactggcagaatgaaattgagctcaatgacagattgcagttcttctggatctcacttgagagaatatgtggggcagctaattttggtagtacagtgaagcatgggaaaaagaatcagaagaaaacagctctatccaatctgttcaagactcttgaggaatgtggactatctaagcacaggccaatgagtcatgagtggggagatgagctggcagcaccaagtccattgttcttggagcagtcatatgattctgcacatttattacagcaaataaactctcagaaaatgctggaagatgttagcatcaatcattccacactattgaacacagataactggaagcatgcaaatcagcaatacttcaaatgtttagcaatgatgcaacaacttcgacaggtttctttgaagtttaacaaagatctaggtttggaagaggttaacaaggctatgtcatttatgagtcatctgttgactgtgttgtctgaacaacgacatcttgcttataatctatttgatcaacggaaccaattcaagcatgctattttcttattaggttctggaggaaagagtaaatctctatcatcaagccaaaatgtgctgctgagttccatgtggcagcaaaagaaattgtttgatgctgtaatcactttgataacagactccaacttattgctcagaagcttcaaggattgccattataactcttgtaacaactttatagaagttgaagggatctcatctctccttggaaagttcatcttgaatttttctgaatccaaggagttgttagatgaatgcttgcttggatccactaatatatttgctggtgcatataagagcatgcctcattctgcaacagagatggaacaactttttactgataattgccagcatatagattcattgttggatggatacttgcctggatccaataatatatttccagatgcatataagagtattcctcttgctacaacagagatggagcaactttttgctgataattgccagcttatagattcattgagagaagatatgaaggttctatgccacagggatctttcagtgggatctgttaagaaagttcttatctctcgtttggaagaattgttggagaagggcaagatggcaatggagaaccgaagacatgttgaagaaaatcataagctatgcttaaagcttgaagcttcgtatatagaaattttgaaggaaactttcatgttagttgttggtgctgtcagaaagctcactgatcatgaagtatgcagtaatggaactgaaaaatcgccagttggtaatgttgcatcatggaaagatactttgcagacatgcattatgaatcttaaattggatgatatttgtgttgctggtgaaaagattcgtattctagtgaggttgctggttgactataaacctgatatacgtactagtatagagctgcacctaatgcatcttcatgcttggctgagtgtgatcctatcatcagcagaagggatactttccgaacttttagaagcacacataacaacttctgaaatgactcttgcacttggggacctttttattcatttatttacggatgggtttggttccactgaagatacagccgaagatgcagatgaactacagcaagatgctgttggaagtggaactggaatgggtgagggggatggtcaaaagagtgtaagctctgatatagatgatgaatcacaacttggtgacagtaag

SEQ ID NO: 135890 - DNA, 539 bp, Zea Mays
tacagaagaagctgaacaagcagatcagaggttagatgcttcagatgatatggaggaaggagatatggcacaacatagcgatggtgtggtagataatgaaggggagcatgttgaagatgcaaatacagacgcaggtgagatggattcacaccaattggacaaggcggattcacttatgcctctgtcacaaggcctacagcctgacaatatgcaaataaattctaatggagaatctgaagcgaacttggccaacagcagtgatatgcatggcgctgttgctccttcagtaaatttttcaggaaatgaagtgcccaatatggaaatatctatgcccaatactggtaacgattcaatactatcgtctaactccaagccagatatgcaaaatgatgctcagcagcacatcaagcagacaaatcctttcagaagcatcggagatgcattggaggactggaaagaacgggccagagtctcagctgatactcaggatcatcaaccagaaactggaaaagatagtagtgagaacactactgaatttc

SEQ ID NO: 135891 - DNA, 798 bp, Zea Mays
gtctgatctcttgacacatctgaatgttatgcttgatactgccgttgcacgggcacgcaccccatcagggcaaaatcctctccagcaactgatactgataatatctgatggaaaattccatgaaaaggaaaacttgaggcgccatgttagagacgttctaaatcgaaagaggatggtcgcgtatgtgctcctggatagccccgaggattctattattaatctaaaggaagcatgcttcagagtaggggagaaggtagagctgaaaaaatacatggattcctttccgttcccgtattatgttatgctacagaacattgaagctcttcctcgcacattggccgacctgcttagacagtggtttgagctcatgcagagcgccaacgagtgacccttgggagttgggagtagtgccacgcatttagctgtacagcaaactacattctagcttccatttttgcttgggcctggacagttctgtggtggcaagcttgattgtgcacaaatgccttcacggttcaaatcgctttcctgaaatatgatctctggtcgcaggcttgattgtctaaaagcatcatcacaattcaaattgtttttgggaaatttgaatagaatttccgctttcctgaaatatggtctctgctcgcaggctttattgtgtaaaaacatcatcacaatttaaattgtttctggcaaatttgaatagaatttccgtgctcaagagttatagtttgttttttttttcaatggagaattgttgctcacgtgctacatgcgacctgagtgtgattgatccttcaa

SEQ ID NO: 135892 - DNA, 849 bp, Zea Mays
atgcactcgatcatcacgcgcaaaaaaaaaaaaaaaaacaaacaaatcgacagtaccgtaactaattatccaatagctagccgcgcgcgcgctagctgttcatcctcagaactggccgccctcgaaggtctggccgaactgccagccagcggggacggcgccgttgctggtgacggtgcggccgtcgctggcggtgacctggaacgagagcgcctgcctgtccaggtacgagttgctctgccagttctggccccagttccgggacatgggctgccaccccgtgcgggagccccggatggagacggagcgcacgtcgccggcgcccgccacgttggtcaccagcaccaggttgaagtaggagtgcccgttgatggtgaaccggatgccgcccttcttcacgcacggcactctcctgaacgcgacgggcacgatgccggcgcggtactgcgcgatgcggaggaaggccggctcggccatgtcgaagtgcgggcgcggcgggttgcaccagccgccgtcgtcgctggggaggccgtagttgggcgggcagaagttggtggccgtgacggtgatggtgcccggcaggcaccaccgcccgtcgttgtcgcaccgcagctcgtagcaggacccgcacgccgcgccgtcgttgaacagcgccgtgctcagcgccgccgtgctcgtgccgtaccccgtgctgtacaggttgccgtacccgcaggcgccgcccattgtgccggacgcgtccccgccgccgtagaacgtggcgtgcgcgctctgccacccgccggcagcggcctcccgcgcgaggagtccgagcaggaggagaagagcgccggcaatggccatcgctga

SEQ ID NO: 135893 - DNA, 155 bp, Zea Mays
ccgggttgcccgcctaaaccagaggctgttatagatgccctaacaaaacttcgtaagaagatagcgcgagaaataattgaggatcgaactctatatcaaagtcaaaagaaaaatagatcttttactacccgtcacaaactttatgttcggcacag

SEQ ID NO: 135894 - DNA, 828 bp, Zea Mays
cccgaaaacctcctcgatcgcctgcatcgacccggccaatagaaccctacgaaatctcgattctcgcaaactgtcagggcggcagaaaacgcgttgaccattcacaccccttcgccccaccctccagatcccgaccaggcggcgcgcccccgccctcgccggggataccggatctgccgtcgagccgccggggcaccacggccgatgcgaccagcacagcaccgctgccagaatcgccgacgaatcggctgacgcggtaaactagtctcccgcccggctgccagccgatgggcacctgcgggctcgccgcggtcgtcgcgctactcctcgcctcggctctactccctggccccgattccgcttcagccagaagccttctggaaggcgagaaccccagctccggcgaggacgctcctgcaccagccgtttctggccagtcttcagccgcggggcagcagactgagaacaagcggcatcaggaatcactgccgccggtgacgtcaccaccgccgccgccgcccacgcaggagactaattcgcagaaggcagccagtcctcccccaggacccaatgtcgggacggggcaggaggacacagggagtcaagggaggagggaggagactgacaaactgaaggaggccatggagaagtgtgacgcctcgcataagtgttcctctggaaacgaattttctgcttgccttcaggttcctgataatgctttagttgggccatacattattgtccacaatgaaggccaacatgatatggacattgatgtcaaagaaccatcatcaaatacaaacaatgataaaaagcctctacatcttg

SEQ ID NO: 135895 - DNA, 3343 bp, Zea Mays
ccagcagcaagcgcagcagacagcagtgcatctgcgccgcgaaccgccgctccagtccaatcaatggacggacacttcccatgatctcgtcgcccacctcctcttccgccgccgccgccgcggcaatgccgactccctcccgcctcctcttccccgtcctggtcctcctcgccgcgtcggccggggcggccacggccgccaccgtgagcgacgacgtgctcgcgctggtcgtcctcaagtcgggcctcttcgacccggcgggccgcctcgcgccctggtccgaggacgccgaccgcgcctgcgcctggccgggggtctcctgcgactcgcgcacggaccgcgtcgccgcgctcgacctccccgccgcgtcgctcgcgggccgcctcccgcgggccgcgctgctccgcctcgacgcgctcgtctcgctcgcgctcccggggaaccgcctctccggcacgctccctgacgcgctgccccctcgcctccgttctctcgacctctcgggcaacgcgatctcgggcggcatccccgcctcgctcgcgtcctgcgagtcgctcgtgtcgctcaacctctctcgcaatcggctcaccggcccggtccccgatggcatctggtcactgccgtcgctcaggtcggtggacctctccgggaacctgctctccgggagcgtacccggcgggttcccgcggagcagctcgctgcgtgaggtggacctgagccgcaacctgctccaaggggagataccggcggacatcggtgaagccgggctgcttaagtcccttgacctcgggcacaactcgttcaccggcgggctgcccgagtcgctgcgtgggctgtccgggctgagttttctcggcgctggtggcaatgacctatcagaggagctccagccgtggattggggaaatggcggcgctggagagactggatttgtctgccaaccgctttaccggcaccatcccggacgccatttcaggctgcaagaacctggtcgaggtcgacctcagccggaacgcgctcactggggagctcccatggtgggtgtttggggtacctctgcagcgcgtctccgtctctggaaatgcactgtcagggtgggtcaaggttccccgtgatgctgctgccaccctggaagccctggacctttcagccaatgctttcactggtgtgatcccgcctgagatttccacccttgcaagattgcagtacctgaatttgtcctcaaattccatgtcggggcagcttcctgcaagcattgggctgatgctgatgcttgaggtgttggacgtgagtgctaacaagttggatggggttgtgccactggagatcggaggtgccgttgcgctccgacagctgctgatgggtaggaattcacttactggatggattccggtgcagattggcacatgcaaatccttgattgctttggatctatcacacaacaaacttgcaggatcaattcctatatccatgggtaatcttactagtcttcaaacagttgatctctcagataacttgctgaacggcagcttaccgatggagctctcaaaacttgacagcctgcgtttcttcaatgtctctcacaattcgctgtcagggagccttcccaatagtcgcttctttgacagcatcccttattctttcctctccgataatgctggcctttgcagttcacagaagaacagttcctgcaatggtgtcatgccaaagccaattgttttcaaccctaattcttcgtcagacccctggatggatgttgccccaagttccccaagcaaccggcaccagaggaagatgatattgagcatctcaacactcatcgcaattgtgggtggagcagttattgttatcggtgtggtcaccataacagtgctcaacctccgtgcccatgcaacagcttcccgctctgcacttcccacttcattgtcagatgattatcatagccaatcagctgaatctccagaaaatgaggccaagtctgggaagctagtcatgtttggcagaggcagctcggattttagtgctgatgggcatgcgttgttgaataaggattgtgaacttgggcgtggaggctttggtactgtttacaaggcagtgctcagagatggccagccagtggccatcaagaagctgacagtttcaagtatggtcaagtcagagcatgacttcaagcagcacgtcaagcttctaggcaaggtgcggcaccataacattgtcaccctcaaaggcttctactggacttcctcactgcagctccttatatatgaattcattcctgctgggagtttgcatcagcacctccatgagtgctcatacgagagctcgctttcatgggtggagaggtttgacataatcgttggcgtggcccgcgcacttgtgcacttgcatcgctacggtataatccactacaatctgaagtccagcaatgtcttgctagacacgaatggtgagcccagggttggtgattatggtcttgtgaacctgctgccgatgctggatcgctatgtgctcagcagtaagatccagagcgtgctgggatacatggcacctgagttcacttgcacaacggtcaaggtcacggagaagtgcgacatatacagcttcggagtgctagtccttgagattttgtcaggcagaaggcccgtagaatatctggaagatagtgtggttgtgctttctgatcttgtcagtgatgcactcgatgatgacaggctggaggactgcatggatccacggctatcaggtgagttctcgatggtggaggccacactgatcatcaagctgggcctggtctgtgcatctcaggtgccttctcaacgaccggacatggctgaggtggtcagtatgcttgagatggtgaggagtcctcagggtaccccagaggatgatctggtttgagatccatttagggtgcgttcttttgttcaggattgatgccaggattggttccaggtgatcaaagcttatacaaattagataagcattcatggttagattggttctagatcatgattccggaacaaacaaacacacccttaccggagtttctcccttttctcattccttttttccattcgtctttgggtagatacatgttgaggagatggggaaagtgcggtccgaaagtatgttaggtctttgactagtgagtctagtttggttgcaatatttaggcacttctctatctcaggtgtctgaatttttagttgattttagggaacactcttgaataaccaactagtataagaaaattattgtttttatgatttgtgatttttctttgtatcgtaacaaattcaatttttatacttgcctgcctatagaaatgattgttagttatcttt

SEQ ID NO: 135896 - DNA, 1359 bp, Zea Mays
ctaccactaggtctctgctgcttgcgatggccatgggcccatggccacgcccatgctcccctccgtcgtccctcacgcaatgaccacggcgacggtgtcgctgtccgggcggcgggcgctctgctgggccactcccctgccgcctgtggcactggcactggcaggcttggcgtccatgacggggcggcggcacgtcgggcacgagccgcgggacagcagccaggcgtcgacgcacgggacgtggaacgcgtggccgcaccgcggcagcacgcgcaccttctcgccgtccgcgaactcgccgaggcagatggcgcacacgtccccgctcccggccccctcctcctcgtcgtctttcgcatccccgccgacgtaaacctccacggggatgctccgcagcgcgcgcttcttgatcccgccccggacgcccgcgcaggacgacgcggcgacgctcggcgacgccgccacctcgccgcccccggccgcggcccggcctccgcaccagagcgcgaacctggccagcgagttgagcgcgatggcgagcagcagcgccaggaacagcgccgccagcaggatcaccgtgttggtgtcgaaggtcgcgtcgacgaccccgggcgccgccgcgcccgcgcctccgacgccgccagtgccgttcacggccggccccggcgcctcggaggagtcccggcggtccatgtgccaccagctctcgcgcacgaatgctcgttccttcctgccgtgctctgtccgcggcagtaactgctaactagtcgcgatgcacgtttcgggagtgttgcgcggcgagtgtgcttgtataaagggggcgatccgttccgttccgttcctctcggtgttgtcgaagggcttcaagggataggcactcgaccgacgtgtggtgccgcccgctcgctttttggttgctttgtaggcaaagctagctagcaggaggactggaagatgaagtagagaatactataccttccttgcgttgcgtgcttaggcaggcggacaatgcaatgcaagccccgaagatttggaagctacctagctcgctagtcggctctggtgcattttggagcggtggaaagggcgtctcgcgaccgtcgacggccgtcgggtctccgtgagcagttagttggtcacttgcctggtcggactcggagcgcaaaagcgcacgccttggcctgcggtgtttagcgagctgcccgcgtcgcgttggctgggtacgcggggattttttttatttaattggccgcgcccgctcgtggcacactggcgacggcacgagacgttctttcagggattcctccgatcggagtgtgtcaccgagctcgctttttaaagcctttggagcgtttgtta

SEQ ID NO: 135897 - DNA, 717 bp, Zea Mays
atgaggcaatcaaagctgagagcagtgtcggcaaggccgtggttgttactcctttgcctcgcgctagcagccaccgccggcgtaatgcaagctcgcgcccagcctaacagcatcggtaatctcatggggcgcgcgggcgatcgagcacgtttcatcagcatcgactgtggtttcccggggacgacgagctacgtggacgacgccacgacgctgccgtacgccccggacgctgcgttcaccgacgccggcgagaaccacaacgtctcgtctgagcacgtcacgccggagctcccgaggatctaccgcgacgtgcgcagcttcgtggacggcgcgcgtaactgctacacgctcccgtcgaccctcgcggtggggctcaacaagtacctcttccgcgccgccttcatgtacggcaactacgacggcctcaaccggccgcccgtcttcgatctctacataggcgtcaacctctggaagacggtgaacctgtcgtcgtcggacccggccgccccagtcatcgcggaggccatcgttgtcgtaccggacgacttcgtccaggtttgcctggtgaacaccggcaccgggacgccgttcatctccgggctggagctgaggcctctcaagaactccatctacccgcaagtgaatgcgacacaggggctggtcctgcaaagcaggcgcaacttcggcccgactgatatgacagacattatcaggtga

SEQ ID NO: 135898 - DNA, 2227 bp, Zea Mays
acggccagcaggtaccctgacgatcaatacgacagattatggacacctatgattattgacgccatcgactggctggtgctatccacgacggaaaaggtgcggaacatatatgatgacctcttcgaggtgccgtcgaaggtgatgcagacggcgatcacgccgcgtgacgctaccagcagcatcaacttctattggaactccaagggctcgtcgcttgggtacataccggtcttccacttctccgaggtgctgcaggcgggcgccggcgttgttcgccagttcaacatcaacatcaacggcaagcggttcacctcccatgattattacacaccacggcacctcgaaagtggctacgtatacggtaccagaccttacaccaaccagatccggtataacgtctccatcgttaagacagacacgtcaacgctcccgcctatcatcaacgccgacgagattttcatcgtcatctctacgaccaacgttggcacggactcggaggacgtctctgctatgaaggctatcaaggcgaagtatcaggtgaagaagaactggatgggagacccgtgcgttgctgggacttttaggtgggatggactgacgtgcagctatgccatttctgatcctccaaaaattactgccctaaacatgtccttcagtggtctgaccggtgacatatcatctgctttcgcaaatctcaaggctgtccaatccttggatttgtcacacaacaacctgacgggctcaatccctagctccctgtcacaactgccgtcactgacaactctagatttgacggggaatcagctcagcggaccaataccctctagtcttctcaaaagaatccaagacggctccttaaacctaatctatgccgataatccagacctttgcaccaacgccggggattcatgtcagacggcgccgcaaggaaagagcaagctagtcatctactacgtcgctgttcctatggctctgatcgtggtggcgttggcagtactgctgtgttgtcttctgcggcggcgaaagacgcgagggctagcggacgtctctgtgaagccccgggacaagactccgacgagccttgcttcaatggcggccgacgaacacagacttagctcgctgcggcttgagaaccgccggttcacatacgaggacctagagatgatcaccgacagcttcaagcgtgtcattggccggggcggctttggatacgtctacgagggcttcttggaggatggcactcaggtggcggtgaagatgaggtctcagtcgtccaatcagggtgccaaggagttcctcacggaggcacagatcttgacacggatccatcacaagaaccttgtctccatggtcggctactgcaaagatggggtgtacatggcgcttgtctacgagtacatgtcagaaggatccctgcaggagcacattgcaggaaaacgcttgacttgggggcagaggcttcgaatcgcattggaatcagcgcaagggctagagtatctgcacaggggctgcaacccgcctctgattcacagggacgtgaagaccagcaacatcctactgaacgcgaaactggaggccaaggttgctgatttcggcatgtcaaaggctctagaccgcgacacctatgcgtccacgaacactcttgttggcacaccaggatacgtcgacccagagtacctggaaacaatgcagccaagcaccaagagcgacgtgtacagtttcggcgtggtgctcctggaactggtcacagggagacctcctatcctgcacagcccacagcccaccagcgtgatccagtgggcacggcagcacctggcgcgcggcgacatcgaggtcgtggtggacgcgtccatgggaggcaaccacgacgtcaacagcgtgtggaaagccgcggaggtcgcgctccagtgcaccgagcaggcgtcggcgcagcgccccaccatgggcgacgtggtggcgcagctcctggagtgcctcgacctcgagaagggccgctccgccaacgaaagtttctgcgacggagacgacagcggctccgcgaccgcgagcttgagccacagcagcgcatttgtgacggggcgtatttttgggacggtgccaatggtggagacaggccctgccacgaggtaaacgctagttgacgctgtttcacaaaggcacatggaagtgttcacaaattttttatatgaaaaacttcttattcaaacgtatgaaataagaacagcct

SEQ ID NO: 135899 - DNA, 3756 bp, Zea Mays
atgattattgacgccatcgactggctggtgctatccacgacggaaaaggtgcggaacatatatgatgacctcttcgaggtgccgtcgaaggtgatgcagacggcgatcacgccgcgtgacgctaccagcagcatcaacttctattggaactccaagggctcgtcgcttgggtacataccggtcttccacttctccgaggtgctgcaggcgggcgccggcgttgttcgccagttcaacatcaacatcaacggcaagcggttcacctcccatgattattacacaccacggcacctcgaaagtggctacgtatacggtaccagaccttacaccaaccagatccggtataacgtctccatcgttaagacagacacgtcaacgctcccgcctatcatcaacgccgacgagattttcatcgtcatctctacgaccaacgttggcacggactcggaggacgtctctgctatgaaggctatcaaggcgaagtatcaggtgaagaagaactggatgggagacccgtgcgttgctgggacttttaggtgggatggactgacgtgcagctatgccatttctgatcctccaaaaattactgccctaaacatgtccttcagtggtctgaccggtgacatatcatctgctttcgcaaatctcaaggctgtccaatccttctatgccgataatccagacctttgcaccaacgccggggattcatgtcagacggcgccgcaaggaaagagcaagctagtcatctactacgtcgctgttcctatggctctgatcgtggtggcgttggcagtactgctgtgttgtcttctgcggcggcgaaagacgcgagggctagcggacgtctctgtgaagccccgggacaagactccgacgagccttgcttcaatggcggccgacgaacacagacttagctcgctgcggcttgagaaccgccggttcacatacgaggacctagagatgatcaccgacagcttcaagcgtgtcattggccggggcggctttggatacgtctacgagggcttcttggaggatggcactcaggtggcggtgaagatgaggtctcagtcgtccaatcagggtgccaaggagttcctcacggaggcacagatcttgacacggatccatcacaagaaccttgtctccatggtcggctactgcaaagatggggtgtacatggcgcttgtctacgagtacatgtcagaaggatccctgcaggagcacattgcaggaaaacgcttgacttgggggcagaggcttcgaatcgcattggaatcagcgcaagggctagagtatctgcacaggggctgcaacccgcctctgattcacagggacgtgaagaccagcaacatcctactgaacgcgaaactggaggccaaggttgctgatttcggcatgtcaaaggctctagaccgcgacacctatgcgtccacgaacactcttgttggcacaccaggatacgtcgacccagagtacctggaaacaatgcagccaagcaccaagagcgacgtgtacagtttcggcgtggtgctcctggaactggtcacagggagacctcctatcctgcacagcccacagcccaccagcgtgatccagtgggcacggcagcacctggcgcgcggcgacatcgaggtcgtggtggacgcgtccatgggaggcaaccacgacgtcaacagcgtgtggaaagccgcggaggtcgcgctccagtgcaccgagcaggcgtcggcgcagcgccccaccatgggcgacgtggtggcgcagctcctggagtgcctcgacctcgagaagggccgctccgccaacgaaagtttctgcgacggagacgacagcggctccgcgaccgcgagcttgagccacagcagcgcatttgtgacggggcgtatttttgggacggtgccaatggtggagacaggccctgccacgagacgcgcgctcgtgtgtgtctcactgtctcccctgtcccctctcccgcgtgctcgtctaccttcggctcccccatgggatgagagcgccttcctcgccatggccgcctcccacctgccccccgcagccaccctcgtcaagaagtacccaactctcctccacccgttcggcgccaaaccacacgcccagaggctgatcttcaggtgccgcgcgaccagcagcgagggtgcggacgatggctgggcgtcctttgtggacgagctcaagaggtcgctgcaggtggacccgtccgacgcggtgattagcaacgccggcgcgggtctcacatcaaataacgacctcgtcaccgcgctgccactggaaccctccgctggtccggctgcgggagacgcgaccactgccgctgccggcgcggtgagcgagctcctgggcgtggacgcgtcaggcgcggtggccacccccgaccgcctcctgagctccctgctgcacctggacgcgtccaacccggtggcgagcgtggcgggcggcgcgctgtctcgcctggacgcgctcacgtcgggactgtcggacgcgcagcggtgggcgctgttcgggttcctggccgcgacgtggctgtacctgaccgcgcggcccggggtgctgagcggcgccgtggacatgtacgtgctggcgccgctgcagctggcgctggacagcgtgctgggccggcggagcctcaagatgagcgacttcgtcgtcggcgagcgcatcggggagggctccttcggggtggtgtatgccggcgccgtggtgccgaagaacggcgccgtcgtggaggagcggtccggcaaggccaagacgagcctccagaacgacgacaggtacaaggagaaggtcatactcaagaagatcaaggtcatgacggtgggggcgaaggagtgtggggactacgaggagtggttcaactaccgcgtgtcgagagcggcgccggagtcgtgcgccgacttcctcgggagcttcgtcgccgacaagaacaaggcggagttcgtcaagggcggcaagtggctcgtctggaagtttgagggcgacaggacgctggccaattacctgagcgagcgcggcttcccgtccaacctggagcgtctcatgttcgggcgcgtgctgcagggcctgggcccgctggagcgcgaggcgctggtggtgaagcaggtgatgcggcagctgatcacgtcgctgaagcgcatccacgccacgggcatcgtgcaccgcgacatcaagccgtccaacctcgtcgtgacccgccgcgggcaggtgaagctcatcgacttcggagccgccaccgacctccgcatcggcaagaactacgtgcccgaccgcgcgctgctcgacccggactactgcccgcccgagctctacgtcctccccgaggagacgcccgagcccccgccggagcccatcgccgccatcctctccccgatcctctggcagcagcagccatctttgcagctgaacagcccggacctgttcgacatgtactcggcggggatagtgctgatgcagatggccataccgacgctgcggacgcagtcggggctcaagaacttcaacgccgagctcaggtccgccggctacgacctcaacaggtggcggcagagcgcgcggcggaggcccgacctgcagatcctggacctcgactccggccgaggctgggacctcgccaccaagctcatctcggagaggggcgccaacggcggtggccgcctgtctgccgcggccgcgttgcgccacccgtattttctcctgggtggcgaccaggccgcggcggtgctgtccaagttctcgctcagtaaatag

SEQ ID NO: 135900 - DNA, 3546 bp, Zea Mays
atgattattgacgccatcgactggctggtgctatccacgacggaaaaggtgcggaacatatatgatgacctcttcgaggtgccgtcgaaggtgatgcagacggcgatcacgccgcgtgacgctaccagcagcatcaacttctattggaactccaagggctcgtcgcttgggtacataccggtcttccacttctccgaggtgctgcaggcgggcgccggcgttgttcgccagttcaacatcaacatcaacggcaagcggttcacctcccatgattattacacaccacggcacctcgaaagtggctacgtatacggtaccagaccttacaccaaccagatccggtataacgtctccatcgttaagacagacacgtcaacgctcccgcctatcatcaacgccgacgagattttcatcgtcatctctacgaccaacgttggcacggactcggaggacggtacgtgggatggactgacgtgcagctatgccatttctgatcctccaaaaattactgccctaaacatgtccttcagtggtctgaccggtgacatatcatctgctttcgcaaatctcaaggctgtccaatccttctatgccgataatccagacctttgcaccaacgccggggattcatgtcagacggcgccgcaaggaaagagcaagctagtcatctactacgtcgctgttcctatggctctgatcgtggtggcgttggcagtactgctgtgttgtcttctgcggcggcgaaagacgcgagggctagcggacgtctctgtgaagccccgggacaagactccgacgagccttgcttcaatggcggccgacgaacacagacttagctcgctgcggcttgagaaccgccggttcacatacgaggacctagagatgatcaccgacagcttcaagcgtgtcattggccggggcggctttggatacgtctacgagggcttcttggaggatggcactcaggtggcggtgaagatgaggtctcagtcgtccaatcagggtgccaaggagttcctcacggaggcacagatcttgacacggatccatcacaagaaccttgtctccatggtcggctactgcaaagatggggtgtacatggcgcttgtctacgagtacatgtcagaaggatccctgcaggagcacattgcaggaaaacgcttgacttgggggcagaggcttcgaatcgcattggaatcagcgcaagggctagagtatctgcacaggggctgcaacccgcctctgattcacagggacgtgaagaccagcaacatcctactgaacgcgaaactggaggccaaggttgctgatttcggcatgtcaaaggctctagaccgcgacacctatgcgtccacgaacactcttgttggcacaccaggatacgtcgacccagagtaccacctggcgcgcggcgacatcgaggtcgtggtggacgcgtccatgggaggcaaccacgacgtcaacagcgtgtggaaagccgcggaggtcgcgctccagtgcaccgagcaggcgtcggcgcagcgccccaccatgggcgacgtggtggcgcagctcctggagtgcctcgacctcgagaagggccgctccgccaacgaaagtttctgcgacggagacgacagcggctccgcgaccgcgagcttgagccacagcagcgcatttgtgacggggcgtatttttgggacggtgccaatggtggagacaggccctgccacgagacgcgcgctcgtgtgtgtctcactgtctcccctgtcccctctcccgcgtgctcgtctaccttcggctcccccatgggatgagagcgccttcctcgccatggccgcctcccacctgccccccgcagccaccctcgtcaagaagtacccaactctcctccacccgttcggcgccaaaccacacgcccagaggctgatcttcaggtgccgcgcgaccagcagcgagggtgcggacgatggctgggcgtcctttgtggacgagctcaagaggtcgctgcaggtggacccgtccgacgcggtgattagcaacgccggcgcgggtctcacatcaaataacgacctcgtcaccgcgctgccactggaaccctccgctggtccggctgcgggagacgcgaccactgccgctgccggcgcggtgagcgagctcctgggcgtggacgcgtcaggcgcggtggccacccccgaccgcctcctgagctccctgctgcacctggacgcgtccaacccggtggcgagcgtggcgggcggcgcgctgtctcgcctggacgcgctcacgtcgggactgtcggacgcgcagcggtgggcgctgttcgggttcctggccgcgacgtggctgtacctgaccgcgcggcccggggtgctgagcggcgccgtggacatgtacgtgctggcgccgctgcagctggcgctggacagcgtgctgggccggcggagcctcaagatgagcgacttcgtcgtcggcgagcgcatcggggagggctccttcggggtggtgtatgccggcgccgtggtgccgaagaacggcgccgtcgtggaggagcggtccggcaaggccaagacgagcctccagaacgacgacaggtacaaggagaaggtcatactcaagaagatcaaggtcatgacggtgggggcgaaggagtgtggggactacgaggagtggttcaactaccgcgtgtcgagagcggcgccggagtcgtgcgccgacttcctcgggagcttcgtcgccgacaagaacaaggcggagttcgtcaagggcggcaagtggctcgtctggaagtttgagggcgacaggacgctggccaattacctgagcgagcgcggcttcccgtccaacctggagcgtctcatgttcgggcgcgtgctgcagggcctgggcccgctggagcgcgaggcgctggtggtgaagcaggtgatgcggcagctgatcacgtcgctgaagcgcatccacgccacgggcatcgtgcaccgcgacatcaagccgtccaacctcgtcgtgacccgccgcgggcaggtgaagctcatcgacttcggagccgccaccgacctccgcatcggcaagaactacgtgcccgaccgcgcgctgctcgacccggactactgcccgcccgagctctacgtcctccccgaggagacgcccgagcccccgccggagcccatcgccgccatcctctccccgatcctctggcagcagcagccatctttgcagctgaacagcccggacctgttcgacatgtactcggcggggatagtgctgatgcagatggccataccgacgctgcggacgcagtcggggctcaagaacttcaacgccgagctcaggtccgccggctacgacctcaacaggtggcggcagagcgcgcggcggaggcccgacctgcagatcctggacctcgactccggccgaggctgggacctcgccaccaagctcatctcggagaggggcgccaacggcggtggccgcctgtctgccgcggccgcgttgcgccacccgtattttctcctgggtggcgaccaggccgcggcggtgctgtccaagttctcgctcagtaaatag

SEQ ID NO: 135901 - DNA, 936 bp, Zea Mays
atggcaattctgactaaatgtaaaaggctgaatattgataggtccaaaacctgtcgattttggtgtccatttgtgagagtagaggtctttgatgatgcatcagaaaatttacttcggctcacagcaggcacagagatcttcttcacaggagctgaggcagctgaaggttcagtatttggggttgatcttatgcctaaagccattcctggccgtgatctgccagcagatggtggtctttcaggtaattttgtccttagatttggtggagtttcatttggaaaatcggggatatcaagaggtcgcactggagctcggggtcgtgggtttggagaacttggacgagatgatggagcagatgaaggtgctgagttcctgccagtactggctgcagacctggacgaagtcgtaaagctgttgatgctagaagtccgtccaacagaaggagaacgaccaatagctggagctgatgagcgaattgcaggctgtcgtgtaggtgtagatgatcgtgagctggaacggctcattgaaggaaccgaacttgaggacaatgaggtggcacggcttatcccaggaacattacctgaggaagaccctgtcttggcagcagcggaatcagttgaagagtttggtgctgttggacgagttctcgtaggagtagatgggcgagtttttgctggtgtagatggacgagtattaacaggagtagaggatcttgcaggcactggacgtgcagctggagctgaatgctttggtgtgccaactgtgctgcttcgcctactaggagttgtaggtcttgaagtgactgaagaaatgcttgtattcagaactgatgtcctgttgttgccattcatgagagctgactggatagatgatcggctgacagagttacttcttgcaggtctagtgggaatcgtcgaattcccattctctgtttga

SEQ ID NO: 135902 - DNA, 1144 bp, Zea Mays
ttggatctcgctcgaggaaccaaaagcactctcgatcacaggaattcacgtcgatcgcttgagttagtttgcagccaagatgaacgacgccgatgtcgggaagcaggtgcagcagatggtccggttcatcctgcaggaggccgacgagaaagccagcgagatcagtgttgccgccgaggaggagttcagcatcgagaagctgcagctggtggagtcggaaaaacggagggtgcggcaggagtacgagcgcaaggagaagcaggtggacgtccgcaggaagatcgagtactcgacggagctgaacgcggcgcgcatcaagctgctgcgggcgcaggacgacgtggtgaccgggatgaaggagagcgccggcgacgcgctgctccgcgtcaccaaggacgccaacgcctacaagagggtcctcaagggcctcatcgtgcagagcctgcttcgcctgagggagccggcgctggtgctgcggtgccgagaggcggaccggagcctggtggaggcggtgctggaggtggccaagaaggagtacgccgagaaggccaaggtcaacctccccaagatcatcatcgacggcaaggtctacctgccgccgcagaggaccagccgcgacgcgcatgggccgtcctgctccggcggcgtggtgctcgcgtcccaggacggcaagatcgtctgcgacaacacgctggacgccaggctcagcgtctccttcaggcaaaagctccccgagatcaggaagaaactcttcagccagcgagtatcgtcctaatgttttttttttgttactctgatcgattgttttctgaaataaaccagaagcggtccgatcctacgaagatacacaggtcctgacattgggtgaagcccgtatgtgcacgtttcggatttcgcaacatcgatttgagcttgaacagttcttcgctagcttgtcggtagaggcggcaatggctgaagttgagtctgtatcccggtggataggggacctccgcgaccgttaccctgagtcgagttgtgtcacagtctgtatctatcgctcctgaaacctgaggggcctgtattgtttgtcatgcactttgtttcttctcttctgtttgtagcctactatatccactgaaatctgaggggcctgtattgtttg

SEQ ID NO: 135903 - DNA, 1378 bp, Zea Mays
gaccttatccaccaacctccggtccacggtgactggccgcaagctcctcctctcccgcaaacacccacgcccactccattgctcctctcctccaacatcgctcacgcggtctcctctccccgctcagctccgctccgctcccggagacacgcaagcttcccgttcccgggaacgcgcactaaagatgcctccagccttcgccgccgcaccttcctcctcgatgtaagcgtctgagcgccgaaccactggccctcaaagcccttgtacttctgtactgctggtgcttgtaaaatatgtgtatatatatttcagatgtggcgttcgcatcccaactgtgcgccgtttcgaagcgcaaagcacggtttccacgcccagatttatgcgtaatcgggtggcagcaaaaacacggtctacatcagcttggtccttgaaggctggcttgtgggattctctcagatctggccttttgaagaataatagcagtacagagacagtagagccaccaccagcaccacttgaagtggaagagcctttgcctgtggaaatagtactcctagaaagaacactacctgatggaagcacagaacaaattttattttcttcagccggagatgttgatgtatatgatctccaagccttatgcaataaggtaggatggccacgcaggcctctttcaaagatagcagcctcattaagaaatagctacttggttgctacactatattcaataattagatcttcagaaacagaagttatttgacagagggagaagagaagaaacagctcattgggatggcacgagcaacctcagaccatgccttcaatgcaacgatttgggatgtccttgttgatccttcataccagggtcagggtcttggtaaagcactcatggagaaagtaattcgtactttgctccagcgagacatcaacaacattacactgtttgcggataacaaagttatagatttctacaagaacctggggttcgaagttgatcctcaaggcatcaagggcatgttctggtaccccagattttagcaccagcagccagatatatcgttcgaggggttgttgtacttgaagcatctccccgttctgaaagggtaattgacaggtcagggctccacgccctgatggatctcgcacttaatatttcatccttggtgagaagctgtaattttcttcaatgctaaaacgaccatgtgatcggctcaactctccgcacccctgttgtaaccataaccccaacaaaacacgctatttgtaatacccgtgtttcatacatgcgctctagactcttgccatctgtatgtaacgtacgctttcaaatttctacattcgaaatggaaaaaaaaactgtatccatcagttatccata

SEQ ID NO: 135904 - DNA, 3253 bp, Zea Mays
cgcgtagctgcgggagtcgctcttcccgcgggagcgggagctgaagtaagcaagcggataggatcgacaaggaggcaaggagcaacgccgccttctcagtttctcactcgcgtccctctcctgttcctcagcttcgtccagaacttgccttcctccgccgccctttattccaggcttcctgagaagaagagcttttcaattgattatttcaggaggatggctaagtttgcagacgtcctctgtgcagttacactacttgtgttgctcccctgctcggatgttgcattggggcagactactgacccttccgaggtcaatgggctcagggctatcaagggacgattagttgatcctatgcaaaaccttatgaattggaataggggagatccgtgcaggtcaaattggacaggagtcttctgccacaaagtgaatgatgatacatttcttcatgtgacagaattgcagttatttaagaggaatctctcaggaactctggcaccagaggtcagtcttttatctcatctgaaaacactggattttatgtggaacaacttaactggtagcatcccaaaggaaataggcaacatcactacgctcaaacttatacttttgaatggcaatcaactctctggtattttaccttatgagatcggtaaccttcaaagtttaaacagattacaggttgaccaaaaccaattgtccggccccatacctaaatcattttccaatttaagaagtgtgaaacatcttcatatgaacaataattcgttaagtggggccatcccgtctgaactttccacattgcctcttcttcttcacctgcttgttgacaataacaacctatctggacctctccctccagaatttgctgaagcgcctgccatgaaaatatttcaggctgataacaataacttcagtggaagttccatccctactacatataacaacatatccacactactaaagctgagtcttagaaattgcagcttgcaaggagatattccagatttgagtagcatacctcaacttggctatttggatattagctggaaccagttgacaggatctataccaactaataagctcgcttccaatatcactacaattgatttgtcgcacaacatgctcaatggaactatcccacagaacttctcagggctccccaagcttcagatattgtcacttgaggataattatctaaatggttctgttccctcgacaatctggaatggcatcgagcttactggaaatagaagccttattctagacttccaaaacaattctctcaagacaattccggacacatttgatcctcccccaaataccactgtaatgctatatggaaaccctgtgtgtgggggtacgaatggatctctgataaccaacctgtgccaacccatgtcagtaaacatgcaaacgtcgcaaaatgaacatggctctagttgtcaaccttgtcctgtggataaaaattatgagtacaatccatcatcaccactaacttgcttttgtgcggtgccacttggagtcggacttcgtctgaagagtccaggaatcacagattttcgtccctatgaagatgactttgagatcaacttaacctctttattgcaactgtttcggtatcagttaagtattgaacgctacatatgggaggttggtccaaggctaaatatgcacatgaagttatttccaagtaattcaagtctattcaatatatctgagattgtgcgactcagacatgtacttgctggctgggaaattaccctttcagatgtatttggtccatatgagcttctcaacttcacactaggttcttatgcagatgaatttccaaatgcagtgtcaacaggtttaagtaaggctgcactgggcagtatctttgctagcacaattgctggcgctattttactttctgtggtagctaccacccttatagtgagaaggcgttcaagacacagaactgtctcaaaacgttcattgtcaaggttttctgtcaaagttgatggcgttagatgtttcacatttgaagaaatggctatagcaacaaataattttgatctatcagcccaagttggccaaggaggttacggcaaagtctacaagggaattctaggcgatggagcacttgtagcaatcaaacgagcacacgaggattcccttcaaggttcaagggagttctgcacggagatagagctactatcaagattgcatcatcgcaatttggtttcattggttggctattgcgatgaagaggatgagcagatgctggtttatgaattcatgtcaaatggcactttacgtgatcatctttctgccaagtccaagagacctctaagttttggtttgaggttgaaaatcgcattgggtgctgcaaagggaattttgtatctacatactgaagcagatccacctatattccaccgtgatgttaaggccagcaacattctgttggactccaaattcgttgcaaaggtagccgattttggtctctcgaggcttgctccagtgccagatgtcgaagggacattgccagctcacgtatccactgttgtcaagggcaccccaggctatcttgatccggaatacttcctaactcacaaactgaccgacaagagtgatgtttacagcctgggtgtcgtgttccttgaaatgttaactggtatgaaaccaattgagcatggtaaaaacatagtgagagaggtatgcacttcttcagtaaactcagcttgccagtcgggcgcagtttctggaataatcgatggccggatgggcttataccccccagaatgcatcaagaggttcttatcactagcaaccaagtgttgccaggatgaaactgatgacaggccttccatgtgggagattgtcagagaacttgagctcatcttgaggatgatgcctgaagaggacctgattctgctggaaacctcagaaacagactcgaccgatgtcagtaagtcgttgtcatcttcagcgaccaggaccctcttcgtctcgtcacaggcctctgggagtcttgatgcgagcagcggcatgatctctggaagagtaactccccggtaggcatggtgtaatacttgtgaatatgcaagtttgttctgtaacattataggcttaccactcctaggacctgtcttttatgaattattcatattcagccgaacgtacagtagataatagcttatgatacactggaacatagctggcattgcattctttacctttctaatatgttaatctgctttctgtaagg

SEQ ID NO: 135905 - DNA, 81 bp, Zea Mays
ctccgtacttcggcaactttgagtgctgacatgtttaaggtcaattctttgtttagaagtaacaaggttttttttatagaa

SEQ ID NO: 135906 - DNA, 134 bp, Zea Mays
tttattttttgtcttccacgtgtaggtggtaccagaactgtgactgtgagcaccagaggtttaccagttactaccaactgagattgcgctgactatagaagagggtttctctggaagagcaggaatgatgtcaa

SEQ ID NO: 135907 - DNA, 226 bp, Zea Mays
taaggacctccttataaacgagatttgcatactgaacagtgttcttctatttaagtgagatgcagttatctatatctagtttagttgggtccaaagacccaagactatttactaaacaatacatgaaacataatgaaaagagaccaataacatctattcaatgctcatctgctttatttgttgtatcaaccaaatgaccactaaacaataggaagctaaaaaggag

SEQ ID NO: 135908 - DNA, 435 bp, Zea Mays
ctgatggatacagtttttttcccatttcgagtgtagaaatttgaaaacgtacgttacatacagatgacaagagtccagagcgcatgtatgaaacacgggtattacaaatagcgtgttttgttggggttatggttacaacaggggtgcggcgagttgaaccgatcacatggtcgttttagcattgaagaaaattacagcttctcaccaaggatgaaatattaagtgcgagatccatcagggcgtggagccctgacctgtcaatctgacctgcaattaccctttcagaacgtggagatgcttcaagtacaacaacccctcgaacgatatatctggctgctggtgctaaaatctggggtaccagaacatgctcttgatgccttgaggatcaacttggaaccccaggttcttgtagaaatctataactacatttattgc

SEQ ID NO: 135909 - DNA, 393 bp, Zea Mays
atggcggacctcctcggcgatccggcgtggccgcagctccacccgcggccctgcaccgacacgccatggccaagcctacagtgcgagcttgcgcccgacgacgtgcgcgtgctccgcgccacccgcctccacctgggccccgacgtcgccaccccgccctgcaggcccggggccaggctcgaccctgcctcgctgcgcggcctaccgcacctccggacgctctccatcttcgtctgtttcggtgccgcccaggcccccgtcgagctgtcgcccgcgctattcacgtcgtcgtcctcgctcgagcagatcatgctcaagtccaaccccagcctcacctcccccataccggcgacgttggttatcattgtttttgaggaaaaaatagcgtattag

SEQ ID NO: 135910 - DNA, 1440 bp, Zea Mays
gcgcagggtcaggagaggcagaggcctcagagatacgccgggacgcaacacgtcgtgccgcgcggagggttttgccgagattttccctcaaaagggtattgccacccgcaccgagaaaagaaaacgatacacaccgcgataaaaacataccctctccatcctctcctcttcttcctcctcccgtagcggcttcccccgatttgcacccgggcgcggccccatccccacctggccgccgcgcgccgccatggacggcctgcacggtacggacgcatgcttctcccccgcgagggctatctcgccgcaggtgaggccccccgggccgccggacgtaggcagtcagtacctggcggagctgctgcaggagcaccagaagctggggcccttcatgcaggtgctcccaatctgcagcaggctgctgaatcaagaaatagtgcgggtgtcgaatatacggcgccaacatggtgttgctggcgactttgagaggtttccagccgcaagccccaaccagatgcatccggcaccccccatgacaaacttttgtggaaacggttttagtccatggaatgggatgcattcagagagagtaggtgttccgcaaggagctatgggttggcaaggacccccacagagcccctcttcttatattgtcaagaagattttgcggttggaagtaccgacagaagcataccctaatttcaattttatcggccgtcttcttggaccaaggggaaactctttaaagaggattgaagcctccacaggctgtcgtgttttcatcagagggaaaggctcaattaaagattctggcaaggaggaacaactcaagggaagacctggctatgaacacttgagtgaacccctccatatcttgattgaagctgagttacctgctaatgtgattgatgcaagacttgcaaaggcacaagagatccttgaagagctgttgaaaccagtggacgaatcacaagactactacaagagacagcaactgcgagaacttgcaatgctaaattcgccactccgagaggagagtccacatccaggtggtgctcctcctagtcccttcagtaacggcggcatgaaaagagtgaaacaatgacaccgccgaggctcgttcctccatcttgactccccagcaaccccaatgcagtccataccttcacaccctatttttcaatgagcaagctttcatgacggtgttggtagtgtgtgacattcttcactgtactagcaggtgaattttgatctcccatcccatgttacattaaccttgagtgacagatgactatgcgtagtgtatcctctatggcagtataactagaacatttgatttatttgttactggtaatgctgagatatagtactgtgcagattctgagttacggtgaactagtgtgccggtatttatctcaattttgtttgcttttcaattttaac

SEQ ID NO: 135911 - DNA, 1438 bp, Zea Mays
gcgcagggtcaggagaggcagaggcctcagagatacgccgggacgcaacacgtcgtgccgcgcggagggttttgccgagattttccctcaaaagggtattgccacccgcaccgagaaaagaaaacgatacacaccgcgataaaaacataccctctccatcctctcctcttcttcctcctcccgtagcggcttcccccgatttgcacccgggcgcggccccatccccacctggccgccgcgcgccgccatggacggcctgcacggtacggacgcatgcttctcccccgcgagggctatctcgccgcaggtgaggccccccgggccgccggacgtaggcagtcagtacctggcggagctgctgcaggagcaccagaagctggggcccttcatgcaggtgctcccaatctgcagcaggctgctgaatcaagaaatagtgcgggtgtcgaatatacggcgccaacatggtgttgctggcgactttgagaggtttccagccgcaagccccaaccagatgcatccggcaccccccatgacaaacttttgtggaaacggttttagtccatggaatgggatgcattcagagagtaggtgttccgcaaggagctatgggttggcaaggacccccacagagcccctcttcttatattgtcaagaagattttgcggttggaagtaccgacagaagcataccctaatttcaattttatcggccgtcttcttggaccaaggggaaactctttaaagaggattgaagcctccacaggctgtcgtgttttcatcagagggaaaggctcaattaaagattctggcaaggaggaacaactcaagggaagacctggctatgaacacttgagtgaacccctccatatcttgattgaagctgagttacctgctaatgtgattgatgcaagacttgcaaaggcacaagagatccttgaagagctgttgaaaccagtggacgaatcacaagactactacaagagacagcaactgcgagaacttgcaatgctaaattcgccactccgagaggagagtccacatccaggtggtgctcctcctagtcccttcagtaacggcggcatgaaaagagtgaaacaatgacaccgccgaggctcgttcctccatcttgactccccagcaaccccaatgcagtccataccttcacaccctatttttcaatgagcaagctttcatgacggtgttggtagtgtgtgacattcttcactgtactagcaggtgaattttgatctcccatcccatgttacattaaccttgagtgacagatgactatgcgtagtgtatcctctatggcagtataactagaacatttgatttatttgttactggtaatgctgagatatagtactgtgcagattctgagttacggtgaactagtgtgccggtatttatctcaattttgtttgcttttcaattttaac

SEQ ID NO: 135912 - DNA, 1158 bp, Zea Mays
cctcgatttcccgtctcctttgtgttgtgtggtcggactggattgccggtggcgcagtcagtacctggcggagctgctgcaggagcaccagaagctggggcccttcatgcaggtgctcccaatctgcagcaggctgctgaatcaagaaatagtgcgggtgtcgaatatacggcgccaacatggtgttgctggcgactttgagaggtttccagccgcaagccccaaccagatgcatccggcaccccccatgacaaacttttgtggaaacggttttagtccatggaatgggatgcattcagagagagtaggtgttccgcaaggagctatgggttggcaaggacccccacagagcccctcttcttatattgtcaagaagattttgcggttggaagtaccgacagaagcataccctaatttcaattttatcggccgtcttcttggaccaaggggaaactctttaaagaggattgaagcctccacaggctgtcgtgttttcatcagagggaaaggctcaattaaagattctggcaaggaggaacaactcaagggaagacctggctatgaacacttgagtgaacccctccatatcttgattgaagctgagttacctgctaatgtgattgatgcaagacttgcaaaggcacaagagatccttgaagagctgttgaaaccagtggacgaatcacaagactactacaagagacagcaactgcgagaacttgcaatgctaaattcgccactccgagaggagagtccacatccaggtggtgctcctcctagtcccttcagtaacggcggcatgaaaagagtgaaacaatgacaccgccgaggctcgttcctccatcttgactccccagcaaccccaatgcagtccataccttcacaccctatttttcaatgagcaagctttcatgacggtgttggtagtgtgtgacattcttcactgtactagcaggtgaattttgatctcccatcccatgttacattaaccttgagtgacagatgactatgcgtagtgtatcctctatggcagtataactagaacatttgatttatttgttactggtaatgctgagatatagtactgtgcagattctgagttacggtgaactagtgtgccggtatttatctcaattttgtttgcttttcaattttaac

SEQ ID NO: 135913 - DNA, 1528 bp, Zea Mays
ctctctatactaatacggagtacttcggtagaaaagaattctaaaatccacacacaccattcgctctctcgctccactctctctctcgccgagtgagggaaggagggagagagaggaggcagggaagtggggagagcggcgaggacatggcggcgaaagcgagcagagcagccgcctccggcgcggcctacgaggagcagcgcaagaagcgggtcctcgagaacctcaagcatctggaggatttgggtatagcggagatgtctaagagcctgctccaggcggcgcgcctgcagaaactgaacaaggccggcgtgcgcgcgggccccaaggagaggaagaagttcgacgccaccgaggtgcggcgttcttcgagggcgaagaccacggtttcctacaaggacgatttcggtgaactagatgcttttctgcgtggcacaaggcgcagtggtggtaggaatacagaacatggaagagaatacactggaagaattccatcttatgaacagcaacaacgtgctttcagaaaagctgagaaacttcaagacagtctggaccctaataacccatcttttgttaagaccatggttcgatcacatgtgtcaagttgcttttggcttggtcttcctataagcttctgcaaaaataatctgccttccaaagaatttaggatggtgttggaggacgaagagggtcttgaatttgacgctgtctatattggaaaccgaactggtctaagtggtggatggaggggctttgcaatgcaccacaacctggaggaaggggattcattggtctttgaattggctgagcatgacaaatttaagatttatataataaaagctattgatgatgatgtgaaagaggctgagcctgatgacaagaatgacaatggtgttaccaaggaagagcctgaccaggaagaatcacctgttgctgagcctccaaaaggtgccaaaaggagaaaactccgaggacggcggtagtttttctattagtttacatcgaacttttaatattagacactctttgggtaagcgaatgccgctatgctagtgatgcgctctcctgccaggtcatccatttgctcctttttgttgacctgttctttctgaaattaggtgtccaattgcaacccatatattgcggtgaaaagcacatctatcaacgtaggtagtccttgattcatgtaaataagtagtttgacagtggagtacttacgctctcagaaccccctgtgtgctactttagcagagaggcaaattgcttctgtgcatacgaagtgacaatcattagcaaagagataattgcaatgactttctgtggcaaaactgcaaagacaggcgtcacctataaaatcggctcgcgagtaggataagtgggtgtttgattcctttagtcatccttctaaattttagtgattaaactttagttcctttaaatcctatttaaaagatttattttagttacatattttggtattttaggaactaaaagtgttagaaggtggaaactaaacaccttctaagac

SEQ ID NO: 135914 - DNA, 678 bp, Zea Mays
tcggtagaaaagaattctaaaatccacacacaccattcgctctctcgctccactctctctctcgccgagtgagggaaggagggagagagaggaggcagggaagtggggagagcggcgaggacatggcggcgaaagcgagcagagcagccgcctccggcgcggcctacgaggagcagcgcaagaagcgggtcctcgagaacctcaagcatctggaggatttgggtatagcggagatgtctaagagcctgctccaggcggcgcgcctgcagaaactgaacaaggccggcgtgcgcgcgggccccaaggagaggaagaagttcgacgccaccgaggtgcggcgttcttcgagggcgaagaccacggtttcctacaaggacgatttcggtgaactagatgcttttctgcgtggcacaaggcgcagtggtggtaggaatacagaacatggaagagaatacactggaagaattccatcttatgaacagcaacaacgtgctttcagaaaagctgagaaacttcaagacagtctggaccctaataacccatcttttgttaagaccatggttcgatcacatgtgtcaagttgcttttggcttgtaagctctaagataaactagaatttgtttgactcatttaccagaaaagcataggattaatttctaatcaaggatattttctcta

SEQ ID NO: 135915 - DNA, 1638 bp, Zea Mays
atggcgtaccgtcggaagcagggcatccagcgctcggccaccttcgtcgaggaccaccgccaggcgtcgtcgggcggctccgcgtcgccggccatcgcgtccccgcgcgccacacggttcgcggacgacagccgccgccccgaacgcccctctcccctggcctcgcccgccgcgcccggggacctaacgctgccttccatcggcgagcgcttacccgccgctccggcggcggcgggggcccaagcccaatgcgacgtcgagccgagtagcccgctgcaggaccctgtcacccatctctacacatcgccaacttgcctaaacgacgaggggcccaagtacgacctcgagctatccaagaaagagcacacgaagcatgggttctgggggcttctggctcagaaagccaaggtcatgctcgacgagaatggcaccccacgcattcagacctctgaatctcgctggtcctacgatcgggtccgaagctcggagagccagagccccacggcacggagaggaacgctggaaggcaggctagacatcggagggaagatcaaggacgttcttgagaaggagggcctggcggtggccgacaacacaatgtcaggcaacagccacggcggtgtcgtcgctgctgcccggaagctgcacatcaggaggaaggcgtgcagcatggacttccgggccgcaaacctgaccccggccagccccagcatgtcgccgatgctggccgacatggaatcgcctcagctcaaggcctctcgcgacgtagcgaacgccatggccgccaaggtgaagctgctgcagcgggagctcaagacgttgaaggccgacctggccttctccaaggagcggtgcgcgcagctggaggaggagaaccggctgctccgggatggcaaccacgacgccgacgaggacctgatacggcggcagctggagacgctgctcgcggagaagacgcggttggcgcacgagaacacggtgtacgcccgcgagaaccggttcctgcgggagatcgtcgactactaccagctcaacatgcaggacgtcgtcaaccttgacgacgacgacgacgacatcgaggaagaagacgacgattacgacgtcaacgccgacgacgtggagttggaggctgaacagtaccaagatcgccgcaagtgcctgccgtcccggcttgtgctggaggaagaggagcaccaggcggccgatccaggcgccgaaccgcagtcgcccactgagcagacggagtcgccgcgaatgctgaacacgaacagcggcggcggtgtcacccctgaccacgaatcgccgcggatcctgaacacgaacagcggcggcggcggcacccctgaccgcgaatcgccacggatcctgaacacgaacagtggcgtcacctctgaccacgaatcgccgcggatgctgaacacaaacagcggcggcacccctgaccacgaaccgccgcggatgctgaacacaaacagcggcgtcgaaattgctagtgaatcccccaggatgctgagcacaaacaccggcggcaacacaaatgagtcgccccggggctacaaggatgatggttcttcgccagaaacgacgagggacggttgacgattcttcatctctgatttgtcatttggattttgttga

SEQ ID NO: 135916 - DNA, 163 bp, Zea Mays
cgaaagcatcggtcttcctaatccattctggggtgacatcattacgtcgaacgcggcccgtgtacatccactcacggtcctccatcctctaacatatataaccgagtatagtttaatataaacatgtaatgcatgtacactacgttcctaccttctaataggt

SEQ ID NO: 135917 - DNA, 383 bp, Zea Mays
cgcgcatggccgccatggagtacagcagcctcttgcctctggcgctgctggcagggtggtgcgccctcgcggcggcgctagtcctggccatttctgcgtggctgcagcggccgcgccgcgtcgcagaggccttccgtcggcagggcgtggacggcccgccgccgtcgtcgttcctgtcgggtaacctctcggagatgcaggcgagggcggccgccgcggcggtggcggaggccgccggcggccgggacttccagaaggaaggcttcgacgactactgcatgaagatcttcccctacttcgagaagtggaggaaagcctacgatcccatgtggggcggggtacggttgtgctacagcggcaagcaagttgactatattaactag

SEQ ID NO: 135918 - DNA, 1279 bp, Zea Mays
gcaggcgagacgtacctgtactggctacgccgccggccggcgctgtacgtgtcggacccggagctgatccgcgagatcgggcgttgcgtgtcgctggacatgggcaagcccacctacctgcagaagggccaggagcccctctttggccgcggcgtcctcaaggccaacggcgccgactggcatcgccagcgcaagctcatcgcccccgagttctacatggcaaaggtcaagggcatggtggagctgatggtggacgcggcgcagccgctgctgacgtcgtgggaggacaaggtcgccgccgcgccgggcggcgtcgcggagctcgacgtggacgaggacatccggagcttctccttcgacgtcatctccagggcctgcttcgggggcgactactccagggggcgggagatcttcctccggctcagggcgctgtcgggcctcatgtccgagaccagcgtcatcttcaccatcccgtcgctcaggcacctgcccacgaggaagaaccggaggatctggaagctcacgcacgagatccggtcgctgatcctgcagctggcgagcgagcgcaaggcggcagcggcggcgctggcgcccggccgcgacttcctgggctccatcatcgacagcagccgggaccagccgcgcgcggacgacttcgtcgtggacaactgcaagaacatctacttcgcgggccacgagacgagcgcggtcaccgcgacgtggtgcctcatgctcctcgccgcgcacccggagtggcaggaccgcgcgcgcgccgaggcgctcggcgtctgcggcgccgcggcggcgccggacttcgacgcggtcgccaggatgaagacgctgcacgcggtggtcctggagacgctgcgcctcttcccgccgtcgtcgttcgtggtgcgtgaggtgttccgcgacatgcagctcggcaggctccgcgcgcccaagggcacctacctcttcgtccccgtctccaccatgcaccacgacgccgccgtctggggccccaccgctcgacgcttcgaccccggcaggttccgcgacggcgtggcggccgcgtgcaagcacccgcaggcgttcatgcccttcggcctcggcgcgcgcacctgcctcggccagaacctcgcgctcgtcgaggtcaaggtgctcgtggcgctcgtcctcgcgcgcttctcgcttgcgctgtcgccggactacaggcacgcccccgcattccggttcatcatcgagccggagttcgggctgcgcctcctcctgcgccgccgcctcggccactgatgct

SEQ ID NO: 135919 - DNA, 1812 bp, Zea Mays
ggacagacacgccgtgcttgctaaatatatgtcacttccgaagcagctgcccacacaacgaagtcacatgccactgtgctccactactactgggcgcgcggtcatgggatcactggcgacggcggaggggcagcggccgcacgccgtgtgcatgccgtacccggcgcagggacacgtgacgcccatgctcaagctcgccaagctcctccacgcgcggggcttccagatcaccttcgtcaacaccgagttcaaccaccgccgcctgctccactcgcgcgggcccgacgcgctcgaccgcgtgcccgggttccgcttcgacgccattcccgacggcctcccgccgtccgacgccgacgccacgcaggacatccccgcgctctgctactccaccatgaccacctgcctcccgcacctcctcgcgctcctcgccagggtcgacgccgacgccgggtccccgccggtcacctgcctcgtcgtggacgccgtcatgtcgttcggcttcgacgccgccagagagatcggcgtgcccgtcgccgcgctctggaccgccagcgcctgcgggttcatgggctaccggaactacagaaacctcatcgactggggcctcgtgccattcaagagcgccgcggacctccaggacaacgtcggcggcggccacctcgccaccgtggtcaccggcgcgcgcggcatgtgcgacggcgtgcagctgcgcgacttccccaacttcatccgcaccacggaccgcgcggacttcatgttcaacttcctcatgcgcgagtccgagcggctgtcgctccccgacggcgtcatcgtcaacaccttcgaggacctcgagggcgccacgctggacgccatgcgcgctatcctcccgacggtgtaccccgtcggcccgctcctcctccgcgagcgcctggagatccccgctagcagcccgctcgcgggcctcggctccaacctctggaaggaggaggaaggcctcctgaagtggctcgctggccgcgcgccgcggtccgtggtgtacgtgaactacggcagtatcacggtgatgaccaactcgcagttgctcgagttcgcgtggggtctggccaacagcgggtacccgttcgtgtggaacatccggccggacctggtgaagggcgactccgccgtgctgccgccggagttcgcgtccgccgtcgagggccgcgcgttgctgacgacgtggtgcccgcaggaggcggcgatccagcatgaggcggtcggggtgttcctgactcactccggctggaactccaccctggagagcctctgcgcgggggtgcccatgctgagctggcccttcttcgcggagcagcagaccaactgccggtacaagcggacggagtggggagtcgggatggagatcggcggcgaggtgcggcgcgacgaggtgacggtcgttctaaaggaggccatggacggggagaaggggagggagatgcgccggcgcgcagaggagtggaaggagaaggccgtgaaggtgacgctgccgggtgggcctgcggagactaacctcgagagggtcatccacgaggtgctgctctcccagaaaaagggatagactgccaacgcgtgatcgtcgtggactcgtggggagtatcatgttcgcgagcatcatgccttgcccctcgctttgctgtgttttcttatttacgtgtgttagctttgaataattaattatctcaactttcagctctcaaatgacaaacctcaaaccccagctctccgctgaaaggttgtactaatatttttatcataacattttttttactagtttcagtgagtggtggtttc

SEQ ID NO: 135920 - DNA, 1328 bp, Zea Mays
cacgccgtgtgcatgccgtacccggcgcagggacacgtgacgcccatgctcaagctcgccaagctcctccacgcgcggggcttccagatcaccttcgtcaacaccgagttcaaccaccgccgcctgctccactcgcgcgggcccgacgcgctcgaccgcgtgcccgggttccgcttcgacgccattcccgacggcctcccgccgtccgacgccgacgccacgcaggacatccccgcgctctgctactccaccatgaccacctgcctcccgcacctcctcgcgctcctcgccagggtcgacgccgacgccgggtccccgccggtcacctgcctcgtcgtggacgccgtcatgtcgttcggcttcgacgccgccagagagatcggcgtgcccgtcgccgcgctctggaccgccagcgcctgcgggttcatgggctaccggaactacagaaacctcatcgactggggcctcgtgccattcaagagcgccgcggacctccaggacaacgtcggcggcggccacctcgccaccgtggtgtacgtgaactacggcagtatcacggtgatgaccaactcgcagttgctcgagttcgcgtggggtctggccaacagcgggtacccgttcgtgtggaacatccggccggacctggtgaagggcgactccgccgtgctgccgccggagttcgcgtccgccgtcgagggccgcgcgttgctgacgacgtggtgcccgcaggaggcggcgatccagcatgaggcggtcggggtgttcctgactcactccggctggaactccaccctggagagcctctgcgcgggggtgcccatgctgagctggcccttcttcgcggagcagcagaccaactgccggtacaagcggacggagtggggagtcgggatggagatcggcggcgaggtgcggcgcgacgaggtgacggtcgttctaaaggaggccatggacggggagaaggggagggagatgcgccggcgcgcagaggagtggaaggagaaggccgtgaaggtgacgctgccgggtgggcctgcggagactaacctcgagagggtcatccacgaggtgctgctctcccagaaaaagggatagactgccaacgcgtgatcgtcgtggactcgtggggagtatcatgttcgcgagcatcatgccttgcccctcgctttgctgtgttttcttatttacgtgtgttagctttgaataattaattatctcaactttcagctctcaaatgacaaacctcaaaccccagctctccgctgaaaggttgtactaatatttttatcataacattttttttactagtttcagtgagtggtggtttc

SEQ ID NO: 135921 - DNA, 1871 bp, Zea Mays
atttcctttcatccatctccgtatggaccgtatccctgtctctctctcttctccccctcccccccaatctccgaggcgagctcgagctcccaaaccctaggcctcactggggagtcacctccgccactccagcgatgtctctcgccgcagcggcttgacggtgcctgcccccaaatctacctctccgttagagagcgcggcgtggttgctgcgtgaggcgcaccggggtctgcaaatggagccgaggcgcatatcggcgagcccgcgcccatgcagcgggcggcgggtagtggccaggaagaggccgaggcaggaggcggtggtgagcagtgtgcggaagctgcagcgccgggagatcagctcccgccgcgaccgcaccttcaccatgagcgccgcgcaggagcgcttccgcaacatacagctgcaggaagagtttgacactcatgatccaaaggagaacgcttcactactcccttacttgaggaaaaggtcaaaaatcattgagatagttgcagcgcgtgatatagtctttgctttatcacagtcaggagtatgtgctgcttttagtagagagacaaatcggagaatatgctttctgaatggaagtccagatgaagttatccgcagtttattttacaacaagaataatgattcactcattactgtatcagtatatggttctgaaaacttcagtgctctgcgatgcagaacaactcgaatagagtacgttcggcgaggacaaccggatgctggtttccctctttttgagtccgagtccttgaaatggcctggatttgtagagtttgacgatgtcaatggaagggttttgacttactctgctcaagacagcacttacaaggtgtttgatttgaaaaactacacattactgtatttggtgtctgataagaatgttcaagaaataaagatcagccctgggataatgctattgatttatgcaagaacaagcagctcggttcctctgaagattctttccattgatgatggtacagtcttgaagtccttcagccacctcctccatcgtaacaagaaggtagattttattgagcagttcaatgaaaagcttctggtcaagcaggaaggagagaacctccaaattcttgatgtaaggaacttccaattgacagaagtgagcagaactgagtttatgactccatccgcctttatttttctacatgagctgcaactgttcttgacattccggaatcgagcagtatcagtttggaactttcgaggtgaactggtcacgtcatttgaagatcacctgttgtggcaccccgactgcaacacaaacaacatatacatcacaagcgatcaagatcttattatctcgtactgcaaggctgactcaactgattcaacttcagaagaaaatgctggctctataaacataagcagcatactgtccgggaaatgcctggcaaaaataaacactggaaactccaatgcttgcaaggaaagaaagaaggcgtggaagttccggaacacagtctcggaggcccttgaggacatcacggctctgtactacgacgaggatcgcgacgagatctacactggcaaccggcacggccttgtccatgtgtggtcgagctgaaagctgaaactgcggggcggctttcaaccgtagcacggtgatctggtcttcacctgtgcgcgtattaacagctactagtgcctcacgtggcacgggggtggggggcacgaaagagggaccccccaagccactcaagtgacagttcttatttatctcagcatgccaagagcactgtccatcattctgaaatcagaggccccccagatctgttgtaacggacgtaccttgcaagtaatgaaatccattcgttgatctgaaa

SEQ ID NO: 135922 - DNA, 1938 bp, Zea Mays
atttcctttcatccatctccgtatggaccgtatccctgtctctctctcttctccccctcccccccaatctccgaggcgagctcgagctcccaaaccctaggcctcactggggagtcacctccgccactccagcgatgtctctcgccgcagcggcttgacggtgcctgcccccaaatctacctctccgttagagagcgcggcgtggttgctgcgtgaggcgcaccggggtctgcaaatggagccgaggcgcatatcggcgagcccgcgcccatgcagcgggcggcgggtagtggccaggaagaggccgaggcaggaggcggtggtgagcagtgtgcggaagctgcagcgccgggagatcagctcccgccgcgaccgcaccttcaccatgagcgccgcgcaggagcgcttccgcaacatacagctgcaggaagagtttgacactcatgatccaaaggagaacgcttcactactcccttacttgaggaaaaggtcaaaaatcattgagatagttgcagcgcgtgatatagtctttgctttatcacagtcaggagtatgtgctgcttttagtagagagacaaatcggagaatatgctttctgaatggaagtccagatgaagttatccgcagtttattttacaacaagaataatgattcactcattactgtatcagtatatggttctgaaaacttcagtgctctgcgatgcagaacaactcgaatagagtatgctttgtcaatgcaattgtttttttatcacgtcatctttcttaaatttccccaaccattcaaggtacgttcggcgaggacaaccggatgctggtttccctctttttgagtccgagtccttgaaatggcctggatttgtagagtttgacgatgtcaatggaagggttttgacttactctgctcaagacagcacttacaaggtgtttgatttgaaaaactacacattactgtatttggtgtctgataagaatgttcaagaaataaagatcagccctgggataatgctattgatttatgcaagaacaagcagctcggttcctctgaagattctttccattgatgatggtacagtcttgaagtccttcagccacctcctccatcgtaacaagaaggtagattttattgagcagttcaatgaaaagcttctggtcaagcaggaaggagagaacctccaaattcttgatgtaaggaacttccaattgacagaagtgagcagaactgagtttatgactccatccgcctttatttttctacatgagctgcaactgttcttgacattccggaatcgagcagtatcagtttggaactttcgaggtgaactggtcacgtcatttgaagatcacctgttgtggcaccccgactgcaacacaaacaacatatacatcacaagcgatcaagatcttattatctcgtactgcaaggctgactcaactgattcaacttcagaagaaaatgctggctctataaacataagcagcatactgtccgggaaatgcctggcaaaaataaacactggaaactccaatgcttgcaaggaaagaaagaaggcgtggaagttccggaacacagtctcggaggcccttgaggacatcacggctctgtactacgacgaggatcgcgacgagatctacactggcaaccggcacggccttgtccatgtgtggtcgagctgaaagctgaaactgcggggcggctttcaaccgtagcacggtgatctggtcttcacctgtgcgcgtattaacagctactagtgcctcacgtggcacgggggtggggggcacgaaagagggaccccccaagccactcaagtgacagttcttatttatctcagcatgccaagagcactgtccatcattctgaaatcagaggccccccagatctgttgtaacggacgtaccttgcaagtaatgaaatccattcgttgatctgaaa

SEQ ID NO: 135923 - DNA, 224 bp, Zea Mays
atttatacaaaataaaatatagctaggtgaacactggtagagggtaatatgtttgttgcaatatctgaagctgccttgttatatttacatgaaatgttttcagaagagttgagcagttatatataattacacagagagcattctactacctaaaacgctgctgataatatgagaaaatcttcagttcttggaaggtctggtgtccggcttttctttgatgcgca

SEQ ID NO: 135924 - DNA, 262 bp, Zea Mays
atttatacaaaataaaatatagctaggtgaacactggtagagggtaatatgtttgttgcaatatctgaagctgccttgttatatttacatgaaatgttttcagaagagttgagcagttatatataattacacagagagcattctactacctaaaacgctgctgataatatgagaaaatcttcagttcttggaaggtctggtgtccggcttttctttgatgcgcagaggtccatgtttgaacctgtatagttgggaaacaaag

SEQ ID NO: 135925 - DNA, 1203 bp, Zea Mays
cggctgtggcgtcgtgatcacgtactgctgcatcaccagcacggacaccatcttggagaactcagacgacaccagcaggtcgccgatgggccccagctccggcgactccatccactccgcgagcgccgacgtcagcggcgacccggcctcgccggggtgcctgcccacgatgtacagctcgtgcgcgctgtccaggccccggattgccgccagcgtatcctcgctgttggcaaccacctgctccatgtacaggatggcgtcgttgccgatgttgcgcacccggaactcgttcaggtactcctcgtccatctgccgctcgctcttggggacgtccgggacgatggtgatggcgcgcgcgtgcacgttggccgcggggccccggggcggcatgggctgcggcggcgccagcgcgggggccttgtagcccggcgggatgaaccggacgatggtgaggcagacgcccgggtgctccaccatgcgccacgcgtaggccagcccctcgcggtcgtcgggcccgccgaagaagagcagcgccacgtggtgcacgctcgccatgcgcgccgccgcggcgctgagtccgcggtccacgaggatgcccaccgagcacggcgccgacgacaggatgctctcgttgaagccccggagggacgcgttgatgggttccatcccgccgtccaccgtctgctgcttgtggaacgggagcacgatgagggacacgtgcttgtcctccgccaggatggacacgtcctcgtgcatcgtctggtacggcgacaccgccgtcagcgcctggacggacacgccgcccacgctctcctcgtagctctcgaaggcgttgaagatgtggtcgctggagctgcggctctggttggtggcggagtggtgggcggcgagcatgttggacgcgcgcccggtgagctccacgaggtgcagcgcgtagatgaagatgggggagcgcttggttgggttagacagctccagcagcgagatgatggacggcacgttgcgagtggtgtgcacgcacgccagcatgcgcagctcggagtcgtgcttggaccgctgcaggttgcgccgcttgtagccgaccaaccgccgcgccgggcggtacaccgtcgtcaccaccggcgtcacgagcgccgtcatcgccacagacaccagcaccatcaccgcgaacgactcatcatccagcacctggttttatttctg

SEQ ID NO: 135926 - DNA, 1374 bp, Zea Mays
atgggtagtccaatacgtcttgacaaccaggaggatcttctccctgacgcataccaaaatgcattagtccctgcgtcttcctgcctgatgcagggtgaacaccgagtccgcatggatgagatcgtaggtcctcgggtaggtagacatgccctcgcacctgcagtgaatgcagtagtgagatcacgaaacctaaaccgacgagcgcggtggtggacgtggacctcgagctgggcgacgagcgccgtgcactccctccatggatccagccctacaaagagaatccaaccctccacggatccagcttttgtggagccctgcatggatccgccggcatggcgtcgttcgcccttcgccgacgacccggtagtgaaccacagggagagggagagggtgagggagaaggagaggaagaggaagagggtagtcctcaccggcgctgagtgtggcggcggaggaagatggagcggacacagcacgggatttgggttaagattcaaaaagactcaggaacacttccctactctagatgaagttaagggtatgagtgagttgtttcccctatttgttaatttattattcttgaattataccaatcgactgaatcctttttcggtacctttggagcacccaaaaagattctatatagggatgacatttagctatggtgcagataataagttccttggagctgaagattttcctccaactgctcctcaacccttgcatgttcgcttctgcaaagatattgaattacaaggaggaaaactggcattcacgttcaatgatctaaaaaatgcaaccaagaacttccgaccggacagccttcttggggaaggagggtttgggcatgtctacaaaggttggattgatgagcacacgcttgctccttcaagacctgggagtggtatggttgttgctgtgaagaagcttaaaccggaaggttttcaaggacacaaggaatggctgacagaggttgattaccttggtcaacttcaccacaagaatcttgttaagctcattggttattgctcagatggtgaaaatcggcttctggtgtatgaatttatgcccaagggaagtttggagaaccatctgtttagaagtgaggtgctgatcctttgtcaagggcaaaggctcaaagttgccattagagctgctaggggcttgtcatttttacatgatgctgaaaaccaagtcatatatcgtgatttcaaggcatcaaacattcttctcgcctcaattgaacaacatgaatctctagagaacatctttagccctgtccttgaaactactgctcaggcttatggtgaagatgacaacattcaaccttcttcagtgacgaagcaagcattagatattgccagggtcagctaa

SEQ ID NO: 135927 - DNA, 492 bp, Zea Mays
atggtgttcttgcgctcgggtgttcttcctgccaccagaaaacagaactcacgccgccgtgtgccaccatgggcctcgctaccaggtggtcgggcagccggctaccaccatatgcccgcgacgccgcctgcttccaaccgcgagctctaccatctcccagcagtcgtccgcgccaccccctgccagcagctccagccagatggccgcaccaccccctgccagcagccagatggccacgacaccgcctgccaccagccagagggccgcgccacccctgccaccaggcagctgcccgtgccacccccttgcctccccatggtttctactgtggaaagagtggatctacctgttaggagctcggatttgtctgatccccaagattttctgttaggggatgaacatagaatggaggttttagaaattgattgggggcaatacaaattgatgatagatgggaggaagaaggagaacaagagactgcctctgagttag

SEQ ID NO: 135928 - DNA, 2340 bp, Zea Mays
gaccgttgtgcctaaagcccacaatgaccatatcgcgcagcatatccgaacctagccaaccagccccagcgcccaacgcacgaactgtaagaaaccctagcggagcaactgacacactcgcctacatcctcggccgccagctcgccaccatcgcctcccggtcggccgcgccacctcccggaagattggataacaatatcatgccattaggtggataacatttgacgtgctcctggtttgttcatttccgggcatcatcaaaatgtcaggaccgctgaattcaaacattagtgggggcccctcgaaccttagagattccacaggaaggccatttacatcatcgttttctggtcaatctggatcacttccaggttttcatcactcaggggttcaacaacccagtggtggcatttccagtggccgtttccctccaaataatcttcaagcttccttgtctcagattcctcatgggcattctgggattagcaacagaggaggtatgaatgttgggggaaatcctggatttggtagtagcatgaatgctattggtggttcaatacaaggtttatcctcaaacttggctaatgtgggtaaccgcaattctgctcctgggttggcagcttctccagtcttaggaaatttaggcccaagaatagcaagttctgggaatattttgggtgggagcaatattgggagaagtataagctctggaggactgtctatgcctggtattgcatctcgcatgaatttaagtggcaactctggtagtggggctatcaacattcaaggatccaaccgtattggtatgcttcaacaagcatccccacaatttatgaacttgcttggaagttcttacccaacacctggagggtcactatctcagaatcaagtacagtcaggaagtggttctttaggatcttctggaatgctatatgaaggaagctcaggtgacaatgctccatttgatattaatgactttcctcagttaactggacgacctaattctgctggaggtggtcaaggacaatatggatcactgagaaagcatggagtaagcgtcaatgccattgtacaacaaaaccaggaattcagcattcagaatgaagattttccagctttaccaggaaataaaggtagttcctcagattatcctatggatattcatcacaaggaccaccttcaagagaatataaatattatgcaagcacaacattatcctatggctagaccatctggctttagcttgggaagcagttatccaccccgtcaacatcagcagagtgctaattcagttcaaaatgctgggctggaaactattggactaagaccggcaaattctccaagtctgtcaactaattcaggggtttatgagcaattcatgcagaagtaccatcaaccacagactcaaaattcacttaggttgcaggcagcttcaggtcctcaacagtacaaggatcagagccaaaaatccgttcagggaacacaggctgtgccggatccatatagcttacttggactgttgagtttaataagaatgaaagagcctggaccaacaactcttgctttagggattgatttgacctcgttggggttgaatttgaactcccaagataatctttacaagacatttggctctccgtggtcaagcgagccagctgtaggagaacctgattatcagatcccagcttgtttctctgcagagccaccaccagcactgcaaccatttcattttcagaagtttcaccctttgacactattctacatcttttacagcatgcctaaagatgccgctcagttatatgctgctaatgaactatacaataaagggtggttttaccacaaagactaccgtgtttggctaacaagagctcctaattccgcacctcttgtgaaaactccacttcatgaacgagggtcctacatttgttttgatccaagcatctgggatactgttcataaggacaactttgttctccattacgaagcagtggagaagagacctgtccttccttctgctggccaaaatattaggcgagaactataaggttctcctgcatttgaagttaatttggtttgatcagtagctgttgtcatggatgggctgagttcatacaaaatgattctataagaacttatgacccccaggtggcagttgtagaaatgtagctgagatttagattttcttcataatttgttggcattatttagtagggccattgttgtaccaatgttgtgacttgatttgttgttgttgttgttgtgacgcagtcaccgtgatgataataaatgttttgaccgttatgagtcagcatgaaaatataatgagacttttgatttgag

SEQ ID NO: 135929 - DNA, 1394 bp, Zea Mays
gaccgttgtgcctaaagcccacaatgaccatatcgcgcagcatatccgaacctagccaaccagccccagcgcccaacgcacgaactgtaagaaaccctagcggagcaactgacacactcgcctacatcctcggccgccagctcgccaccatcgcctcccggtcggccgcgccacctcccggaagattggataacaatatcatgccattaggtggataacatttgacgtgctcctggtttgttcatttccgggcatcatcaaaatgtcaggaccgctgaattcaaacattagtgggggcccctcgaaccttagagattccacaggaaggccatttacatcatcgttttctggtcaatctggatcacttccaggttttcatcactcaggcattccgtctgcaggggttcaacaacccagtggtggcatttccagtggccgtttccctccaaataatcttcaagcttccttgtctcagattcctcatgggcattctgggattagcaacagaggaggtatgaatgttgggggaaatcctggatttggtagtagcatgaatgctattggtggttcaatacaaggtttatcctcaaacttggctaatgtgggtaaccgcaattctgctcctgggttggcagcttctccagtcttaggaaatttaggcccaagaatagcaagttctgggaatattttgggtgggagcaatattgggagaagtataagctctggaggactgtctatgcctggtattgcatctcgcatgaatttaagtggcaactctggtagtggggctatcaacattcaaggatccaaccgtattggtatgcttcaacaagcatccccacaatttatgaacttgcttggaagttcttacccaacacctggagggtcactatctcagaatcaagtacagtcaggaagtggttctttaggatcttctggaatgctatatgaaggaagctcaggtgacaatgctccatttgttttgatccaagcatctgggatactgttcataaggacaactttgttctccattacgaagcagtggagaagagacctgtccttccttctgctggccaaaatattaggcgagaactataaggttctcctgcatttgaagttaatttggtttgatcagtagctgttgtcatggatgggctgagttcatacaaaatgattctataagaacttatgacccccaggtggcagttgtagaaatgtagctgagatttagattttcttcataatttgttggcattatttagtagggccattgttgtaccaatgttgtgacttgatttgttgttgttgttgttgtgacgcagtcaccgtgatgataataaatgttttgaccgttatgagtcagcatgaaaatataatgagacttttgatttgag

SEQ ID NO: 135930 - DNA, 2458 bp, Zea Mays
gaccgttgtgcctaaagcccacaatgaccatatcgcgcagcatatccgaacctagccaaccagccccagcgcccaacgcacgaactgtaagaaaccctagcggagcaactgacacactcgcctacatcctcggccgccagctcgccaccatcgcctcccggtcggccgcgccacctcccggaagattggataacaatatcatgccattaggtggataacatttgacgtgctcctggtttgttcatttccgggcatcatcaaaatgtcaggaccgctgaattcaaacattagtgggggcccctcgaaccttagagattccacaggaaggccatttacatcatcgttttctggtcaatctggatcacttccaggttttcatcactcaggttcacacaacattcatggaaatcttaatcttgcaaatatctctggatcattagcaccacgaaataattcaatggcaggcattccgtctgcaggggttcaacaacccagtggtggcatttccagtggccgtttccctccaaataatcttcaagcttccttgtctcagattcctcatgggcattctgggattagcaacagaggaggtatgaatgttgggggaaatcctggatttggtagtagcatgaatgctattggtggttcaatacaaggtttatcctcaaacttggctaatgtgggtaaccgcaattctgctcctgggttggcagcttctccagtcttaggaaatttaggcccaagaatagcaagttctgggaatattttgggtgggagcaatattgggagaagtataagctctggaggactgtctatgcctggtattgcatctcgcatgaatttaagtggcaactctggtagtggggctatcaacattcaaggatccaaccgtattggtatgcttcaacaagcatccccacaatttatgaacttgcttggaagttcttacccaacacctggagggtcactatctcagaatcaagtacagtcaggaagtggttctttaggatcttctggaatgctatatgaaggaagctcaggtgacaatgctccatttgatattaatgactttcctcagttaactggacgacctaattctgctggaggtggtcaaggacaatatggatcactgagaaagcatggagtaagcgtcaatgccattgtacaacaaaaccaggaattcagcattcagaatgaagattttccagctttaccaggaaataaaggtagttcctcagattatcctatggatattcatcacaaggaccaccttcaagagaatataaatattatgcaagcacaacattatcctatggctagaccatctggctttagcttgggaagcagttatccaccccgtcaacatcagcagagtgctaattcagttcaaaatgctgggctggaaactattggactaagaccggcaaattctccaagtctgtcaactaattcaggggtttatgagcaattcatgcagaagtaccatcaaccacagactcaaaattcacttaggttgcaggcagcttcaggtcctcaacagtacaaggatcagagccaaaaatccgttcagggaacacaggctgtgccggatccatatagcttacttggactgttgagtttaataagaatgaaagagcctggaccaacaactcttgctttagggattgatttgacctcgttggggttgaatttgaactcccaagataatctttacaagacatttggctctccgtggtcaagcgagccagctgtaggagaacctgattatcagatcccagcttgtttctctgcagagccaccaccagcactgcaaccatttcattttcagaagtttcaccctttgacactattctacatcttttacagcatgcctaaagatgccgctcagttatatgctgctaatgaactatacaataaagggtggttttaccacaaagactaccgtgtttggctaacaagagctcctaattccgcacctcttgtgaaaactccacttcatgaacgagggtcctacatttgttttgatccaagcatctgggatactgttcataaggacaactttgttctccattacgaagcagtggagaagagacctgtccttccttctgctggccaaaatattaggcgagaactataaggttctcctgcatttgaagttaatttggtttgatcagtagctgttgtcatggatgggctgagttcatacaaaatgattctataagaacttatgacccccaggtggcagttgtagaaatgtagctgagatttagattttcttcataatttgttggcattatttagtagggccattgttgtaccaatgttgtgacttgatttgttgttgttgttgttgtgacgcagtcaccgtgatgataataaatgttttgaccgttatgagtcagcatgaaaatataatgagacttttgatttgagatgtatgcgcctgtttgatgattgg

SEQ ID NO: 135931 - DNA, 2443 bp, Zea Mays
gaccgttgtgcctaaagcccacaatgaccatatcgcgcagcatatccgaacctagccaaccagccccagcgcccaacgcacgaactgtaagaaaccctagcggagcaactgacacactcgcctacatcctcggccgccagctcgccaccatcgcctcccggtcggccgcgccacctcccggaagattggataacaatatcatgccattaggtggataacatttgacgtgctcctggtttgttcatttccgggcatcatcaaaatgtcaggaccgctgaattcaaacattagtgggggcccctcgaaccttagagattccacaggaaggccatttacatcatcgttttctggtcaatctggatcacttccaggttttcatcactcaggttcacacaacattcatggaaatcttaatcttgcaaatatctctggatcattagcaccacgaaataattcaatggcaggcattccgtctgcaggggttcaacaacccagtggtggcatttccagtggccgtttccctccaaataatcttcaagcttccttgtctcagattcctcatgggcattctgggattagcaacagaggaggtatgaatgttgggggaaatcctggatttggtagtagcatgaatgctattggtggttcaatacaaggtttatcctcaaacttggctaatgtgggtaaccgcaattctgctcctgggttggcagcttctccagtcttaggaaatttaggcccaagaatagcaagttctgggaatattttgggtgggagcaatattgggagaagtataagctctggaggactgtctatgcctggtattgcatctcgcatgaatttaagtggcaactctggtagtggggctatcaacattcaaggatccaaccgtattggtatgcttcaacaagcatccccacaatttatgaacttgcttggaagttcttacccaacacctggagggtcactatctcagaatcaagtacagtcaggaagtggttctttaggatcttctggaatgctatatgaaggaagctcaggtgacaatgctccatttgatattaatgactttcctcagttaactggacgacctaattctgctggaggtggtcaaggacaatatggatcactgagaaagcatggagtaagcgtcaatgccattgtacaacaaaaccaggaattcagcattcagaatgaagattttccagctttaccaggaaataaaggtagttcctcagattatcctatggatattcatcacaaggaccaccttcaagagaatataaatattatgcaagcacaacattatcctatggctagaccatctggctttagcttgggaagcagttatccaccccgtcaacatcagcagagtgctaattcagttcaaaatgctgggctggaaactattggactaagaccggcaaattctccaagtctgtcaactaattcaggggtttatgagcaattcatgcagaagtaccatcaaccacagactcaaaattcacttaggttgcaggcagcttcaggtcctcaacagtacaaggatcagagccaaaaatccgttcagggaacacaggctgtgccggatccatatagcttacttggactgttgagtttaataagaatgaaagagcctggaccaacaactcttgctttagggattgatttgacctcgttggggttgaatttgaactcccaagataatctttacaagacatttggctctccgtggtcaagcgagccagctgtaggagaacctgattatcagatcccagcttgtttctctgcagagccaccaccagcactgcaaaagtttcaccctttgacactattctacatcttttacagcatgcctaaagatgccgctcagttatatgctgctaatgaactatacaataaagggtggttttaccacaaagactaccgtgtttggctaacaagagctcctaattccgcacctcttgtgaaaactccacttcatgaacgagggtcctacatttgttttgatccaagcatctgggatactgttcataaggacaactttgttctccattacgaagcagtggagaagagacctgtccttccttctgctggccaaaatattaggcgagaactataaggttctcctgcatttgaagttaatttggtttgatcagtagctgttgtcatggatgggctgagttcatacaaaatgattctataagaacttatgacccccaggtggcagttgtagaaatgtagctgagatttagattttcttcataatttgttggcattatttagtagggccattgttgtaccaatgttgtgacttgatttgttgttgttgttgttgtgacgcagtcaccgtgatgataataaatgttttgaccgttatgagtcagcatgaaaatataatgagacttttgatttgagatgtatgcgcctgtttgatgattgg

SEQ ID NO: 135932 - DNA, 2443 bp, Zea Mays
gcccaacgcacgaactgtaagaaaccctagcggagcaactgacacactcgcctacatcctcggccgccagctcgccaccatcgcctcccggtcggccgcgccacctcccggaagattggataacaatatcatgccattaggtggataacatttgacgtgctcctggtttgttcatttccgggcatcatcaaaatgtcaggaccgctgaattcaaacattagtgggggcccctcgaaccttagagattccacaggaaggccatttacatcatcgttttctggtcaatctggatcacttccaggttttcatcactcaggttcacacaacattcatggaaatcttaatcttgcaaatatctctggatcattagcaccacgaaataattcaatggcaggcattccgtctgcaggggttcaacaacccagtggtggcatttccagtggccgtttccctccaaataatcttcaagcttccttgtctcagattcctcatgggcattctgggattagcaacagaggaggtatgaatgttgggggaaatcctggatttggtagtagcatgaatgctattggtggttcaatacaaggtttatcctcaaacttggctaatgtgggtaaccgcaattctgctcctgggttggcagcttctccagtcttaggaaatttaggcccaagaatagcaagttctgggaatattttgggtgggagcaatattgggagaagtataagctctggaggactgtctatgcctggtattgcatctcgcatgaatttaagtggcaactctggtagtggggctatcaacattcaaggatccaaccgtattggtatgcttcaacaagcatccccacaatttatgaacttgcttggaagttcttacccaacacctggagggtcactatctcagaatcaagtacagtcaggaagtggttctttaggatcttctggaatgctatatgaaggaagctcaggtgacaatgctccatttgatattaatgactttcctcagttaactggacgacctaattctgctggaggtggtcaaggacaatatggatcactgagaaagcatggagtaagcgtcaatgccattgtacaacaaaaccaggaattcagcattcagaatgaagattttccagctttaccaggaaataaaggtagttcctcagattatcctatggatattcatcacaaggaccaccttcaagagaatataaatattatgcaagcacaacattatcctatggctagaccatctggctttagcttgggaagcagttatccaccccgtcaacatcagcagagtgctaattcagttcaaaatgctgggctggaaactattggactaagaccggcaaattctccaagtctgtcaactaattcaggggtttatgagcaattcatgcagaagtaccatcaaccacagactcaaaattcacttaggttgcaggcagcttcaggtcctcaacagtacaaggatcagagccaaaaatccgttcagggaacacaggctgtgccggatccatatagcttacttggactgttgagtttaataagaatgaaagagcctggaccaacaactcttgctttagggattgatttgacctcgttggggttgaatttgaactcccaagataatctttacaagacatttggctctccgtggtcaagcgagccagctgtaggagaacctgattatcagatcccagcttgtttctctgcagagccaccaccagcactgcaaccatttcattttcagaagtttcaccctttgacactattctacatcttttacagcatgcctaaagatgccgctcagttatatgctgctaatgaactatacaataaagggtggttttaccacaaagactaccgtgtttggctaacaagagctcctaattccgcacctcttgtgaaaactccacttcatgaacgagggtcctacatttgttttgatccaagcatctgggatactgttcataaggacaactttgttctccattacgaagcagtggagaagagacctgtccttccttctgctggccaaaatattaggcgagaactataaggtagcatgcttctatcatatataaaaggaatgtatagttatgtgtacgtttgactaattgacttccttccctgatgcacacatatttgcccttgctgcttgccctaggttctcctgcatttgaagttaatttggtttgatcagtagctgttgtcatggatgggctgagttcatacaaaatgattctataagaacttatgacccccaggtggcagttgtagaaatgtagctgagatttagattttcttcataatttgttggcattatttagtagggccattgttgtaccaatgttgtgacttgatttgttgttgttgttgttgtgacgcagtcaccgtgatgataataaatgttttgaccgttatgagtcagcatg

SEQ ID NO: 135933 - DNA, 1015 bp, Zea Mays
aaaaaacaactgatatatgttttaaccaatataaagttacaaatcacagatcacacatagacaaatcatatatcacacctaggttcatcataaacatatacaagaagaagttgctgaatatacagacttgcacagaccgctcctggctactactaggttcagtgaaaataaacacatcacctcgtgcatttttgggctaaacaatctaaggacattttatgagaactcatccgcttcaacaactttcagacagttgttctcatggaaaccacgagtactcttctacctcctcgagatttcgtttggacaagtacgtgagcaagaccaccgatgaaagaacctgcattgacaaccattggtgctggccttcgttgatgcatcacgtatcaacatttctcttccttgagccctgtcattcagtcactgtcccaaccttcatcagtattcttctccgttgccaatgttttccctcttgtcatcactatcctcactgctgctgtcaaaattcgggaaactcgcctttggggctcttgagttcgcctcttcccccttgtaatctgacacccacaagtcatcgtcatcagcgtctaactcatcaccgttgctgctgcctctggacatagtgccatcggaaagcatcgactgaactccctggaatccgattagaccctctgcatcccctaggaacagaaatctctctgccactggatctgctcctctcattcctcatcggaagcataccctctcatcctcgtcaccaccggccacggccggcctccaccgccgcctgcacaccgctcgctactctcgccccccttccatatccatcaagaacaagaaaaaaatgaggatgggagagctcaatactcaccggtgagaaggtgccggggaggcttgccgtcggggctgcgcggcgccggcccgccgtcacctcgcgccgccacgcagtgacctcgcaccgtcctcatgcgtcgccaacgtctcgccgtcgctttggccaggaatcgatccggag

SEQ ID NO: 135934 - DNA, 858 bp, Zea Mays
gtcatccagcagccccattgcagtttcgagttcctggctggtggcgtggcacctcgttccctccgatcgagtccgcgactaagatacaccccgactcgctagcgagcaggcaggcagaatggagcgccacgccgagaagccgctcctcgtgctgccctcctgcctcctcttccttgtcctcctcctcgccccgctcgtctccgccgtccccacgccaagaagcctgcgcctggggagccaccagcagcacccgccgccggctctgaagctcagttactctcaggacacgacggcgatcgcggcggcgatgatgaaaaacacgggcaggccgacggcgagggtggacgtggaggtgaacgactaccagccgtccggccccaacaaccgccacgacccacccaagggtcccggaagaccttgaacgggggccggctcagctggacgacgacccggccaatcaataatccaactccgtcgtcgtcgtcgtcacaccggtagtacaaagtgcgtcgcttgtgctagctcctctactctagttctagtagaaattaaggtcgtcgaaacaaagtcacctagctgcgtttgtatatatatacaccggccgcgcgtgtgtatggctgtgtcctgtgtgcaaggcacatcggtcatcggtgcagtgggttgtgttgttcttaggctggttaattggttgctgttcgtcggaaagaactccactgcatgcagatcgatttgcatctcctgcagcaggtgccggtacagtgtaccagcagattgagattgtccagcttgttagttctatgctcccgatcttgatatacttctatatatcatactagtatatccatcagcaaaagcagc

SEQ ID NO: 135935 - DNA, 361 bp, Zea Mays
tctgagacacggccgcgggcgtggcggctggggccgccatgctggcgtgggaggccaagcgccccggtgcggcaggccgcggtgccgtggcctgcgcaatgccgtggagtacaacatccagctcgagacggaggagtgcgtgcgtggccggctgccgctcgcgcacggtgtaggaggcggggccgcggccacgtggcgggtcttggggacgagcaccggtagcttgaaccttgaagcggtgctcgggaagatggcgccgcccaatggccgtaccgtgctgatcttccgtgtgccgtgcgggtgcccaaaagagaggatggaggtctggggcgctaagaaaaggtgcgccggatgaagaagt

SEQ ID NO: 135936 - DNA, 171 bp, Zea Mays
agataatggaacaaaatccggctttcgcctctttcgagggtagggccaaggtcagacaccaaataacaactccaagtactcgcaaaataaggccaaaacatttagcctaaaagacttaaactctctcttactcctcaccgattcaacactcacttaaaaaacgaaaatgat

SEQ ID NO: 135937 - DNA, 712 bp, Zea Mays
acctaagatcttcttttcgtattcgctacggaggcatccggacctcgatattccttgtgcagcaaaagaagctttctgtggctttcaaggaacatatgctgcctggcctgggtatgaaaaaaataaactatcgcggcggcggcgactatcctgcgcttagtgatggttactgttcagggatgctctttattgagcaactagtctagtctagtggttatgtgatgctcttccagttcacgggcagcgagcgaggggggggcacctgaaggattcattcttgatatggtatctaatgcaaatttgccctctatattttcttgtcttgtttatactccctccgtttctttttatttgtcgctggatagtgtaaaattgcactatccagcgacaaataaaaagaaacggagggagtatataatagctgtacatgtattatgtgcgctaatgctttgggctaacggttgcatttgtctgaaggaaatctggggttaaagtaaatcgaattgaggcgaccgtctctattcttttctttgggagcgagcatcgctctggagcatatggcatttctagtcctggtcagtgcttttggttttcccctcttttcgatattccaatgatcatgttgacatcagtcgaggtcacgagcgatattcctctaagaatgtgggcagttctgccacatttcacttcgcggtttattgcatgtgctttt

SEQ ID NO: 135938 - DNA, 98 bp, Zea Mays
ctggctccgccactgctcagcatactcaaagattgcaccaagagaagggcatgcgatgtactacctcggggtactcgaatatttgtaaaaaccgtgat

SEQ ID NO: 135939 - DNA, 360 bp, Zea Mays
gcagcaatgatttgtcacactaacagcaaatgaaaggttatttattggctttaaacgttagtaattgctacgaagtactccctccgtttctttttagttgtcgctggatagtttaattttacactatctagcaacaactaaaacgaaacggagggagtagcataatttatatggagcgcatccagtttttattgatgcatgactttagcaatcactctatattttaatatatcttttttataagtttgatttcatgggacttattttagaaacttgatctcacaaactttctcttatttggtctctgtatgatggaattatgtcattttatgatctctgttcattcagtcaattgttgtg

SEQ ID NO: 135940 - DNA, 1698 bp, Zea Mays
gtgggacaggcatcatttggcgtcgggccggtacggtattggcggcgggccagctgacgagaaggaacggccgcagcccatcctgattcctgtcctcccagcaccggtgtctcatcaggaacaggaagcgaacaccggcggttgtcccgttccaattccaaccaacctacctaggctccgcgcgcacctaccccgtctctgctccggggagcgtcaccagtcagtcacggcggctctaaaatctcagataccaccagaccagaccagatccgtcccgcgaatctaaggtcaaaccaaccgcgatccgcgaatccgcggagaggaggggaggggaggggaagggcgcgggggcatggagttcctgcagggccagaggctggagaccacgctggccgtcgcggccgccgtcgttgccgtcgcagccggctccgcctacctcttcctccgcagtaggaagcccaggggatgcctagaccccgagaacttcaaggagttcaaacttgttgagaagaggcagctgagtcataatgttgccaagttcaagtttgcgctcccaacacctacttctgtattgggtcttccaatcggacagcatataagctgcagaggacaggatgcttctggcgaggaagtgatcaagccttatactccaactactctggactctgatgttggatcttttgagcttgttataaagatgtatccccaaggaagaatgtctcatcatttccgtgagatgaaagttggtgattatatgtctgtgaagggacctaagggccgtttcaagtacctacctggacaagtgagagcattaggaatggtagctggaggatcaggcattactccaatgttccaagtcacaagggcaattcttgagaacccaaaggacaacacgaaagtacacttaatctatgcaaatgtcacgtatgaggatattcttctgaaggaagaacttgacggcatggccaaaaactatcctgatcgtttcaagatctactatgtcttgaatcagcctcctgaagtctgggacggtggcgtcgggttcgtgtcgaaggaaatgatccagactcattgcccagcgcctgccgccgacattcaggtattgcgatgtggacctcctcccatgaacaaagccatggccgcgcacctggacgaccttggctacacgaaggagatgcagttccagttctaagcgttacattctctctaccagtaccagaataaacgggggtggaacaagtttcgtcgcctctttgagcagacgaagcctgaccatatcgccatatagctccaaacagacgcggtttgccactgacagtcacagagcgtcgtacttaaggggtgtttggtttatagggactaaactttagtctctccactttattccattttagttcataaattattaaatagggaaacttaaatagagttttagtttctatatttagtaatttagggactaaaatggaataaaatagaggactaaaaattagtccctagaaaccaaacacccctttactctacctggatgaaagcagcagtacagtacccacctaatttgtatcggtgtcgggacattgtaccatgccgttcttttgtatcggtttgtcactcactcactccgcgagccagcagcccagcacacgatccatcgtgtcattttggcaacgtcatacagatacaaaaaactgcatgtgc

SEQ ID NO: 135941 - DNA, 732 bp, Zea Mays
gtacagttgtcgcgctcgggcggccgagtagtttaatcctcgaggaaggaggggggcggtcgccccggatggccgtgtcctcgtcgccttcctgcagacccactcccgggtttgaggcgtccctcctcctccgccgccgctctttccggttgcgtttgggaggaatggttgtggagttggtggattctcattctccgctggggttttaggaggattccgggctcttggccggggaagcggagatcggaggttctgccaggcgtacggattgggcgctggagctcctgtttgtttgaattgaattttggggaaaagcttccacctttcttctgcctttaaaaggagatggctttttcacacgacggaaagatgaagggctgtcagacaaaccttttccggacaaaggataagaaagtcgtcaagatgacagatagtgcaagctgctccacagctaagtatggatcaagcaactcaaaatcaccatcttcatcccccttccggaagctttcagaagttaggagcatacgtctcaaccattttctaagtcactcttcaaatgctacaaaatatgaacatgtcaggatatttgtctccacatggaatgttggaggaaaagcacctactgccgagttgaaactggatgactttcttcctgttgatgaccattcagacatttatgttttagggtaaccagcctcatcattactctgaaccttatccatgttaatgtcg

SEQ ID NO: 135942 - DNA, 2736 bp, Zea Mays
gtacagttgtcgcgctcgggcggccgagtagtttaatcctcgaggaaggaggggggcggtcgccccggatggccgtgtcctcgtcgccttcctgcagacccactcccgggtttgaggcgtccctcctcctccgccgccgctctttccggttgcgtttgggaggaatggttgtggagttggtggattctcattctccgctggggttttaggaggattccgggctcttggccggggaagcggagatcggaggttctgccaggcgtacggattgggcgctggagctcctgtttgtttgaattgaattttggggaaaagcttccacctttcttctgcctttaaaaggagatggctttttcacacgacggaaagatgaagggctgtcagacaaaccttttccggacaaaggataagaaagtcgtcaagatgacagatagtgcaagctgctccacagctaagtatggatcaagcaactcaaaatcaccatcttcatcccccttccggaagctttcagaagttaggagcatacgtctcaaccattttctaagtcactcttcaaatgctacaaaatatgaacatgtcaggatatttgtctccacatggaatgttggaggaaaagcacctactgccgagttgaaactggatgactttcttcctgttgatgaccattcagacatttatgttttaggctttcaggaaattgtgcctctcaatgctggtaatgtccttgtgatagaagataacgagccagctgcaagatggcttgctcttataaaccgtgcgctaaaccaaccagttgacactgttgatgatatatttcagcataaaccatatccctccctggattcaacctcatcccggtcaacaccatgccttgatggttccttctccaaccgttcaagaacagccagtggttctataatcttccaaaagtccttgaaatccatcaagaaatcttacatgccatcccagagaaaacaactcaaattctgcaattgcccagtggaaatggccaagaaatcctacaaagatgcttgcttttggtgtccacaagcatatgccaatgacatggactcctcagaagaggatgaattggatgacaatttgaatgatatttttggccttaatgatgatggcgttacttcgtctgtttctgcctccagggaccagctaaagtataacctcatatcttgcaaacaaatggttggtatttttgtcacagtctgggcaaagaaagaattaatgcagcatattggacatttgagaacgtcctgtgttggtcgcggaataatgggatatcttggaaataagggatgtatatcagtaagcatgacactataccagacaagcttttgtttcatctgcagccatttggcttcaggtgagaaggaaggtgatgaattgaggcgaaatttagatgtgttagagattctaaggctcacacaatttcgaaggatttgcagaagagctgggcgaagaatccctgagaaaattcttgaccatgagcgggtgatatggttaggagatctgaactaccgaatttccttgagctatgaagataccaaaaaacttctgactgaaaataactgggatgccctttttgaaaaggatcagctcaatatccagcgtgcttctggaagtgtgttcaaggggtggagtgaggagaagatatattttgctcccacatacaagtactcttgcaattcagattcttatgctggagagactgccacatcaaagaaaaagaggagaaccccagcctggtatgtactacaatgtttgagatagtttcagagagttcagatctcattctcatatgataacactcgtcagtggctatgaagtatcctagagtccacaaacctctttgcaacccgaaaaccttgtgtttcccctttctgtaccatcttttgagatgagttaaatcagatttggacagcaaggtaagttgtaagcgtggggaaacacaaaagaggaatcattctcatgtgcaataaataaacaaatcaagatgattcacatattctgaattcaggaatcacacttcccaaaccatgaatacataatactattaatgtccggtttgttgcaaatgttcaggtgtgatagaatactatggcatggagatggtattgcacagttgtcctacttccggggggaatctcaattctctgaccatcgtcctgtttgtgggacatttattgttgaggttaaaaggctagatggtcaatcaaagcggcgcccatcaaacaccaacattaaaatcggtgctgaagagttgttaccgacaagagacaggcataactaaggtgctggggcggggcccaaatcaccgattaaagctaggtttttgtgtgacttgggaacacaacaccgcggaaccttcgtaaggacgctaagctatctgttcctcgaggaaattacctgtgaccatagaaatatgattaaagatcatatgcttattattatgttgttgttattgtacatcatatagtcgcgtacagttttgaaaggaacattagtcattagtttatattgtatacttgtaaaacttcctcacagggttgttttggttttcatttctacttctttcatttgtgtaatttccaaagttcaacagagtagccaaagcatgttcgctttctttgttgtactgtacaaagtttgtattttgacctttgtaggggtcaagttttgaatttgtgtatcagccttgctggaaggagtttaattgtacaa

SEQ ID NO: 135943 - DNA, 1755 bp, Zea Mays
ggtattatctgttggttgtatcttgtcatttttgtgggtgtggggtctggacggtccggtgcaagtgcaaccgcgaggcagactatcgaatgtttgattccgtagcaacacacggtatatatctagtgaattaataataatccaaagaaaaggctgagaggctgtaaagagtgttgaaggacgctcggttccttcaggtgcggcggcgaccttgtctaggattttacccgtggaacgtggcgaccacttccgacgggccactcgccgccgctcgcccgccctgctcttcaccccttctcccgggaccgggacaagcgatctcccgtccccgtagtccgcaggagagagatttttttctcggttgcaatgaagagttatccgtgggcgggggcccgccctcttgccgtcgtgcagctcctcctcttcctcgcccacctcgtcgaccgcggcggtgctgccggtggaggcagcaagggcagctcggtgtacccggcggctgtcgtctacccgcatcactcccgccagatctcctgcaaacccagggtgttcctgtatcagcacttcctcagcgacgacgaggctaaccacctgatctccctcgcgagagcggagctcaagaggtcagcggtcgccgataatatgtctggcaagagcacgctcagtgaggtccgcaccagctccggcaccttcctcaggaagggccaggatcctattgttgagggtatagaggacaaaattgctgcatggacattccttccaaaagagaatggtgaagatatccaagtcctaagatataagcatggggagaagtatgaaccacactatgattacttcactgacaatgttaacactgtccgtggtggtcatcgctacgctactgttcttttgtacttaactgatgtaccagaaggaggggaaacggttttccccttggctgaggtaaatttttttatattttccgtgacgtttgtgtttaaagagatggtagaaagtggttcagaagtttttttgattttttttttgttctggctacatgtgtctatcatgtccatttcctattttattttgggctctgatattaaataacgttctgctgcattaataattcttaaaaggagcccgatgatgctaaagatgcaaccttgtcagaatgtgctcagaaaggcattgcagtgagaccacggaaaggtgacgccctccttttcttcaaccttaacccagacggcaccaccgactcggtgagcctccatggtggttgcccggtcataaaaggcgagaaatggtcggctacgaagtggatccgtgtggcctcgttcgataaggtccatcacccacagggcaactgcaccgacgagaacgagagctgcgcgaaatgggcggccctaggggagtgcataaagaacccagagtacatggtgggaaccacagcgttgcctggttactgtcggaggagctgcaatgtgtgctagggtcaggacgtgagagtactagtatttgttagtgcataccacttgtatccatagtctgttgttggtctcctacatctcgcataaaagaaatactcctatgctataggttatgccgatggaggtgcatttagaataagcctagtatttgatctattgatttattagattgcttggttctgctagctcataatttgtaccggaaccttagaagatctttgattcgttgtcatctgtaacattttctcgatatatatatggtgtgcatttctggtcatcccacaaaatc

SEQ ID NO: 135944 - DNA, 1579 bp, Zea Mays
ggtattatctgttggttgtatcttgtcatttttgtgggtgtggggtctggacggtccggtgcaagtgcaaccgcgaggcagactatcgaatgtttgattccgtagcaacacacggtatatatctagtgaattaataataatccaaagaaaaggctgagaggctgtaaagagtgttgaaggacgctcggttccttcaggtgcggcggcgaccttgtctaggattttacccgtggaacgtggcgaccacttccgacgggccactcgccgccgctcgcccgccctgctcttcaccccttctcccgggaccgggacaagcgatctcccgtccccgtagtccgcaggagagagatttttttctcggttgcaatgaagagttatccgtgggcgggggcccgccctcttgccgtcgtgcagctcctcctcttcctcgcccacctcgtcgaccgcggcggtgctgccggtggaggcagcaagggcagctcggtgtacccggcggctgtcgtctacccgcatcactcccgccagatctcctgcaaacccagggtgttcctgtatcagcacttcctcagcgacgacgaggctaaccacctgatctccctcgcgagagcggagctcaagaggtcagcggtcgccgataatatgtctggcaagagcacgctcagtgaggtccgcaccagctccggcaccttcctcaggaagggccaggatcctattgttgagggtatagaggacaaaattgctgcatggacattccttccaaaagagaatggtgaagatatccaagtcctaagatataagcatggggagaagtatgaaccacactatgattacttcactgacaatgttaacactgtccgtggtggtcatcgctacgctactgttcttttgtacttaactgatgtaccagaaggaggggaaacggttttccccttggctgaggagcccgatgatgctaaagatgcaaccttgtcagaatgtgctcagaaaggcattgcagtgagaccacggaaaggtgacgccctccttttcttcaaccttaacccagacggcaccaccgactcggtgagcctccatggtggttgcccggtcataaaaggcgagaaatggtcggctacgaagtggatccgtgtggcctcgttcgataaggtccatcacccacagggcaactgcaccgacgagaacgagagctgcgcgaaatgggcggccctaggggagtgcataaagaacccagagtacatggtgggaaccacagcgttgcctggttactgtcggaggagctgcaatgtgtgctagggtcaggacgtgagagtactagtatttgttagtgcataccacttgtatccatagtctgttgttggtctcctacatctcgcataaaagaaatactcctatgctataggttatgccgatggaggtgcatttagaataagcctagtatttgatctattgatttattagattgcttggttctgctagctcataatttgtaccggaaccttagaagatctttgattcgttgtcatctgtaacattttctcgatatatatatggtgtgcatttctggtcatcccacaaaatc

SEQ ID NO: 135945 - DNA, 1540 bp, Zea Mays
ggtattatctgttggttgtatcttgtcatttttgtgggtgtggggtctggacggtccggtgcaagtgcaaccgcgaggcagactatcgaatgtttgattccgtagcaacacacggtatatatctagtgaattaataataatccaaagaaaaggctgagaggctgtaaagagtgttgaaggacgctcggttccttcaggtgcggcggcgaccttgtctaggattttacccgtggaacgtggcgaccacttccgacgggccactcgccgccgctcgcccgccctgctcttcaccccttctcccgggaccgggacaagcgatctcccgtccccgtagtccgcaggagagagatttttttctcggttgcaatgaagagttatccgtgggcgggggcccgccctcttgccgtcgtgcagctcctcctcttcctcgcccacctcgtcgaccgcggcggtgctgccggtggaggcagcaagggcagctcggtgtacccggcggctgtcgtctacccgcatcactcccgccagatctcctgcaaacccagggtgttcctgtatcagcacttcctcagcgacgacgaggctaaccacctgatctccctcgcgagagcggagctcaagaggtcagcggtcgccgataatatgtctggcaagagcacgctcagtgaggatcctattgttgagggtatagaggacaaaattgctgcatggacattccttccaaaagagaatggtgaagatatccaagtcctaagatataagcatggggagaagtatgaaccacactatgattacttcactgacaatgttaacactgtccgtggtggtcatcgctacgctactgttcttttgtacttaactgatgtaccagaaggaggggaaacggttttccccttggctgaggagcccgatgatgctaaagatgcaaccttgtcagaatgtgctcagaaaggcattgcagtgagaccacggaaaggtgacgccctccttttcttcaaccttaacccagacggcaccaccgactcggtgagcctccatggtggttgcccggtcataaaaggcgagaaatggtcggctacgaagtggatccgtgtggcctcgttcgataaggtccatcacccacagggcaactgcaccgacgagaacgagagctgcgcgaaatgggcggccctaggggagtgcataaagaacccagagtacatggtgggaaccacagcgttgcctggttactgtcggaggagctgcaatgtgtgctagggtcaggacgtgagagtactagtatttgttagtgcataccacttgtatccatagtctgttgttggtctcctacatctcgcataaaagaaatactcctatgctataggttatgccgatggaggtgcatttagaataagcctagtatttgatctattgatttattagattgcttggttctgctagctcataatttgtaccggaaccttagaagatctttgattcgttgtcatctgtaacattttctcgatatatatatggtgtgcatttctggtcatcccacaaaatc

SEQ ID NO: 135946 - DNA, 915 bp, Zea Mays
aagcacacaacacaaacatcaccacagccggcatttgctacaacactcgttgctcgtctccctcctcatcctcagatcacattgccagacgccatggaggtcacaggcacgaggagagccttgccgatcaccgcattcgccctcatggcgatggctctggcgtccctggagccggtgctggcaggcagggacggcgacgcgctgacggcgctacgcaagggcctggaggaccccgacggcgcgctcacggactgggacccgaacctggtggacccgtgcacgtggtttcacgtcgtgtgtgacggcgataaccgcgtcatccgcctggatcttgggagactgaacctgtcgggtcctctggcacccgagctgggacaactggatcagctgcaatacatggaaattttcgggaacagcatcagtggatcaatcccatcagagttcggtagcttggtgaacctgatcagcctggacctgtccagcaacagcatctcaggagctatacccgcagcgctcgggaacgccaagtccctgaagttcctgcgtttggatcacaatcgcctgacggggccgatcccaagggagcttgctgggctgcccaatcttggaattgtagatttctccaacaacgacctttgtggcgcgatcccgacagacggagcattccagaacattccccgtagcagcttcgacaacaacccgcggctgcatgagggaggcgagtttgaacccaactgctagatggctgtctgtaactctgtatgaataatgatcgaacaatcacgtagagcggtgttctgatccatccatgcagactttctcagggcaaaaccatgctccttacccaatggccctttagatgggcctatattgtacttgatgatttggtatacttgacgtctatctctattggcc

SEQ ID NO: 135947 - DNA, 707 bp, Zea Mays
cctagtgagccgcccatttgcgccgccgcagcccgcagtcgcttgcgcgcagcagcacttcgcaccgccgccccatcccattgccgccagtgtctgctcgatccgatggctcccacgaagaagtcgaagagcacagagagcatcaacaacaagctgcagctggtgatgaagagcggcaagtacaccctgggctacaagaccgtcctcaagacgctgcgcaactccaagggaaagctgatcatcatcgcaaacaactgccctccacttaggaagtctgagattgagtactacgccatgctggccaaagttagtgtgcaccatttccacggaaacaatgttgatcttggcactgcctgcggcaagtactacagggtgtgctgcctcagtatcatcgacccaggtgactcggacatcatcagtaccacccctggcacccagtgagccagccccggcacccattgcagctgcttcgcctttctcaagatgagatgagatgtagcgctccggccctatgtccgtttcctttttttatcttttagctatgtaattttgctaccatgtgtccatctaccatactgatagtacctcttattatggctgctatgcaaggcatatccatggttttgtttgatgagatggttgtacttgttctcttgttgatgttgatcggatcaggtcaatcgatgcgctgatgggctgcttggtta

SEQ ID NO: 135948 - DNA, 2071 bp, Zea Mays
ccgcgtccacgctatgacgtcgccctcgtaatcaatctccgcctccctgcctgcttaccccgaccccgtcggcatctcggagaatcgcggcggtcaaagcccagcctaccccacctcgcgccgcgtcgccgcggtttccgcgggccagtgctctcgggagtcgggagctcagatcaggagggacgggctaggtagggttcgcgagcgagcgagggtgctgccgtccggcgccggtgtccgagtagcaagaggagagatggacgcgttcctgcagaggctcaagcggttggacgcgtaccccaaggtgaacgaggacttctacaagcggacgctctccggcggcatcgtcacgctcgtcgccgccgtcgtcatgctgcttctcttcatctccgagaccaggtcatatttttattcagcaacagagactaagttagttgtggacacatcaagaggagaaaggctacgagtaaattttgatattacttttctgagcattccttgcaccctcctcagcgttgatacaatggatattagtggagaacagcaccaggacattaggcatgacatcgaaaagatacgattagatgcacatggtaatgttattgaagcaagaaaagttagcattggtggagcaaagatcgagagaccattgcaaaaacatggaggaaggctcgacaaaggtgaacaatattgtggtacgtgttatggtgctgaggagtcggatgaacaatgttgtaattcttgcgaagaagtccgggaggcatataagaagaaaggatgggctctgacaaatcctgacctaattgaccagtgcgcaagagaggattttgttgagagagttaaaactcagcaagatgaaggctgcaatgtccatggttttttagatgtcagtaaagttgctggaaattttcactttgccccaggcaaaggtttttatgaatcgaacatagatgtgcctgagctgtcattacttgaaggtggtttcaatattacccacaaaataaacaaactgtcctttgggacagaattccctggtgttgtcaatccacttgatggtgctcagtggacacagccagcttcagatgggacataccagtatttcataaaagttgtccctacaatatacactgatataagaggacacaatattcattcgaaccagttctcggtaacggaacattttagggatggaaatgttcgtccgaaaccccaacctggagtttttttcttctatgatttctcacctataaaggtgatattcacagaagaaagtagatccctactccactacctgacaaacctttgtgctatagtgggaggtgtgttcactgtctcgggtatcatcgactcgtttatataccacggacagaaggcactcaagaagaaaatggagctaggtaaatacagatgatcaacatcgaccttgtactggccccatcgtttccaagttttgtggcatgtaaggaggggatatgcctgctaaatacgacaagatgccacttacattgctgaggttgcaatttgcaaggccatcagactgatgttattgcacgtgagctgatcagataacatgtaaaaagacaatgaatagcctggtctggggggagtgctttgatgtccatcattgttcactgacattgaaatggcccgaaccggtgcggtggagtaatttgagttcggaggtggatatatcatagatcatagaatgtttcttatgaaagtttcttcaaggaaacagcttcactcatggtgtcacccatactttgttcatttggtagtgctgctcttcaggaagaactggaacgattcgattgattatgttgcttttttcctaatgaccttggaggattcccttttctcgttttattttcagcagagctatccagtaaatatatattaactgtaatagtgattttttagttctacctacaattcattaggggtgggccaatgcaaaggtatactacaaattagaagatagcttattatgattgatttcattagattaatataagcctagctgtttggtaacctatattattggaggtgttgaaaagaaaaattaaaataa

SEQ ID NO: 135949 - DNA, 1245 bp, Zea Mays
gatttttcatataatgattctattgttttcttttccttgtagaggcatgacatcgaaaagatacgattagatgcacatggtaatgttattgaagcaagaaaagttagcattggtggagcaaagatcgagagaccattgcaaaaacatggaggaaggctcgacaaaggtgaacaatattgtggtacgtgttatggtgctgaggagtcggatgaacaatgttgtaattcttgcgaagaagtccgggaggcatataagaagaaaggatgggctctgacaaatcctgacctaattgaccagtgcgcaagagaggattttgttgagagagttaaaactcagcaagatgaaggctgcaatgtccatggttttttagatgtcagtaaagttgctggaaattttcactttgccccaggcaaaggtttttatgaatcgaacatagatgtgcctgagctgtcattacttgaaggtggtttcaatattacccacaaaataaacaaactgtcctttgggacagaattccctggtgttgtcaatccacttgatggtgctcagtggacacagccagcttcagatgggacataccagtatttcataaaagttgtccctacaatatacactgatataagaggacacaatattcattcgaaccagttctcggtaacggaacattttagggatggaaatgttcgtccgaaaccccaacctggagtttttttcttctatgatttctcacctataaaggtgatattcacagaagaaagtagatccctactccactacctgacaaacctttgtgctatagtgggaggtgtgttcactgtctcgggtatcatcgactcgtttatataccacggacagaaggcactcaagaagaaaatggagctaggtaaatacagatgatcaacatcgaccttgtactggccccatcgtttccaagttttgtggcatgtaaggaggggatatgcctgctaaatacgacaagatgccacttacattgctgaggttgcaatttgcaaggccatcagactgatgttattgcacgtgagctgatcagataacatgtaaaaagacaatgaatagcctggtctggggggagtgctttgatgtccatcattgttcactgacattgaaatggcccgaaccggtgcggtggagtaatttgagttcggaggtggatatatcatagatcatagaatgtttcttatgaaagtttcttcaaggaaacagcttcactcatggtgtcaccca

SEQ ID NO: 135950 - DNA, 1552 bp, Zea Mays
cactatgccgattggagaggttgtgctatctgccttcacgcaggcactctttgagaaagtgcttgctgctactatcggagagctgaaactccctccagatgtcactgaagaactgcaaagcttatcgagcatcctgtcaacaattcaatttcatgtcgaagatgccgaggagcggcaattgaaggataaggctgcacgcagctggcttgccaagctcaaggatgtcgcggatgagatggatgacttgcttgatgagtatgcagccgagactctgcgatccaaactagaaggtccatccaaccatgaccatctgaagaaggttaggagctgtttctgctgtttttggttgaacaagtgtttctttaatcataagatagcgcagcacataaggaagattgaggggaaactcgataggcttatcaaggaaagacaaattattggtcccaacatgaacagtgggaccgacaggcaggagataaaggagaggcccaaaacaagttcgctgatcgatgactcaagtgtgtttggaagagaaaaagataaggaaaccattgtaaagatgttgctggcccctaataataactcaggccatgccaacctttctattattcccatagtgggcatggggggactaggaaagacgactctaacacagctcatctacaatgatgaaagagtaaaggagcatttccagttaagggtgtggttgtgtgtttctgaaaattttgacgagatgaagcttaccaaggaaacaattgaatcagttgctagtggattctcatcagccacaacaaacatgaacctgctccaagaagacctctcaaaaaagctgcaaggtaaaagatttcttctagtccttgatgatgtatggaatgaggatcctgaaaaatgggacagatatcgttgtgctctacttagcgggggaaagggaagcaggattataattaccacgcgaaacaaaaatgtggggatactaatgggtgggatgactccttaccatctaaagcagctatcaaacgatgattgctggcagttgttcaaaaaacatgcatttgtagatggtgactccagttcacacccagaattagaaataataggcaaggacatcgtgaagaagttgaaaggcctgccactagctgcaaaagcagtcagcagtttactatgtaccagggatgcagaggaagattggaagaacatactaaagagtgaaatatgggaattgccatcagacaagaacaacatattgccagctctgagattgagttacagccatttgccagccacactgaagcgatgttttgcattttgttcagtgtttcccaaagattacgtctttgagaaaacaaggttggttcaaatatggatggcccttgggttcattcagcctcaaggaaggagaaagatggaagaaattgggagtggctattttgatgaattgcaaagcagatccttcttccaacatcacaaaagtggatatgtcatgcatgatgccatgcatgacctagcacagtctgtctcaattaatgaatgccttagattggatgaaggccta

SEQ ID NO: 135951 - DNA, 304 bp, Zea Mays
gtcggcaacagtttacttcatatcatcaaccatgcccaagtcatattttctcagggaaaacaaaaaaaaggttttaattgtgctacaagcaagtctcccatgcgtgaatgcatagcaacaagtttacagagtatactatccagggtactaacatatttatcaaaatgttgatgactgtatctcgtgcttcattattgaagttaggggagctctgttaaatatgtaagatctgcaattttgttctgcataaaaaggattcggatttctcagttatatacttattttcttcgtttacagatcatca

SEQ ID NO: 135952 - DNA, 104 bp, Zea Mays
gaaaatttggaggcatgcagaagttacagggtggaaggtactacgcttatcctcaaactttcatctactgcactttgtcttcttctgcatcgtgaagactaccg

SEQ ID NO: 135953 - DNA, 2470 bp, Zea Mays
agacagaccgtaggctcagtcagaactcagaaacagcatccactccaaaagcatagcgaccggtttcgccggcagccatcagccatgcacagccttctgcccatcctcctctgctcgtttctcctcgcaacggcagccaacgccgacaacccgttctacacaggctgtccgaacaacacgaactacacgcgcggcagcgcgttccaggccaacctcaacgccctcctcgcatccctcccctccgcggccgccgcgtcagcgggttttgccacgaacaccaccggcaccgcgcccgaccaggcgtatggcctcgcgcagtgccgcgccgacgtgaacgcgtcggactgccgcgcgtgcctcgacggctcgacgcgggacatggccagggtgtgcccaggccagaagagcgccatgctcatctacgacgcgtgccagctgcggcactccaacgcgagcttcttcggcgccgtcgacgcgtcggtcgtggtctggcagcctaacgcgcagaacgcgacgcagcaggagcagttcacgacgcggctcggcgcgctcatgggcagcgtcacggagagggcggcgtacgcgtccccgcggaggttcgcggtcggctcggccgccgtgacgcccttcgtgaacgtctacggcatggcgcagtgcacgcgggacctcgccggcgacgactgcaaccgctgcctcgtcggcgccgtctcgttcatcccgacgtgctgcgacggcaggcaaggcgcccgcatcgtgtacccgagctgctccatccggttcgaggtgtatccgttctacgacgcccaggctgccgacgcggcgatgtcgccggcaccggcaccgggagccggatccgtcaacggcagcgaccagtcgggcctaggagaaagcgggagcggcagtcacaaggtccgggcagctcttcttgtggcaattcctgtcgctgttgcgctgctgcaagttgctgtcttcctcttcctccgcaagaggaacagacaaccgcacaagcatgtgcaggttgcaagcaacgtacacgaagatgaagaagacatgacaagctcagagtatctcctctatgatctgagcaccctacgagctgccacggacaacttttcggaagaaaataagctcggcgagggagggtttgggccagtgtacaaaggcacgctgcaagacgggcaggagattgcagtgaagaggctgtcagcaacttcgcagcaagggcaggtggagatgaagaacgaggtggtcctgttggcgaagctccagcacaggaacttggtacgcctgctcggctgctgcaccgaggaacacgagaggctcctcgtctacgagttcctcaccaacaacagcctcgacaaaatcctcttcgatccagcacggcggcaggagctgggctggggactgaggcagaggatcatcgagggcatcggccgcgggctcctctacctccacgaggaatcgaggctgaccatcatccaccgggacctcaaggccagcaacatcctgctggacgcggacatgaaccccaagatctccgacttcggcttggccaagctgttcagcctcgactccagcgtgggaaacaccagccacattgccggaacatacggatacatggcgccggagtacgccatgcacggcctcttctcggccaagtcggacgtcttcagctacggcgtccttgtcctcgagatcgtcaccggccgccgcaactcgtacacgcatgcttcaggaccgtctgaagatctgcttacatttgtttggacgcactggagccgtgggagcgtgcagcctctgctggaggggtgccccgacgaggggctccgtgcgcaggagatgctgaggtgcatccacgtcgctctgctctgcgtccaggaggatccgctcgaccgccccagcatggcatcggtcgtcgtcatgctcaacagccgctccatcacgctgccggcgcccggcgcgccagcgtacgcggtgccccgccgtggaaccacggtcaggagcgcggctcgccagggcctggtggatgccgcggcatctagggagcagtccgttaacggcgcctccttttctgacatggagccgcgctaatgaatctgctgcactgcaacatggacgtcaatcgtgatgttttattaggttcaattttgtaagtacgatttttgaattactggagttgtttaaagtaggtttgtatcgttgtgttgccacggtaacggggggaaatcgatggaatgaaatagcatgatcttagcaatattgtaatgttttgggccacactggaaaatatataagtatattttttaagtaacattatgaaggcaaacatttagaagaacgcaaaaacacatagttcaagtaggtacttttttttgaaaggaaggggcaaaagacttgacgcaacgatatatattagattagggaagaaagaaagggagaatacaaaacctgagcaactggaggcaagaag

SEQ ID NO: 135954 - DNA, 1972 bp, Zea Mays
cccaggccaggcaccgctcccaaaacctcacgagcaagcgcgcgcggccacgaacaccatacgcgctgctcgctccctgtcccggccgtcgccgcgcgaggcggagaaaagagagtgcggatcgccgatccatgaaggaggcactcgcgctcgtgggcagcgcaaggcggctgtccgcgccggaggaggatgagctgctgggcctcctcgcgggcttccccgacgaagacggcggcggcggcggcggctccgaccgcgagctctccttctccgacctcgtcgaggccggcgccaggcaggcgatcgcggacgcggacctcggcgccgccaaggcgccgtgcggggatcgcccttgggcggccgtggcgctgccgtcgtcgcatgaggccgcgggcgctgcggcatccaagcagccggcggcgaggcagagggcggcgcggcggagcggcggcagcaggggcagctgcggcggaggcggcgacggcgtgctgctcaacttctacgtgccggggcttctcaccaggagcatgaccgcgccgaggcccagccgcgggccgccgtcgcccggggccgtgcagggcgcgccggcgaagcctgttgccgccgccggaaaagccagcagcagcaggacgcagacggcccagggcatcggttgctggccggcgctgtggggacgcgggcgccggccagccaaggcctgcagctgaagctgagagacgaccgccgtcgcgcgccaccaatcggagtccggactccggagaagcaagcttgctttctttctttcatgagctttcgttcttgaatctacagcagtctacaaccgacctcagaccccctgctacctgcacctctgtaaaataacgccgtcgccgtcgtcgccatctccctttctggtgtgcgtgtgacgcagcgatctctgtcgcagctcttgacgtctgaaccgtagctcctcccgctttgagccggcgcggggcgcgggcctcacgttccagctgccgcattgcacgtgttcagagaaagcgaacagaacagaacaaaacccgacccagaccctgaagagtctgaatgagtggcccatggccagtgagacgcgctgctgctggcaaatcagaggaggtgcagtgtaggcatcggggggaaaaatgtcttcttgggctcgtgctgcggcttcgtgcttgtcaatcgtcttactactgttaatgtggactgtgctgtgttttccgagctgtggagagcgcctgagacgccacatcgcacgacgcggcacacatgagtacgtgacacatgggtctcggagctcagcgtagccaatccggcagccgaaacgactggtcggtgtgccagcgatgggactacgacatgacgagcgagcgaggcatcgatgtgccgtgtcgtacgctgctggcttccaggttccagcccggggatgtggccggtttccgcggagaggcgcgtccgtttctggcgacctgaaatcggccgtctcgtcagggagataaatcgtgccccgtactccttccgtagcatagcataatcacataattgattgttcattgaatcattgttctgttcacctcaaatctacaagtgcaattgtttttgagacgaagtgggcacttcgtgcacctctcgagtcttgactccgtcgcgtcacgtcacgtccagtccgatgctgggaaatactgttgcaaggaaatctgacaaggacgattcaccaacacgaacaagctggagcggggagccaccgttaatctgctctctaaactctgtaaagggaacaatgcaaacaatcttatatacatctacatttgcattccccacaagagtagattttttgtatagttcagtctatgcacccagcaagtagcaaaagggtttctagctaggttgattaagtggtctgagtagcactctttaagtacttagttcgaatcctaattggagagaatttcagattaagttttaaaaagtc

SEQ ID NO: 135955 - DNA, 1421 bp, Zea Mays
ctgactccgtttgacattcggagatctcaacgtgaaacgaagttgatgaaagacgtaacatctttccacgaggatccaccctcttcagacgcagcccgagccgcgtccttccacagtgtcactcgcttcctcatgtcctggaactccgccgcgtcagggcgcatcagcctgtccacggccgaggctatctcacctctcccgatgacgccgtcggcgcgggccatgtccctgaggccgatgccattcttccacacctcggtgacgagccggctattggtcggctggtcgaacgcgatgggcagggtgagcatgggcacgccagcgtacaccgcctcgagcgtcgagttcatgccgcagtgggtgaagaaccccccgaccgaagggtggcacagcaccctcagctggttcgtccatggcacgatgaggccggcgtcgggatcgcggatcaggcctcgcacgcgggagcacgcgtcggcgtcgcggagcacccacaggaacctggccttgctcccggccaggccagcggcgatctcgtcgaactgggcggcggacaccgagaggaagctgccgagcgagacgtagagcaccgagcccgcgggctgtgcgtccagccacgccatgtagtcgtcaccgtctgggctggccttgtgctcttgcagtgccatgaaggggacgcagggcccaactgcgtacactgggcagttttgcctcatagcgccgatggcgtcgctctcgagctcttggaaggtggtgaagacgatacattgtgctttctttacagaggagtgggcttcaaggattttgtctagaagtaacgcatcggtgtgtgtaggcgcaagatcggcgaacctgattgatttctttgcagaaatgttgacatgccaaagaagaacaatgtttgtacgagttgcgcaactgctagtacccggagacgcgccgccgccggccgccgcgggtggtagcaggtggaagttgtactgcaccgcgaacatggtggcgctaatcgggcacatgatgcacacaggcacgcccctccgctcgccgacgcctacggtccacggcacgaacatgtcggccacaatagccgcgggcgccggcggcgcgagcctgtcgagaagctgctcgaacggcgacgccatcttggtgtacacggcctccatgaagccgaccatgtcgttggcgcggccgtgctcggaggggatcacgtttggaatggcctcaaagcgaacgcgcaggccgaggtccggcagcgccgccggggcgccgaggaggctgagccactcctcggtcacgatgatggtgatggtgacgccgtctcgagctgccaggaggcggcataggttcagcatcgcgttgacgtgaccacggcccgggtacggcacggccacgatgtggcagggcgccgccgccgtggagcccat

SEQ ID NO: 135956 - DNA, 1499 bp, Zea Mays
gtcccagctcgaacaggtcacctgagctctgagctccctgctacagtgctaccactgtaccaccagctattgctggcttgctgccatcttcctgtgagcgtgagaagtgagacggctgctaggatcggaataggatcaccatggcgtggccgcggtgcggtgggttcgtggagaaggcgaagccctacatcgccatgatctcgctccagttcggctacgccgggatgaacgtgctcaccaaggtgtcgctgaaccagggcatgagccactacgtgctcgtcgtctaccgccacgccttcgccacgctctccatcgcacccttcgccctcgtcctcgagaggaagaaggtgaggcccaagatgacgtggccaatcttctggcaaatcttcgtccttgccatgctcgggccggtgatcgaccagaacttctactacgcggggctcaagttcaccggccccacgttcgcctgcgcgatgagcaacatcctgccggccatgaccttcgtcctggcagtgatattcaggatggagaagctgcagatggagaaggtgaggtgccaggccaaggtcttcgggacggtggtgaccgtggccggcgcgatgctgatgacgctctacaagggcccgctgatgcagctggcgcggacgaccagcaggcacgcgtcggcgtcggcgtcgcccgccgcggagatcatcatcagcggcagggactggttcctcggctcggtgttcgtcgtcgtcgccacgctcgcctgggcctccctcttcgtcctgcaggcgcacaccatcaagcagtactcggcgcagctgtcgctcaccacgctcgtctgcttcgtcggcacgctgcaggccgtcgtggtcaccttcgtcatggagcgccgcacctccgtctggaccatcgggttcgacatgaacctgctcgccgccgcctacgccggcatcgtgacgtcgagcatcgcgtactacgtgcagggcctggtgatccagaaggccgggccggtgttcgcctcggcgttcagcccgctcatgatgatcatcgtcgccgccatgggctcgctcatcctctccgagaagatctacctcgggggcgtcctcggcgccgcgctcatcgtggcaggcctctactccgtcctctggggcaagcacagggagacgcaggagaaggaggaggccgccgacgccaagatggcgctgccgacggcggcagcatcctccatgcaagacgctgccgccggtgtcgctgtagatggtgcggggtgcaacgtcgggaatggcgtgacgaggtcatcctccaatgccgccgccgccgctgctagtgcagtttgattggcctcatcaggctcccaataatttgcctccggtgaatggcgcgcgggcgtcatgtcatccgtgatcgaatgctgaactgttcgtctagctacgacgagcacactgttcttattagggaaatggtgcacagctagctgtttggaagttggaattgagattttcgggaagaac

SEQ ID NO: 135957 - DNA, 1879 bp, Zea Mays
tccactcttcctttcccgccgtataaattcgccgaacacggcaccaccattctccaccaacccccggcgcggagcagccatggacgcctccctcctcctctccgtcggcctcgcgctggtgctgatcccgctctccctctcgctcctcaaccggctgcgcgtcggccgcctgccgcccggcccgcggccgtggcccgtcctgggcaacctgcgccagatcaagcccgtccggtgccggtgcttccaggagtgggcggagcggtacgggcccatcatctccgtctggttcgggtccggcctcaccgtcgtcgtctccacctcggagctggccaaggaggtgctcaaggagaacgaccagcagctcgcggaccggccgcggaaccgctccacccagcggttcagccgcaacgggcaggacctcatctgggccgactacggcccgcactacatcaaggtgcgcaagctctgcaacctcgagctcttcacgcccaggaggctcgaggcgctgcgccccatcagggaggacgaggtcaccgccatggtcgagtccgtgcaccgcgccgccactgccccgggtaatgaaggaaagccaatggtagtgaggaagcacctttctatggtggccttcaacaacataacaaggctggcatttgggaagcggttcatgaatgcaaacggtgatgttgacgaacaagggcgtgagtttaagactattgtgaacaacgggatcaagattggtgcatctctctctgttgctgagttcatttggtatttgagatggttgtgtccacttaatgaggagctttacaaaactcacaatgagagaagggaccgcctgacaatgaagatcattgatgagcacgctaagtctctcaaggagagtggtgccaagcagcactttgtggatgcacttttcactctcaaacaacagtatgaccttagtgaagacacagttattggacttctatgggatatgatcactgctggaatggacacaacagtcatctcagtcgagtgggcgatggcagaactggtcaggaaccctagggtgcagaagaagctgcaagaggagctcgaccgtgtggttggccgtgaccgcgtcatgctagagaccgacttccagaacctcccctacctacaggccgttgtcaaggaatcactccggctgcacccgccgacgccactcatgctcccgcacaaggccagctcgaacgtcaagatcggaggttacaacatccccaagggcgccaacgtgatggtgaacgtgtgggcggtggcgcgtgatcccaaggtctggagcaacccgctggagtacagaccggagcgcttcctggaggagaacatcgacatcaagggcagcgacttcagggtgctgccgttcggtgctggccggcgtgtgtgcccgggcgcgcagctcggcatcaacctcgtggcctccatgatcggacaccttctgcatcacttcgagtggtccctgccggagggcactagaccagaggacgtcaacatgatggagtcccccggtctcgtcacgttcatgggcacaccgctgcaagctgtcgtcaagccgcgcctggagaaggaggagctgtacaatagggtcccagttgagatgtgaggtgcctgcagccgctttgaattcactgctcgatttgtgtttttctcgctgctgcagctgctgcttctttcagctttaagctgttgaactgagttgttcgtgttgtaaaatatgaggtgctagatgcatttcgaatctcataaaattgttacatgtagtttgtcatagacttgcacaatgtgtctttatacaatagtataacacgattcaacaattccccttcgaactgaaatttagtactgcgtttatattcatttacat

SEQ ID NO: 135958 - DNA, 2042 bp, Zea Mays
atcgaacgatttgggggacgaggtgttctatttcacaaaagaggcaaaaaacaaaagccggtaacggaaaccctaatccccccaaatcccgaatccctctcgaatttctatttaatgttcctgttcttcccctccgatccgatgtccccaactgcgctccccgcggcgatcaaacaccggatcgcggcactcgccgccgttgaggaggaggtttccggcgctgcttccagcgccttgccgtcagcaccatgaggaagaagctggacacgcgtttccccgctcctcggattaaaaagatcatgcaaacagatgaagacgttggcaagattgctcaagctgtacctgttctagtgtccaaagcattggagctatttctgcaagatttatgtgataggacatatgatattacaattcggaagggggtcaagactgtgggttcttcccatttgaaacaatgcatacaaacgtacaatgtctatgacttcttgagggaagtagtcagcaaagttccagacattggtccttctgatgttattgctgatgataagcttggcaaaaggaggaaagccgaagaagatggaagtgaggaagaattgaagaggacaagaaatgagacagaaagccatacaagcaatggcagaggccgtgggagaggtcgtgggagaggtcgccgtagtgtacgtggaccttggcgggaggtggtcacaagtcctgaacaattcaaggaggagaatcaatctagcaaggtagccagcctaaaggtggaggtagcagatgaggtctcgaatgtaactgaagcaaaacaggacactacaccaatgagcaatgccaggccttccttaaggaacattgacttgaatttagatccaaccgatgaagaggatgaggttacagtgccacccgaaccccagctgtcagctccagcaactagttgcgctgcagccactgcagcacctggaccatctgttccacggttaagggaaggagcaaaactcaaggacttctttggtgcttgggaactggctgacatgaacaagatggagatggaccctgtccagtttgctctgtcaacaaaccatagattggaggaggacgaggattatgacaatgaagactagctccgccgttatatagcttcagagttgatgagtaggaatagcaggacaactgtaggttcagcttaactctgtagcagttctcatgtatcatatagccgccaaagctgccgatgtagcttataatgtcccagaggttaaggtcgtttgactagttgactgtaatgttctcaagttaggttctattagcagctattgctttcgcagatagtaccgtttgtacattccagttgctctccagttttatgttatctatccttctgctttcttggatagctgagacctgttggcggatgtatcatgtatggcaagttggcaacaaaaagcaagaaggctttcagattccttagcacatctcattctattacagtggtcaaatatctcattagggtacaatacatgtgggtaagacgctggtttattcattatatcatacttttccagtgggatgacagttaaattctttcattgttgtgctccagcctccagcgaaaagcctgtgcgccttgaagaagaaaaaaacacatcatggcactggaagatgatacctttactacctcaaatatggttatgcaagcacaaggtgaaccggttctacagaaccatgtgagtgttgttcccgtatggtatttcttgtgctagtccctccctgtaaaaagatcctgtacctcaggcgaccgcggcgtctccgacgagctcgaagctctgcagctgcttgaagttctcccacgccttctcccacaccttggcctcgtacagcttcttttcgccgccgccggcctccttcacctcgacggtgaagtggtgcagggtcccggccacgacctggtgcctcaccttcaccagcctctcgaattccagcatcgcgttctgcgcgtgtattatgcatccatgtgagggctccgatctcaaaacttaaaaaaaaaa

SEQ ID NO: 135959 - DNA, 1034 bp, Zea Mays
ccgaccgagcgagcgctagttaggcaagtgagctgctgctcatcatgagtcactagtcagtagtcgcaacgcgcacgcggtgcgagcgtgaggtcgttgatgggcgcgcagggatgagcgagagtgccctgaccatcaggcggctgagcggtggcggtgccggcggcggcaatgcgggagagagcgctggcgccgacggcccctgggaagaaggaggcggcaatgcggcgcgggtccggggcgtcaacgcgggcatcatggacgagacggtgctgcagctggtgttccgggcgctcaactgggacccgcagacgctgtgcgcggtggcgcgggtgagccggcgcctgcgcgccgtggcggagcgggtgctgtggcgggagctctgcgcctcgcgggcgccgcggatggtggcggcgctgacgggcggggcggccgcctcggcgccggcggccgggcgcatcggcggcgggtggccggcgctggcgaagctcctgctcttctgctgcggcgcggcgggcgcgggcgtgcggggccacttcgtcccggtctcccgcttctccaagacgtccgggcggagcttcctgtcgcgccgctgcgcgggggacctgctgtacgtgtcggacccctgcgagcacgccgtggcgggcgccaacgacgacgtcggcgcctaccgcggcgtgttccgcgggttcatgcgctcccggacgcgggcgtgcctggtgggccaccgcaccgcgctggagccgcgcgtgcgctgcccctactgcggcgcgcgcgtctggagcatgaccgccgcggggctcgccccgcgcagcgcgtcccgcaggctcggcgcccacgaggaccgcctcgagtacttcgtctgcgtcagcggccacctccacggcagctgctggctcgcgcgcctctccgacagcgagggcggcggaccaggcggcgccagcgacgacgacgacgacgcgtccgccgccgccagcgaggaggacgacgccagcctctgacgccgatcgatcgacgggagggacgtgtacaga

SEQ ID NO: 135960 - DNA, 2050 bp, Zea Mays
ttttttttctgtagcttaagagtgcagtagatagatataagtcgtttagtgggccggaaacctcactgtggcggtgtggcccgccttttgttctacattccagtcccctccggcacactgtgttcttccgttcctctcgcgtggttgtctggtgccgacgactgggccgccgccgcctccgtcctacgctcggtgctgaggccttcgggacttccgccggcgacgcgcaccctccgggttgaaatccctcgagaacaatggggcgcacggttctttcagatgaagaagaagatgagttcgaggctgacgaggaggatccgcggccctcgcggaggaacagggacgatatggacgagcgcgatgacgacgacgacgacgatgaggacggtcaggatgaatttgagaaggatgacttcatagtggacgacgaggaagaagaagtggaaggagaggaagaggaacagaagagtgatgacgagaggcgaagaaagaaaaagaaaaagaagagggaatcagacgacttcatgctcgatgaggatgactatatgttgctccaggataataacatcactggcatcagtcgcccaaagcctggaaacaagtttaagcgcttgaaaaaggctggaagggaatctgaaatggatgagcactctggtttttcagatggtgatggaacaggcaaaaaacgcagtggcaaggagagggtcgagtacagtttatttggtgatcatcaagatgctgcaccctttgaggaggacttcgaggacgatcagcaggcaggggagggtgaggaggaagttggtgatgatgaagatgaaatggcagatttcattgtggaggaagatgaaattgatgggaatggacaagttgtaaggaggaagaaatttaaaaagaaggtaccacgacaagcagcaggtgtatcatcgtctgctctgcaagaggcccaagacatatttggcgatgttgatgagctgttggcactaagaaaacaagagcttgagagggaggcccttaactctggtgagttaaggggggcgaggcttgaagatgagtttgaaccatttattcttgcagagaagtatatgacatcaaaagatgagcaaataaaagaaaatgatgttcctgagaggatgcagttgtctgaagagttgactgggtatcctccaacggataaaacaacgattgaggaagagagttcatggatacacagccacttaaccggtgatggatttctgtccttttttggcaatgagcacataaacaaggatattgaccagaaggacattgtcaatgtcgtgaccatgttgcatgccaacaaatttgaaattccgttcatcgcaatgtacagaaaagagagctgtccaaccctattaagttttgattctgatgaggataacgaggatattgaatctgatgcacgcaaattgaggtggcataagctgctctgggcggttcaggccttagacagaaagtggctacttcttcagaagcgcaaggttgctttacagttgtattatgagaaaagatttgatgatgagaaacggaggatagatgatgtcacaaggcaagaacttaatagccaactttataattccatcattgaagcactgaaggatgctaaatctgagaaagaggtggaggatgttgatgcaaaattcaatttacattttcctcctggtgaagtagaagaagaaggtcaatttaaacgtcctaaaaggaagtccttgtacagtatctgtcacaaggcagggctatgggaggttgccaaccaatttgggcgcagtgctgagcaattaggccaccatctgactttaactaagatacctgaagcaggcgagcttgagagcggtagacattcacctgaagaggtcgctgcaaatttcacatgtgcaatgtttgaaacatcacaagatgttcttcgtggcgcgagacacatggtatttaatagacccacaattctgaccctcttttgtactccttccattccaaattataagacattttggtttttctagatacattgattgtactatgtatctagacatggtgt

SEQ ID NO: 135961 - DNA, 5460 bp, Zea Mays
ttttttttctgtagcttaagagtgcagtagatagatataagtcgtttagtgggccggaaacctcactgtggcggtgtggcccgccttttgttctacattccagtcccctccggcacactgtgttcttccgttcctctcgcgtggttgtctggtgccgacgactgggccgccgccgcctccgtcctacgctcggtgctgaggccttcgggacttccgccggcgacgcgcaccctccgggttgaaatccctcgagaacaatggggcgcacggttctttcagatgaagaagatgagttcgaggctgacgaggaggatccgcggccctcgcggaggaacagggacgatatggacgagcgcgatgacgacgacgacgacgatgaggacggtcaggatgaatttgagaaggatgacttcatagtggacgacgaggaagaagaagtggaaggagaggaagaggaacagaagagtgatgacgagaggcgaagaaagaaaaagaaaaagaagagggaatcagacgacttcatgctcgatgaggatgactatatgttgctccaggataataacatcactggcatcagtcgcccaaagcctggaaacaagtttaagcgcttgaaaaaggctggaagggaatctgaaatggatgagcactctggtttttcagatggtgatggaacaggcaaaaaacgcagtggcaaggagagggtcgagtacagtttatttggtgatcatcaagatgctgcaccctttgaggaggacttcgaggacgatcagcaggcaggggagggtgaggaggaagttggtgatgatgaagatgaaatggcagatttcattgtggaggaagatgaaattgatgggaatggacaagttgtaaggaggaagaaatttaaaaagaaggtaccacgacaagcagcaggtgtatcatcgtctgctctgcaagaggcccaagacatatttggcgatgttgatgagctgttggcactaagaaaacaagagcttgagagggaggcccttaactctggtgagttaaggggggcgaggcttgaagatgagtttgaaccatttattcttgcagagaagtatatgacatcaaaagatgagcaaataaaagaaaatgatgttcctgagaggatgcagttgtctgaagagttgactgggtatcctccaacggataaaacaacgattgaggaagagagttcatggatacacagccacttaaccggtgatggatttctgtccttttttggcaatgagcacataaacaaggatattgaccagaaggacattgtcaatgtcgtgaccatgttgcatgccaacaaatttgaaattccgttcatcgcaatgtacagaaaagagagctgtccaaccctattaagttttgattctgatgaggataacgaggatattgaatctgatgcacgcaaattgaggtggcataagctgctctgggcggttcaggccttagacagaaagtggctacttcttcagaagcgcaaggttgctttacagttgtattatgagaaaagatttgatgatgagaaacggaggatagatgatgtcacaaggcaagaacttaatagccaactttataattccatcattgaagcactgaaggatgctaaatctgagaaagaggtggaggatgttgatgcaaaattcaatttacattttcctcctggtgaagtagaagaagaaggtcaatttaaacgtcctaaaaggaagtccttgtacagtatctgtcacaaggcagggctatgggaggttgccaaccaatttgggcgcagtgctgagcaattaggccaccatctgactttaactaagatacctgaagcaggcgagcttgagagcggtagacattcacctgaagaggtcgctgcaaatttcacatgtgcaatgtttgaaacatcacaagatgttcttcgtggcgcgagacacatggcagcagttgagataggttgtgagccaattgtgagaaagcatgtacgaggcatcttcatgaataaagcagttgtgtcaacaagtcccacatctgagggaaatacaatcatagatccatatcaccaactatcgggtgttaagtggctgagagagaaaccacttagcaagtttgttgatgcacagtggctccttattcagaaagcagaggaagaaaagctcctcaaggttaccgtaaaattgccagaagatgcaaagaaaaaactcatgtctgaagcacgtgagaattatctaagtgattgtgtcagcaagtctgcacaattgtgggatgagcaacggaagatgatactggatgatgctttcttcaattttctccttccatcaatggaaaaggaagctcgatcactgttgatgacaaaagccaaacattggctccatatggaatatgggaaacagttgtggaacaaggttactgttgctccttggaagaagaaagatgcggacaagaaggatgctgacattgatttggatgatgaatcagagttgagagttatggcttgctgctggggtcctgggaagccagcaaccacctttgtaatgttagactcctcaggagagttggttgatgttctgtatgcaggctctatcagtaacaggtctcaaggtgtcgctgagcagcagcggaagaagaacgaccagcagcgagtcttaaagtttatgactgatcatcaaccacatgttgtgtgtgtaggagcatcgaactacaattgcagacaactgaaggatgatctttatgaggttatttttaaaattgtagaggatcatccaagggatgttaacgcccaaatggaaaattttagcattgtctatggtgacgagtctgtgcctcgcttgtatgagaactctcgaatatcttcggatcaacttcctggccaatcaggtattgtgaagcgggctgtggcgcttggacgttaccttcagaacccgttggcaatgattgcaacactgtgtggacctgggaaagagatactttcttggaaactgcatgctctggaacagtttctaactcctgatgagaagtatgaaattgttgagcaagtaatggttgatgcaacaaatcagataggttttgatgtcaatcttgctgctagccatgagtggcatttttctactctacaatttattgctggtttgggtccgcgtaaagcttcagctttgcagaaagatctggtaagagagggatccatttttagtcgcaaagagcttgtaaaacctctaggcaggaaagtattcatgaatgcttctggatttttacgtgttcggcggagtggtgcagctgcagccagcgctcaactcattgatctgcttgaggatacaaggatccatcctgaatcatatgtattggcaaaaaatttagctaaggatgtctatgttgaggatgcacaacatgaaataaatgaaatggacgatgaggagcaagagatggctattgagcatgttagagaaaggccaagcatgcttcgaagtcttaaaattgtggaatatataaagagcattacagaagaataccgtaaactggaaactctgcgtgatataaagtttgagctgctgtgcggtttttctgactggaggattccctataccgagccaagcccagacgaggaattctggttgctttctggtgaaactgatgataccatatctgagggaaggattgttcaagttactgttcgcaatatacaagataacaaaataatttgcacctttgattcgggtttgaaagccatagttatggcagacaactattctgatgagggttttgatccagaatcatcacagttacgtgaaggcgatgtattaactggcaaaattcgaaacgtgaataaaaatagattcatggtttacctaacatgcaaggctagcgagatgaggagaaggccattctctagaggtgagcaggatccttactatcatgaacaagacatgacctcacaaactgtagaagataaggctcggaaacaaaaggaacttgcaaagaagcatttcaagccccgaatgattgttcatccccactttcagaacctgacagctgaagaagccatgcagtttttatcagataaagagcatggtgagaagttaatccgaccaagctccaggggaccatcatttttgacacttaccctgaaaatttttgatggcgtttacgcacataaggagatagctgaaagtggaaaggatcataaagatatcacaagtttgcttcgcctggggaaaacactaacaattgataatgaaacttttgaagacctcgatgaggttattgaccgatatgtggacccattggtaggacacctgaagagcatgctgtcgtaccgtaaattcagaaagggtttaaaaaatgaggttgatgagatgttaagggcagagaaagcagagaaccctatgagaatagtatatagttttggcatatctcacgaacatcctggcacctttatattgtcatatattaggagtacaaacccacatcacgagtacattgggttgtacccgaagggcttcaggttcaggaagagagacttcgacaacattgaccgtcttgtgtcgtatttccagaagaatattgacaaaccaccacctgatgctggaccatcaatgcggaatgttgctgcaatggtacctatgaaaaactcagcttggggttctggtggtggtggggatgcaaatggtggttggaggggagatggtagtaatgatagggatcgacctttctctggcagatcaggagggaggtttgattcaaggaatagctctggtggtcgtggacgaggacgggggcgtggccggggtaactttggcgatgacgataatgctggtggaggttggagtggaggaggtggtggtggcaacagtggaaggtggaccgataacattggcacaggtggcagtggtggttcttcctggggtggtggtggcggtggtgatgacagcaaccgtggcggtggaggagggggttggggatcagctggtggtggtgctgacaatgctggtggcggaaatggagcctggggagcagctgctggtggctctgatgacccagggttgggtagcgccaaaaaggtcgtcccagcacaggatggtggaaccggctgggggtcagaaggtggcggcggcggtggtggcggaggctggtaactgggctgtgccctgcgttgtagtccagacaacagctactagatgaaaacagtttcctcgttttaactcctgtcctatcgtactgtggacgggagaaatctggcacttataagtcttgcagctgctgcacgtctgcagatgttgcattgcggacagcgttatgtttcagtgcatgtacataaatccaatatgtctggtcacactttcctgctacgaatttgatcctggtgcttcattgttgaggctatccgcaattaggccagtactctaccccatgttggtaagcttttgtgttgaaagtgtaacacgctacattttgtttccctagcttcacata

SEQ ID NO: 135962 - DNA, 499 bp, Zea Mays
gtggcggtgtggcccgccttttgttctacattccagtcccctccggcacactgtgttcttccgttcctctcgcgtggttgtctggtgccgacgactgggccgccgccgcctccgtcctacgctcggtgctgaggccttcgggacttccgccggcgacgcgcaccctccgggttgaaatccctcgagaacaatggggcgcacggttctttcagatgaagaagatgagttcgaggctgacgaggaggatccgcggccctcgcggaggaacagggacgatatggacgagcgcgatgacgacgacgacgacgatgaggacggtcaggatgaatttgagaaggatgacttcatagtggacgacgaggaagaagaagtggaaggagaggaagaggaacagaagagtgatgacgagaggcgaagaaagaaaaagaaaaagaagaggtacctccatttcttcctactacggataaatgtcaatatattgtgtacgctatcctgaaat

SEQ ID NO: 135963 - DNA, 5421 bp, Zea Mays
gtggcggtgtggcccgccttttgttctacattccagtcccctccggcacactgtgttcttccgttcctctcgcgtggttgtctggtgccgacgactgggccgccgccgcctccgtcctacgctcggtgctgaggccttcgggacttccgccggcgacgcgcaccctccgggttgaaatccctcgagaacaatggggcgcacggttctttcagatgaagaagaagatgagttcgaggctgacgaggaggatccgcggccctcgcggaggaacagggacgatatggacgagcgcgatgacgacgacgacgacgatgaggacggtcaggatgaatttgagaaggatgacttcatagtggacgacgaggaagaagaagtggaaggagaggaagaggaacagaagagtgatgacgagaggcgaagaaagaaaaagaaaaagaagagggaatcagacgacttcatgctcgatgaggatgactatatgttgctccaggataataacatcactggcatcagtcgcccaaagcctggaaacaagtttaagcgcttgaaaaaggctggaagggaatctgaaatggatgagcactctggtttttcagatggtgatggaacaggcaaaaaacgcagtggcaaggagagggtcgagtacagtttatttggtgatcatcaagatgctgcaccctttgaggaggacttcgaggacgatcagcaggcaggggagggtgaggaggaagttggtgatgatgaagatgaaatggcagatttcattgtggaggaagatgaaattgatgggaatggacaagttgtaaggaggaagaaatttaaaaagaaggtaccacgacaagcagcaggtgtatcatcgtctgctctgcaagaggcccaagacatatttggcgatgttgatgagctgttggcactaagaaaacaagagcttgagagggaggcccttaactctggtgagttaaggggggcgaggcttgaagatgagtttgaaccatttattcttgcagagaagtatatgacatcaaaagatgagcaaataaaagaaaatgatgttcctgagaggatgcagttgtctgaagagttgactgggtatcctccaacggataaaacaacgattgaggaagagagttcatggatacacagccacttaaccggtgatggatttctgtccttttttggcaatgagcacataaacaaggatattgaccagaaggacattgtcaatgtcgtgaccatgttgcatgccaacaaatttgaaattccgttcatcgcaatgtacagaaaagagagctgtccaaccctattaagttttgattctgatgaggataacgaggatattgaatctgatgcacgcaaattgaggtggcataagctgctctgggcggttcaggccttagacagaaagtggctacttcttcagaagcgcaaggttgctttacagttgtattatgagaaaagatttgatgatgagaaacggaggatagatgatgtcacaaggcaagaacttaatagccaactttataattccatcattgaagcactgaaggatgctaaatctgagaaagaggtggaggatgttgatgcaaaattcaatttacattttcctcctggtgaagtagaagaagaaggtcaatttaaacgtcctaaaaggaagtccttgtacagtatctgtcacaaggcagggctatgggaggttgccaaccaatttgggcgcagtgctgagcaattaggccaccatctgactttaactaagatacctgaagcaggcgagcttgagagcggtagacattcacctgaagaggtcgctgcaaatttcacatgtgcaatgtttgaaacatcacaagatgttcttcgtggcgcgagacacatggcagcagttgagataggttgtgagccaattgtgagaaagcatgtacgaggcatcttcatgaataaagcagttgtgtcaacaagtcccacatctgagggaaatacaatcatagatccatatcaccaactatcgggtgttaagtggctgagagagaaaccacttagcaagtttgttgatgcacagtggctccttattcagaaagcagaggaagaaaagctcctcaaggttaccgtaaaattgccagaagatgcaaagaaaaaactcatgtctgaagcacgtgagaattatctaagtgattgtgtcagcaagtctgcacaattgtgggatgagcaacggaagatgatactggatgatgctttcttcaattttctccttccatcaatggaaaaggaagctcgatcactgttgatgacaaaagccaaacattggctccatatggaatatgggaaacagttgtggaacaaggttactgttgctccttggaagaagaaagatgcggacaagaaggatgctgacattgatttggatgatgaatcagagttgagagttatggcttgctgctggggtcctgggaagccagcaaccacctttgtaatgttagactcctcaggagagttggttgatgttctgtatgcaggctctatcagtaacaggtctcaaggtgtcgctgagcagcagcggaagaagaacgaccagcagcgagtcttaaagtttatgactgatcatcaaccacatgttgtgtgtgtaggagcatcgaactacaattgcagacaactgaaggatgatctttatgaggttatttttaaaattgtagaggatcatccaagggatgttaacgcccaaatggaaaattttagcattgtctatggtgacgagtctgtgcctcgcttgtatgagaactctcgaatatcttcggatcaacttcctggccaatcaggtattgtgaagcgggctgtggcgcttggacgttaccttcagaacccgttggcaatgattgcaacactgtgtggacctgggaaagagatactttcttggaaactgcatgctctggaacagtttctaactcctgatgagaagtatgaaattgttgagcaagtaatggttgatgcaacaaatcagataggttttgatgtcaatcttgctgctagccatgagtggcatttttctactctacaatttattgctggtttgggtccgcgtaaagcttcagctttgcagaaagatctggtaagagagggatccatttttagtcgcaaagagcttgtaaaacctctaggcaggaaagtattcatgaatgcttctggatttttacgtgttcggcggagtggtgcagctgcagccagcgctcaactcattgatctgcttgaggatacaaggatccatcctgaatcatatgtattggcaaaaaatttagctaaggatgtctatgttgaggatgcacaacatgaaataaatgaaatggacgatgaggagcaagagatggctattgagcatgttagagaaaggccaagcatgcttcgaagtcttaaaattgtggaatatataaagagcattacagaagaataccgtaaactggaaactctgcgtgatataaagtttgagctgctgtgcggtttttctgactggaggattccctataccgagccaagcccagacgaggaattctggttgctttctggtgaaactgatgataccatatctgagggaaggattgttcaagttactgttcgcaatatacaagataacaaaataatttgcacctttgattcgggtttgaaagccatagttatggcagacaactattctgatgagggttttgatccagaatcatcacagttacgtgaaggcgatgtattaactggcaaaattcgaaacgtgaataaaaatagattcatggtttacctaacatgcaaggctagcgagatgaggagaaggccattctctagaggtgagcaggatccttactatcatgaacaagacatgacctcacaaactgtagaagataaggctcggaaacaaaaggaacttgcaaagaagcatttcaagccccgaatgattgttcatccccactttcagaacctgacagctgaagaagccatgcagtttttatcagataaagagcatggtgagaagttaatccgaccaagctccaggggaccatcatttttgacacttaccctgaaaatttttgatggcgtttacgcacataaggagatagctgaaagtggaaaggatcataaagatatcacaagtttgcttcgcctggggaaaacactaacaattgataatgaaacttttgaagacctcgatgaggttattgaccgatatgtggacccattggtaggacacctgaagagcatgctgtcgtaccgtaaattcagaaagggtttaaaaaatgaggttgatgagatgttaagggcagagaaagcagagaaccctatgagaatagtatatagttttggcatatctcacgaacatcctggcacctttatattgtcatatattaggagtacaaacccacatcacgagtacattgggttgtacccgaagggcttcaggttcaggaagagagacttcgacaacattgaccgtcttgtgtcgtatttccagaagaatattgacaaaccaccacctgatgctggaccatcaatgcggaatgttgctgcaatggtacctatgaaaaactcagcttggggttctggtggtggtggggatgcaaatggtggttggaggggagatggtagtaatgatagggatcgacctttctctggcagatcaggagggaggtttgattcaaggaatagctctggtggtcgtggacgaggacgggggcgtggccggggtaactttggcgatgacgataatgctggtggaggttggagtggaggaggtggtggtggcaacagtggaaggtggaccgataacattggcacaggtggcagtggtggttcttcctggggtggtggtggcggtggtgatgacagcaaccgtggcggtggaggagggggttggggatcagctggtggtggtgctgacaatgctggtggcggaaatggagcctggggagcagctgctggtggctctgatgacccagggttgggtagcgccaaaaaggtcgtcccagcacaggatggtggaaccggctgggggtcagaaggtggcggcggcggtggtggcggaggctggtaactgggctgtgccctgcgttgtagtccagacaacagctactagatgaaaacagtttcctcgttttaactcctgtcctatcgtactgtggacgggagaaatctggcacttataagtcttgcagctgctgcacgtctgcagatgttgcattgcggacagcgttatgtttcagtgcatgtacataaatccaatatgtctggtcacactttcctgctacgaatttgatcctggtgcttcattgttgaggctatccgcaattaggccagtactctaccccatgttggtaagcttttgtgttgaaagtgtaacacgctacattttgtttccctagcttcacataaccccgcttacaagtgtttcaatgt

SEQ ID NO: 135964 - DNA, 1647 bp, Zea Mays
agtcccaggcccaaaccctccctcaccggccagtcggcaacccaagcgcccgccgctctcctccagccctcgccggacgtccacgcgcgagctcgtcgttggtgtcgtttctaccgtcaggttcccatctcgcttccccacccgctcctttctcccccgccctcgcctcctcctgcggcgacagcttccctagcccccttcttaagaatcttctagacgcggaccgaaggacccggccgccagccgcagcatccgttggtgaaggcgaagtaggcaggctcgggttctaggggcgaccttgctggcccggtatggaccagaggaaggccatcttccgcgcgaagctccgcgagacgaaggagaagcaacagcggcgcatcgaccccgcgctcgtcaggtataacgaatttgaccagcccatatgcagagtatgcaatattacactgaagtctgaagcactttggcctgcacaccaagtgtcacggaagcatcatgaagcaaaagccgccgctgctgataaggctacaacacttacagggtctagaggcagcaatgcaaagctagagcaaccattggagcctcaggaacgaaaatcatccacactacctaccaagttttttgataatcagggagctaaaaggaaaagtgatgatactatatctgagggaaggtctgtgcgccatgaagttgctgttattcaaccgaagaccataggagcaagcactgataaatcatctgttcggatggatcaaatgtcaaagaaagggagtcaaagcaacaccaatgtccaaggaatccttccagggaatttttttgactatggagaagatgaagcttcagctccagctccaaaagagcttagtacatctcaaattcacactaaggtgaaaggtgtccctgatggcttctttgatcacaataaatctagcagtggcatgcaacccaatgaaccaagttcagaagctgctcaagtaataggatcgttgcctgaaggtttctttgataacaaagatgcagatctccgtgcacgcggtatccaacctcaaaaggttgacatgaatgatgcgtacaaagaatttgagaaggaaattcaggaggatttgcaggaagttgatgaccgccttgaagaagaggagattgatgctgctgctgagagggaggagtacttgactctagagcaacaggagtacaggcagcaggttgatatgttgaagaaacagctagtagagtcgaaagccgcccgtactgctagagtaaatagaaaacctatcggtatggactcggactccagcagtgactcatcgagcgatgaagaggatgacaacacagattttgctgttgattggagagcacagcatttgaaatgatggaaacattttgcaagtggtatgaactattgtggaaagtcagaacctttagtatcgagaattctagctcagttcagttttttacatgtagaaaacactgtagtatttacatcttttatctcattttgtagtatacaccggagttgagtcttctgactacctggaccgactggtgaatcccttgactgcttgaacttggctgttgcttaacctgttccgagaaattttacacgttgtctccgattttttaacatacgacttaggagtacatgttaaacaa

SEQ ID NO: 135965 - DNA, 1443 bp, Zea Mays
ccctccctcaccggccagtcggcaacccaagcgcccgccgctctcctccagccctcgccggacgtccacgcgcgagctcgtcgttggtgtcgtttctaccgtcaggtataacgaatttgaccagcccatatgcagagtatgcaatattacactgaagtctgaagcactttggcctgcacaccaagtgtcacggaagcatcatgaagcaaaagccgccgctgctgataaggctacaacacttacagggtctagaggcagcaatgcaaagctagagcaaccattggagcctcaggaacgaaaatcatccacactacctaccaagttttttgataatcagggagctaaaaggaaaagtgatgatactatatctgagggaaggtctgtgcgccatgaagttgctgttattcaaccgaagaccataggagcaagcactgataaatcatctgttcggatggatcaaatgtcaaagaaagggagtcaaagcaacaccaatgtccaaggaatccttccagggaatttttttgactatggagaagatgaagcttcagctccagctccaaaagagcttagtacatctcaaattcacactaaggtgaaaggtgtccctgatggcttctttgatcacaataaatctagcagtggcatgcaacccaatgaaccaagttcagaagctgctcaagtaataggatcgttgcctgaaggtttctttgataacaaagatgcagatctccgtgcacgcggtatccaacctcaaaaggttgacatgaatgatgcgtacaaagaatttgagaaggaaattcaggaggatttgcaggaagttgatgaccgccttgaagaagaggagattgatgctgctgctgagagggaggagtacttgactctagagcaacaggagtacaggcagcaggttgatatgttgaagaaacagctagtagagtcgaaagccgcccgtactgctagagtaaatagaaaacctatcggtatggactcggactccagcagtgactcatcgagcgatgaagaggatgacaacacagattttgctgttgattggagagcacagcatttgaaatgatggaaacattttgcaagtgtatacaccggagttgagtcttctgactacctggaccgactggtgaatcccttgactgcttgaacttggctgttgcttaacctgttccgagaaattttacacgttgtctccgattttttaacatacgacttaggagtacatgttaaacaagctatctgcctctagatcacgatccagtcagatatttgctcgtgcatttcaatcttctgctgtcgtcacaaggatatctgacatctcaattggttggtacttggttgttggatggttgaagggacgcctccgcctgtgaagattggctggcttgtgcatgcttcaacgcttgtgctaccagctagtacagggcttgtgtc

SEQ ID NO: 135966 - DNA, 1367 bp, Zea Mays
ctccctcaccggccagtcggcaacccaagcgcccgccgctctcctccagccctcgccggacgtccacgcgcgagctcgtcgttggtgtcgtttctaccgtcaggttcccatctcgcttccccacccgctcctttctcccccgccctcgcctcctcctgcggcgacagcttccctagcccccttcttaagaatcttctagacgcggaccgaaggacccggccgccagccgcagcatccgttggtgaaggcgaagtaggcaggctcgggttctaggggcgaccttgctggcccggtatggaccagaggaaggccatcttccgcgcgaagctccgcgagacgaaggagaagcaacagcggcgcatcgaccccgcgctcgtcagggtctagaggcagcaatgcaaagctagagcaaccattggagcctcaggaacgaaaatcatccacactacctaccaagttttttgataatcagggagctaaaaggaaaagtgatgatactatatctgagggaaggtctgtgcgccatgaagttgctgttattcaaccgaagaccataggagcaagcactgataaatcatctgttcggatggatcaaatgtcaaagaaagggagtcaaagcaacaccaatgtccaaggaatccttccagggaatttttttgactatggagaagatgaagcttcagctccagctccaaaagagcttagtacatctcaaattcacactaaggtgaaaggtgtccctgatggcttctttgatcacaataaatctagcagtggcatgcaacccaatgaaccaagttcagaagctgctcaagtaataggatcgttgcctgaaggtttctttgataacaaagatgcagatctccgtgcacgcggtatccaacctcaaaagtgatgcgtacaaagaatttgagaaggaaattcaggaggatttgcaggaagttgatgaccgccttgaagaagaggagattgatgctgctgctgagagggaggagtacttgactctagagcaacaggagtacaggcagcaggttgatatgttgaagaaacagctagtagagtcgaaagccgcccgtactgctagagtaaatagaaaacctatcggtatggactcggactccagcagtgactcatcgagcgatgaagaggatgacaacacagattttgctgttgattggagagcacagcatttgaaatgatggaaacattttgcaagtgtatacaccggagttgagtcttctgactacctggaccgactggtgaatcccttgactgcttgaacttggctgttgcttaacctgttccgagaaattttacacgttgtctccgattttttaacatacgacttaggagtacatgttaaacaa

SEQ ID NO: 135967 - DNA, 1636 bp, Zea Mays
ctccctcaccggccagtcggcaacccaagcgcccgccgctctcctccagccctcgccggacgtccacgcgcgagctcgtcgttggtgtcgtttctaccgtcaggttcccatctcgcttccccacccgctcctttctcccccgccctcgcctcctcctgcggcgacagcttccctagcccccttcttaagaatcttctagacgcggaccgaaggacccggccgccagccgcagcatccgttggtgaaggcgaagtaggcaggctcgggttctaggggcgaccttgctggcccggtatggaccagaggaaggccatcttccgcgcgaagctccgcgagacgaaggagaagcaacagcggcgcatcgaccccgcgctcgtcaggtataacgaatttgaccagcccatatgcagagtatgcaatattacactgaagtctgaagcactttggcctgcacaccaagtgtcacggaagcatcatgaagcaaaagccgccgctgctgataaggctacaacacttacagggtctagaggcagcaatgcaaagctagagcaaccattggagcctcaggaacgaaaatcatccacactacctaccaagttttttgataatcagggagctaaaaggaaaagtgatgatactatatctgagggaaggtctgtgcgccatgaagttgctgttattcaaccgaagaccataggagcaagcactgataaatcatctgttcggatggatcaaatgtcaaagaaagggagtcaaagcaacaccaatgtccaaggaatccttccagggaatttttttgactatggagaagatgaagcttcagctccagctccaaaagagcttagtacatctcaaattcacactaaggtgaaaggtgtccctgatggcttctttgatcacaataaatctagcagtggcatgcaacccaatgaaccaagttcagaagctgctcaagtaataggatcgttgcctgaaggtttctttgataacaaagatgcagatctccgtgcacgcggtatccaacctcaaaaggttgacatgaatgatgcgtacaaagaatttgagaaggaaattcaggaggatttgcaggaagttgatgaccgccttgaagaagaggagattgatgctgctgctgagagggaggagtacttgactctagagcaacaggagtacaggcagcaggttgatatgttgaagaaacagctagtagagtcgaaagccgcccgtactgctagagtaaatagaaaacctatcggtatggactcggactccagcagtgactcatcgagcgatgaagaggatgacaacacagattttgctgttgattggagagcacagcatttgaaatgatggaaacattttgcaagtgtatacaccggagttgagtcttctgactacctggaccgactggtgaatcccttgactgcttgaacttggctgttgcttaacctgttccgagaaattttacacgttgtctccgattttttaacatacgacttaggagtacatgttaaacaagctatctgcctctagatcacgatccagtcagatatttgctcgtgcatttcaatcttctgctgtcgtcacaaggatatctgacatctcaattggttggtacttggttgttggatggttg

SEQ ID NO: 135968 - DNA, 622 bp, Zea Mays
cctagtacgagaaggtatctgaagtatcgcgtttaaatactcaggaatgaacagtgaatgtgttccaattgtaaaacatcgaaaccttccacagttaatctcgtccaacaaaattagtgagtccacctatttggccaagggagaagatgcccaagtgccacaagaaccagctccaataaaaatcattctatggtcggactcaaaccaaaactagagtccatccaatttggccaaggaagaagatgctcatcaattgccaaagaccagctccaataaaaatcatggaacgatcggactccacaaaaacatcttcgccaataaaactaggagtcctccatctagattggcctaggctcaagatgctcaattgccacaagaccagctccaataaaaatcatggaatgaccggactcaaaccaaaacatgccacagactccatctcatttggcctaggtagaagatgctccattgccacaacaaccagctccaataaaattattgttcaagatcctagtgcaccatataacaagatgaatatatgaatatactaatctggagataatacagagttacataaatagaagcaaccgatcctagcttgcattcaagttgaacaaacacc

SEQ ID NO: 135969 - DNA, 3126 bp, Zea Mays
atggactcgggcagcaagagctggagcatcgatagctacctcaacgagcacttcgacatccccgccaagaacccgcccagcgaggcccgcctccgctggcgccgcgccgtcggcctcgtcgtccgcaaccgccgccgccgcttccgcatgttctcaggcctccacgccctcgacgacgcccagcgccgcaacatcctgggaaaagttcaggttgtaattaatgtgcacaaggcagcgctgcattttatggacggtataagacgataccacctatctcctgagcttatcgaagaaggattttgtatcagtccagatgaactggcagcaattactggaatccgtgaagactctacgatcctcaagtcacatggtggaatcagtggaatatctaggaaaatcaaggcatcattggatgatggcatcaaggaaactgaaatagcaaccagacagaagctgtatggcagcaacaagcacaccgagaaacctcctagaagcttctggacgtttgtctgggatgcgttgcatgacctgacgttgattattctaatcgtttgtgccgttgtttctctaatggttggccttgccactgagggatggccgaagggcatctatgacggccttggcataataaccagcattttgttggtggtgctggtcacagcatccagtgattacaaacagtcacggaagttcatggagctggactacgagaaaaagaagatatacgcccttgtcactagagataggaaaaccaaaagggtactgattcatgatctggttgtgggtgacatcttgcatctttcagtaggcgatgtggttcctgcagatggcctgttcatctctggctactgcctagtcatagatgaatctagcttatcaggcgagagcgaaccagttgatgtttctgaagaaaagcctttcgttcatgctggaagtaaggtggtagatgggactgccaagatgcttgtgactgctgttggtatgcgtactgaatggggcaaagtcatggatactctgagtgctgatggagtggatgaaacccctttacaagttaagctcaatggtgtggccacgatcattggacagatcgggctggcgtttgctatcctcacatttctagtgctcctagtgaggttcctggtggacaaaggaatgcatgttgggttgtcaaattggtcagcaaatgatgcgctgacaatagtgaactactttgctattgcagtgacaatcatcgttgtcgcagtgcccgagggtctaccactggctgtgactcttagcctcgcgtttgccatgcagaagttgatgaatgacaaagcgctagtgagacatctcgctgcgtgtgagaccatgggttcagcaagttgtatttgcactgataagactggaactttgacgactaaccacatgatcgttgacaaggtttggatgggcgatgtatccaagtctgtcaacagtgatacaaatatgaacgagctgaaggatgctactgcagaaagtgctgtggacttacttgttcagggaatatttgtgaacactgctgctgagatcgtgaagggagatgatggcagaagatctatcttaggcacaccaactgaagcagcgttgttggagtttggcttgggcttgcaaggagatctatacggtgagtacaataagatggcaagagtcaaaatagagcccttcaactcagttaagaaaaagatgtctgtggtaatacagttacctaatggaggcctccggtccttctgcaaaggtgcatcagaacttattctagggcagtgtgacagcttcctcaacagtgaaggaaatttagcaccactgtcagaaatgcaaaagcagaatgtcttagatataataaactcgtttggatctgaggcgttaagaacgctctgtatcgcgtttaaggatctgggtgaaattcctgacgaccaaacaataccagaggatggttacacactaatagcgctttttggcataaaggatccagtccgtcccggtgtgagggatgcagtgatgacctgcatggctgctggaattaaagttacaatggtgactggagacaacatcaatactgctaaagccattgccaaggaatgtgggatattaaccgaggatggaatcgcaatagaaggaagagagcttcacgataagagcatggatgaactgaaggagatcctgcctaaaattcaggtaatggcccggtccttgccgatggacaaatataaactggtgacaagcctaaaaagtatgtatcaagaggtggtggcagttactggtgatggaaccaatgatgccccagcattgagtgagtcagacataggtctggccatgggaattgccggcactgaggtcgcaaaagaaaatgccgatgttataataatggatgataatttcagtaccattgtaaatgttgctagatggggtcgtgcggtttacttgaacattcagaagtttgtgcagttccagcttacagttaatatagtggctctgatagtgaatttcatctcagcgtgtatcataggtactgcaccacttactgccgtccagttgctatgggtgaacatgatcatggatacattaggagccttggccttagcgacagagccgcctaacgatgaaatgatgaatagaccaccagtgagacgggggcatggttttatcactcaggtcatgtggagaaatattcttgggcaggctttatatcagctccttgtgcttggtactctcatgtttaatgggaagaggatccttaacatcgaaggcccaaatgctgatagaactatcaataccctcatattcaactcttttgtgttttgccaggttttcaacgagataaatagcagggaaatggaaaagatcaacgtgttcagagggatactgaaaaactgggtctttatcggtatattgacaacaaccatcatattccaagtaatcatagtagagtttcttggaacctttgcaaacaccgtaccattgagttgggagctatggttgctcagcgctattcttggctcggtcagtttggttatctctgttatcctcaagtgcattcccgtcgaatctaggaaaacggatattaagccccatggctatgagttgattcctgaagccccagaaacagtttag

SEQ ID NO: 135970 - DNA, 3321 bp, Zea Mays
atggactcgggcagcaagagctggagcatcgatagctacctcaacgagcacttcgacatccccgccaagaacccgcccagcgaggcccgcctccgctggcgccgcgccgtcggcctcgtcgtccgcaaccgccgccgccgcttccgcatgttctcaggcctccacgccctcgacgacgcccagcgccgcaacatcctgatgtcctctgcagtgcagaggatccgagtctacgccgaagatggagcaggaggaggggaatttggtgtaggcgcggtggtagtggatgagatgactgggaggttgggagctttgatgattacgacatacatgaacgtgctactaggtaaattgccctaccttgttttccttttgccctccgccgcttatagtgtcaatgccaatgtcggccgtgtggtctgtttggccatctacagtgcagagtatagaggtataagacgataccacctatctcctgagcttatcgaagaaggattttgtatcagtccagatgaactggcagcaattactggaatccgtgaagactctacgatcctcaagtcacatggtggaatcagtggaatatctaggaaaatcaaggcatcattggatgatggcatcaaggaaactgaaatagcaaccagacagaagctgtatggcagcaacaagcacaccgagaaacctcctagaagcttctggacgtttgtctgggatgcgttgcatgacctgacgttgattattctaatcgtttgtgccgttgtttctctaatggttggccttgccactgagggatggccgaagggcatctatgacggccttggcataataaccagcattttgttggtggtgctggtcacagcatccagtgattacaaacagtcacggaagttcatggagctggactacgagaaaaagaagatatacgcccttgtcactagagataggaaaaccaaaagggtactgattcatgatctggttgtgggtgacatcttgcatctttcagtaggcgatgtggttcctgcagatggcctgttcatctctggctactgcctagtcatagatgaatctagcttatcaggcgagagcgaaccagttgatgtttctgaagaaaagcctttcgttcatgctggaagtaaggtggtagatgggactgccaagatgcttgtgactgctgttggtatgcgtactgaatggggcaaagtcatggatactctgagtgctgatggagtggatgaaacccctttacaagttaagctcaatggtgtggccacgatcattggacagatcgggctggcgtttgctatcctcacatttctagtgctcctagtgaggttcctggtggacaaaggaatgcatgttgggttgtcaaattggtcagcaaatgatgcgctgacaatagtgaactactttgctattgcagtgacaatcatcgttgtcgcagtgcccgagggtctaccactggctgtgactcttagcctcgcgtttgccatgcagaagttgatgaatgacaaagcgctagtgagacatctcgctgcgtgtgagaccatgggttcagcaagttgtatttgcactgataagactggaactttgacgactaaccacatgatcgttgacaaggtttggatgggcgatgtatccaagtctgtcaacagtgatacaaatatgaacgagctgaaggatgctactgcagaaagtgctgtggacttacttgttcagggaatatttgtgaacactgctgctgagatcgtgaagggagatgatggcagaagatctatcttaggcacaccaactgaagcagcgttgttggagtttggcttgggcttgcaaggagatctatacggtgagtacaataagatggcaagagtcaaaatagagcccttcaactcagttaagaaaaagatgtctgtggtaatacagttacctaatggaggcctccggtccttctgcaaaggtgcatcagaacttattctagggcagtgtgacagcttcctcaacagtgaaggaaatttagcaccactgtcagaaatgcaaaagcagaatgtcttagatataataaactcgtttggatctgaggcgttaagaacgctctgtatcgcgtttaaggatctgggtgaaattcctgacgaccaaacaataccagaggatggttacacactaatagcgctttttggcataaaggatccagtccgtcccggtgtgagggatgcagtgatgacctgcatggctgctggaattaaagttacaatggtgactggagacaacatcaatactgctaaagccattgccaaggaatgtgggatattaaccgaggatggaatcgcaatagaaggaagagagcttcacgataagagcatggatgaactgaaggagatcctgcctaaaattcaggtaatggcccggtccttgccgatggacaaatataaactggtgacaagcctaaaaagtatgtatcaagaggtggtggcagttactggtgatggaaccaatgatgccccagcattgagtgagtcagacataggtctggccatgggaattgccggcactgaggtcgcaaaagaaaatgccgatgttataataatggatgataatttcagtaccattgtaaatgttgctagatggggtcgtgcggtttacttgaacattcagaagtttgtgcagttccagcttacagttaatatagtggctctgatagtgaatttcatctcagcgtgtatcataggtactgcaccacttactgccgtccagttgctatgggtgaacatgatcatggatacattaggagccttggccttagcgacagagccgcctaacgatgaaatgatgaatagaccaccagtgagacgggggcatggttttatcactcaggtcatgtggagaaatattcttgggcaggctttatatcagctccttgtgcttggtactctcatgtttaatgggaagaggatccttaacatcgaaggcccaaatgctgatagaactatcaataccctcatattcaactcttttgtgttttgccaggttttcaacgagataaatagcagggaaatggaaaagatcaacgtgttcagagggatactgaaaaactgggtctttatcggtatattgacaacaaccatcatattccaagtaatcatagtagagtttcttggaacctttgcaaacaccgtaccattgagttgggagctatggttgctcagcgctattcttggctcggtcagtttggttatctctgttatcctcaagtgcattcccgtcgaatctaggaaaacggatattaagccccatggctatgagttgattcctgaagccccagaaacagtttag

SEQ ID NO: 135971 - DNA, 845 bp, Zea Mays
gtcggtttctctcatgccaatttctcttgccctggttctctctcgctcgtcggcgcgcagttggagtcgccgagagcgccgtctgcgccgaatggtactcgccgtcaaactccgtcgtggtgagtccgctttcccttcccacctcatccctcccctctctgccccctgccgagcagttcgtctcctcccgacgagcccctgcacgactccctttccctccgatgcgcggctcctgcgcagggcgcggcgcggcggacagccagcgcgcccaggcgtctggcccctgcgcgtggagtcgtcgtagacgtgctgctccatgcctccgctgaccatgtgcggcgagccccaccggccatggacgctgctgtcgcgtcaacgtctaggcccgctagagtccgactagagccgtcgctgtccggccatggccaccgggccggtgccacccgccccgcctgctagcctcggctggagcagcacttccccatcgcctttgtgcatgcgtgctcgtcctagccgatggaaggaggaagagaaacctgttgctcatcataggctcgtagctgatggaattgagaaagaagaaataaccgctcgtggggcccgcatgcatgtctcccacacattcctcacgccatgcgcacgattagcatcctggaaagtggaaaccgcctggaccccatcgcatggcatgcatcttctttttgcatccctctgttgcgttttttttaaattcttttcctacgcatgcttggaaactccctcgtgttagatctactgcgtccgcgacttcgtaagcctctgtgtggcttggctctaaccagtcatattgcgtcactgcattaaat

SEQ ID NO: 135972 - DNA, 1351 bp, Zea Mays
gagaacagacatcaggcagagcagatcagacacgaagagctcagagttcagacagcagggctttctctcctatcgctgttctgaacgacggcagcgcgcggcggtggtacgaggatgacgtctgctgctgctgccgcggcgccatgggttagcgtctgcagcttcttgctctgcttggcggccttccagggagctgaaggcgcgattggcgtgaactacggcatggtcgccaacaacctgccggcgccggagcaggtcgtctccatgtacaaggccaagaacatcagctacgtgcggctcttccacccggacacggacgcgttgaacgcgctccgcggctccggcgtcggcgtcgtcctgggcacgctgaacgaggacctcccgcgcctggcgtccgacccgtccttcgccgcgtcgtgggtggccacgaacgtgcagcccttcgccggcgccgtccagttccggtacatcaacgccggcaacgaggtcatcccgggggacgccgcggcgcgggtgctcccggccatgcagaacctggagtcggcgctccggtccgcgggggtcacgggcgtccccgtcaccacggccgtggccaccagcgtgctcggcgcctcgtacccgccgtcccagggcgcattctccgaggcggccgcgtcggtgatggcgcccatcgtctcgtacctgtcgtcgaagggcgcgccgctgctggtcaacgtatacccgtacttcgcctactcgagcagcggcgggcaggtggcgctcgggtacgcgctgctgtcggcggacgccggcgcggcgtcgtcggtcacggacgccggggtggtctacaccaacatgttcgacgctatcgtggacgcgacgcacgccgcggtggagaaagccggggtccaggggctggagctggtggtgtcggagaccggctggccgtcggccggcggcgagggcgccaccgtggagaatgccgcggcgtacaacaacaacgtggtgcggcacgtcggcggcggtaccccgcgccggccagggaaggccgtggagacgtaccttttcgccatgttcaacgagaacggcaaggccgagggcgtggagcagcacttcggcctcttccagccggacatgagcgaggtctaccacgtcgacttcacggcgggatccccctaggtctagggaggaggcggcttacccgcttcttcacttttagtagtaggctcatccttcattcccctgatctacttcgttttgttggagtagcaaaactgccgcacgtcacgtttactgtttattttttaatatcttatatagaaaaataatatcaacatttattctttaaataagtttatgtttactataaata

SEQ ID NO: 135973 - DNA, 802 bp, Zea Mays
ggcacgtgtcgatgcagtccgtgactgcaatagaacatcctggccaacaccggtgagcgaagagaaacgattccatagtcgaagcgtagatcgcagcggagcagaggcatggatggaaagagctttagcaacgaacagcaagcccaacaaaagaacccagacgcagtgacaaacagtgttccgagccaaggccaggagcccttgaacacgtttccagattcagacgatggaaacacgaacaccggtccgttgaatggccatgcagcagctcatgtgaacatggaagctgccatctctacggaggacgtcatacgggctggcgggttcggagcgaaggatgacattggcagcctcctcccgacggcaattgattccaccgattttgaggcctcgctgcgggatgcccgtggtttcgagggcgagaaagcggcgccgtcgcatcctggactagggtggaagggggagaaagctgatggtggaaccaaactggcagatgtggcggagcagtgatcacgctttcctcttctgtagcccagctccagccttcagaaaaccttgttttctgccacgtgtgtctggagagctgccctgcgtatgaactttctttgtcacagtgttttgtgtgacacataacattctgtgtatgaacatgaggatgtcggttctatgctgtctgtcgtatagctctcaattgtgttggatgtctgcggaatgtgtagtccagcatggtttgctgtctcttttaatcgcctgctgatgagtggccacagagttgcaatatgtcagtggagccgatactact

SEQ ID NO: 135974 - DNA, 2081 bp, Zea Mays
atgttttttatatcactagttacgttaccgaggaaagatcactcggtaaatcacatactattagggtcgtcgttgttcaaacgatttccattagctctataaaacattggtctcttacatttcgggcgagcggctgaggaggtgcaagtgcaagcgagaatgtagcaagtatacaacggcacgtgaagacgaagacgaaacaaaatgaaagcatgcttcatacggtcacagtggcggcttcattcaacgcaacaactcccggaagctcctttccttccaacaattccaggctagcgccacctcccgtggaaatgtggctcataacgtcagcaactcccaccttctcgacggcggcgacggagtctccgcctccgatgatagttgtgacgcccttgccgctgagttctgccagcttcttttgctttacctcggttcctacagcgaacttgtcaaattcgaagacacccatgggcccgttccagatgaccgtcttggttgtatccagggctgcgttgaatgaagcgacagaatctgggccaatatccaggcccatccaaccatcaggaattgcagatgctggaacaatctgtaggaaaaaaaaaattatatggtcaagtttctccctacgcagcagaactgagagatgcttcagctccactacaaaagatctgctgattaggaaaaagagaagatgcaacaaacctggctgttagcatcaggggcaaacttgtcagcaatgacaacatcggttggcagcataagggagacacccttttccttagcctttgcaagtagagacgttgcaagctcgagtttgtcttcctcgaccaatgaagcaccaacagggagaccttgtgccttgtaaaacgtgaagatcataccaccacccaagagaaggatatcacacttctccaacagggactcaataaccccgatcttggatgacacctttgaaccacccacgatggcagcaaaagggcgtttagggcttgaaacagctccgacaaggtaagagataaccttctgcagaaggaaccctgcaacagaaggctgcaaaaacttggtaactccctcggtcgatgcatgcgccctgtgggctgttccaaatgcatcgttaacataaagatctgctagggaggcaagcttctgtgcaaactctgggtcattcttctcctcttccttgtagaatcttacgttctcaagcagcagaaccccaccgttgggcaaggccgccaccagcttctcaacttcagggccaataacatcgtcggctttttgcacctatttgtatgtatagatacgctttagtcagaacaatcaattagcacatgtgatttcattacaagtaccaatgatgtagaataaatcaatacctgaatgccaagaagctcagacaaccgtcctacaaggggagctaagctaaacttgggtgtaaaacccttagggcgaccctgcacatccagagatgaccttggcgcccttgctgaggatgtactggatggtggggatggcggcccggatgcgggtgtcgtcggtgatgttctggttctcgtcgagcggcacgttgaggtcggcgcgcacgaagacgcgcttcccctcgaggtcggcctccgtgagttcccctacgctcttcttcgccatggtggccatggcccgcgtgccacgcccggagaacgcctgccggcatcgcgacgcgacgtggaccgcgagccgcgcgtcgcccgccgcgaaagccagagaccgtgccggctggcacgccgtggcgaggcctcccctgcgcagcggggcggcggcggcggcggctgccctggtggccgcgcgggccgcgagggagagggaggttggaggggcggccgcggacgccattgggattcggggggcggaggcgacggcggcggctggagcgcagggacagagagggagcgattcgggagggcgggaagaaggctttgtggacgataaagtggggaggagatttgcttatcgctggcgagaggtcaggacgacggttccggtgggtgtgtgggggaggagacggcggtgatcgattacggcgatggatggcgacgtgtgggggctcg

SEQ ID NO: 135975 - DNA, 555 bp, Zea Mays
atgacccgggacgacgacagcgaccggcagcgccagtgcgagaaggacgaggacgacatgctcccagcaccggctttcatagtcggtgccacggacgccgacgacgccctcctcggcgcgacggcgatcccgccgctgccaccaggagctggagtggcggtggcgccggcaccagcagagacggctgacggtgacgagggccaccacgtggagagaggcgccgacgcccggaaagtgacccgctgggactgggacgccgtcgtcgttgccgacaagtccggagccactgcgctcctgcggctggctctgctgctgagcttcggcgccggagacggcggcagaggcttcttggtgcggctgggcaggcggaaacacgtgcacttgaggacgccgcttaccggcggctcagtggcgccgttggccatcctgggccgcagcggaggcagaggatgcgcgctgccgctgctactgttttgtcgaggcagcgtttggggcgccaccggaacattttctttggcagaggtcatgggtgcctcgcaaggtggccttgcctga

SEQ ID NO: 135976 - DNA, 198 bp, Zea Mays
caagcttttggagttgtcttcaagaaattgaagatgatactaagggtcttgcactggtttgagttaaagactggatgtatgtgggcatcaatatcatctttggctgatatgacctaagaaacttttggaggttcttttggatagttgcctgttagacactgagcaactatattgctccaagcaatgctttttaagtac

SEQ ID NO: 135977 - DNA, 105 bp, Zea Mays
atcaaaatgatattttatcagttctttttcaaccctatctcactccgctgaaccatcttattgccatccctacacatgtgacaccacgaaccaacaacctattac

SEQ ID NO: 135978 - DNA, 216 bp, Zea Mays
atggccgagacgagaacggcctgtgggatggtggacgacgtccaaaacgcacccactgggtgtgagagcgacctcgaggccattgagctcgcgtgcttcagtcacgaacgtgatgccaggaccatgcattttactgtcgaggtggatgccggcagcggaaagaagctgtgcaaggccaaggtgggggcggtgtggaacaacttcaagcagctgtag

SEQ ID NO: 135979 - DNA, 366 bp, Zea Mays
atgacatgtactgtgcctatcaacatatgccttcacaagtttttctatctttggtccacatgtggctatgtacttcgtaatcaactcttcagtagttggtacttgatttggctcaatggagtccacaaccttctcgacagattttctcactaccagtttatgagcatctttactcagattaccttttttccatattggtttgaccaactcctttatatgttctgccaaatgaaaacggaaatcccttgttttctcattgtaatcaactgcatccttttttctgtcacaagctttcaccttgatagtatcatccaggctagagctgcatcctctatcaggagcaataaagtaagcaggttcatttga

SEQ ID NO: 135980 - DNA, 103 bp, Zea Mays
ggtaattgacattttcaattgtaaaaactgttcctatataagtttattacattcccagcggcatcatcatttttttcgagaagagaaaatttattgcatcaag

SEQ ID NO: 135981 - DNA, 317 bp, Zea Mays
gttgattgccagtctgctatgcaactatgagtaagttgcagtccgaggttctcaaggatgccatctcccagatagtttaggatgccaagaagaataggaagttcactgagactgttgagcttcagattagtctgaagaattatgatccacaaaaggacaagcgtttcagtggctctgttaagttgcctcacatccctcgtccaaagatgaaggtgtgcatgcttggtgatgcccaacacgttgaggaggctgagaagatgggacttgactacatggatgttgaggccctcaagaaaatgaacaagaacaagaagctt

SEQ ID NO: 135982 - DNA, 604 bp, Zea Mays
agccagttttttccatcggaacggcggttcgcgcacctaattatatgcaccacacgcctataaagccaaccaacccgtcggaggggcgcaagccagacagaagacagcccgtcagcccctctcgtttttcatccgccttcgcctccaaccgcgtgcgctccacgcctcctccaggaaagcgagagcttctgcataagaacaacaaatcaaaagcttgatcagctcggtgcctacaaaacctcaacaaccaagtttcatgtctgatctcgacgtccagcttccatctgcctttgatccgtttgctgaggcaaatgctgaggactctggtgctggtcctggaacgaaggattatgtgcatgtgcgcatccagcagcgcaacggcagaaagagtctgactacagtccagggtctgaagaaagagttcagctataacaagatcctcaaggatctgaagaaggaattctgctgcaatggtactgtagttcaggacccagagctaggccaggtcattcagctccaaggtgaccagcgcaagaatgttgctactttcctagttcaggctgggattgcgaagaaagagaacatcaagattcacgggttctaa

SEQ ID NO: 135983 - DNA, 978 bp, Zea Mays
agccagttttttccatcggaacggcggttcgcgcacctaattatatgcaccacacgcctataaagccaaccaacccgtcggaggggcgcaagccagacagaagacagcccgtcagcccctctcgtttttcatccgccttcgcctccaaccgcgtgcgctccacgcctcctccaggaaagcgagagcttctgcataagaacaacaaatcaaaagcttgatcagctcggtgcctacaaaacctcaacaaccaagtttcatgtctgatctcgacgtccagcttccatctgcctttgatccgtttgctgaggcaaatgctgaggactctggtgctggtcctggaacgaaggattatgtgcatgtgcgcatccagcagcgcaacggcagaaagagtctgactacagtccagggtctgaagaaagagttcagctataacaagatcctcaaggatctgaagaaggaattctgctgcaatggtactgtagttcaggacccagagctaggccaggtcattcagctccaaggtgaccagcgcaagaatgttgctactttcctagttcaggctgggattgcgaagaaagagaacatcaagattcacgggttctaagggacctgtaaatgcttgtgccctatattgtgtgcctccacatattggggagcttgaagcatcgacagttactagtcattgcttacttatataagaacataagtagtatttgctattgtcaagtgtgccttgcttgatgcaagttgtgttttcgtatcattattattatgcacggccatcgtacgtgtatggcttgtatgggttattgccaacttaataaaagcacactctgtttgcctataagcactgatgtttgcctcgtcatgcacatgttgagtcgggttttatttgtattattgcctccttgtatgttgtgatctagcagtgattcatgctgggtcttgaggcggcgtctggttagtccgatgccgttt

SEQ ID NO: 135984 - DNA, 252 bp, Zea Mays
cggcggcggcggcggcccggccctgcgccctggcccggagacctcgccggcggcggcggcgagcggcggggtcgcgccatgtcgtcggccgcggctcaccaccgagacggcggcgagggcagtggcattggtgccgcgaacagcgcgcggacgggtagtgggtgccgcgccgcgcgggtaggcgcgcgagatctacgagtagcagtggtggtggtggcccggcgagacgactggtagtctatagttgtagga

SEQ ID NO: 135985 - DNA, 1482 bp, Zea Mays
gtacgttttgctgcccgaaatccggccgctagctgtatgtacctgctactacagcaaagattccagcaaaagccgcggcgcaacaagccagccagcctaacacatgcggcccgcgggcgtagtaggcgtaggccgccccccggccttgtggctggcgctataaaaaccgcggcccccgattccgcagcgcagcacagcacagcacacgcttccttctctacctcgttagctagcttagcccggccgagggagagaagcagaagcagtagaggcgaccttttttttctgttctctgatcgagctctgaagaccggggatggcgtcctgggcggctctcctggcgctgctgctctcggcgttctcggcggcggcgcagctggacgagaggttctacggccagtcgtgccccagcgtggaggacgtcgtgcggaaggagatggtgcgcgcgctctccgtcgcgcccagcctcgccgggccgctcctcaggatgcacttccacgactgcttcgtcagggggtgcgacggctcggtgctcctcgactccacggcgaacaacaccgcggagaaggacgcgaagccgaacctgacgctgcgcggcttcggcttcatcgagagggtcaaggccgcggtggagaaggcgtgccctgacaccgtctcctgcgccgacgtgctggctctcatggccagggacgcagtgtggctgagcaagggcccgttctgggcggtcccactggggcggcgggacggcagggtgtccatctccaacgagaccgaccagctgccgccgcccacgggcaacttcacggagctggcccagctgttcggcgccaagggcctggacaccagggacctggcggtgctgtcggccggccacaccatcggcacgtcgcactgcttctccttctcggaccgcctctacaacttcacgggcctggacgacgcccgcgacaccgacccggagctggaccgcgcgtacatggcgcgcctccgcgccaagtgcgccagcctggacgacaacaccaccctggtggagatggaccccggcagcttccgcaccttcgacctgggctactacgccaacgtggccaagcgcaggggcctcttccactccgacgcccagctgctcgccgacccttccacccgcgcctacgtgctccgccacgccacgggcgcccacagggacgagttcttcgccgacttcgccgcgtccatggtcaagatgggctccgtcggcgtgctcaccggcggccagggcgaggtcaggaagaagtgcaacgtcgtcaactaacttattatatggcctcctgaggagtcatgtctttctcttcttcattttttcgttcactgcattattgattgattgattttttttttgttcctctgtcgccatgtatgtaatgtaaatctctgcccctcatcttcagttgtccatcaggatctcatgataatgcatgcaataaaacatttttgatttagtctgtc

SEQ ID NO: 135986 - DNA, 1673 bp, Zea Mays
cgcgcgcgcgctcgctcgctcaacaaccgcaacgcaccctaacgtctccagtcgcgctcaatcgccggccgactgggctctcgacctctcgtctcgtcacacaccatccgaaagccaccgggcaaccaaccaggccgccgtgtgatcccgatcgcgtactgcgcgcacgcagtacagctcgcgcgcgcaccagacagacgccttctccctctcccgcagtacagggtacagctcgcgctcacacaagacaccatctccctgcctgcgatccgatgcgtccaacgttttcagccggggtacggtcctaccaccgctgtgcctaataattggcggctagctagctagctagctgcagctgctgcgatcctggatcggcacagccggttcttgatgtggagggagcggcggcgggcgctgctcctgctggtggccggcgcggcgctgggactgatcggtgccgcgctcgcgagcgcgccgccggaggccgcgctgaaggtcgggttctaccatgcgacgtgccccatcgcggaggacgtggtcctcgccgagatgaggctcatcctcatggaggacgccacggtcgcgccgtccctgctccggatgcactaccacgactgcttcgtgcagggctgcgacgggtcgatcatgctccagtcgaggaagaaggggaaggcggagcgggacgcgctgcccaaccgtagcatgcgagggttcgacgccatcgagcggatcaaggcccggctcgagaccgtctgcccgctcaccgtctcctgcgccgacatcatcgccatggcggcgagggacgccgtctacctgagccacgggccgtggtacgacgtggagaccgggcggcgcgacggcaacgtcaccgtggccgagtacgtcgacaacgacctgccgccgccggactccaacattgtcgacgtgaagaccttcttcagcgtcaagtcgcttaactcgaaggacatcgccgtcctcttcgggtgccacagcatcgggacctcccactgcggcccgatccagaagcggctctacaacttcaccggcaacatggacggccaggacccgtcgctggacccggcctacgccgccgagctcaggaagctctgcccgcctcccagacccggcgacgatgctaggaaggtcaaggtgcctttggaccccggcagcaactacaccttcgacctgagctactaccgccacgtgctcgccacgggcgggctgttccagtccgacggcagcctcctgcacgaccccgtcaccagaggctacgtcgagaaggtggccaaggcgtcgtcgcccgacgagtactacgcggacttcgccgcggcgatggtcaagatgggccgcaccgacgtgcttgtcggcgatcatggggagatcaggccaacgtgtggcatttttgttgactaggttcaggattgggttgaagatgcgaagataatctgtacgggtttctgtcaacgtgtactgtgcgtgctgttagatcagaaagagcacggtcgctgttaactgtgtatccgggaatgctgttctgttcacacacggtcgtcactgatctactgaattgtcagccatgatgtaattatttatctacgtattagttgtatattcttctgatctacgcgtgttgttttgaccaagtaggcacatgcaaaatagtttggtcaccc

SEQ ID NO: 135987 - DNA, 1043 bp, Zea Mays
gcacagccagtgaatggcaaacggaatcgcgcctcccatcctctgctttccccaaaggccagctccaccgccggcacggctcctataaaccaccagctccccgtaggcgcgctttccccgcgacagcctgagcagccatgccggggcggcgggcgatcgacgtccggctgctgccgggcggcggcgacgccgctgcggcgcccaagtggcgcatgtcgctgctggagaacacgttcagcgggttcctgcagggcgccggcgccgacaccgcggcgagggccgtgttcgcggaggggtccctgttctgcccgttcctgttcggcaacttcttcgacccggccgacccgttcccgctgtgggagttcgagtccgacgtgctgctcgccgcgctccgccgcggcaacgccaggaccaccgtcgactgggccgagaccgactgcgagtactacctcagagccgacgtgccaggtggaaggagatgcgacgtggaggtgagcggggacgcgatgaaggtgatcgacatctgcgggctgtggcgggcgccggcggcggacggccgggactggcgctgcggccggtggtgggagcacggcttcgtccggcgggtggagctgccggaggacgcggagtggaggaaagtggaggcgcacttcgacgactgcgagggggccctggagataaaggtccccaagaccgccgacgacgacgatgcccaccacgccacggcctgagcctgacgccgagaatcggaacctcgccgccccatttgaggacggcattattattcttcgaacggacggcagaaacggaaaacgacggcataatcttgataagaatgttcgacggcagaaacggaaaacgacggcataatcttgataagaatttgcaagatacggaggaaacgcaggaggaggagcgagctaattaaactgatcgtcgcagcatgttgcatgtgcatgaatgcacgcgtgtccctgaaaaaaaaaacgatgtatgtaatagtatgttcttcagtgccaggtgttaattggcagtgagtgtca

SEQ ID NO: 135988 - DNA, 887 bp, Zea Mays
cctgagcagccatgccggggcggcgggcgatcgacgtccggctgctgccgggcggcggcgacgccgctgcggcgcccaagtggcgcatgtcgctgctggagaacacgttcagcgggttcctgcagggcgccggcgccgacaccgcggcgagggccgtgttcgcggaggggtccctgttctgcccgttcctgttcggcaacttcttcgacccggccgacccgttcccgctgtgggagttcgagtccgacgtgctgctcgccgcgctccgccgcggcaacgccaggaccaccgtcgactgggccgagaccgactgcgagtactacctcagagccgacgtgccaggtacggtcgctgctactagttccgagcttctcacatggttctgcacactgtccatggatcaatggatccttgcgaaagcctgaaattggtcttagagcactgcacaaaaacagacatccatattcaatcgaatatctattcaatacttctatgaaaagttcagattctaaatgtatgagatgatttccatttagcagttgtaggatagatttaggactttgtgataatatgcgtcgtcggttccgtatagctgctacttgtggtcttgcttctgccaccggctaaggcgttactgagccgtcgtgccagtaaaattgcattgcaatgtcctgtccattcgcgcttcagtattcagatggttaatgctttcaattctccagagagatcttttgcatctaaccagtagtagctccctagagctagagaggatgaaaagcaacaataaggcatgtgtgcatcctcttttcccccactagtagctagcttctctgtgctttagagctagcgtctccatagcctagcttaaagctagctcgttgcttttt

SEQ ID NO: 135989 - DNA, 1679 bp, Zea Mays
ctggcttgccgtcgcaaaatcctgtaccaggtcggcacgtcacgtccatacgtacgaggcggcgagcggcggagcatggagcaggagctgaggaccggcggccgcggcggcggcaacctcagggcgcacagctctgcctgcctctctggcgcgctcatcgatggcccgcgcatccagcagcttctcctccactgcgccgcggcgctcgagtccaacgacgtcacgctggcgcagcaggccatgtgggtgctcaacaacatcgcctcctcgcagggggaccccagccagcgcctcacgtcgtggttgctccgcgcgctggtcgcgcgcgcgtgccgcctgtgcgccccgcccggcagcactacccagtctgccgccgccgccgcggccgctaggacacccgcgccgcgggagcgggccatgtcggtcacggagctggccgagtacgtcgacctcatgccgtggcaccgcttcggcttcacggcctccaacggcgccatcctccgtgcggtggtgggcagcgccgcggtacacgtcgtggacctcagcgtcacacgctgcatgcagtggcccacgctcatcgacatgctctcgaagcggcccgggggcccgccggagctccgcatcaccgtgccttccgcccgccccgccgtgccgccgcagctcggcgtgtcggacgcggagatcggcctccgcctcgccaacttcgccaagtccaaaggcgtgcagctgcatttcagcgtcgtcgagggcgtgacgtcgccgcctccagagaagcaggcggcggcgctgtgccaggacctcgcgtccgtgctgtccgaccggcaggcgctggggctacgggacggcgaggcgctcgtcgtcaactgccagagctggatccgccacgtcgcgccgggctcgagggacgcgttcctcggcgccgtccgcgcgctgaacccgtgcctggtcaccgtgaccgacgaggacgcggacctggactcgccgagcctggccacccgtatcgcgggctgcttcgacttccactggatcctgttcgacgccctggacacgtcggcgcccagggacagcccgcggcgtgcggagcacgaggcggccgtgggcaggaagatcgagggcgtcgtcggcgccgacgacgccgacggggcggagcgctccgagtccggcgcgaggctcgccgagaggatgcggaggaacgggttcgtgagcgtcgcgttcgacgaggaggccgcgggcgaggtgaggcgccttctgagcgagcacgcgaccgggtggggcatgaagcgggaggaggacatgctcgtgctcacctggaagggccatggcgccgtgtacaccagcgcctggatgcccaactaggtttagccatctgcatcagcgaccaaaactgctgcttaggatgcatgcatgcatgccaccatcaccatggccggcatgaaacataagtaggctagactgctgattagctccaaaaggatcaccaaagaagtaacattagaaacaaacagccataagaacttcagtcgttttcgtgcatccatggtcacggtgaaagaacggaccagaactcaagagtagcgaagaactcatgtaacatgtagaagcatcaggaacttatcaaactgtatcaagcaactccttccacaaattaaaataaaactcccatagtaccaaattttcac

SEQ ID NO: 135990 - DNA, 925 bp, Zea Mays
ctatcactatcagccgtatggagtgcagccggacgatccaatctatggccgcctccaccacgcgctcgccggcggcggttgaccggcacgcggtacggctgatcacgcgcgtctccatagcgatggccgccgtcgccacgctctcactcttatacctcttgcgccacgcatccatctactgttctcccgcgtcccaccagcctgccctcaccatctcgctcgcctcattcccccgcacctcctgcgacgccgcctcgcgccgagtggtcccgcccgaccaccgcctcgctaagctccgcgcctccccgcgctggagacgccgtgccgcctccctggccacgtccgccttcccgccgctccgcggcctcggcatcctcgcgaccccttcgcgcgtcctctgcctcgccgccggcgccggacacgccgtcgacgcgttccgcgcagcggggaccagagacgccacagggatcgatctcgtcgacttcccgccgctcgtccgccgcgcggatccccaccacctgccgttctccgacggcgccttcgacctcgtgttctcggatgacccctcggcgacctccggcgcgctcttcccgtcccgcctcgcgcgagaggctgagcgcgccgtccgccgcggtggcggcatcgcgcttgcgttcgaccgggagatcgagaccgccgtcgtcgccacactattcaagagatcccgcgtcctggatgtgaaggatgtcacactggatggctctcatgttaggctactgatcatgcagagtaatggcactactacagacccatattgatccgtgttcattcgcttcatgtattggcatctcagtgatggtatccaatgaaaggtagccgtgaacatgaattatggagtaatcagtattgacgatggttcataaaaatacgaaattgttcgatatta

SEQ ID NO: 135991 - DNA, 1270 bp, Zea Mays
ggagtatatatgcaccgtattcttcggtacgacgcttgacctggacgacgcctctagctagctagctagctagcaaaccgaccccatggcagacgagtggtggagctgcacgcgtgctgccgacgacgacgacgacgccggtggctcgccctgctccacagccccggcaacaacggaccagctcgacgctgccgacgagccggcggcgacgagcactgcctcgatcgatttccggcggccaacctcattattgcacgtcgtccgccacgctgccgtcccgccatcatcccccttaatcctcgccgatccaccccatcatatcgacgactggacgcaagcctacttgtgcgggagagcgccgctcgcggcggcggcggcggcagaggcgagcacaagcctcagcgcgctgctccagctccacggcggcgacgctgctggccgccacttcctgctcgcccagcacctccacggtgacgctgctgacagcgcggcggcgcacgtggcagcagcgtcgcagagctcggccctgtacgccgccgccggcaaccagccgtactcctccagctacggcggcggcgcgccggcggcaggagcgctgatggcccagcagccgccgttccctcatcaggacgaattcgaattctcatccgccagcctctttgttggctcctcgtcgtcgacgcgggattccgccggcgtgccggcggcagcggcgcggcggcccgccgtgacgacgacgaagccgcttctcttgcaggccttggagcaaaaggctttcgcgttccactcccatcataaggaacgtacacgacaacacgacgcttcctcggcgacgacagcaagtgctcccggctcgcctgcgccggcgaagaagccccgggtcgtcgcgacgccgtctcctttgccgaccttcaaggtgaggaaagagaagctcggggacagaatcactgcgctccagcagctagtctcgccttttggaaagacggatactgcatcggttcttcacgaggccatcgaatacatcaggttcctgcatgaccaagtagcttccctgagctctccctacctcgggtgtgggcggcccgtagtgcagcagatacagcaacgacgacaggcgaaggacgacggcggcgccgcggcgaaggaggacctgcgaagccgagggctgtgccttgtcccggtggcgagcactacgacttatgcagtggccgctggtggcgagacggcgccggagttctggctccctaactttgggggcacactacggtag

SEQ ID NO: 135992 - DNA, 417 bp, Zea Mays
atgtcactctcgtcgtcatgtatttgtaattatgtatgtataggtgtaggtatacgtgtacatgggagcatggcaaggccatccgatcaggcagagccgcccttgagcctcttggcgatgccggcgaagtacttgccctggtggaaggcgtgctccagctccagctccgtcggccaccgcgacccgtccccggcgaaagtgtgcccgcgccgtacgggctgccgccgtgcacgctctccatgtcgaatatcttggcgccgaacgtgtaccccaccggcacgaacaccatcccgtggtgcgtcagctgcgtcaccgccgtcagcccgacaaattaagggaaaacgtgagcatatgctacactattacccactgccactgccatggatgagttggtgcaagcaatgcgaggtgaggtga

SEQ ID NO: 135993 - DNA, 267 bp, Zea Mays
atgacgactcacggcgtggtctcctgcccgccgccctggctgctggtgctgaagaagaggccggcgggcttgccagccaggctctgctcccgccacagcccgccggtcgcgtcgaagaaggccttcatctgcgcggccatcatgccgaaccgcgtggggaagccgaagaggatgccgtcggctggcctcggcgagctcctgcggcgtgatgatcggcgcgtccgtcttgggtggtgcgcccatcttgccgagcacctcctcggatag

SEQ ID NO: 135994 - DNA, 1486 bp, Zea Mays
atcggtgtccactccagtactccactggtcgttgtctccacaaatccgcgtcatttgcagccaaaaccctcgccgtcttgtctccccccgcccccgtcgccctccccgtgatcagatcgagagagcaggcccgattcaattcgacccgaggcgccgcggcctgaaggaatttcgcgagtcgcccggaaaaaaagccctagccagatcagcgatggcaacgcacccggcgtccccgaccgccggcgctggtggcgacaggtcgccgtccggcccgccgccggtgcgcctgtctgcggcacaggcggtggcggcgatccagcctacctcaccgcggtactttttctcctcgctagccgctgcctctgccgcggcgtcctccccgcaccgccgcatcggcatcgccgtcgacctctccgacgagtccgcctttgccgtcaagtgggccgttcagaactacctccgccccggggacgccgtggtgctgctccacgtccgccccacctctgtgctctatggtgccgactggggctccatcccggtctccgtcgacgacgaccccgacgtcgacatcgccgagggtgcggtgcgcgctgcggccgctgaggaggagcctgaggaggcgaagaagaagcgggaggaggagttcgactccttcacgtccactaaggcgcaggaccttgcgcagccgctggtcggcgcgcagatccccttcaagatccacatcgtcaaagaccacgacatgaaggagcgcctctgcctcgaggccgagcgcctcggcctgtccgcgatgatcatgggcagccggggattcggtgcctcgcgcagggtcgggaaagggaggctcgggagcgtcagtgactactgcgtgcaccactgtgtctgcccggttgtggttgtgcgctacccagatgatgccttcggggatgagctgcgaacggtacctgaaaatgagcctgtgtatcatgcggcgccggaggcccagaaagaaaactgagggaagtgcagggcggctaggcgacgaggggtggagaaagcagaggccgtcacgtcacgtcgtcagccagccagccctagcgtaacacaccggtgtcctgtctctccgactctccgtcccatggccactctgcatctgtaccaggaacctgtatatcatggacgagtccccgctgttttgcttcatgacatgtgtgttggtaaactgaagacttcaatgtttttggcgtgcatgggccgccgtgttcttcttctgcttgtgtcgtactggccttcctgcttggctcgctaccccgccagttcatttgccgatgactcggtggctggcaaacgagtggcaccgcggtcagccacaagggcaacacacgtacatgcattggttggtagctggcagcgggtaaaaataaaaaaaaaattatggtgttcggtttgatggatgagttctccatgactgttaaacattgaatttggtctgtgaagcggaatggattaa

SEQ ID NO: 135995 - DNA, 3037 bp, Zea Mays
atgtactacgcgggcaaagcaaagcatcggtgtctacctcattattttcggagtccgagtggcgaaacccgccgcagcttccactgggcagtgctccacaggctcatatccgattccgatccctaagacctcagccgctgcggcatccacggccaactcaagcgctggcaactggcaagggcagatgatctgtgtatagcactcgctaccttctcttgatttccccctcaggtcgctgaccaagggtcctgtccgccatggatgcggagcgaagctctgcacgcagcgccacaccttttggtccgccgtccgatcgccaccgctagacgccacgcctgcgttgccttcccggctgaatcgccgattcccttggcggtctagtgcctgcggtcggcgccagacgccggcgaggtagccgcgagacacaggtacgggtgccgaacgggaacggctgctgcccgccgagccgtcgactgcctgcctggagccttgactgcgcaagcgcagctgccgtgtgttgagtgctgagtcgccgactccaccaggtggccagcgattgctttgctgctccaggaaagaagccaaaaaaaaacacgaagaattaaacatcgattgaaagggaaaagacaatgccaagcctgaactgagaggcgcacactggatttcgcatcagttcatgtcgttccttacaccgtcaatttgacgaatcacctcgccacgccgccttgattttgttttgtcctccgcttctggccgggctcagttcagctgtatggtattggtatcgccatgtcaagcgacctctccacacgctcctcgccttcctcctccaccgcgtcgccttccgacgactcgcggcggcaggagcaaggccaggcggcgggtaacgccagcgggagccggcggtggcggtggcgcctcgggctgggcgcggcgtgggcgctggacccgcgggcgaggtgggtccgggactggaaccgcgcctacctcctggcctgcgcggccgggctcatggtcgacccgctcttcctctacgccgtgtccctgagcggcccgctcatgtgcatattcgtcgacggctggctcgccgccgccgtcaccgcgctgcgctgcggggtggacgccatgcacgtgtggaacgtcgccacgcagctccgcaccgccaaggcgccgccgggtaagcgcgtggccggcgacgaggagcagcagcagaccgtcgccgaggccgcgcgcaagctccccgaggacgcggcgtccaggagggggctgttgctggacttcttcgtcatccttcccgtgatgcaggtggtggtgtgggttgcggcgccggcgatgatccgcgcggggctgacgacgccggtgatgacggtgctgctggtgtcgttcctgctggagtacctgcccaagatctaccacgcggcgcgcctgctccggcggatgcagaggcagtctggctacatcttcggcaccatctggtggggcatcgcgctcaacctcatggcctacttcgtcgccgcccatgctgtgggcgcgtgctggtacctgctcggcgtccagcgggccagcaagtgcctgaaagagcagtgcctccaggcggccgggtgcgcgcgcggcagcgcggtggcctgcgcggcgccgctgtactacggcggctccccgtctcccggagtcggcggcggcgacaggctcgcctgggccgggaacgcgcaggcccggggcacgtgcctcgccagcggcgacaactaccagtacggcgcgtacacgtggacggtgatgctggtggcgaacccgagccgggtggagcggatgctgctccccatcttctggggcctcatgacgctcagcacgttcggcaacctggagagcacgacggagtggctggagatcgtgttcaacatcatcaccatcacgggcgggctcgtcctcgtcaccatgctcatcggcaacatcaaggtgttcctgaacgcgaccacgtccaagaagcaggccatgcacacgcggctgcgcggcgtggagtggtggatgaagcgcaagaaactgccgcggagcttccgcggccgggtgcgccagttcgagcgccagcggtgggccgccacgcgcggcgtcgacgagtgccagatcgtgcgcgacctccccgagggcctccgccgggacatcaagtaccacctctgcctcgacctcgtccgccaggtcccattcttccagcacatggacgacctcgtgctcgagaacatctgcgacagggtgaaatccctcatctttcccaagggagaaaccatcgtgagggagggcgacgtggtgcagcggatgctgttcatcgtgcggggccacctgcagtgcagccaggtgctgcggaacggcgcgacgagcagctgcacgctggggcctggcaacttcagcggcgacgagctgctgtcgtggtgcctgcgccgcccgttcctggaacgcctcccgacgtcgtcggcgacgctggtgacgctggagagcaccgaggtgttcggcctggacgccgccgacgtcaagtacgtcacgcagcacttccgctacaccttcaccaacgacaaggtgcgccgcagcgctcgctactactcgcccggctggcgtacctgggcggccgtcgccgttcagctggcctggaggaggtacaagcaccgcaagacgctctcgtcgctctccttcatccgcccgcggcgcccgctgtcccgctgctcctcgctcggggaggagaagctccgcctgtacacggccatcctcacctcgcccaagcccaaccaggacgacgacttctagctagcttagctaggccgttccaggccggattctcttctcctcagcgaggagtatatatatcaaacaacatgcatttatttgtagtattcattactcgcatgtcgcatgagagacagagccatgaccgtactccctccgctttcctattagttgtcgtttaggataacgacacggtctctaatatataactttgaccaatattttttgttaaaatacaaataaactcttaatacatttatacttttat

SEQ ID NO: 135996 - DNA, 1931 bp, Zea Mays
ccatgcgcatcgtccagccgggtgcgagcacggacgacacggcccacggcgtcttcatctcgccaccaaggcaccaatccggtcaccagaccgccttggaatttttttttactcgtcggtagattcaacgaaagcagcagcgtgttcggtcctgagtcctgacggtgtgtagtgtatatggcgcatgcgtgcaatacaggtggtggtgtgggttgcggcgccggcgatgatccgcgcggggctgacgacgccggtgatgacggtgctgctggtgtcgttcctgctggagtacctgcccaagatctaccacgcggcgcgcctgctccggcggatgcagaggcagtctggctacatcttcggcaccatctggtggggcatcgcgctcaacctcatggcctacttcgtcgccgcccatgctgtgggcgcgtgctggtacctgctcggcgtccagcgggccagcaagtgcctgaaagagcagtgcctccaggcggccgggtgcgcgcgcggcagcgcggtggcctgcgcggcgccgctgtactacggcggctccccgtctcccggagtcggcggcggcgacaggctcgcctgggccgggaacgcgcaggcccggggcacgtgcctcgccagcggcgacaactaccagtacggcgcgtacacgtggacggtgatgctggtggcgaacccgagccgggtggagcggatgctgctccccatcttctggggcctcatgacgctcagcacgttcggcaacctggagagcacgacggagtggctggagatcgtgttcaacatcatcaccatcacgggcgggctcgtcctcgtcaccatgctcatcggcaacatcaaggtgttcctgaacgcgaccacgtccaagaagcaggccatgcacacgcggctgcgcggcgtggagtggtggatgaagcgcaagaaactgccgcggagcttccgcggccgggtgcgccagttcgagcgccagcggtgggccgccacgcgcggcgtcgacgagtgccagatcgtgcgcgacctccccgagggcctccgccgggacatcaagtaccacctctgcctcgacctcgtccgccaggtcccattcttccagcacatggacgacctcgtgctcgagaacatctgcgacagggtgaaatccctcatctttcccaagggagaaaccatcgtgagggagggcgacgtggtgcagcggatgctgttcatcgtgcggggccacctgcagtgcagccaggtgctgcggaacggcgcgacgagcagctgcacgctggggcctggcaacttcagcggcgacgagctgctgtcgtggtgcctgcgccgcccgttcctggaacgcctcccgacgtcgtcggcgacgctggtgacgctggagagcaccgaggtgttcggcctggacgccgccgacgtcaagtacgtcacgcagcacttccgctacaccttcaccaacgacaaggtgcgccgcagcgctcgctactactcgcccggctggcgtacctgggcggccgtcgccgttcagctggcctggaggaggtacaagcaccgcaagacgctctcgtcgctctccttcatccgcccgcggcgcccgctgtcccgctgctcctcgctcggggaggagaagctccgcctgtacacggccatcctcacctcgcccaagcccaaccaggacgacgacttctagctagcttagctaggccgttccaggccggattctcttctcctcagcgaggagtatatatatcaaacaacatgcatttatttgtagtattcattactcgcatgtcgcatgagagacagagccatgaccgtactccctccgctttcctattagttgtcgtttaggataacgacacggtctctaatatataactttgaccaatattttttgttaaaatacaaataaactcttaatacatttatacttttat

SEQ ID NO: 135997 - DNA, 1814 bp, Zea Mays
actccattccactccactgttctcgctttcccctccaccgacctgagacacagagtgagagcccgcagacaagtgagacaacccaccgcgaaaccgacatcccaatccgtcggaatccgtggccagaggctcgccgccgcccgccgcccgccgcgtcagagacacgctctcccccgggcccggacaaacacctcccggcggggctattttctcaccgcgtggtctctttcgatctatcagagcgacgactaggctaccgccgccctacgccagatgccctggtcttagtcgggcccttctccggcaacgagcacctaacagcagttcagatgattctgctggtgccataggtgtgaagtacttagtggggactggggagtgggcggacaagattttcattatagccatataaaatggagtgttccaattcaactagttcccaagggcatcatgtaggaaagtggaatcaagtgcaaatcattgatccttccattgttgaaatgggaccaagtcaccttccactgagtttcatgagaagatgccgtggagtattgtgtttggtgattatgatattaacagcatttatgatgatggtatacctgtcccctgttactactttccttgtgaggttgttcagtgtgcattacagcagaaagtctacatgcttcctgtttgggatgtggttagccatgtggccttttttgtttgagaagattaacaagaccaggtttgttttctctggtgaaagtgtgccagcaaaagagcgtgttctgttatttgctaaccacaggaccgaggttgactggatgtacttatgggattttgcattgaggaaaggccgcttgcagtgcatcaagtatatccttaagaaaagtttgatgaagttacctgttttcaactgggcatttcacattattgagtttattccggtagagagaaagtgggagattgatgaagcaataatccgaagcaggctttctgaatttaagaacccaaaggatcccctttggctggcagttttcccagaaggcactgattatactgagaagaagtgtatcaaaagtcaagaatatgcagcagagcatggtttgcctgttctgaaaaacgtactccttcccaagacaaagggtttcaattgctgtttgcaagtgctgaggagtaccatagatgctgtgtacgacatcacgatcgcctacaaacaccggccgccgacatttctggacaacgtctacggcgtgggtccttcggaagtccacatccacatcagcagcatccaggtctccgacataccggcgtccgaagacggggtggctggctggctggtggagcggttcaggctcaaggacgagctgctgtccggcttctccgcgctgggccacttccccgacgaagggaccgccgagggggacctgtcgacggccgagtgcctcgcgaacttcgcggccgtggtcgccgtcacgggcctgctcgcgtacctgaccctgttctcgtccgtgtggttcaagctcttcgtggcgttcagctgctcgtctctcacgctcgctacgtgctactctgtacatctgccccagatggtaggttttggctcaggtacccctgcgagcatccacgcgaaggaggcttgagcgtagtagcgttgtgactgtaactgagagctgtatgtatgtcagcagagaatttggtactgctacctggacgcggcttttgtatcaccacgttgctgtgtgtagtatatgtgttggtcaatgtgtttttgctaccgccatcttttatctggttcaagtaattgggcgtattcgttgcctaaggttttg

SEQ ID NO: 135998 - DNA, 78 bp, Zea Mays
ctcgaagcatttgttccataaagctcgtcgttttgatgtgtgtgagtctaaaaaaaatcctagcatctgattctagac

SEQ ID NO: 135999 - DNA, 324 bp, Zea Mays
atgggttgctgcatcagcaagaagtgcgacgagccgccgggcacggcggctggggaagtttcccggcgtcggtcggaggcgcgcgacccgccgccgcccccgccggaggaggagacggtgaaggaggtcctctcggagaccccgaaggccaagccgaggcccagtccgaggcgcgtggctgcgtcggcggggaaagaagcaggggagatgggggccaatgcgaagcttggcactgctagggcgaaggattgtggtggtggtggcggcggcggcaaggcgcgtcggccggtgggtcccgctcgttccggcccgccgggaccttag

SEQ ID NO: 136000 - DNA, 951 bp, Zea Mays
cccggggcctttccgggccgtccgggtggcggggaattttgaggtgggactctgatttttctgctttgaacccccccggcgggccccggatcgggtccccggagatggattcttcatgtggacggcaaccgagtccgcgctcggctcccagtcgggaacggagggccccggcggatgggctctccaccatcgcggcggttgcgcgtaccccctctccgcctcccgccgatgcaacaagcgggcggcgcgaatcccgggggaacgggccggcgcggaggtcttcgtctcccgcggcgaagcggacgcaggagcagcgccgcgcgggcgccgcctctgcgactgcgacacagcgtaagccgcctgtccccaccaggccctgtggccgcgcgtcgccgcggcgtgggcagcaggcgcctcccgagccggcgcagccacgcgagcctgaggatagtgcatctccgccgccggtgcaaccagaggagaatgccgggtccacgaccaccgcggttgccggcgacggtgaggggaaggagtcgctggacaaccctttggtggccatggagtgcttcatcttcctgtagcactaaccttctcctgacccgttctccgctgtcagcaaattactccacatagttttagcaggagtaaaggtggtggtgttggtagcagcagcaggcagtaggccagtagcagcgtaatttggtgagtaataatctcgtcgtgtaaaacgtttcccccctgggctggctttttaacccccgcgggagaaaaattactggctattcccgtagagccttcagcccgtcagaattcagatcgcagggctgggctctgacgcgctgtgctgatgtattgtctgcactctgtagagtacctctccgattgtgcatgtctacttgtaatcttctgttcctttttgcaatggcgagtcattcagagctggaaaggcat

SEQ ID NO: 136001 - DNA, 565 bp, Zea Mays
ccatccgcgaacacgagcttcacacacacactcacggcttccacagcttgctctcgctgcactcgcaagcaatacatctcgtcgttccactaagaccgaggagcaaatggcggccaccctgaagctcaggatcctcatcgtggcggccgccgtcgccgcgtccctggtcggcacggcctcagcggccgagggaccggcgcccgctccgacgtccgccgccgcgtccatggccgcgccggccgttgccgctgcgtccttcaccgcgcttgtcttcggctacctcttctgaacgccgtgaacattcaggcgtagacaccgtgtttgaccgtcggaaattctgtgtgttgtgcccagccgaattgtttgcctgctcagattcttcttcttctctctctctcgctctcatgttttggtgtgtataggtttgtaattacgtgttcatttttttattgtgtgaccatggatctcgtaattagtacatgatatatgtataaactatagagaactgcagtttggttcttcattttacactgtttgagagatgctaataattggattaagacta

SEQ ID NO: 136002 - DNA, 505 bp, Zea Mays
caatcggcacaaccaccaccacaacttcttgtcctgttggtgatacgagtgagctagctagccatggcggacgctaaccctaccctgatgctcctgaccatctttctcctggtgacaagcgccacagcaggttgtattagaattaacctcagccacagcggcatgcggtgcacccctggcgacgcgtgcccggtgatatgcgccaaaatcaagggcatagacggcaagtgcgaggatggagcatgcatgtgcacgatctgcgacccttcgtaccacccaagagcagcaacagattaatctaatccgtcgctaaatccgtttcgtttcatcgcatgcatatgtatcatgcatgttcactgtaatgataagagcacgtgaccctatctttggtgatatggatcacccaccacaaaacggcctattggtttttatcctaatccatatatagattggatgagattgagagagtttaaattcttaacaaatcaaaatatctcttaatgtc

SEQ ID NO: 136003 - DNA, 258 bp, Zea Mays
atggcggacgctaccctaaccctgatgctccagaccatcgtcgctatcctggtgtcaggtggcgcaacggcagagctccggccaggccaatgtacgcgaatcaacatgagccacagcggcatgcggtgcacccctggcgacgcctgcccggcgatatgcgccagaatcaagggcaaagacggcaagtgcaagaacggagcctgcatgtgcaccatgtgcgcgccttcgtcgtaccatccaattaagagcagcaagtga

SEQ ID NO: 136004 - DNA, 252 bp, Zea Mays
aagaggaagataatacctcctattgttaacattgatgtgtcaatggagtgtgtacaacatgaaaaaaccaaacatgacagttcaagagagacatttcagaactgcttagtttgtatatctcatgagttatctcctaacatctttgaactgcttcaacattgcatcgaaaccaatacagacatgcctgatgatggagagatagatattttcatcgaagctgtcagtgacatgctatttgagttgcagaaacat

SEQ ID NO: 136005 - DNA, 291 bp, Zea Mays
atggcatgtaggttctccatcctgctcgccatcgcgacactggctatgatgttcgcagtcgatcaagagcatagtggcgacgacttctcctttacactcaaggagggcccgactgtcacttggacgctcgacaccaaggccccactcaagtaccccttctgcatccgcttcatcatcaagtccagcagctacggcatcaccaacaacgtcatcctgccgatttcaaggccagcaccctcagcatatgatcaccctcttatgacgaataatctttcaaaagagctcatctag

SEQ ID NO: 136006 - DNA, 1244 bp, Zea Mays
cttgtgtttgcctgttgcttgtctgtctaatgttgcaggtccatcataggttttcttctgcatatgatagtacaactctgctatatgagatcctgaagtctattaaatgggcaagaaaaacatatggaaatctacctgtaaatgttgtgggacactcccattggaggggatctagcttcattttgtgcccttggtctatttgtaagtatttttaatgtacttgatttattataccaaatttcaatatatgctctacaaataacatgtacttgttttgtgataccatcgcatgtattgttaatatatcagatggttggcttcattgatatctctacattttttacatgttaaatttggatcataggacgttgggcacatgacttttggacagcctcggataggcaatcctgcttttgttgtatgccttggcgaacaagtcccaagaacaatccatgtgacccatcagaacgatattgtgccgcaattaccaccgtactattattacctaagtgaatggacataccaacacttcgctagagagctatgtatttggttatagtcgaaaagaatttatagagatgcatacttttcctagattagcgtccatccatttcttctgtatttatttatctttaggtttgacttcatgagagcatagatggaaatgtagttgccagaaatgagattgtatgtgatgattctggtgaggacccgacctatagcaggtacatatcagtctatctattttggacatttatttcctatgtgtgtttcatattatttgtgttttcttgaaaaagcgggtctatgggatgagcgtagcagatcatcttgagtactacagtgtcacactacatgctgattcaaggggaatctgtcagttcgtgattggtacagccaaccaagtatacaactacattcgtgaagttgatggatccatcatcttgttaagatatatatgcaagaatcacgagctctaaaatcaatgtgactttgtatgccacgaaatgcacccttgtacaatatttttattttcaatttgtgtacagctcatgaaatactgttgtgtacagctcatgaaatactgggctctccagagggtaaggactaaggagagactcacctttttaaatgtacccctttgaccaagtgacattcgatacatgtaagctccataagattgccgcacaattcaatttgtgtatatcaataacactgtgtattaccaagttatgcaagtatta

SEQ ID NO: 136007 - DNA, 653 bp, Zea Mays
ttcttaattttcgatgcaataagttgtattatttcaatcatcgccactagttcttcatcgttaaaagaagctaaaataacacacaccagtgagatgggaattgctagctatcttctggtcgatgtgtcatgaaacgatggcgattgggcgggtgcgactggatctggatgagtcaacgacgaccgaagggccctcctgggacgttgctgttggccttgggcgccggcggcgcccaagcttcgccggccgtcctgtccggcctcagcacatccctccgccacgcccggaatccagagcctgcatgcatgcatgcacctcctcacggttcaactcagtttcaatccagaagcgtgtgggccaggagaaaacaaaagtcatgtgaagaaattacagatcgagacgagacagcgttgatcgaggaagacgatcgaatcgaccgacatgggggcagagatcaattagaaaagcccatcgatcatgcatacctctttggcgagaggtgagccccgcctgccgcgactgaactgtcgtagccgtcgctgtcgccgtcgtagagatcaatagcaccaaaacaaaaacgaacaggaggcaggagacggctggtcgccgccatgctgcccttgccgtgctcttgcctctcagcggagcatcca

SEQ ID NO: 136008 - DNA, 746 bp, Zea Mays
acacagacacatacacacatccgtcaaagaaacaagtgcacacaaataaatacctggctcgctagattgccaagagcaatggcctttaggtcatccatcttgcttgccacggtggcgctagcaacgctattcgcggtcggttcgtgcaccaccccgctcaccttccaggtcggcaagggctccaagcctggccacttggtcctcacccccaacgttgccaccatctctgacgtggagatcaaggagcacggtggcgacgacttctcctttacgctcaaggagggtccgactggcacctggacgcttgacaccaagaccccgctcaagtaccccctctgcatccgcttcgctgtcaagtccggtggctaccgcatcgccgacgacgtcatccccgccaatttcaaggccggcaccacctacaagaccaccctcaacatctgattagcctcttatgacaaataatattttgagagagctcatctggaccaagtgccagcgagctaatatttaatttttttctttggttatattgaggcaccacacgagccaagaaaaaagttatgctacatgtcccttcttgcgccttattgcgttaggttgatatgcatgattacatagattaaaatacacttttattcaagattttttggggagaaatatattgatctggtccaccttcattatccagatgcttgttcatttgattttccaatgttttgatacttatgaaatgctttgttgctttt

SEQ ID NO: 136009 - DNA, 1154 bp, Zea Mays
ccccacacacacgcatccatcaaagaaacaagagcacacaaacaatacctctctagctcgccaccaacaatggcctctaggttctccatcatgctcgccacaacggcactggctacgttttttgtgattggttcgtgcaccaccccgctcaccttcaaggtcggcaaaggctccaagcctggccacctggtcctcacccccaacattgccaccatctccgaagtggagatcaaggagcacggtggcgatgacttctcctttgagctcaaggagggcccggccggcacctggacgcttgacacaaaggccccactcaagtaccccctctgcatccgctttgccatcaagtctggcggctaccgcatcgccgatgatgtcatccctgaaaattttaaggccgacaccacctacaagaccaccctcagcatctgatcatcctcttatgaggaataatattttgaaagagctcatctgatccatgtgccagcgagctaatatttaatttttgttctatggttattttatggcaccacaccacccaagaaataagttatgttacatgtcccttcgtgcaccttgttgtgttgggttaatacggttatataaattgaaatacaatatgtatttaatatttttagagagaaatatgttgatttggtccattgttggtcacttgttttttattccttcagaagatcaaaaacaaggcaacacaattagattaaccttcatgatcatcctttactctatctatcttggaagaacgatagattaaatgatgtagatattaagcgtcaacaaagaacggatgaagagcatcaaagttatatgttatgtaatataaagatgtgatacataattcaaccttgttgaatgttacccctttccttcttttattattcaacaaaggattacaaggataccttcggctctttggagttataatgcgaaggtaaaagagaaatacagcttcttaggcggatcaagacaatctttcctggctaaaagagtgtgtctaatgcatagcactgttcctctatttatatgtgtgagatacaactttgtcaaaattacaattatgcccttgagcctatacatttgtactagcgagcaaactaagggtaatgttatcttctgctcttgtatccttgctg

SEQ ID NO: 136010 - DNA, 99 bp, Zea Mays
ctaagatgatagatgattataagatctttttatttgatcatattatgtttggtattctttttatttacatgtccatgtgttgcatttatatagttaaac

SEQ ID NO: 136011 - DNA, 1446 bp, Zea Mays
cggatcatcacacgtcaccccacctgcctcagcggctcagctggatgggcgccatgtccccatccaaccccgtctccggaatctggacgccctcccgtccaggttcactccggccccctcatcttcctcccgtccccctcttcgttgcccccagatcccgcaaaccgcgaaaagaaaccgcatatcagcgggcgctgctcgttctcatcgccccccctcgtctctcgcggagccgaccccgtccccattcggacctcagctagccaccaccaccatggcttcttcgaagaggagatttggtgctgccggcggcgcggacaagaaggatctattccatgtcgtccacaaggtgcccgccggcgacagcccgtacgtcgtagccaagcacctccagctcgtggagaagcaaccggatgtggcgatcgtgtggttctggaaggcaatcaactcaggggacagggtggacagcgccctgaaggacatggccatggtgatgaagcagcaggaccgttccgaggaggcaatcgaggccatcaggtccttcaggcacctctgctccaagcaggctcaggaatccctcgacaacctcctcattgacctctacaagaaatgcgggaaagttgaggagcagatcgagctcctgaaacagaagctcaagtcgatataccttggcgaggccttcaacgggaaggcgacgaagaaagcgcggtcccatggcaagaagtttcaggtctcgatccaacaagagacgtctcgtattctgggcaatcttggctgggcttacatgcagcagaacaacttcgaggccgccgagctggtgtaccgcaaggcgcaagctatcgagcccgatgccaacagggcgtgcaaccttgggctgtgcctgatcaagcagggcaggcacgacgaggcacggcaagcgctcgaggacgtccgattgcgcagaatctatggatcagaagatggaaaggtggttgcccgtgcggagcagcttctccgcgagctaaacccgttgcaatgcgtttcatcgccgttccaggttggcctcagcgtccatgaagggatcatgggtaaaccagacctagtagtgatgaacgagtggacgccgttcaggtcgaggaggctgcctgtgtttgaggagatagcaactttccgggaccaaatggcttgttgatgcattactttgcatggtttaatttatctgtcagtgtcacactcacatccctctagaagtttttgttcgtatagagatcagtatatatcatatagctggggttgatgcaaagcgttgcctttaggatagtatttggttcatgttatatcactgtatggttcagatttcagtgaacaaatgttcgtgcgtgccctgatcttgtacaggatttacagttggctgttgtgaaatggtcgcttctaatcttgtcttgtacaggatttacagtcggcttc

SEQ ID NO: 136012 - DNA, 4703 bp, Zea Mays
atggagatgatcggttctggctccaggagttgtctgtgtcactcttctttcctgcctggtttctttactggtggggaacatgcagaaaaactgagtcacaaaagaactgaaaggtcacaccctcttccatttcttgtaaaggaagaggagcttagtggcgatgagcttgaggaatttatcaagaatcgatacagtaatcgtgtgaaatatgctgctgatcggagctattctagagaagacgatgacattttccccatggattgtgcactcaaggagcctactatttggagagttaaatgcatggttgggcgtgagcgccaaatggccttctgcttcatgcaaaaatttgttgacctgcgaaaaattggtaccaaagtgccaattatcacagcatttgcacttgatcacataagagggtttgtttttgttgaagcggagaaggccggttatgttacagaggcatgcaaagggttttgtagtgtgtacacaagcagaattacttctgttcctgcaactgaagttcctagcttgttatccagccgtacgaaaccatttgaaatctctcgtggtacatggatacgcatgaagaatggtaactataaaggtgatctggcacagggtggtgcagtttcactaaaagaagctgcagttcctgccccacggttcttcaggcctcacattgaaataaagcgcgatcgtcagactggcgaagtttttgaagtacttgatggtttgatgttcaaggatggatttctgtataaaaaggttgcacttagttctttgatttattgggggatacaaccgacagaaacagagcttttgaaattctcttctagtccaagcaatagagcttctgctgatgacctggattggctctccggcatgtatggttctaagaaaaggaaccttccagcagaacgagatatgaagtcatcatcttctaaaataaaatcctccaaagcaccagaccttaaagggtcaacttctactgaaaattatgacgacaatgatgaattcaaccttcatgatcttgtactctatgggcgaaaagattttggtgtgatcattgctgttgagaaagatggttttaggatactaaagggtggtcccgaaggatctgcggtgacagtgaggaagcaggatattaagaaaggctgtgtagacaaaatgtttacagctgttgatcatcataaaaagacgatatccattaatgacactgttaatgttgtggaagggccatttcagggtaagcaagggctcgttaaacacttgtacttgggaatactgtttatttttaatgaaagtgaaagtgagaactgtgggtttttctgtgctcaaagtgggtcatgcgaaaagatacggaagggtctgggaagctctactactgaaaattcggactttccaactcccatgttttctgaacctgcttatgagcaaaatgagcataggaacactgaagggccttacaggagcaccagagaacaacttttctctattgggcagatgctgcgcattagaaagggtcctttgaagggctacctctgtcgagtagttaggatatttcggaatgatgtgactgttaagctagactctctactgaaaattgttacagtacaagctgatcttctttcagtcccagctaataggggggataacttgtctggtgctccagctagtaaatttggaagtcaagatacacccttcttcgggtcagaagcaggcaaaacttcatgggacagggggttgccatcatttggcagtgactcatggcaacccttttcaagttccacgctaccagtccagaatgcaggtgcagaatcagaagctgatccatggtgtaagaaaacttctgctgaagatgattctgatccatggggtaagaaaacagacggtgattctgatccgtggggtaaggaagcggtatctgctgctgacggtgattgcaatccatggggtaaggaaacagtaccttctgctgctggtgattctgatccatggggtaagaaagtgttttctgctgatggtgattctgatccatggggtaagaaagcaatatcatcagctgttgaagtttggaacactagtgccacacaaaaggaaggttctagtggcaatgcatgggacaaacaagctggagttggtggatctgatgctgctggcagctcctgggacagagcggttgtcaataaggagagtgaaaagagtgacaactggggagaggcttgcagggttatggacatgggaactggagctgacacagacccttggggaagcaaggtcaaagcagtagatatggaaggaccaaatagctgggaaaaggctacaatgcctccagacaataagctggaggatgtcagccaaggatggaaccaacataagggcaactcaactgaagaccaagcaaaagacaatgtttctaaagatgaggacaacaatagggcttggagcagttctttgcctgtcactgaagatggtacctggggcaaatcaaaagacgacaactgtgatggagcaggtggtgcaggaggttgggatgcttctgttgccaactggaacaaatcatccgttctggctgatgcacaggatgagggttggggaaaaggaaattggtcatctgctaagtctgaagaaacaaacaatgaaattggaaattggaacaaagctggagcttcggaccaagctggaccgaaatcttttggtggtgatggttggaacaagggtggtgatcagaatagcagttggaacagtcctggaaattttggaggtgggcgtggctttgggcgaggacgagggagagttaggggtcgggaatctggagatttcaatggcagaaatgatcaaggaaattggaagaattcatggggtggtgacaatgctgaaaaatcttcttggaggtctgataatcaggtagacaatgaagctggagattctggtggatataggggacggggaagaggaggaagggggcaatatggaggacgaggaagagggagagacaatggttggagaaatggtgatggaccaaaatggggtggtggagataattggaacgctacaaatccaccaagtaatcagccttggagtagcagtggaggcaccaagtcatatggtcaaaatcagccttccacttggaataatccagaggataacaaaccatctgtaggtgaacaaggtgatccttgggcaagcaaggtgtcttctactgaaggtaaaggacaacagaatgattcttggtcaagtaagatgacttctcgtggtgctgaggataccagcggtggctgggacagcaaggagaagggctcttcctgcaatggtgggggtgaaggactacaaaatgatccatgggcaaacaagattggttctaacgaaggtaaagaacaagaagctgatccttgggccagcaagatgtcttctgctgtgggtgctgatgacaagaatggtacctgggacacgacaacaaagggcactctatctaacgaaaaggctgacgacccttggaatagtaagcggggtaatgatgatgacagcaagaaaactgacgcctggggtgctggctcgtcaggtgggaatcaggaatcttcttggagtaaacctattttctctctgggggatcaggaacctacttggaacaacccaaggtttggtgacgatgacaatgtaaataatagaggtgggtttggacgcggaaatcaaggcagagggagaggaaggagttttggtggtggtggtggtggatcatcatggaatgaaagcaacaaaaacggtgaatcaggtgggggaaggtctggagaaccatggaacagaaggggttttgatggcggcagaggaagaggccgctttgggcgaggtgaccgcaatcaaggcaacaacttggggtcaggagatggtggcagctggggctctggcaggggaaatggtggtggccgtggtggttacaggaactggaacgataacaacgaaagaaggcccttcggtcaaggtggtggctggtctcagtcttccgactggaatgccaacaaaggaagtggcgaaggaaatcaagctttctcgaagagcaagcccagctgggacgcgcagaacgcctctggtggagatgaccaggcaggaaagaagagtgacacagacaactcctggagccagaaccgatcatctccatctatcctgggtcagccaagcggtgatgctaataacaagtctagcgcttgggacggcgctcccaacggaggagctggcaggggaggttcaggttcttggggaaagagcgacgaggatggctggaactcgtcgtcgggaggatcagccagagagaagccttcgtggggtggtggggcagaagctcctcccaggaaggaggacgacggcgcatggggcaaaggcggcgaggggagccggagcctaggaggaggaggagagggtggtagcagcagttcctgggataaaccggcagatggtgcatggagcggcaacaacaagggtggcagtggcagtggtgggtggtaactggtaagcttgcgacttattggcgctgactgcatgtaaatattgtgcccgcgctgtgtgaactgttctggtgcgtgtctagttcgtatcagttacttggccatgcgtactctaaactaaaataaaacatggcttgtgactgtgactagttaaatgtagcctgttgctgacagtaattaggtgccttaactttcagaaactca

SEQ ID NO: 136013 - DNA, 1444 bp, Zea Mays
gcaattcttccccccccccccaaaaaaaacacacggtgcggcggaaggaagcagccatggcgctcacgcctgtcttgctcctcctgctggcctactgcctctcgggcgtgagctcatctgcaggcccgccgccacgcagcttcacctccctgttcgccctcggggactcgtacatcgacgccggcaacttcgtgaccatggccacgccggtcgctccggtgtgggtcgacaagcctccctacggcatgaccttcttcgaacgcccgacggggcgcttcagcgacggaagggtcatcgtagacttcgtagccgcggcgcttggcgtcccgttcctcccggcttcgctagccaacagctcggacgacgacgtcgcgcgccgcggcggcgtgaacttcgccgtcggcggcgcgacggcggtcgacgtcgccttcttcgagaggagacggctggtgccgttcaagctgctgaacaactcgctggacgtgcagctgggctggttcgaggaactcgagccgtccctttgcaacgccacggcggaaactgcaggttcttatggtggcggacggtgtttcagcagatcgcttttcttggtgggcgagtttggggtcaacgactacaccttcctatggacggcgaacaagacggagtccgaggtgatggcgttcgtgccaagagttgtgagaaccatcgcctcggccgtcgagaggctcatcgtccgcgacggcgcggcgcacgtcgtggtgacggggaacccgccgatcgggtgctcgcccacgctcctcaccctgctccgccggacgagccgccccaccagcgcggcggacgacgacgactacgaccacatcggctgcctgcgcggcgtcaacgacgtggccaggcaccacaacgcgctgctcggcgcggccgtggtcggcctcagggccaggcatccccgggccaccatcgtcttcgccgacttctacaccccgatccgtagaatcctggaaaaccccaaccagttcggggtggtggtcagtgacgtcctgaaggcgtgctgcggcaccggcggcgcctacaactggaacggcagcgccgtgtgcgggatgccgggggtgcccgcgtgcgccaacccgtcggcgtacgtgagctgggacggcgtacacttcacggaggccgtcaaccgctacgttgccgaggggtggctctacgggccctacgctcatccgccgatactcaaagccatgcgacggccctagccgccctacaagcagcagctcagctgctgacaacaaattaaaaagagatcaatataactggctgattaagggtctgtttgtctgtataagctatgtaacagctgttgcgctgagaaaactcaaagctatttggttgaaacaactttcaacaatcaattttgtaacaatatgatgcctgcttggtttctcaaataaaccgattcgacaac

SEQ ID NO: 136014 - DNA, 363 bp, Zea Mays
atggctgtgaagggcaagggcaagcaggtggcccccgaatcccctggcccaggcggcggcggggcctcaggggccggcgggaagcggcggaaggcctccggcgacacgggagagggaccctcgtcgtcctctgccgcgaagcgccgccgccgcgccggggtcctccagttcgtggacgacgttgccggcgtcgacgacgataatgaggacgaggacgaggacgagctcgagtccgaggatgaccccgatgatggtgagtacggattcggttcggtccttaaggcgtgcatgagacgtggatgggtcgaatggatccatctggagttttgtgttatgcgcaatgtggactatctgggcggatag

SEQ ID NO: 136015 - DNA, 109 bp, Zea Mays
cccaagttgacaaagtcctagattctacaattccagaaaatgaagcttgttacatcctcatgacatgcatgaaggaattttcttttgcgtatatgtggagggcttcgtc

SEQ ID NO: 136016 - DNA, 95 bp, Zea Mays
cttttacttcatgtactatctgaatatagagtacagtgtaaagctccttttgcagattggacctgctggatggtcaggttcttatatgtaagcat

SEQ ID NO: 136017 - DNA, 347 bp, Zea Mays
gcatgtctacgtaatttgcagagcattcatctctattttactttggttgctgacattggtttgaggacgatttctggcttgacttcactagagagcatcaacagtggttggcaatctatttctggcttgacttcattgaagttcaatctattttgctacacgaatttagcatatttatatcgttaatataatattattgttattgtgatattttgctacatgtattttggtatttgtcgttccatatctatgttttatattttttttattttcgtggcaacgtacgggcacagaagtatagacacatgcaatcatacaacaggtcactttgccagactgcatagacg

SEQ ID NO: 136018 - DNA, 1162 bp, Zea Mays
tctctcttcgtttccgtcgacggacaggcacctccgcgccccggcactagccgttaagccgacggtgcccaacggctccattcccgccgcgctctactctattaaagcccatctccccgctctctggtgactatactccactccagtccccgcgctgcatccttccgcttcctctcgctccctctgctctctcgcggtcgcagtctcgcagatcccgatcgcgcaaggagccagcgtagagggtgatcgacgatggcgggcagcacgcgcgcagcgcacaaggcgttcctgctctgcaactacacgctgctgggtgcagcatcggcgtgcatcttcctcacgctctcgctccgcctcgccccgtccgcgtgcggcctgctcctcgtcttcctccacgcgctcaccgctgtcttcgccgccgcgggctgctcgggctccttcaccgacggcggcgccggggccggccgcgcgcacgccgcgcacacagcgggggccgtgctcaccgccatcttccagggcgccgccgcgctgctcgccttcacccggaccgccgacttcctagccgagctgcggtcctacgtccgggaggaggacggcgaggtcattctcaagctcatcggcgggctcggcaccgccatcttcgtgctcgagtgggccgcgctagcgctcgcattcgcgctccggcttgacgatgatggcaacgaggagattgacggtgagcactgcaagagctgggcgtcagcgtaccatgtctgattctgctctgttcagacaccggagacgcgagagatacaggcacacaaaccagaaattgggggggggggggattttctcttctattatttacagctgtggatctattccgctgttgttacttgttactgtggtcatgaaccgaagtgcaaaggcaaatgttttgctttgcaatgtattcaattcatctcttagaaattgcaataaagtacattcagtgagccgtaaatgcgtgactccaagcgaagcagattcgtcactgttagacaaaatgatagcaaagttatccagttgagggttatttttaaaataaactatcaacaagattgtgtcagttagcaatgataagatagaagcttaaaaataaactttcgataaatgatattgaaggattggaaacgtacttttc

SEQ ID NO: 136019 - DNA, 1625 bp, Zea Mays
atggtcttcacgcgctggatacttggacgtgagaatctgacagtgatagacagacactggaagctaagacgaccaaaaagtttcttcccccgtggagcatgacatgcacagcacaggctacaccctacacgtcgttctgatgacatggcgaacgcctagtggctgtcgccggctcgccgcagctccggcgagcggcgattcgttggtgcggggatccgtgacgctgagcagacagcgagtagttaacgtcggcgaggcgatgggccgcctccgtgacgggcgagccttcctccaccgcgcgcttgtcctctcgtcgctgctccttctcgcctccggcgaaatcttcttcgaggaacggttcgatgatgggtgggatagccgctgggtgaaatctgattggaagaagagccaaggacaagctggaaccttccgacacacagcgggaacctactctggagaccctgacgataaaggtatacaaacaactggggatgccaaacattttgctatatcagcaaaattcccacaatttagtaacaaggaccggacattggtgatccagtactctctaaagattgagcaagatattgaatgcggtggtgcttacatcaaacttatgtctggttatctcaaccagaagaaatttggtggcgacactccttacagcttcatgtttgggcctgatatatgtggggatcagaaaaagaagctccatctcatactttcataccaagggcaaaactaccctatcaagaaagaactaaaatgtgaaacagacaagttgacacatttttacacatttattcttagacctgatgccacttatagcatccttatcgataaccgggagagagaattcgggagcatgtacactgactgggatatccttcctcctcgtaagatcaaagatgttaatgcaaaaaagccaaaagactgggatgacagggaatatattgaagatcctgatcaagttaagccagagggatatgattcaattcctaaagagatacctgatcccaaggacaaaaagcctgagtcatgggatgacgatgacgatggtacatggaagcctagaatgatacctaatccagaatacaagggaccatggaagcggaagaaaattaagaatcctaactacaaaggaaaatggaagaccccatggattgtcaatccagagtttgaggatgacccagacctatatgttctgaaacctttgcagtatgtggggattgaagtatggcaggtcaaagctggttcagtttttgacaacattttgatttgcgatgacccagactatgcaagacatgttgtagatgaaacttttgctgcaaataaggaggctgaaaaggaggcctttgaaggagctgaaagaaagaggaaggctagagaagaagaggaagcacggagggcacgggaggaaggggagagacgaaggcgggagagggatagggaccgcggcagggaccgatacaaggatagatataagcgtcataggcactacgactaccatgacgagctatagatcctgtattcttttgaaatctgcacgatattggatgtctgtctacggagagcgcacgtgcaaaacttgtatgttgtactcacggatgaagctgaacctgtga

SEQ ID NO: 136020 - DNA, 1817 bp, Zea Mays
tgccatccccgttggcgataaggcacgggacggagtggcatcgtcgtgaatagccaccgcacctgagccccttcaccgatccgctctctttacaaatattccctttgcggttcccagttgcccaccgagagtggcagtggagtagtggtaggaaaagctcgtcgccgagtcgccgtacgggggctcggctcgggtgagcgagcggcggccggcgggtactgaggcctgagggcgaggcgatgggccgcctccgtgacgggcgagccttcctccaccgcgcgcttgtcctctcgtcgctgctccttctcgcctccggcgaaatcttcttcgaggaacggttcgatgatgggtgggatagccgctgggtgaaatctgattggaagaagagccaaggacaagctggaaccttccgacacacagcgggaacctactctggagaccctgacgataaaggtatacaaacaactggggatgccaaacattttgctatatcagcaaaattcccacaatttagtaacaaggaccggacattggtgatccagtactctctaaagattgagcaagatattgaatgcggtggtgcttacatcaaacttatgtctggttatctcaaccagaagaaatttggtggcgacactccttacagcttcatgtttgggcctgatatatgtggggatcagaaaaagaagctccatctcatactttcataccaagggcaaaactaccctatcaagaaagaactaaaatgtgaaacagacaagttgacacatttttacacatttattcttagacctgatgccacttatagcatccttatcgataaccgggagagagaattcgggagcatgtacactgactgggatatccttcctcctcgtaagatcaaagatgttaatgcaaaaaagccaaaagactgggatgacagggaatatattgaagatcctgatcaagttaagccagagggatatgattcaattcctaaagagatacctgatcccaaggacaaaaagcctgagtcatgggatgacgatgacgatggtacatggaagcctagaatgatacctaatccagaatacaagggaccatggaagcggaagaaaattaagaatcctaactacaaaggaaaatggaagaccccatggattgtcaatccagagtttgaggatgacccagacctatatgttctgaaacctttgcagtatgtggggattgaagtatggcaggtcaaagctggttcagtttttgacaacattttgatttgcgatgacccagactatgcaagacatgttgtagatgaaacttttgctgcaaataaggaggctgaaaaggaggcctttgaaggagctgaaagaaagaggaaggctagagaagaagaggaagcacggagggcacgggaggaaggggagagacgaaggcgggagagggatagggaccgcggcagggaccgatacaaggatagatataagcgtcataggcactacgactaccatgacgagctatagatcctgtattcttttgaaatctgcacgatattggatgtctgtctacggagagcgcacgtgcaaaacttgtatgttgtactcacggatgaagctgaacctgtgattttggcgatgggtagagattggccatcgcgtctgtaactaaatttccacgttgcgatgcaatatgagctgtagtactgtcctcgcactactatttaccgtttgtgctgcatatgtgatataaaccttcaagaaacacacacacgaagggtctgaatgagcacggcctttgttgtttgcttcttataaaaaagaactgttttatctgtgtat

SEQ ID NO: 136021 - DNA, 2131 bp, Zea Mays
tgccatccccgttggcgataaggcacgggacggagtggcatcgtcgtgaatagccaccgcacctgagccccttcaccgatccgctctctttacaaatattccctttgcggttcccagttgcccaccgagagtggcagtggagtagtggtaggaaaagctcgtcgccgagtcgccgtacgggggctcggctcgggtgagcgagcggcggccggcgggtactgaggcctgagggcgaggcgatgggccgcctccgtgacgggcgagccttcctccaccgcgcgcttgtcctctcgtcgctgctccttctcgcctccggcgaaatcttcttcgaggaacggttcgatgattcagaatttcagtttgttgtttgagtgagctgttcactattcacgtggtttagcttctcaaagaagtgaattattccagagatattgctactgctagttgtgccttctgaaatgctccaagcctccaatggtcctgcctccaggagtcgaagaacttatttgtagttggcttacagtccgatgtcctatcgatctgatgtcttgtgctgtccatgaagttatcagtagctgatgtctgctcaagtttcttgttttcctaggtgtattgttttatttgtgattcatgaaattacgcaacttggtaacattcagatgggtgggatagccgctgggtgaaatctgattggaagaagagccaaggacaagctggaaccttccgacacacagcgggaacctactctggagaccctgacgataaaggtatacaaacaactggggatgccaaacattttgctatatcagcaaaattcccacaatttagtaacaaggaccggacattggtgatccagtactctctaaagattgagcaagatattgaatgcggtggtgcttacatcaaacttatgtctggttatctcaaccagaagaaatttggtggcgacactccttacagcttcatgtttgggcctgatatatgtggggatcagaaaaagaagctccatctcatactttcataccaagggcaaaactaccctatcaagaaagaactaaaatgtgaaacagacaagttgacacatttttacacatttattcttagacctgatgccacttatagcatccttatcgataaccgggagagagaattcgggagcatgtacactgactgggatatccttcctcctcgtaagatcaaagatgttaatgcaaaaaagccaaaagactgggatgacagggaatatattgaagatcctgatcaagttaagccagagggatatgattcaattcctaaagagatacctgatcccaaggacaaaaagcctgagtcatgggatgacgatgacgatggtacatggaagcctagaatgatacctaatccagaatacaagggaccatggaagcggaagaaaattaagaatcctaactacaaaggaaaatggaagaccccatggattgtcaatccagagtttgaggatgacccagacctatatgttctgaaacctttgcagtatgtggggattgaagtatggcaggtcaaagctggttcagtttttgacaacattttgatttgcgatgacccagactatgcaagacatgttgtagatgaaacttttgctgcaaataaggaggctgaaaaggaggcctttgaaggagctgaaagaaagaggaaggctagagaagaagaggaagcacggagggcacgggaggaaggggagagacgaaggcgggagagggatagggaccgcggcagggaccgatacaaggatagatataagcgtcataggcactacgactaccatgacgagctatagatcctgtattcttttgaaatctgcacgatattggatgtctgtctacggagagcgcacgtgcaaaacttgtatgttgtactcacggatgaagctgaacctgtgattttggcgatgggtagagattggccatcgcgtctgtaactaaatttccacgttgcgatgcaatatgagctgtagtactgtcctcgcactactatttaccgtttgtgctgcatatgtgatataaaccttcaagaaacacacacacgaagggtctgaatgagcacggcctttgttgtttgcttcttataaaaaagaactgttttatctgtgtat

SEQ ID NO: 136022 - DNA, 1805 bp, Zea Mays
tgccatccccgttggcgataaggcacgggacggagtggcatcgtcgtgaatagccaccgcacctgagccccttcaccgatccgctctctttacaaatattccctttgcggttcccagttgcccaccgagagtggcagtggagtagtggtaggaaaagctcgtcgccgagtcgccgtacgggggctcggctcgggtgagcgagcggcggccggcgggtactgaggcctgagggcgaggcgatgggccgcctccgtgacgggcgagccttcctccaccgcgcgcttgtcctctcgtcgctgctccttctcgcctccggcgaaatcttcttcgaggaacggttcgatgccgctgggtgaaatctgattggaagaagagccaaggacaagctggaaccttccgacacacagcgggaacctactctggagaccctgacgataaaggtatacaaacaactggggatgccaaacattttgctatatcagcaaaattcccacaatttagtaacaaggaccggacattggtgatccagtactctctaaagattgagcaagatattgaatgcggtggtgcttacatcaaacttatgtctggttatctcaaccagaagaaatttggtggcgacactccttacagcttcatgtttgggcctgatatatgtggggatcagaaaaagaagctccatctcatactttcataccaagggcaaaactaccctatcaagaaagaactaaaatgtgaaacagacaagttgacacatttttacacatttattcttagacctgatgccacttatagcatccttatcgataaccgggagagagaattcgggagcatgtacactgactgggatatccttcctcctcgtaagatcaaagatgttaatgcaaaaaagccaaaagactgggatgacagggaatatattgaagatcctgatcaagttaagccagagggatatgattcaattcctaaagagatacctgatcccaaggacaaaaagcctgagtcatgggatgacgatgacgatggtacatggaagcctagaatgatacctaatccagaatacaagggaccatggaagcggaagaaaattaagaatcctaactacaaaggaaaatggaagaccccatggattgtcaatccagagtttgaggatgacccagacctatatgttctgaaacctttgcagtatgtggggattgaagtatggcaggtcaaagctggttcagtttttgacaacattttgatttgcgatgacccagactatgcaagacatgttgtagatgaaacttttgctgcaaataaggaggctgaaaaggaggcctttgaaggagctgaaagaaagaggaaggctagagaagaagaggaagcacggagggcacgggaggaaggggagagacgaaggcgggagagggatagggaccgcggcagggaccgatacaaggatagatataagcgtcataggcactacgactaccatgacgagctatagatcctgtattcttttgaaatctgcacgatattggatgtctgtctacggagagcgcacgtgcaaaacttgtatgttgtactcacggatgaagctgaacctgtgattttggcgatgggtagagattggccatcgcgtctgtaactaaatttccacgttgcgatgcaatatgagctgtagtactgtcctcgcactactatttaccgtttgtgctgcatatgtgatataaaccttcaagaaacacacacacgaagggtctgaatgagcacggcctttgttgtttgcttcttataaaaaagaactgttttatctgtgtata

SEQ ID NO: 136023 - DNA, 126 bp, Zea Mays
acaaccatgaaacggatcaagttgtgtacactggaacatttgataacgatacagttagtttcaaagtttttggtcaactgtttttcttattgttgctttgatattctttgcaaagagatcatggtt

SEQ ID NO: 136024 - DNA, 2139 bp, Zea Mays
agtcgtccgtcgctttccttgtggctcgttcatcgcctccatccaataggccgccccgcctgccttgctctcccagcgcgctcgtgtagtcgtcgccatcttcgcttctcttctccacatttctgcgctatcccggcgtacggctgcgatccatacacgcccaatccaaaccctacctaaaactccgcctcgtgcctccgggctcacactcgtaggcacggagtgccgttccgtggtgggtggaatcaccaaaaatgccctccgtccaccaccacctcctcctcctgacgctcgccgccttggccgtggcggcagccaccgctagcgccggcggggacccgccggcaatcgaggcgcagttcgacgcctggtgcgcggagcacgggaaggcctacgccacgcccgaggagcgcgccgcgcggctggccgtgttcgcggacaacgccgccttcgtcgccgcgcacaacgcccgtgcaggcgccaacgccgctggcggcggcggcggcggcgccgcgcccccgtcctacacgctcgcgctcaacgccttcgcggacctcacgcacgaggagttccgcgccgcgcgcctcggccgcatcgcgccgggggcggcgctccggagccgcgccgcgcccgtgtactggggcctcggcggcggtgccgcggtgcctgatgcgctggactggaggaagagcggggccgtcaccaaggtcaaggaccaaggcagctgcggagcttgttggagtttttccgcaacaggtgctatggaaggaataaacaaaataaagacaggctctctggtcagtctttctgaacaggaactaattgactgtgacagatcttataatagtggctgtggtggtggcctcatggattatgcttataagtttgtgataaaaaatggtggaattgacacagaggaggactacccctatcgtgaagcagatgggacatgtaacaagaacaagctgaaaaagcgagttgtgactattgatggttacactgatgtaccttccaacaaagaagatttgttacttcaggctgttgcccagcaacctgttagtgtaggaatatgtggtagcgctagagcatttcagttatactaccaggtgcagatacataattagtttctcctgtcactaacatgtgttacagaacagtaaccatttattttacttcccttctaatgttttcttatgcagggtatctttgatggtccatgtccgacatctcttgatcatgctgtgttaatcgttggctatggttctgaaggtggcaaggattactggattgtgaaaaactcttggggtgaaagttggggaatgaagggctatatgcatatgcatcgaaacactggtgattccaagggtgtctgcggtataaacatgatggcatcatttcctaccaaaacaagcccgaatcctcctccttcaccaggcccaggtcctaccaaatgcagtctgctcacatactgtcctgagggatccacctgttgttgctcatggcgtgtcttgggcttttgcctttcctggagctgttgcgaactggacaatgcagtttgctgcaaggataaccggtactgctgccctcatgactatcctgtttgtgatacaggtcgcgggcagtgtctcaaggccagcggcaacttctctgctatagaaggaatcaggaggaaacagtctttctctaaagctccctcgtggactggctggctggagttgatggaccaatgagcgtataatcagacatggatagtagcttcatgcaagttgtgcgatccgtaggtcggtcattggccttgttccagtgccctgccacattcctgtacgcctactgcccgctgcgttgcaccgagatgcccttattttctctttattattgaaccctatggtgtaaagtttcacgattgtacatgtatgtcacacttgtattggcctatgcattagacgtctccattagtttacctatatgatcatctaaaatattgttttgcagtttttatactgtagagtgaagtttgaatataaaaatgaggatggtgctggatatagccttataggcgcgccctgcagattatttgccgcggttgagcttttgagggccaggccgcatatatattaatagaggactttgtgtaatgtt

SEQ ID NO: 136025 - DNA, 2258 bp, Zea Mays
agtcgtccgtcgctttccttgtggctcgttcatcgcctccatccaataggccgccccgcctgccttgctctcccagcgcgctcgtgtagtcgtcgccatcttcgcttctcttctccacatttctgcgctatcccggcgtacggctgcgatccatacacgcccaatccaaaccctacctaaaactccgcctcgtgcctccgggctcacactcgtaggcacggagtgccgttccgtggtgggtggaatcaccaaaaatgccctccgtccaccaccacctcctcctcctgacgctcgccgccttggccgtggcggcagccaccgctagcgccggcggggacccgccggcaatcgaggcgcagttcgacgcctggtgcgcggagcacgggaaggcctacgccacgcccgaggagcgcgccgcgcggctggccgtgttcgcggacaacgccgccttcgtcgccgcgcacaacgcccgtgcaggcgccaacgccgctggcggcggcggcggcggcgccgcgcccccgtcctacacgctcgcgctcaacgccttcgcggacctcacgcacgaggagttccgcgccgcgcgcctcggccgcatcgcgccgggggcggcgctccggagccgcgccgcgcccgtgtactggggcctcggcggcggtgccgcggtgcctgatgcgctggactggaggaagagcggggccgtcaccaaggtcaaggaccaaggcagctgcggagcttgttggagtttttccgcaacaggtgctatggaaggaataaacaaaataaagacaggctctctggtcagtctttctgaacaggaactaattgactgtgacagatcttataatagtggctgtggtggtggcctcatggattatgcttataagtttgtgataaaaaatggtggaattgacacagaggaggactacccctatcgtgaagcagatgggacatgtaacaagaacaagctgaaaaagcgagttgtgactattgatggttacactgatgtaccttccaacaaagaagatttgttacttcaggctgttgcccagcaacctgttagtgtaggaatatgtggtagcgctagagcatttcagttatactaccagggtatctttgatggtccatgtccgacatctcttgatcatgctgtgttaatcgttggctatggttctgaaggtggcaaggattactggattgtgaaaaactcttggggtgaaagttggggaatgaagggctatatgcatatgcatcgaaacactggtgattccaagggtgtctgcggtataaacatgatggcatcatttcctaccaaaacaagcccgaatcctcctccttcaccaggcccaggtcctaccaaatgcagtctgctcacatactgtcctgagggatccacctgttgttgctcatggcgtgtcttgggcttttgcctttcctggagctgttgcgaactggacaatgcagtttgctgcaaggataaccggtactgctgccctcatgactatcctgtttgtgatacaggtcgcgggcagtgtctcaaggccagcggcaacttctctgctatagaaggaatcaggaggaaacagtctttctctaaagctccctcgtggactggctggctggagttgatggaccaatgagcgtataatcagacatggatagtagcttcatgcaagttgtgcgatccgtaggtcggtcattggccttgttccagtgccctgccacattcctgtacgcctactgcccgctgcgttgcaccgagatgcccttattttctctttattattgaaccctatggtgtaaagtttcacgattgtacatgtatgtcacacttgtattggcctatgcattagacgtctccattagtttacctatatgatcatctaaaatattgttttgcagtttttatactgtagagtgaagtttgaatataaaaatgaggatggtgctggatatagccttataggcgcgccctgcagattatttgccgcggttgagcttttgagggccaggccgcatatatattaatagaggactttgtgtaatgtttcatggctatatggtacagaaggatgcatctagcgcaggtcaatgtggtagtatcatacgctgttttggtacgacgagcaactaggaattcgttttcgtgtacacgttaaacatacttatattgtatcataaacaggcgagtaaggcgtaggcatagggcggcctagacatgttggtttttacaatgataattaattttagtgacttgggaa

SEQ ID NO: 136026 - DNA, 434 bp, Zea Mays
tgtgtcaggtgagctcgaagcaggcggcgacgagggctgcgagcagcgaggagagtcaggcggtcgtggagtagcgcgagcgggcacacgatgtcctcccatctcaacgggtgggtgagatgtgtgacgagcagttggaggaggacgacagtggggtgtggagggggtggggacgggggcgtgtcagaagcggagtcgggggaggagcaaaggctaaggtagtatgtaagttagaagggacacgaaataactttatgttttatcgatttattatgcgatgatttattgaaaaaagattgttctcgcaatatctttttcactcaagactgtgcatccatgataggtgttatatcgatgacttctaggggtattcatgtttggcatatgctagctctgaccgaaatctttggagattattccgtattacaatttgg

SEQ ID NO: 136027 - DNA, 735 bp, Zea Mays
attaaactcacaacacggtagcagggggtggtagtagaaggcataagctctgttctctgaccctcaagtgtttgagcctatttgcgcaacgaaaaaatgagcatcaaaagcattaatggaaagagccccatagtggttggaccttggggagggacaggagggtacccttgggatgacggcgtgtactcaacaatacgccagatcgtgattggccatggtgcagctattgactcaataaggattgaatatgatctgaaaggaaggtcggtttggtcagaaacgcatggaggtactgatggtggctccgaaacagataaggtatacttcactgaaccatccctgaagcatttgtatttttttatctcaaataaccctatttggatgctgataaacttcaaagacaaaattttgatcttgttaatctggtttactgaagctgcaagagtttgtactcgacaaacctaattcgatctctattctaatccagacagtgtttctgtgtcgatgaagatgttcagaacttcagctcagttttcatgtctgtttgacaaaattgttgtataatctgcaggtgaaactagattttccagatgaagtcctcgtgtctgtaagtggacactacggatctgtctgcgggacaccggtcatcataagatcgttgacgtttcagagcaacagctcgacgtacggacccttcggcaccgaggatggcacacctttctcactcccagttag

SEQ ID NO: 136028 - DNA, 2127 bp, Zea Mays
attaaactcacaacacggtagcagggggtggtagtagaaggcataagctctgttctctgaccctcaagtgtttgagcctatttgcgcaacgaaaaaatgagcatcaaaagcattaatggaaagagccccatagtggttggaccttggggagggacaggagggtacccttgggatgacggcgtgtactcaacaatacgccagatcgtgattggccatggtgcagctattgactcaataaggattgaatatgatctgaaaggaaggtcggtttggtcagaaacgcatggaggtactgatggtggctccgaaacagataaggtgaaactagattttccagatgaagtcctcgtgtctgtaagtggacactacggatctgtctgcgggacaccggtcatcataagatcgttgacgtttcagagcaacagctcgacgtacggacccttcggcaccgaggatggcacacctttctcactcccagttagcagtggcaagatcattggattccacgggcggtctgggtcgtatctcaactcaatcggtttctacctgaagcaggtgcattttccaactccagtgaatccttctccagcttcacctctgagcctcccgagtccacaaagtagaaacagcgcctatggcctcaccggtggcgacgctagacctgacatggttctcgccgtgcgagacagaggagacagctatgctgtctacgcgagcaatcaccccaaacagcagtacacaaacccgtcaccggacggagcaatctggaacaagatggtttctgtccccagttactacggagatactacaggagctgcagccgtgggcggcagccctcagacctatggcccctggggtgggagcggcggcaccatatttgacgacggcgtgtacactggcgtgtggcagatcaacttgacgcgcgcagtgggaatctcttctatcaaggttctgtatgatcggaacgggcaggccgtgtggggtaacaagcatggtttcagcagcggtgtcataccagacaagataatattcgacttcccgtcagaggtgctgactcacataaccgggttctacgattcagcaataatcatgggcccgaccgtggtcaggtctctgacgtttcacacgaacaagcggacgtacgggccgtacggcgatgagtacggcacgtacttctccacgagctttaccaatggaaggatagtggggtttcatggccgggaggggtggtacatcgacggcattggagtccatgttcaggaaggcaaggtggcgcagcagcggtttgttagcagaccgaagactccgactagcccattggtgcattacaacatgctcgcccaggcgccgagtgctacttacacggacggcgaggttgcttatggcatggtgaaagaaccggtcccgatgggaccagggccatggggtggggagggaggtcgggcatgggacgacggggtttacactggcgtgaagcagatctacgtcatgagaggagcgttcatcgggtcgatacagatcgagtatgacaggagcggccactccatctggtcttcaaggcacgggaacagcggccacatcacccacagggtgaagctggacttcccgcacgaagtgctgacgtgcgtgtacggctactacaacacgagcaaggaggacgggccccgggtcctgaggtcgctgacgttcctcaccaacaggggcaagtacgggccgttcggcgacgagttcggcgcctacttctcgtcggcgacgacggaggggaaggtggtggggttccacggccgcagcggccagcacctggacgccatcggcgtgcacatgcagcactggctcggggacaggaggcctgcccccaagtacgtgctgtccaagtacctgttctgattcatcacctggctgctcgggttacacgtatctaattttgggcgggtggattctaattacttgtatcatcaccatttattggttcggggcatactcatgcttgatttcgtatcgattaattgaaaagaagtacatcatctctctctctctctctctctgttgaatttcaagacattctttgtcagttatgatgcccaaatattcattgtgcctctgcttgttatggacgcagtacgcaga

SEQ ID NO: 136029 - DNA, 715 bp, Zea Mays
aaagatatggggcagtttggtcttctcctttgtttttagtgattttgtttttaaaattttatttgatacccatccgacggacatcaaattcagcagcaaacgaaaatcatttttttaatataaaattacaattaggctactgaataggggacgataaatattttttattttattattttgagcatgagactatgggaacagggccgttgccagttgggcaggttcagactcgctgcgccggagcccctgatcgtaattttccgtgggcgctagggcatattcgtaatgtggtcccatgggataaattcgattcccctcgaacggcaaatatctaccggagcgcgtctcggggaggagagagaaagtcagatccgtgttccgtgtccgcgtccagtgtgtccgctactccgctccccctcagtcctcagttcctcacctagcggtagcgtgcgcgcgggagacgtagatggcggcttcggaggcggcagcggcggcggcaacaccggtgacgccgacagaggggacggtgatcgcgatccacagcctggaggagtggagcatccagatcgaggaggccaacagcgccaagaagctggtttgtttctctgtccttgtattggcaacgtatctggtgctcaaagggtacggtgctcacgtgcgagaaatttggagagatcagtccatgcctacgctcatcttagaatctgccggatag

SEQ ID NO: 136030 - DNA, 924 bp, Zea Mays
tgggataaattcgattcccctcgaacggcaaatatctaccggagcgcgtctcggggaggagagagaaagtcagatccgtgttccgtgtccgcgtccagtgtgtccgctactccgctccccctcagtcctcagttcctcacctagcggtagcgtgcgcgcgggagacgtagatggcggcttcggaggcggcagcggcggcggcaacaccggtgacgccgacagaggggacggtgatcgcgatccacagcctggaggagtggagcatccagatcgaggaggccaacagcgccaagaagctggtggtgattgacttcactgcaacatggtgtcctccgtgccgcgccatggctccaatttttgctgatatggccaagaagtccccaaatgttgttttcctgaaagttgatgtggatgaaatgaaggtcgtcgaactttctaactctctttgcagattgtcatgatatattatacttgttaattgcattgtctgtgttctgatatctattttctgagcagaccattgctgagcaattcagcgtagaggccatgccaacattcctgttcatgagggagggcgacgtcaaggacagggtcgttggcgcagcaaaggaagagctagcaaggaagcttgaactacacatggcctcgtagatcagtgatgccgtaatgtagtattcgcctaaataagaggacgcctcgcctcaactctgagaaaactagtgcttctgtgatggtaattcgtatgagagagtgccccctttggtggtacttcttcgtatgtagtattaactcctgtcttaatatgttgccctgcttgtgcttttcataccatgtttgctctttcagctgaggtgttatacggtaaatcggagtcaatatctttgaaattgattaactgtagtcacctagcttttttccctaaca

SEQ ID NO: 136031 - DNA, 1208 bp, Zea Mays
tgggataaattcgattcccctcgaacggcaaatatctaccggagcgcgtctcggggaggagagagaaagtcagatccgtgttccgtgtccgcgtccagtgtgtccgctactccgctccccctcagtcctcagttcctcacctagcggtagcgtgcgcgcgggagacgtagatggcggcttcggaggcggcagcggcggcggcaacaccggtgacgccgacagaggggacggtgatcgcgatccacagcctggaggagtggagcatccagatcgaggaggccaacagcgccaagaagctggtggtgattgacttcactgcaacatggtgtcctccgtgccgcgccatggctccaatttttgctgatatggccaagaagtccccaaatgttgttttcctgaaagttgatgtggatgaaatgaagaccattgctgagcaattcagcgtagaggccatgccaacattcctgttcatgagggagggcgacgtcaaggacagggtcgttggcgcagcaaaggaagagctagcaaggaagcttgaactacacatggcctcgtagatcagtgatgccgtaatgtagtattcgcctaaataagaggacgcctcgcctcaactctgagaaaactagtgcttctgtgatggtaattcgtatgagagagtgccccctttggtggtacttcttcgtatgtagtattaactcctgtcttaatatgttgccctgcttgtgcttttcataccatgtttgctctttcagctgaggtgttatacggtaaatcggagtcaatatctttgaaattgattaactgtagtcacctagcttttttccctaacagccagcttgtttagccgcgatgcgtgggttatttcggacagccatgtcttctcaggccagtatgctttctcttcctgaacactcaagtttccagaattacggtcttgtctggtattgagaaccgatatttgcatgttcatttccaaatcaatgttgaatgggacatttttttctcatctggtattctggtggcatttttgcaagaaatgctactgttaatttcaattccgttatttgtacccctataaaaaccacaacttcaaacattgctagagtcatccaaccaaatgtccatcacaatctacagttcttctaaatgaaccaaacaaactacgcttagattcatctcaaatcgatcatacttttgaaatcaagaaa

SEQ ID NO: 136032 - DNA, 516 bp, Zea Mays
atgaccaactccaccagtcaaccaccaagtctggaaagcagctcaagaggggcaactgtgctctggggagtggcgccccatatctacaaagcaacataccatcgtgccattcaccctaggtcgactgggctcctaggcgttgacaagcctcctccaccctcggcctgctcgaacacaaagcaccacaaatcagaccagtcaacggccccaagacacgcccagattgagaaacccaagtcctccccaggcccggggccgccgaaccctcaccgtttggggtccggagctattgcgagctggttcatactggacggctccagctcggtccctccgaaggcatgcgttggcaagtccccgggctccagagtggctgggggtggcgccgccggcgccggagacggtggcttcatggagatcggggtggcctccatgggatgggactatgggagtacgaggggtgcgctcacgcaacgggtccgtgtgaactgggaagaggcggctcccctcttttattag

SEQ ID NO: 136033 - DNA, 690 bp, Zea Mays
ggtgtaagcctaattccctttcaatacccttgcgcgggtgctccaacgaggactagtggagagtgccgactcttcgatacctcggtaaaaattggaggagtcttctaaactttgctttacattccgcacttaattcaagctatttactttgtgtatttgtttagcaagtatttgaagcattgtcttagccttgttacatttctattattattttcttagtgctagttattggggtgaagttgggctcttgtttagctcttgcttaggttttaattagttttgatttttagaaaagcccaattcaccccccctcttgggcatcgtgatcctttcaggtgaatatataattaataaagtacaactataattttgattcgaaattttttcatgaatagtagtagtttgattgcacgagaaacttaattgcacaacagtttaccctgagtagagatagtttaagaaagacaacaattgtataaataaacaaattctattacagatgtggttagctgattaatcctatctctaactactttttatgaatggatgcaatcaccacttaaaagggtgcctcttgaaaataggtgtcgtttcacacatcccctattgatcatatctttgttcaagttaatgtagttgctactagtattcctcagaaaaacctatagaaaaaacctatagaaaagtcca

SEQ ID NO: 136034 - DNA, 640 bp, Zea Mays
gggacgaggcccccaattgttcccccctggctgctggtatctactgtctccctccctctctgccttgctatcgccttccagctctatttctatgcctctgccggttcgcagggccttagctttcatgagcactggagatggacatcgagtcggtgaggtgcgcctgctgtagcctcagagaggactgcacccaggaatacatagacaatgtcaagggcagctttggggggagatggctctgtggcttgtgctccgaggctgtaagggatgagctcagcaaacacaggaccggccagggtagagttgaagaggctgtcaaggctcacatggaattctgcaggatgacgctgtcaagcccagctgtccgggtagccgatggcatgaaggagatgctcaggaggaggtcaggggacaagaggaggccagcaacgccatcaaaagcacacccagcatagcaaggtaggtaagggctgtcgacagagatgcttctagtcgccttaaggtcagtgcatcgatgtgggagcctctcaaatctactaaatgtatgtgtcctactataagtatattgtatttatatataatacaggcagcatgtcaactgtaaatatgagcgatattattaatccgaggtttcatgatc

SEQ ID NO: 136035 - DNA, 569 bp, Zea Mays
cgccttccagctctatttctatgcctctgccggttcgcagggccttagctttcatgagcactggagatggacatcgagtcggtgaggtgcgcctgctgtagcctcagagaggactgcacccaggaatacatagacaatgtcaagggcagctttggggggagatggctctgtggcttgtgctccgaggctgtaagggatgagctcagcaaacacaggaccggccagggtagagttgaagaggctgtcaaggctcacatggaattctgcaggatgacgctgtcaagcccagctgtccgggtagccgatggcatgaaggagatgctcaggaggaggtcaggggacaagaggaggccagcaacgccatcaaaagcacacccagcatagcaaggtaggtaagggctgtcgacagagatgcttctagtcgccttaaggtcagtgcatcgatgtgggagcctctcaaatctactaaatgtatgtgtcctactataagtatattgtatttatatataatacaggcagcatgtcaactgtaaatatgagcgatattattaatccgaggtttcatgatc

SEQ ID NO: 136036 - DNA, 1019 bp, Zea Mays
accaccagcagagagcagacccgccgtctccgctatcagcacgcgtgtagccctgcagcgaggaatcaccacacacacacacacgcagagagacagagaagaggagggagatgtcgccgcagtctcagcagcagacggcgatagtcggggaggagtactgcgagggcgaggacagggagctgacggtgcgcaagacgacgctcttcaccccgggggacgggctggaggcgtacgaccaccgcacgggcgcgctggcgttccgcgtcgagacgtacggccgcggcggggcgtgcgggggcggggccgccaggggggacctcgcgctgctgggcgcccagggggagcccgtcctcacggtgcgccgccgccgccccagcctgcacaaccgctgggacggcttcctcggcgacggcgccgcgcacggccagaagaagcccgtcttctccgcgcgccgctcctccatcctcggcgccggcacgggcgccgccgccgtcctcgtcgacctcctcgcccccggcgccgccggggagttccgcgtcgacggctccttcccgcgccgctgctgccgcgtcgtggcctccgccagggcctgggccgcgcccgtcgccaaggaggaggaggaggaggaggaggaggacgtggtggtggcggaggtcaggcggaaggtggacgaggacgcgcacgtcatgatgggccgggacgtcttcgtgctctgggtgcgcgccggcttcgacgccgccttcgccatggggatcgtgctcgtgctcgaccggatcaccggggatgacgtcgacggcgacctgcgggaggacctgctcgaggccgctacatcgccgccggcgtaagcacgcgggaccgacctcccgctcgcgtggggcgtggcttcagtacaattccacaaacaattttctcatggttcttcgatccgatgtactttaccttcgagcatgatgtgaattatcttctcaattccgtgctgtttccccccttccaatctgatgcttgacattggatcacca

SEQ ID NO: 136037 - DNA, 1323 bp, Zea Mays
aatcagactcctcgtttccctccctatcctctctcgtcacgccgttgtcgtcccgttgctcgattcgaaggcgcgacccttcgccatcgctcttgcctcgccttgccggcggcgccaatacccgtgctcgcgtcggagcgcccaacttccccacggtggccgttccgccgcggcgcacgcaggtgggcgatgcggtcggatgagtgggcggcggcggcggcggcggcagtgtttcgtggaaaggaggaggaggggggccttgtgctttcccgcggcgttgctgtctccgccgcatacgcccctcggagccggtgatggccccgaccgcggagtcgtcttccccgccgccgcaacggcgcccccgcacgggcccacccccggggctgaagaacctcagcaatacctgctacctcaactgcgtcctacagtgcctcgcgtccacgccgcccctcgccacgttctgccttgcctctggccactccgacatttgcaagaaggtgtccccgaatagggacaaggagtgcgcgttctgcgtgcttgagcggcagatcgcccggctgcttcgggcagatgctggggcgctcgattccccagcaaaggtaatccgctgcatgcccctattcgctgagcacttcaggtgggggcgccaggaggatgcgcacgagttcctccgctatgtggtagatgcctgtcacactgctggcctccgcacgcgcaagctgctactcgctaaaggtgccaatggtaactgtggtgaggatggcagggggcagggggcatgtctggttatgagggagacatttggtggggcattgctgagtcaagtgaaatgccttgtgtgcaacagagagtctaacaagactgatgaaataatggacatcagtctcgatctgcctgggagcagttctgttgctgatgcccttgcccgcttctttaagccggagatattggaaggtgcaaacaaatatagttgtgaaagatgtaaaacgctcacctcagcgcagaagcaaatgtttatgctgagggcacctaaggtgcttgtcatacaactcaagaggtttgaggggataaatggtggaaagatcaacaggaatatagaattcaaggagacacttggtatttctgattgcatgtacaataaaagccaggtaaaacatcaaatttcgattgcttattctttggtttttttcttaggcatgcaaacttctgtggatgcaaaaactatctgtgaaaccaattatttagctgtggtaggttgctcattgatatgaaaccacatgttaactgccatcaatttctagtttgtttaaggacattgtttcc

SEQ ID NO: 136038 - DNA, 381 bp, Zea Mays
atgcttcctgaatcgtcacattcatcaggctcggtgtggccactgtcatcagagggagcggcgctcggactatctgagccagctgaggagggggagggcgacggcgaggctgaggatgctccaaggatgacgcagctgcccagtgtggacccgaagtcagccttccacttgagcatcacgccatcgtccatgccgagctcgcccgctgggagctcgatgcgaaggtggcggagctccttgaaggaacggagcacctccgatggcgagtggtgcgacacgtccccagcaggcagtggcgaggaggaggacgacgacgacgatagcgacgaagcggcggatgccggaaagccggaggcggagttggcgggtgagaggatctga

SEQ ID NO: 136039 - DNA, 288 bp, Zea Mays
tctccctccccccacgatctgctccccccatctcaacaatccccgccccatcgccgtgcgtctcggctgtcatcttccctaccggaagcagcgactagggtcaagatggtgtggtggctcacctaccagaagcggcacagctacgccaccaaatcgaaccagacccgcgtcgtcaagacacctggtgggaaacttgtgtaccagtacaccaagaagcgcgcgagcggaccgaagtgcccagtcaccgggaagaagatccaaggagtatgtgtcgcccacctttctatt

SEQ ID NO: 136040 - DNA, 213 bp, Zea Mays
atgcataacatgattattgaagacgagggtgaagtcgaccctgatgaacgttttcaagatggtggcgataatgtgcagccttcccatgatcaacatcccgatttggacgaatttatagagacacatcgaaaaatcagggacaaagaaactcatcatcagctgcaagaggaccttgtcgagcacctttggcaacatcattcagatcagtattga

SEQ ID NO: 136041 - DNA, 2204 bp, Zea Mays
ctctctttcgatcctagaggctagaccctctctcgcgcacacgctctctcctctcttcacacggtttttgcctcgcaaacgaaaagacaccaacccgggcccggagggtcaagtggagagcaggggaggaggggagaggaaagggaaaagcgggtcgcgagtcgcgactcgcgagtgcccgcttttgctccaatccaatcggtgccgcctcgggcgagatccgctccgcgtgccccgccgctgccgaggcgctggatgttggagagaaaattacaagatgccgaagttcctgtagaagagcaaaataacattcttaagcatttggagaaaaaagagactgaatatatgcgcttgcagagacacaagatgggagttgaagattttgaacttttgactattattgggagaggtgcattcggagaggtgcgtcttgtagagagaaggtctctaagaatgtttatgcaatgaaaaagctcaagaaatctgaaatgcttcgtaggggccaggtagaacatgtcaaagctgaaaggaaccttcttgctgaagttgatagtgcttacatagttaagctctattattctttccaagacgaagagttcttatatctcatcatggaataccttcctggtggagacatgatgactttacttatgcgcaaagacacactaacagaagatgaagctagattttatattgcagaaactgtgcttgccatcgagtctattcacaagcacaactatgttcatcgggatatcaaaccagataatcttttgttagatcacagtggtcacctgaagctttctgacttcggtttgtgtaaacctttggacagcagtaatttccctaatttgaatgaaccagattatatgtctggaaaagttaccacacctttgcctgataccactcggttaagcaacccttctgcaccgaggcgtacacagcaggagcaattgtcacactggcaaaagaaccgtcggatgttggcatactcaacagtcggtacacctgattatattgctccagaagtgctactgaagaaaggatatggaacggagtgtgactggtggtcccttggtgctattatgtatgaaatgctagttggttaccctccattttattcagaggacccaatgtctacttgcagaaagattgtgaactggagaagtcacttgaaattccctgaagaggcaaagcttcctcctgaagctaaggctctcatcagcaagcttttgtgtaatgttgagcatcgacttggtacaaaaggagcccatgaaataaaagcgcatccatggttcggaggtgttcagtgggagaagttgtatcagatgaaagctgctttcataccagaagttaatggagagttggatactcagaattttgagaatttcgaggagattggaactcaaattcaaagttcatccaagtcaggcccttggagaaagatgcttccatccaaagatgcaaactttgttgggtatacgtacaagaactttgaaattgtgaatgatgatgaagtggcaggaattgcagagttgaagaaaaagagttccaaaccaaagcgaccaaccatcaagacaatgtttgagaggatggacgaagaggagcctgttcaagggagtttcttaagtatgttgcccccggagggccaaccttcgtcccactccagcgttccacaggaaaaataccaacctcgccgtaaataggatatggaggtttggaaagtaaagcataggaaagtaaaacaagaaaaaaaatcgtctgctgccttttgatctgttccctgtctaggttttgtaaatcctaaccaatgcgttctttagtcaaatgcttaaaaaaatctctccggcaaaatagtgtattgcatttgatgtgaacatcagtgttcggctgtatattgtgtcaccgttctaacttcgaagtgatgcttctcagccatattggcaaaaacttgccataccaggagcaggcaagttgtgctgctgtgggcctgtggcaagcatgggctatgtgtatgacctttagatgtttctttggggtcatggttcataggagcttgatcaacttgcacttgtagcatactccctctatacccaaaagctcctatgaattgagggactgcattcttttcggacagattttgacttacctgggattaaaacccactcaatccctctcaattcatatggattggagttgaatcgaac

SEQ ID NO: 136042 - DNA, 2600 bp, Zea Mays
ctctctttcgatcctagaggctagaccctctctcgcgcacacgctctctcctctcttcacacggtttttgcctcgcaaacgaaaagacaccaacccgggcccggagggtcaagtggagagcaggggaggaggggagaggaaagggaaaagcgggtcgcgagtcgcgactcgcgagtgcccgcttttgctccaatccaatcggtgccgcctcgggcgagatccgctccgcgtgccccgccgctgccgagatagagggtgtcgtccccactccccagcatctggttccacggagagttgttgatcttggatacctgatccgcaatttggggctgattgagtcacttgaccttttcaacatctgccccgttcctgctgccttgctcactataagaggctggcctggttccagagatgattctattgtgagtggagatggattctgtgagaagttggttccagaagttccagccgagagacaaatcgaagaggccagtggtggctgccagacatggaaaagatccaggaaagcccccgatggacgatgccccttctagtgcgacgaaacagagggttgccgctgcaaaacagtacattgagaaccactacaagacccagatgaagtccctgcaagataggaaagagaggcgctggatgttggagagaaaattacaagatgccgaagttcctgtagaagagcaaaataacattcttaagcatttggagaaaaaagagactgaatatatgcgcttgcagagacacaagatgggagttgaagattttgaacttttgactattattgggagaggtgcattcggagaggtgcgtcttgtagagagaaggtctctaagaatgtttatgcaatgaaaaagctcaagaaatctgaaatgcttcgtaggggccaggtagaacatgtcaaagctgaaaggaaccttcttgctgaagttgatagtgcttacatagttaagctctattattctttccaagacgaagagttcttatatctcatcatggaataccttcctggtggagacatgatgactttacttatgcgcaaagacacactaacagaagatgaagctagattttatattgcagaaactgtgcttgccatcgagtctattcacaagcacaactatgttcatcgggatatcaaaccagataatcttttgttagatcacagtggtcacctgaagctttctgacttcggtttgtgtaaacctttggacagcagtaatttccctaatttgaatgaaccagattatatgtctggaaaagttaccacacctttgcctgataccactcggttaagcaacccttctgcaccgaggcgtacacagcaggagcaattgtcacactggcaaaagaaccgtcggatgttggcatactcaacagtcggtacacctgattatattgctccagaagtgctactgaagaaaggatatggaacggagtgtgactggtggtcccttggtgctattatgtatgaaatgctagttggttaccctccattttattcagaggacccaatgtctacttgcagaaagattgtgaactggagaagtcacttgaaattccctgaagaggcaaagcttcctcctgaagctaaggctctcatcagcaagcttttgtgtaatgttgagcatcgacttggtacaaaaggagcccatgaaataaaagcgcatccatggttcggaggtgttcagtgggagaagttgtatcagatgaaagctgctttcataccagaagttaatggagagttggatactcagaattttgagaatttcgaggagattggaactcaaattcaaagttcatccaagtcaggcccttggagaaagatgcttccatccaaagatgcaaactttgttgggtatacgtacaagaactttgaaattgtgaatgatgatgaagtggcaggaattgcagagttgaagaaaaagagttccaaaccaaagcgaccaaccatcaagacaatgtttgagaggatggacgaagaggagcctgttcaagggagtttcttaagtatgttgcccccggagggccaaccttcgtcccactccagcgttccacaggaaaaataccaacctcgccgtaaataggatatggaggtttggaaagtaaagcataggaaagtaaaacaagaaaaaaaatcgtctgctgccttttgatctgttccctgtctaggttttgtaaatcctaaccaatgcgttctttagtcaaatgcttaaaaaaatctctccggcaaaatagtgtattgcatttgatgtgaacatcagtgttcggctgtatattgtgtcaccgttctaacttcgaagtgatgcttctcagccatattggcaaaaacttgccataccaggagcaggcaagttgtgctgctgtgggcctgtggcaagcatgggctatgtgtatgacctttagatgtttctttggggtcatggttcataggagcttgatcaacttgcacttgtagcatactccctctatacccaaaagctcctatgaattgagggactgcattcttttcggacagattttgacttacctgggattaaaacccactcaatccctctcaattcatatggattggagttgaatcgaac

SEQ ID NO: 136043 - DNA, 1968 bp, Zea Mays
gactactcacaaggccggagttctggaccctgatgcatactcggtagtcggtacgcacgagtattgcacgtgacaaggcctgtcactgtcagccatctgacgagggaaaaaaaacaagcaactgatgacggccgctgccgttcgatttgagagccaccgattaacccatccatccacctcgccgccgccggagagtatggttgagcggcggtacaccgaggaggaggaggccctcgagatcaagtccctccgccgcatcatcgccgcctacgccaactatcaagatgctgcagaaagggatgtcgagagatatgagcggtcattcaaaatgcttcctacagcgcacaagaaacttcttttccacctcggtctgaagtaccaaagtctgagatggtgtatatccatgaatgcatcttttatcatgaaaatgcttgaggcgtttgaacctccttttgacatgagtcagtatgtagatgatgatgttcatgctcatccatcaatcttgcatgaccatagtcatatggattgcactcattccagcgagaggggtgattgctctataattgctatctccagaagcaatttatcattggatgagcagcatgatagtcccaaagaatataccaagagacatgaaccttcaagagaaactgataataataagggaggggaagatcacatggcaggctgctcccagcctgttggcaacatggggatgtctcaaggtgcaggcattgcatgtaatggtgataaaaatacgggtgcagcagcttatttccaggataaagatgtctctgcatcttctgctattgaaaatgtagcactgcggcactgcacagcttcatcgctcaagttaaatgttcctccaattgatgttgacaaggtaagatgcatagtaagaaatatcgtgagagattggggtgatgagggtcaaaaggaacgtgatgagtgctataagcccattcttgaggagcttaatcgcctttttcctaaccggagcgatcagaggcctccttcatgtcttgtccctggtgctgggcttgggagattggctcttgatatatcttctctgggttttgtaagccaagggaatgaattctcatattacatgctgatctgttcaaatttcatcctgaaccacactcaagaagctaatgagtggtccatatatccttggatacatagcaactgcaattctctttctgacaacgatcaacttcgtcctgtttcatttcctgacattcatccctcaagtgcaggtatcacagagggattttcaatgtgcgctggggactttgtagaggtctacagcgaggaaagccaagaatctgcatgggatgctgttgtaacttgctttttcctggatacggcacacaatatcgttgaatacatcgagatcatatcaaaagttctcaaggatggtggggtctggattaacttgggtccccttctgtatcactttgctgattcatatgggccagatgatgatatgtctattgaattaagtttggaagatgtgaaaaaggttgcttaccattatggatttacaatggaggtggagaaaatgatcgagactacttacactgcaaacatgaaagcaatgatgcagaatcggtaccgtgcagcattctggacaatgaggaaagatgcgtctcggtcaaaagcttgtaagcctcgttgaagtgaagatcatccatggcggacgatcagttcgtgccatcattattcactgttgtattcaaactccacacaggccgtgccagaccaagttagatagatatatcagatgagctgcctgattcacagaatataattggcttaacataggaaaggaggtgctgagccacgctagctagctcatccttttctcctatatcacagatattcaaactgtactatgaactctgtaagaatgagcaataaactaagcagacagaagttaaaaatagaagtaacagaaatttagaa

SEQ ID NO: 136044 - DNA, 5037 bp, Zea Mays
atgacggccgctgccgttcgatttgagagccaccgattaacccatccatccacctcgccgccgccggagagtatggttgagcggcggtacaccgaggaggaggaggccctcgagatcaagtccctccgccgcatcatcgccgcctacgccaactatcaagatgctgcagaaagggatgtcgagagatatgagcggtcattcaaaatgcttcctacagcgcacaagaaacttcttttccacctcggtctgaagtaccaaagtctgagatggtgtatatccatgaatgcatcttttatcatgaaaatgcttgaggcgtttgaacctccttttgacatgagtcagtatgtagatgatgatgttcatgctcatccatcaatcttgcatgaccatagtcatatggattgcactcattccagcgagaggggtgattgctctataattgctatctccagaagcaatttatcattggatgagcagcatgatagtcccaaagaatataccaagagacatgaaccttcaagagaaactgataataataagggaggggaagatcacatggcaggctgctcccagcctgttggcaacatggggatgtctcaaggtgcaggcattgcatgtaatggtgataaaaatacgggtgcagcagcttatttccaggataaagatgtctctgcatcttctgctattgaaaattggaagggcgggcctggtgcagtggtagagcctaccgtctgtaaccggaaggtagcactgcggcactgcacagcttcatcgctcaagttaaatgttcctccaattgatgttgacaaggtaagatgcatagtaagaaatatcgtgagagattggggtgatgagggtcaaaaggaacgtgatgagtgctataagcccattcttgaggagcttaatcgcctttttcctaaccggagcgatcagaggcctccttcatgtcttgtccctggtgctgggcttgggagattggctcttgatatatcttctctggcactcaagaagctaatgagtggtccatatatccttggatacatagcaactgcaattctctttctgacaacgatcaacttcgtcctgtttcatttcctgacattcatccctcaaggtatcacagagggattttcaatgtgcgctggggactttgtagaggtctacagcgaggaaagccaagaatctgcatgggatgctgttgtaacttgctttttcctggatacggcacacaatatcgttgaatacatcgagatcatatcaaaagttctcaaggatggtggggtctggattaacttgggtccccttctgtatcactttgctgattcatatgggccagatgatgatatgtctattgaattaagtttggaagatgtgaaaaaggttgcttaccattatggatttacaatggaggtggagaaaatgatcgagactacttacactgcaaacatgaaagcaatgatgcagttattggatattcggcccgactggttgtatatgggttgggttagtgcaacttttgaaagttcagttcagaaaaagctacggcgagaagccgagaagactagttgcggccgttggcccgccgaagcccaatcattcgcaggagacctcgtcgctggtttgcctccaaatgtgctcgccacgatcgcagccgtagaggaagacgcgggccttttttttgtctctttctctttctctacctgccgcgcgccggcgccggcggtcaaggtgaagttcttctctttatgtatcgtcatgaacaaagttatgtggtctttattagtaggtcaagagctctggctatcttttcaagaccatgctgagtgtacagaacttggacaatctttggcggacttcggaaaggcgattaagcttttgggctcttgtgaaggagatttgatggaaaaggtgttttctgaagttggttcaaagtcagagatgttgtcaataaagctgcaaagagaggtgttcgcgctcccaccacccgccttcgtccagatctgccttcgcgcgttcctgggtgggggcggcgatggcggtgccacggggccaacacagtcggcggctcacacaatcggagcagatggacagacacaatcggttttaaaagtatcatacaatcggttttacaaatgtctcattttctatactaaatatttttattatttttatcatactataaggcaatcagagcagatggacagacacaattgagccatgaaatagctttggagctaagtcagaggagtgctgctgctggactaaggccgattggagcagtggtcttcatgcaacggggtgtcctgaaggtttgcttgaggactactgacagtacagttaatacatcagagattgcaaaggcatatggcggaggtggaaaacgaagttcgagttcattcactctaagaatggatgagttcaacatctggacttcagtgaactcatgaattgaactggagaggtcacatagtgttcatactgtgggaactcgcaaccagctcatctgggcatggattccctcagtggtgaacatgtgaagatggggtggtctttttgtgctccggtatgagaggaaggaaaacaaaatcttagtctaacctaccatgttgatatgagcttacaggagaataatctcttcgatatgaatgactggagagcaatttggaggcataatgcttaagccgttcaagagaagatttgatgcctttaaatgaaaggtttgctggtacatcaaaagacgtattttatgctctttctaatctttctccagtagacctatgtgcttaattttagagatgataagggtggtgcgggccgaagatctgtcatactcctaggggccaattatagcttacacttatgttgttattagttttgaatgctgaacatacatggagatgggtagctcagctcagcttggatataacttggtttctatccaaactaatactttgctccatagggaatgcatctggcaacggaaattgttgtcaagctccagtagcagaaaggatcatcttcaattattgtaatcctgctccttaataatacattcttggatcttgctctgggcttaaaaaatctgcatcaccaaattgttcctcgttgcgaacatttatgtaatacagaaccttagaaactggaaatgtttattccattccggtaatttgggaatgatctgtgttaaaatcctttttaagtgtcataccacgcactatttttctgttcctcaactctatcgatcccataacctatttctgttaactggttactaaggacatgtacaatcccataaccaaattggtgggtatgcaatgcgtcaatgaaaaaaccatttcttcagtcctgtaatgttgttccgattgcgtcaatgaaaaaactgtaatttttgaccggggagatggtagcactagcatgtggggattaaagttcctaaatgttcagtactgtcctaaacacttgttttatcttttttgagtggaagtccgacgtccgagaggggctcgccattgggcttggcatgggcacagtcatgctgctcctcttctgcggctactcgctggtgatttgatatggctctaagctgatcctggagatggtgtacaccggagccaaggtcacaacatgatctttgtagtcctcactggttctcttttctcaaattgaccatggtgttgtaaatttgatcaatgaagaagattcaagaattaccgttttactggattgccatgggatttcgccattcagatttccaatgcaaatgatgaggtcgtttatcactgtggttcaagaaaactacccgaatcgtcttggggtattgtttgtcatccgccttcctccagttgtcagagttattgcacagacatttcttcaagatacaaaccaaccaaggctgactacaagttaaagatgctctgtaaaaaggaaggatcagtttgactatatctttttgctggtagattgcaatatcacatggtatccgtggagatgaggacgacattgcctccaagtctgctccaccggcatccatcgacggtgcaagatccagcagatagattgatggcaaagaggacgactccatgtccaggcgtactccccgccttgcatcgagattgctaggtcataatcgaagggtttacagggaggagatctgaacatagctcttcaatcccaaagttaacatcgttggttaccataattcttactgcttgcaagcccttttagaatattactgctgcgaggttcttgcaaagtccttgatgaagaagtcgaaggtgacgaacgccgaggccgtcatccttgatcgacgccaagaacctcacagcgcacctccttgtgatgctcttttctccaatgtcttctcttatctacatgcaggaaaaaatctacatgtttgatggcgtggatcagaaaaatgtggaaggacaagatttaagatgcactgccatggttggcggtctatttactgcatctcgaagcggcttgcattcaaaggttctgcacctctaaatatttctggtcgtgaagctgtctatgaaaggaagatgaaaattcagcaagttggattgatttatctttcccccctatggctgattcagcaacctgtattaattagtctatttgacatttgatatttcaatgctgttataggactatattgtacatgaccttgaaggagctgaccatgtgacagaccttgatcataaccatgttgcagagttgaagatattaggactatattaaacattgctgcatatagcatcaggtacacaattttgctatcatttttataaaataaatatgtaccaaaggtctcaaacaacaatactcaatttgaatggcacatactttggaggatatgatgacatcagacttagaagtcaaacaacatcaaacttatcatcaggtatgttttgaattatcttacgttttttagattgaaaataactatttctgaaaccttattttcactctgagcctgtgaggacagtttatccttagttaatcagcactttatatctgttatttgcctattag

SEQ ID NO: 136045 - DNA, 5464 bp, Zea Mays
atgacggccgctgccgttcgatttgagagccaccgattaacccatccatccacctcgccgccgccggagagtatggttgagcggcggtacaccgaggaggaggaggccctcgagatcaagtccctccgccgcatcatcgccgcctacgccaactatcaagatgctgcagaaagggatgtcgagagatatgagcggtcattcaaaatgcttcctacagcgcacaagaaacttcttttccacctcggtctgaagtaccaaagtctgagatggtgtatatccatgaatgcatcttttatcatgaaaatgcttgaggcgtttgaacctccttttgacatgagtcagtatgtagatgatgatgttcatgctcatccatcaatcttgcatgaccatagtcatatggattgcactcattccagcgagaggggtgattgctctataattgctatctccagaagcaatttatcattggatgagcagcatgatagtcccaaagaatataccaagagacatgaaccttcaagagaaactgataataataagggaggggaagatcacatggcaggctgctcccagcctgttggcaacatggggatgtctcaaggtgcaggcattgcatgtaatggtgataaaaatacgggtgcagcagcttatttccaggataaagatgtctctgcatcttctgctattgaaaattggaagggcgggcctggtgcagtggtagagcctaccgtctgtaaccggaaggtagcactgcggcactgcacagcttcatcgctcaagttaaatgttcctccaattgatgttgacaaggtaagatgcatagtaagaaatatcgtgagagattggggtgatgagggtcaaaaggaacgtgatgagtgctataagcccattcttgaggagcttaatcgcctttttcctaaccggagcgatcagaggcctccttcatgtcttgtccctggtgctgggcttgggagattggctcttgatatatcttctctggcactcaagaagctaatgagtggtccatatatccttggatacatagcaactgcaattctctttctgacaacgatcaacttcgtcctgtttcatttcctgacattcatccctcaaggtatcacagagggattttcaatgtgcgctggggactttgtagaggtctacagcgaggaaagccaagaatctgcatgggatgctgttgtaacttgctttttcctggatacggcacacaatatcgttgaatacatcgagatcatatcaaaagttctcaaggatggtggggtctggattaacttgggtccccttctgtatcactttgctgattcatatgggccagatgatgatatgtctattgaattaagtttggaagatgtgaaaaaggttgcttaccattatggatttacaatggaggtggagaaaatgatcgagactacttacactgcaaacatgaaagcaatgatgcagttattggatattcggcccgactggttgtatatgggttgggttagtgcaacttttgaaagttcagttcagaaaaagctacggcgagaagccgagaagactagttgcggccgttggcccgccgaagcccaatcattcgcaggagacctcgtcgctggtttgcctccaaatgtgctcgccacgatcgcagccgtagaggaagacgcgggccttttttttgtctctttctctttctctacctgccgcgcgccggcgccggcggtcaaggtgaagttcttctctttatgtatcgtcatgaacaaagttatgtggtctttattagtaggtcaagagctctggctatcttttcaagaccatgctgagtgtacagaacttggacaatctttggcggacttcggaaaggcgattaagcttttgggctcttgtgaaggagatttgatggaaaaggtgttttctgaagttggttcaaagtcagagatgttgtcaataaagctgcaaagagaggtgttcgcgctcccaccacccgccttcgtccagatctgccttcgcgcgttcctgggtgggggcggcgatggcggtgccacggggccaacacagtcggcggctcacacaatcggagcagatggacagacacaatcggttttaaaagtatcatacaatcggttttacaaatgtctcattttctatactaaatatttttattatttttatcatactataaggcaatcagagcagatggacagacacaattgagccatgaaatagctttggagctaagtcagaggagtgctgctgctggactaaggccgattggagcagtggtcttcatgcaacggggtgtcctgaaggtttgcttgaggactactgacagtacagttaatacatcagagattgcaaaggcatatggcggaggtggaaaacgaagttcgagttcattcactctaagaatggatgagttcaacatctggacttcagtgaactcatgaattgaactggagaggtcacatagtgttcatactgtgggaactcgcaaccagctcatctgggcatggattccctcagtggtgaacatgtgaagatggggtggtctttttgtgctccggtatgagaggaaggaaaacaaaatcttagtctaacctaccatgttgatatgagcttacaggagaataatctcttcgatatgaatgactggagagcaatttggaggcataatgcttaagccgttcaagagaagatttgatgcctttaaatgaaaggtttgctggtacatcaaaagacgtattttatgctctttctaatctttctccagtagacctatgtgcttaattttagagatgataagggtggtgcgggccgaagatctgtcatactcctaggggccaattatagcttacacttatgttgttattagttttgaatgctgaacatacatggagatgggtagctcagctcagcttggatataacttggtttctatccaaactaatactttgctccatagggaatgcatctggcaacggaaattgttgtcaagctccagtagcagaaaggatcatcttcaattattgtaatcctgctccttaataatacattcttggatcttgctctgggcttaaaaaatctgcatcaccaaattgttcctcgttgcgaacatttatgtaatacagaaccttagaaactggaaatgtttattccattccggtaatttgggaatgatctgtgttaaaatcctttttaagtgtcataccacgcactatttttctgttcctcaactctatcgatcccataacctatttctgttaactggttactaaggacatgtacaatcccataaccaaattggtgggtatgcaatgcgtcaatgaaaaaaccatttcttcagtcctgtaatgttgttccgattgcgtcaatgaaaaaactgtaatttttgaccggggagatggtagcactagcatgtggggattaaagttcctaaatgttcagtactgtcctaaacacttgttttatcttttttgagtggaagtccgacgtccgagaggggctcgccattgggcttggcatgggcacagtcatgctgctcctcttctgcggctactcgctggtgatttgatatggctctaagctgatcctggagatggtgtacaccggagccaaggtcacaacatgatctttgtagtcctcactggttctcttttctcaaattgaccatggtgttgtaaatttgatcaatgaagaagattcaagaattaccgttttactggattgccatgggatttcgccattcagatttccaatgcaaatgatgaggtcgtttatcactgtggttcaagaaaactacccgaatcgtcttggggtattgtttgtcatccgccttcctccagttgtcagagttattgcacagacatttcttcaaattgcaatatcacatggtatccgtggagatgaggacgacattgcctccaagtctgctccaccggcatccatcgacggtgcaagatccagcagatagattgatggcaaagaggacgactccatgtccaggcgtactccccgccttgcatcgagattgctaggtcataatcgaagggtttacagggaggagatctgaacatagctcttcaatcccaaagttaacatcgttggttaccataattcttactgcttgcaagcccttttagaatattactgctgcgaggttcttgcaaagtccttgatgaagaagtcgaaggtgacgaacgccgaggccgtcatccttgatcgacgccaagaacctcacagcgcacctccttgtgatgctcttttctccaatgtcttctcttatctacatgcaggaaaaaatctacatgtttgatggcgtggatcagaaaaatgtggaaggacaagatttaagatgcactgccatggttggcggtctatttactgcatctcgaagcggcttgcattcaaaggttctgcacctctaaatatttctggtcgtgaagctgtctatgaaaggaagatgaaaattcagcaagactatattgtacatgaccttgaaggagctgaccatgtgacagaccttgatcataaccatgttgcagagttgaagatattaggactatattaaacattgctgcatatagcatcaggatatgatgacatcagacttagaagtcaaacaacatcaaacttatcatcagcaacaacttggtttccgtcgctgcccaaacttcagcagaggcgatctaagaagaagcaagcgtatcggctcatgttctgacggccgtgttcacgtggtgtaagatctgcattgtggaatccttcgcccggacaagagagattggatcctcccgtccagacaacctgatagaacgacagtgtataagaacagggctcttaggacgccttttgtcaagttgggtcataactctaccctgagaattgagatagatgatcatgtggtgcaagatattgagtccctaatctttgatgacacacataacaaatggtaagcgtctccgtggatggagcctgaagtatattcaaattcaaggcatgccacaaagcatctcgcgtgtgggatgctccggcgtgtggaaagtagaaaagccaaataaatgggtacatgtacagcaggcgtgagttcttaaatactcagattccttgtccataggcaaatgcatagttcatacgaatcagagtacacgatgcacacaacttgatgtctctatcgttgttttcaacatgatgaacatgcgaatttcgtggtattaattgggaccgtctgatttctcatggatccatagttctattctacaagcatttgagataaagggatcatgcaaactgaaaaatgggagatgacattactgtacaacttagtataattcataaacgggatgtttggctgacataactccggtgttgactctggattttttgagagccgtagtatatttttgtttttgttttggaatacctcatatactgcttcggcagtcttggtattcaatcttgaaatacc

SEQ ID NO: 136046 - DNA, 5348 bp, Zea Mays
atgacggccgctgccgttcgatttgagagccaccgattaacccatccatccacctcgccgccgccggagagtatggttgagcggcggtacaccgaggaggaggaggccctcgagatcaagtccctccgccgcatcatcgccgcctacgccaactatcaagatgctgcagaaagggatgtcgagagatatgagcggtcattcaaaatgcttcctacagcgcacaagaaacttcttttccacctcggtctgaagtaccaaagtctgagatggtgtatatccatgaatgcatcttttatcatgaaaatgcttgaggcgtttgaacctccttttgacatgagtcagtatgtagatgatgatgttcatgctcatccatcaatcttgcatgaccatagtcatatggattgcactcattccagcgagaggggtgattgctctataattgctatctccagaagcaatttatcattggatgagcagcatgatagtcccaaagaatataccaagagacatgaaccttcaagagaaactgataataataagggaggggaagatcacatggcaggctgctcccagcctgttggcaacatggggatgtctcaaggtgcaggcattgcatgtaatggtgataaaaatacgggtgcagcagcttatttccaggataaagatgtctctgcatcttctgctattgaaaattggaagggcgggcctggtgcagtggtagagcctaccgtctgtaaccggaaggtagcactgcggcactgcacagcttcatcgctcaagttaaatgttcctccaattgatgttgacaaggtaagatgcatagtaagaaatatcgtgagagattggggtgatgagggtcaaaaggaacgtgatgagtgctataagcccattcttgaggagcttaatcgcctttttcctaaccggagcgatcagaggcctccttcatgtcttgtccctggtgctgggcttgggagattggctcttgatatatcttctctggcactcaagaagctaatgagtggtccatatatccttggatacatagcaactgcaattctctttctgacaacgatcaacttcgtcctgtttcatttcctgacattcatccctcaaggtatcacagagggattttcaatgtgcgctggggactttgtagaggtctacagcgaggaaagccaagaatctgcatgggatgctgttgtaacttgctttttcctggatacggcacacaatatcgttgaatacatcgagatcatatcaaaagttctcaaggatggtggggtctggattaacttgggtccccttctgtatcactttgctgattcatatgggccagatgatgatatgtctattgaattaagtttggaagatgtgaaaaaggttgcttaccattatggatttacaatggaggtggagaaaatgatcgagactacttacactgcaaacatgaaagcaatgatgcagttattggatattcggcccgactggttgtatatgggttgggttagtgcaacttttgaaagttcagttcagaaaaagctacggcgagaagccgagaagactagttgcggccgttggcccgccgaagcccaatcattcgcaggagacctcgtcgctggtttgcctccaaatgtgctcgccacgatcgcagccgtagaggaagacgcgggccttttttttgtctctttctctttctctacctgccgcgcgccggcgccggcggtcaaggtgaagttcttctctttatgtatcgtcatgaacaaagttatgtggtctttattagtaggtcaagagctctggctatcttttcaagaccatgctgagtgtacagaacttggacaatctttggcggacttcggaaaggcgattaagcttttgggctcttgtgaaggagatttgatggaaaaggtgttttctgaagttggttcaaagtcagagatgttgtcaataaagctgcaaagagaggtgttcgcgctcccaccacccgccttcgtccagatctgccttcgcgcgttcctgggtgggggcggcgatggcggtgccacggggccaacacagtcggcggctcacacaatcggagcagatggacagacacaatcggttttaaaagtatcatacaatcggttttacaaatgtctcattttctatactaaatatttttattatttttatcatactataaggcaatcagagcagatggacagacacaattgagccatgaaatagctttggagctaagtcagaggagtgctgctgctggactaaggccgattggagcagtggtcttcatgcaacggggtgtcctgaaggtttgcttgaggactactgacagtacagttaatacatcagagattgcaaaggcatatggcggaggtggaaaacgaagttcgagttcattcactctaagaatggatgagttcaacatctggacttcagtgaactcatgaattgaactggagaggtcacatagtgttcatactgtgggaactcgcaaccagctcatctgggcatggattccctcagtggtgaacatgtgaagatggggtggtctttttgtgctccggtatgagaggaaggaaaacaaaatcttagtctaacctaccatgttgatatgagcttacaggagaataatctcttcgatatgaatgactggagagcaatttggaggcataatgcttaagccgttcaagagaagatttgatgcctttaaatgaaaggtttgctggtacatcaaaagacgtattttatgctctttctaatctttctccagtagacctatgtgcttaattttagagatgataagggtggtgcgggccgaagatctgtcatactcctaggggccaattatagcttacacttatgttgttattagttttgaatgctgaacatacatggagatgggtagctcagctcagcttggatataacttggtttctatccaaactaatactttgctccatagggaatgcatctggcaacggaaattgttgtcaagctccagtagcagaaaggatcatcttcaattattgtaatcctgctccttaataatacattcttggatcttgctctgggcttaaaaaatctgcatcaccaaattgttcctcgttgcgaacatttatgtaatacagaaccttagaaactggaaatgtttattccattccggtaatttgggaatgatctgtgttaaaatcctttttaagtgtcataccacgcactatttttctgttcctcaactctatcgatcccataacctatttctgttaactggttactaaggacatgtacaatcccataaccaaattggtgggtatgcaatgcgtcaatgaaaaaaccatttcttcagtcctgtaatgttgttccgattgcgtcaatgaaaaaactgtaatttttgaccggggagatggtagcactagcatgtggggattaaagttcctaaatgttcagtactgtcctaaacacttgttttatcttttttgagtggaagtccgacgtccgagaggggctcgccattgggcttggcatgggcacagtcatgctgctcctcttctgcggctactcgctggtgatttgatatggctctaagctgatcctggagatggtgtacaccggagccaaggtcacaacatgatctttgtagtcctcactggttctcttttctcaaattgaccatggtgttgtaaatttgatcaatgaagaagattcaagaattaccgttttactggattgccatgggatttcgccattcagatttccaatgcaaatgatgaggtcgtttatcactgtggttcaagaaaactacccgaatcgtcttggggtattgtttgtcatccgccttcctccagttgtcagagttattgcacagacatttcttcaaattgcaatatcacatggtatccgtggagatgaggacgacattgcctccaagtctgctccaccggcatccatcgacggtgcaagatccagcagatagattgatggcaaagaggacgactccatgtccaggcgtactccccgccttgcatcgagattgctaggtcataatcgaagggtttacagggaggagatctgaacatagctcttcaatcccaaagttaacatcgttggttaccataattcttactgcttgcaagcccttttagaatattactgctgcgaggttcttgcaaagtccttgatgaagaagtcgaaggtgacgaacgccgaggccgtcatccttgatcgacgccaagaacctcacagcgcacctccttgtgatgctcttttctccaatgtcttctcttatctacatgcaggaaaaaatctacatgtttgatggcgtggatcagaaaaatgtggaaggacaagatttaagatgcactgccatggttggcggtctatttactgcatctcgaagcggcttgcattcaaaggactatattgtacatgaccttgaaggagctgaccatgtgacagaccttgatcataaccatgttgcagagttgaagatattaggactatattaaacattgctgcatatagcatcagcaacaacttggtttccgtcgctgcccaaacttcagcagaggcgatctaagaagaagcaagcgtatcggctcatgttctgacggccgtgttcacgtggtgtaagatctgcattgtggaatccttcgcccggacaagagagattggatcctcccgtccagacaacctgatagaacgacagtgtataagaacagggctcttaggacgccttttgtcaagttgggtcataactctaccctgagaattgagatagatgatcatgtggtgcaagatattgagtccctaatctttgatgacacacataacaaatggtaagcgtctccgtggatggagcctgaagtatattcaaattcaaggcatgccacaaagcatctcgcgtgtgggatgctccggcgtgtggaaagtagaaaagccaaataaatgggtacatgtacagcaggcgtgagttcttaaatactcagattccttgtccataggcaaatgcatagttcatacgaatcagagtacacgatgcacacaacttgatgtctctatcgttgttttcaacatgatgaacatgcgaatttcgtggtattaattgggaccgtctgatttctcatggatccatagttctattctacaagcatttgagataaagggatcatgcaaactgaaaaatgggagatgacattactgtacaacttagtataattcataaacgggatgtttggctgacataactccggtgttgactctggattttttgagagccgtagtatatttttgtttttgttttggaatacctcatatactgcttcggcagtcttggtattcaatcttgaaatacc

SEQ ID NO: 136047 - DNA, 1056 bp, Zea Mays
gttcccccacctccccacccccaccccgcgtgagccgccgccgccctgcctcccacctccagtccgccgctctcccacggatcgtgctccctccccatgccctccttcttactccttaccgcggagtccgaggccactcgtggccttcggtgcctcctccgcatcggcgacctcgcctgacacggctgccgtctctcagtcggcctctcttcacccttcggcctggtctctgctcccctctcttttctggttgttccctatggatggttggcgcctgaagggcggatggatccgatggaaagctagcttctccggatccggtcagatcatatctcccggtaacccgttccgatcaacctcttccggtattttttcagaggaaaggttggccaacggcgttccggtggttggatttgtatttggtggcggtggactccggttatgtccactgattgcttgctgttcggttcgcttaagtggtaaagctgatgtctttaggttagaagaataactaagattgggtaggaaggaaggatggtggattgggtagctagctgctggctgcttggttcaggagttggggttaaattagcgtctgaaatacttgtttggtttaggtattcctatgtagacgacctgattatgattcagggtgatttatcgtagcagtaatctgaagtttggtgtggtgtttgatctgtgtgagtcttgtgttaggtgagtcatgaacaaatttatgtggtctttattagtaggtcaaggtgaagttcttctctttatgtatcgtcatgaacaaagttatgtggtctttattagtaggtcaaggtgaagttcttctctttatgtatctatatcagcttagctgtgatatgcgtgtgagtcgtaaatttcgatatatgaaagtctgttcttgcatccgatcaggaattgtgaacatctctttcttcatatgcctctctttcgtgaaattggggatatgtctttcgtctagatttacttctgttcggctgctccgctggcggctgctgctgttcatgctcatgcacttggatgtca

SEQ ID NO: 136048 - DNA, 1566 bp, Zea Mays
catttcgagattgttttgactaatttcagcaaacaaataatgtttgttctgaattttattttccaaaaaaatatttgtcttaaacatgtgggcagacctggtgcagtggtgagagttgccatattttttggggtggggggcttgtctcggcttatcacttccctagaccccacttatgtgggagatcccagcactgggtctgccctttatttggctttaacattacgaggaactctagctcaaagacgatcaataagaacctcaatttttcttgtttttagcacggtatatcaagatgaattacacagtcctatttttgattcattagaacttggacaatctttggcggacttcggaaaggcgattaagcttttgggctcttgtgaaggagatttgatggaaaaggtgttttctgaagttggttcaaagtcagagatgttgtcaataaagctgcaaagagaggtgttcgcgctcccaccacccgccttcgtccagatctgccttcgcgcgttcctgggtgggggcggcgatggcggtgccacggggccaacacagtcggcggctcacacaatcggagcagatggacagacacaatcggttttaaaagcaatcagagcagatggacagacacaattgagccatgaaatagctttggagctaagtcagaggagtgctgctgctggactaaggccgattggagcagtggtcttcatgcaacggggtgtcctgaaggtttgcttgaggactactgacagtacagttaatacatcagagattgcaaagtggaagtccgacgtccgagaggggctcgccattgggcttggcatgggcacagtcatgctgctcctcttctgcggctactcgctgattgcaatatcacatggtatccgtggagatgaggacgacattgcctccaagtctgctccaccggcatccatcgacggtgcaaggtacggattcgagcctccggtccttcaatctagccaccaggtcataatcgaagggtttacagggaggagatctgaacatagctcttcaatcccaaagttaacatcgttggtaaaccccttctggtgttacctcacaaatatcactaaagtcattttagctttttgctgctccttatgtgcttcagattcagcaagaggttaccataattcttactgcttgcaagcccttttagaatattactgctgcgaggttcttgcaaagtccttgatgaagaagtcgaaggaaaaaatctacatgtttgatggcgtggatcagaaaaatgaagttatatctgtgatccagcaacaacttggtttccgtcgctgcccaaacttcagcagaggcgatctaagaagaagcaagcgtatcggctcatgttctgacggccgtgttcacgtggtagattggatcctcccgtccagacaacctgatagaacgacagtgtataagaacagggctcttaggacgccttttgtcaagttgggtcataactctaccctgagaattgagatagatgatcatgtggtgcaagatattgagtccctaatctttgatgacacacataacaaatggtaa

SEQ ID NO: 136049 - DNA, 2768 bp, Zea Mays
cgggacgggaggcacagccgcggataaataaagcgggggaggcgagctcccctgctagaccgacgacgtggtgagctgttcttccttccttccgcgcgcgcgcacaccctctctctctctctctctctctctctctctctctctgctgtgcccgcggctattaagcccgttctggatgagtcggtgagggaggacgacgaggagagccggggtcatcggatcgctgccgagggttctccgtttgtgcgacagagaggtggtggtggtgacggtgtcagtgcgtgcgtgcgtgcgtgccaatggcgccgtcgtggtgggggcgggacgcgagggccaacggcgtcgttggcggcggcacgcccgtggtggtcaggatggagaaccccaactggtgcatctccgaggtcgccgccgcggcgtcggaggtggacgcgccgccgccggcggcggccgggggcggcaaggccgggcggcggggcaagaacgcgcgccagatcacgtgggtgctgctcctcagggcgcaccgcgccgcgggccgcctcacggggggcggcctccgccgcgctctccgtggccgccgccgcgcgccgcagggtggcggcgggccggaccgactccgacgccgacgccgacgccgccccgggcgagagcgcggcgctccgggcgcgctcctacggctgcatccgcctcttcctcgccctctcgctgctgctgctcgccgtcgaggtcgcggcctacctccggggctggcacctcgaggtggacgtgggcgccgggatcctcgccgtcgacggcctcttcgccgccgcctacgcggcctggatgcgcgcccgcctcgactacctcgcgccgccgctgcagttcctaaccaacgcctgcgtcctcctcttcctggtccagagcgtcgaccgcctcgtgctctgcctcggctgcttctggatcaagctcaagggcgtcaggcccgtgccgccgctgcccgccgacaaggaggacgtcgaggccggtcccgacggcgtccccatggtgctcgtgcagatgcccatgtgcaatgagagagaggtgtaccagcaatccatcggtgcggtttgcagcctggactggccaaggtcaaatttcctggtccaggtgttggatgactctgatgatgctaccacttcggcacttatcaaggaggaggtggagaaatggcagcgagagggtgtgcgcatagtataccggcaccgggtgatccgggatggctacaaggctggaaacctgaaatcagccatgaactgcagttacgtgaaagactatgagttcgttgtcatcttcgatgctgatttccaaccacaggcggacttcctgaagcgcaccgtgccccatttcaagggaaaggatgacgtcgggttggttcaggcgagatggtcgttcgtaaacaaggatgagaacttgctgaccaggcttcagaacataaatctttgcttccacttcgaggtggagcagcaggtgaacggggcgtttctcaacttcttcgggttcaatggcaccgcgggagtctggagaatcaaggcgcttgaggagtctggaggatggatggagaggacgacggtggaggacatggacatagctgttcgagcgcacctcaaagggtggaagtttctctttctaaacgatgtcgagtgtcagtgtgaattgccagaatcgtatgaagcgtacagaaagcagcagcaccggtggcactcaggtcccatgcaattgtttaggctctgctttgtggatataatcaaatctaagatcggtttctggaagaagttcaacctcatattcctcttcttcctgctccggaagctgatactacccttctactccttcaccctcttctgcgtgatcctccccatgacgatgttcgtccccgaagccgagctccccgcgtgggtggtgtgctacatcccggcgacgatgtccatcctcaacatcctcccgtccccgaaatcgttcccgttcatcgtcccgtacctgctgttcgagaacaccatgtcggtgaccaagttcaacgccatggtctccggcctgttccagctggggagcgcctacgagtgggtcgtcaccaagaagtcggggcgctcctccgagggcgacctcgtggccctcgtggagaagcactccaagcagcagagggtaggctcggcgcccaacctcgacgcgctgaccaaggagtcgaagggcaccgaggaggagaagaataagaagaagaggaagaagaagcacaacaggatctacaggaaggagctcgcgctgtccttcctcctgctgaccgcggccgcccgcagcttgctgtccgcccagggcgtccacttctacttcctcctgttccagggggtttcgttcttggtcgtcgggctcgacctgatcggcgagcaggtggattgatagcagttgaataatgggttatatatatatatatatatatatattttcgcttgaagaaatcctcgcaggcatcatcaaattcaaagggctctttgtgaagggaagagcgtcgccttcttggatgcggaaaccttgggtccctgttcctgttccaggaggggtcggaaacgtggggagctgtgtagataggtatagcttggggtttagcctgcgagatgcttttgttcttccaggtttcgattcttttgtaagaatatttgtgcccctacatgcaagggctcttttgtttttttctttttttgacagactttaccttcaaatgaagataatacttgtgttccattccatctcgctactac

SEQ ID NO: 136050 - DNA, 1938 bp, Zea Mays
cgggacgggaggcacagccgcggataaataaagcgggggaggcgagctcccctgctagaccgacgacgtgagcgtcgaccgcctcgtgctctgcctcggctgcttctggatcaagctcaagggcgtcaggcccgtgccgccgctgcccgccgacaaggaggacgtcgaggccggtcccgacggcgtccccatggtgctcgtgcagatgcccatgtgcaatgagagagaggtgtaccagcaatccatcggtgcggtttgcagcctggactggccaaggtcaaatttcctggtccaggtgttggatgactctgatgatgctaccacttcggcacttatcaaggaggaggtggagaaatggcagcgagagggtgtgcgcatagtataccggcaccgggtgatccgggatggctacaaggctggaaacctgaaatcagccatgaactgcagttacgtgaaagactatgagttcgttgtcatcttcgatgctgatttccaaccacaggcggacttcctgaagcgcaccgtgccccatttcaagggaaaggatgacgtcgggttggttcaggcgagatggtcgttcgtaaacaaggatgagaacttgctgaccaggcttcagaacataaatctttgcttccacttcgaggtggagcagcaggtgaacggggcgtttctcaacttcttcgggttcaatggcaccgcgggagtctggagaatcaaggcgcttgaggagtctggaggatggatggagaggacgacggtggaggacatggacatagctgttcgagcgcacctcaaagggtggaagtttctctttctaaacgatgtcgagtgtcagtgtgaattgccagaatcgtatgaagcgtacagaaagcagcagcaccggtggcactcaggtcccatgcaattgtttaggctctgctttgtggatataatcaaatctaagatcggtttctggaagaagttcaacctcatattcctcttcttcctgctccggaagctgatactacccttctactccttcaccctcttctgcgtgatcctccccatgacgatgttcgtccccgaagccgagctccccgcgtgggtggtgtgctacatcccggcgacgatgtccatcctcaacatcctcccgtccccgaaatcgttcccgttcatcgtcccgtacctgctgttcgagaacaccatgtcggtgaccaagttcaacgccatggtctccggcctgttccagctggggagcgcctacgagtgggtcgtcaccaagaagtcggggcgctcctccgagggcgacctcgtggccctcgtggagaagcactccaagcagcagagggtaggctcggcgcccaacctcgacgcgctgaccaaggagtcgaagggcaccgaggaggagaagaataagaagaagaggaagaagaagcacaacaggatctacaggaaggagctcgcgctgtccttcctcctgctgaccgcggccgcccgcagcttgctgtccgcccagggcgtccacttctacttcctcctgttccagggggtttcgttcttggtcgtcgggctcgacctgatcggcgagcaggtggattgatagcagttgaataatgggttatatatatatatatatatatatattttcgcttgaagaaatcctcgcaggcatcatcaaattcaaagggctctttgtgaagggaagagcgtcgccttcttggatgcggaaaccttgggtccctgttcctgttccaggaggggtcggaaacgtggggagctgtgtagataggtatagcttggggtttagcctgcgagatgcttttgttcttccaggtttcgattcttttgtaagaatatttgtgcccctacatgcaagggctcttttgtttttttctttttttgacagactttaccttcaaatgaagataatacttgtgttccattccatctcgctactac

SEQ ID NO: 136051 - DNA, 1412 bp, Zea Mays
aaaacaaacttcactacatcaacaattccaacatttcacagtatgtctcacagccatagcgatgaagactcttactcgagtgatagtgaggaggaaacacttatgcttgtcaatcttcttgtcctaaacatagaggcgagacgccacctgcaacgacggtcccgtttgcctcgacgggttattcatagagatcattttcgtggagaaaatcttatccatcatcactacttcgccgagaaccctgtgtatccaccccacgtctttcgtagaaggttctgcatgagtaggcctctcttcctgagaatcttgcaaggtcttcaacaacatgattcgtactttacacaacgggtagacgcaactggtatgcctggtctaggtccactacaaaaagtttgtgcggcattgcgggtactagcatatgggttaccttcagatgctgtagacgagtacattcaaataggggagtcgacagcgagggaatgccttcatcatttctgtcgaggtatcattgcatacttcagtgcctggtacctacgaactcctaacgaagctgacataacacgcatcatgcaccatagcgaatcaaggggtttcccagggatgttgggttctatagattgcatgcattgggagtggcggaactgtcctaccgcatggcgtggtcagttttgtggcagaaatggtcgagcgtctatgatcctagaagcagtggcaacgtatgacctttggatttggcatgctttctttggcatgcccgggacaaacaacgacgtgaacgtgctccaccgatcaccagttttcgaccccatgacatcaggccgaatgccacctgtgcattacacagttaatggtaatgcatataacttcggatattaccttgctgatggtatatacctgaactggccaactttcgtaaaagctataaggcacccatatgagcaaaagaaagtctatttcacacaaatgcaggaaagttgtcgaaaggatattgagcgtgcatttggagttcttcaagctaggtgggcggtgctgcgaggtccagcatatggttgggatcgtaatcgtttaactgaaattataactgcttgcatcataatgcacaacatgattgttgaagacgaaggggcatttgcagctaatactgattttggagataacacttcaacgagccaagcaccacatcttattgctgaaggaagggcagaatgggtgattaaccacttcgatcttcgtcgccaagaaagatcttgctccctccaaaatgaccttgtcgagcatttgtgggctcggcgtggtagcatgtaaacttgagcattcgtatgcacaagtttatggaaactagattctactatgtgtaatttccattcgcaagtcctacgtatttcagaaataaagaagtatttcagtgcaaa

SEQ ID NO: 136052 - DNA, 1345 bp, Zea Mays
atctgttccgttgcgtgctcctctctcactccacggtccacgactgccaccagcgcttcccgctttcccagccacccgtcgcctccgcgtgtcgccccatccagccatcagttccaccccagctgcgaatccggcgcgctactaaccgccgggggaccgaaatttccccagccgcaagtttcgggaccggaacaacaatggcagcagcagccgtcgcctccagttccaccccgcggccgctccggttggcgcagcgcggggcggtctctgcgcacgcgtcccaccacgtcagcgccccgccccaccgctcccgcaggccgcggctctccgtctcggcctcagccggggtggaggggaccagcgggtcggagcggttctacttcaacttcaccgggttccccttcccgctcggcccgttcctcaaccgccgcaccatccgcaccgaggtaacctctcgcccgcccgtaggccgcctcgccttttgctccccggcagcaactaccggactggaaatttcctcagtgtttctcgcgttggtgcgcgccggccgttggatcaggcggtgaagggcagcatatggctgttcgagcaggagcaggcgctgggcttcagcagcgtctccaccaacatccgcatgacggtcatcaagctcaagtccggtgggctctgggtgcacgcgcccatcgcgcccacgaaggagtgcatccagatgctcaaggagctggacgcgccggtggagcacatcgtgctgccgaccttcgcatacgagcacaaaatcttcgtcgggcccttctccaggaagttccccaaggctcagatatgggtggcgcccaggcagtggagctggccaatcaacctgccgctcgagttcttcgggatcttccgggccaagccgctcaaagatgaggatgacgccacgccctgggtcgccgaaatcgagcagaaggtgctcagctctccggaagttgggattgggccatatgtggaggtggcgttctaccataagccttcacggacactactggtgaccgatgctgtcatatttgttcctcaacagccaccggagtgtatcagcaaagaatctctgttggcatctgcgaagaatggactggcagtgaagctattgagcaaagggaaggaggttcccgatgaaccagttgttgacaataagctaaaccgtcagaaagggtgggagagaatggtacttcaaatactatttcttggtccgtcaaatctacttgagccaaatgcaagttttgctcaaatgtcgcaaaaattgatcgtctcacctattgtcaagacgctcgttttcagcaaagttccagagaaggtatgttcttgtgac

SEQ ID NO: 136053 - DNA, 1232 bp, Zea Mays
atctgttccgttgcgtgctcctctctcactccacggtccacgactgccaccagcgcttcccgctttcccagccacccgtcgcctccgcgtgtcgccccatccagccatcagttccaccccagctgcgaatccggcgcgctactaaccgccgggggaccgaaatttccccagccgcaagtttcgggaccggaacaacaatggcagcagcagccgtcgcctccagttccaccccgcggccgctccggttggcgcagcgcggggcggtctctgcgcacgcgtcccaccacgtcagcgccccgccccaccgctcccgcaggccgcggctctccgtctcggcctcagccggggtggaggggaccagcgggtcggagcggttctacttcaacttcaccgggttccccttcccgctcggcccgttcctcaaccgccgcaccatccgcaccgaggcggtgaagggcagcatatggctgttcgagcaggagcaggcgctgggcttcagcagcgtctccaccaacatccgcatgacggtcatcaagctcaagtccggtgggctctgggtgcacgcgcccatcgcgcccacgaaggagtgcatccagatgctcaaggagctggacgcgccggtggagcacatcgtgctgccgaccttcgcatacgagcacaaaatcttcgtcgggcccttctccaggaagttccccaaggctcagatatgggtggcgcccaggcagtggagctggccaatcaacctgccgctcgagttcttcgggatcttccgggccaagccgctcaaagatgaggatgacgccacgccctgggtcgccgaaatcgagcagaaggtgctcagctctccggaagttgggattgggccatatgtggaggtggcgttctaccataagccttcacggacactactggtgaccgatgctgtcatatttgttcctcaacagccaccggagtgtatcagcaaagaatctctgttggcatctgcgaagaatggactggcagtgaagctattgagcaaagggaaggaggttcccgatgaaccagttgttgacaataagctaaaccgtcagaaagggtgggagagaatggtacttcaaatactatttcttggtccgtcaaatctacttgagccaaatgcaagttttgctcaaatgtcgcaaaaattgatcgtctcacctattgtcaagacgctcgttttcagcaaagttccagagaagcagcaacaacaataa

SEQ ID NO: 136054 - DNA, 609 bp, Zea Mays
atgaggcacctcagaggcgtggggacctcaagtcgcagcggtggtgggaggtcttcgacgcaggcgaccgaggtgagggactgggttgacaggatcgctgccgactggcgattccgacggataatcccttgccacttcgcagccccaataaacgcgagccggtcagactttctggctgcctttgccttcctcgacgagttcctccccgaacgcgccgccgcggctcccggcctctcgctgctcctcgcctccttcatggggaaggcggccagctacttccctccggatgacatgaagacgctctcgtctctggacgagttcctggtctccgttggcgctgtcaagaaaaccgtctctgggaggaagaggtgacgccggtggattggatgtgcatgggtttttatatgaagggacagttgctgcagtgcgtgcttgaagcgtgggtacactgtcaaattttaatgtggttattagtggaggaaattactgtaggccctccctacagtacattcacttcaaaaaaaaaatagtgggggaaatggtacattaggctaaaatctaggagagcccatatgtcttgctgccttcaatagaaagccagatttttac

SEQ ID NO: 136055 - DNA, 674 bp, Zea Mays
atgcagcacagcagaaggggaaaaaaaagagcctgagtcaggcaggcctgacaggaacgatcctctacaggacaaaggaatcagcattaaaccaaatcctgactgttaatcacgctctggcccacaggtcattgacacatcaaccaggcttaaagtgcttgcctccttaggctgtctccagcagcgtcctctaaattccatcccctaaaggaatattctctgtcctttacagcacactctaaaagattctgtcctctatatattctcagtctccagcagtgtcccctaaattcggtctcctaaagctacagtgttaacagattccttttttccatttgtttttctgttttctttggtttgttcccatttcacgctatacaaatgatacgcaaaaaagtgtatttatcaattttcgaattgtcaaatttaattaacattgttattttgtgtgtaattgttattttgtgtgtaatttaattaacattgttatttcgtccagccccccttttttccatttgtttttctgttttctttggtttgttcccatttcacgctatacaaatgatacgcaaaaaagtgtatttatcaattttcgaattgtcaaatttaattaacattgttattttgtgtgtaattgttattttgtgtgtaatttaattaacattgttatttcg

SEQ ID NO: 136056 - DNA, 1591 bp, Zea Mays
tttacccccacaggccacagcgacgccagagagcgaaatcgagccgttggcgtccggacacgggcgggctcttctcccaaagggccaacggtgcgcccactccggtcagtcactgcacggccacgcgacggtgttcgttcgcagtcgcggcaaagaaaatcggggaaaatcaagcgccgcttcagcgtgcggtcgctgtttcgtccataaaaggagggaggacggcgcggagggcttgacgacactgcagaccactccccagttcagtccccacaccgagctctgcccatcgcgcgcacacacacactctctctcccaccgttcacggtccagtccagagagctcaagagctcctgcagccatggcggttcccctgcttctcctcctcctgctgtccgtgttcacagcctcagatgcggcgttctgcgtgtgcaagccgggcatgtccgaccagatgatgcagtcggccatcgactacgcctgcagcaagggggccgactgcgcctccaccaccaagggcgcgccgtgctacggcaacggcaacaaggtggccgtctgctcctacatctgcaacagctactaccagagccgcagcggcatgggcgccacctgcgacttcaacggcgtcgccaccctcaccggcaccgaccccagctccgggacctgcaagttcgcctccggccccagcagcgtaggcaccggcggcggcgctggtatgggcaccggcggagcaggcgctggcgtcggcggtggcacgggcgccggcgctggcacgggcgcgggcatgggtgccggcgctggaaccggagcaggcacgggcatgggcgccgggacggggaccagcaccggagctggcgctggcaccggcaccggcgccgggatcacgacccccggggccctgagcccgccgttcggcggcacgggcgcctacggcccgtcaggagcaggcagcactgactacaacgacgctgcggcgcggcgcgtctccaggctgcacgtggtggccgccctcgtcttcggcctcgccgccgccgccgcacctctcctccgctaggaggtgtaagtgggagggaggggggcgggcacgacacgcgcagtggatcccgctgtctggcgtgcgtgcgtgcctgcgctgggttttgatcgatcagccgtcgtcagcgtagtagcagcacggggtttactgttattcaactgaccctcttgtccttccccgtgctagtggtggtggtggctgccatgtgccatgtggtttggtgctctgtactagtggtagtagagatcctagggattcttttggtagttccggacatacgtgtcgacgtgttcttcagtcgtttttctttctttctgttttgttccttatgcctccgttgttgtgttaggctgtgtttttactagaactatgctagtgtctggtggcggccgctttccatgcattctgattctcccctgtaccttgagggtgcccagccacgtttggatccttgatgcagtcgggatcacatgcccagcatgatgctgcgccggtcattttgcccccacggtgaatggtcaggacgctgatctatgatatgattgcaggttggtt

SEQ ID NO: 136057 - DNA, 1588 bp, Zea Mays
tttacccccacaggccacagcgacgccagagagcgaaatcgagccgttggcgtccggacacgggcgggctcttctcccaaagggccaacggtgcgcccactccggtcagtcactgcacggccacgcgacggtgttcgttcgcagtcgcggcaaagaaaatcggggaaaatcaagcgccgcttcagcgtgcggtcgctgtttcgtccataaaaggagggaggacggcgcggagggcttgacgacactgcagaccactccccagttcagtccccacaccgagctctgcccatcgcgcgcacacacacactctctctcccaccgttcacggtccagtccagagagctcaagagctcctgcagccatggcggttcccctgcttctcctcctcctgctgtccgtgttcacagcctcagatgcggcgttctgcgtgtgcaagccgggcatgtccgaccagatgatgcagtcggccatcgactacgcctgcagcaagggggccgactgcgcctccaccaccaagggcgcgccgtgctacggcaacggcaacaaggtggccgtctgctcctacatctgcaacagctactaccagagccgcagcggcatgggcgccacctgcgacttcaacggcgtcgccaccctcaccggcaccgaccccagctccgggacctgcaagttcgcctccggccccagcgtaggcaccggcggcggcgctggtatgggcaccggcggagcaggcgctggcgtcggcggtggcacgggcgccggcgctggcacgggcgcgggcatgggtgccggcgctggaaccggagcaggcacgggcatgggcgccgggacggggaccagcaccggagctggcgctggcaccggcaccggcgccgggatcacgacccccggggccctgagcccgccgttcggcggcacgggcgcctacggcccgtcaggagcaggcagcactgactacaacgacgctgcggcgcggcgcgtctccaggctgcacgtggtggccgccctcgtcttcggcctcgccgccgccgccgcacctctcctccgctaggaggtgtaagtgggagggaggggggcgggcacgacacgcgcagtggatcccgctgtctggcgtgcgtgcgtgcctgcgctgggttttgatcgatcagccgtcgtcagcgtagtagcagcacggggtttactgttattcaactgaccctcttgtccttccccgtgctagtggtggtggtggctgccatgtgccatgtggtttggtgctctgtactagtggtagtagagatcctagggattcttttggtagttccggacatacgtgtcgacgtgttcttcagtcgtttttctttctttctgttttgttccttatgcctccgttgttgtgttaggctgtgtttttactagaactatgctagtgtctggtggcggccgctttccatgcattctgattctcccctgtaccttgagggtgcccagccacgtttggatccttgatgcagtcgggatcacatgcccagcatgatgctgcgccggtcattttgcccccacggtgaatggtcaggacgctgatctatgatatgattgcaggttggtt

SEQ ID NO: 136058 - DNA, 960 bp, Zea Mays
aagcgcgcggttcttccgtcggattaacgtgtcttgccgttgatttcttcctgcagcagcgtaggcaccggcggcggcgctggtatgggcaccggcggagcaggcgctggcgtcggcggtggcacgggcgccggcgctggcacgggcgcgggcatgggtgccggcgctggaaccggagcaggcacgggcatgggcgccgggacggggaccagcaccggagctggcgctggcaccggcaccggcgccgggatcacgacccccggggccctgagcccgccgttcggcggcacgggcgcctacggcccgtcaggagcaggcagcactgactacaacgacgctgcggcgcggcgcgtctccaggctgcacgtggtggccgccctcgtcttcggcctcgccgccgccgccgcacctctcctccgctaggaggtgtaagtgggagggaggggggcgggcacgacacgcgcagtggatcccgctgtctggcgtgcgtgcgtgcctgcgctgggttttgatcgatcagccgtcgtcagcgtagtagcagcacggggtttactgttattcaactgaccctcttgtccttccccgtgctagtggtggtggtggctgccatgtgccatgtggtttggtgctctgtactagtggtagtagagatcctagggattcttttggtagttccggacatacgtgtcgacgtgttcttcagtcgtttttctttctttctgttttgttccttatgcctccgttgttgtgttaggctgtgtttttactagaactatgctagtgtctggtggcggccgctttccatgcattctgattctcccctgtaccttgagggtgcccagccacgtttggatccttgatgcagtcgggatcacatgcccagcatgatgctgcgccggtcattttgcccccacggtgaatggtcaggacgctgatctatgatatgattgcaggttggtt

SEQ ID NO: 136059 - DNA, 107 bp, Zea Mays
ggcagtggtcgtcgactcgtcgcgtgatcggttggcatccgtccgcttgccgccggtggaccctgcgcttccttggtcacgaggaatgtacggaacattctcgactc

SEQ ID NO: 136060 - DNA, 288 bp, Zea Mays
tcgccatggcgcgcgggccgaaaacggagggcacggtggaacggagggaaaacgggaggagacgcaaggcaacgggcggcagggctgttcggccttgcgtttcgggtgaaaacgaggggttcgccatggcgaacgggccaaaaacggattttcggccacggccgcgaaaacgggcacgtggaagggcacgggaccctcccgtggtccccccgcgtgagacgtggaagttagggtgccccttagggaaaacgggtcacgctagcagaaacccctgattctgagcacgaa

SEQ ID NO: 136061 - DNA, 1887 bp, Zea Mays
cacaacgcacaagtagtagtagtgcatgcctgctcccatcatcatcagtacacactacaaacactaccaccatccagcagctagcagaaggcagaagcagctagtgtagatagccggcggctggctgagaccaccacctctccctttcctttcttctctttgctttgctccctctcatctcatcttcccttcccttctccagctaacactacagctttctagggctcacaccgcagcaccgatccagcgccgtccggtcgtcgatccacatcaccattattccatccccctgataacgatcgagccccagccctccctcgctctccgggctgagctagccggacgaattcgggcgtgcggcttcgagctctcgcttatatcagcgccgcgcgcgccggccggcggccggaggagccactatcatccccggcgtttgattcggccagagcagcggccatggtcgaatatatttgatctctctcgatctgatctgagctgagccggctggtggcccgggaaggacgaagtgtgtcgccacctataatttgatgatgtttgtgtcatcatgatcggtggctagcagaataagagatgataagcggcaacctcaacaatgaagagctggggggcggcgggtgcaccaaggccgaggggccgggcgcggccggcggcgccggcgccgtcgtcgcaaagagtcccgtgctgtcgagctcccggcactggccgccgtcgacggagtcgaggatcgtgcgcgtgtcgcgggtcttcggcggcaaggaccggcacagcaaggtgaggacggtcaaggggctgcgcgaccggcgcgtgcggctgtccgtgccgacggcgatccagctctacgacctccaggaccggctgggcctcagccagccgagcaaggtggtggactggctgctcgacgccgcgcaggacgagatcgacaagctgcctccgctccagttcccgccgcaagggcaggacctcgtcgcccatctcccgccgtccatggtggcgcccttcgccaacgttgcagccgaccgggccgccgccgccgctgccgccgcgaacgcgtcggccgcgatggccgaaggcggcaaacgccactgccacggaggcatcaaagggctcatgggcatgggcctcaacaattctatcggcctcgccaacgccaccatgccgctggctcacggcttgtactacacgcccggtgagtcttggaccaatggaggcaatgccgccgtccatgatcatcaggtgagccacggcggcacctcgcctcagacggtggctcaccactcgccgttctcgtctctgctgtctcttgctgctccggggccccagctcgtcttctactcgccggaaggcggcggcttcgccatgaaagaagccaccgatcatcagttcgctgtagatagcctcgatcactcgcaaggccagctctcactgagctcagctagaagcttccttcaccccggcaaccagggatgatattaggtcactgatctctactgctccaagaaggtacgtagaacaataaagcttggtgtagtagtaatcaagtactcgtttgaaggctccgtaaagcttgcaactgcagttttgagatgttattgtttggtatgatcgagtagaggggctctagcgtagagagctgctagcatgcatagtaattaaggttaattttgcaggacatgcaatgcaattcgttgcttcttttttatacaaggaagtaaccggtcatggggtgtgtggtgtgtgtgtgtgttggcaatgtaataacaattttataattcgttcttgaatttgtgcttagctagattgcgttcctttttagactttgttttcatatatactcgatcaatccataccaatatttcgaggtgtttt

SEQ ID NO: 136062 - DNA, 1747 bp, Zea Mays
gctggagcaaagataaaaagagggaaggaaactggccgggttgtaagtctactgtcagtttctacacaggaattaagaaactttatgaaataaaaaaaatcgatcagtattagtattgaagagctaaccactctatagatataggctgcgaggacaagctgtatcattagttttgctataaataaagagagctacagtccactatccacccaagttcatgtttcagtgccatatatatgcccatatctttccgtgattcgatcgatctgaccagtgccttagtagcaaataaggctgctcgtttaccagtggacagcagtgggcagatcgatccatatccacatgttgctcaccagcaccagcagcagcacgcactgtcatctggatgcgccagcgatctcatttcatgcatgcccaattaacttcccctgcagtagtctcgactgtctggttcaattctgtactatcctgatgatgatccgttattaggtgtcatcatgatcggtggctagcagaataagagatgataagcggcaacctcaacaatgaagagctggggggcggcgggtgcaccaaggccgaggggccgggcgcggccggcggcgccggcgccgtcgtcgcaaagagtcccgtgctgtcgagctcccggcactggccgccgtcgacggagtcgaggatcgtgcgcgtgtcgcgggtcttcggcggcaaggaccggcacagcaaggtgaggacggtcaaggggctgcgcgaccggcgcgtgcggctgtccgtgccgacggcgatccagctctacgacctccaggaccggctgggcctcagccagccgagcaaggtggtggactggctgctcgacgccgcgcaggacgagatcgacaagctgcctccgctccagttcccgccgcaagggcaggacctcgtcgcccatctcccgccgtccatggtggcgcccttcgccaacgttgcagccgaccgggccgccgccgccgctgccgccgcgaacgcgtcggccgcgatggccgaaggcggcaaacgccactgccacggaggcatcaaagggctcatgggcatgggcctcaacaattctatcggcctcgccaacgccaccatgccgctggctcacggcttgtactacacgcccggtgagtcttggaccaatggaggcaatgccgccgtccatgatcatcaggtgagccacggcggcacctcgcctcagacggtggctcaccactcgccgttctcgtctctgctgtctcttgctgctccggggccccagctcgtcttctactcgccggaaggcggcggcttcgccatgaaagaagccaccgatcatcagttcgctgtagatagcctcgatcactcgcaaggccagctctcactgagctcagctagaagcttccttcaccccggcaaccagggatgatattaggtcactgatctctactgctccaagaaggtacgtagaacaataaagcttggtgtagtagtaatcaagtactcgtttgaaggctccgtaaagcttgcaactgcagttttgagatgttattgtttggtatgatcgagtagaggggctctagcgtagagagctgctagcatgcatagtaattaaggttaattttgcaggacatgcaatgcaattcgttgcttcttttttatacaaggaagtaaccggtcatggggtgtgtggtgtgtgtgtgtgttggcaatgtaataacaattttataattcgttcttgaatttgtgcttagct

SEQ ID NO: 136063 - DNA, 1437 bp, Zea Mays
gtgatagcctcatgctcgcagctcgacaaacgacagcggcctagccccgcctccccgttatccgacctatccccagcgtcgttgggtcatctccggcagctcccccgctaacacctccatggcgtcgaagcaggcggcggctggcgaagcccttgcggcccaaatcaacggcatgtcccgccctgagatgtacgacatgatgtccaagatgaagaccatgatcgaccacgaccaggagacggtgcgccgcatgctcgtcgacaacccggacgtcacccgtgcgctctttcgggcacaagtggtccttggaatggtgaaaacacccaaaactacacaagctttggacatggtccaacccacagcagtgccaacagcaccttcctcagtcaaaactactgcaccagatcatgtcagcttgcccccgcccccattacctgctaaccagcagagtgttgctcaactttctgccccgttttcatctggcttgtctaatgtgggatcgaccatggaccctcctactatttcagcaaatccaccacaatcagcacaagcaaaaggataccttatccatcagatgccttcatcagctcctcagccatctcaacatccaaatatggccctacctcatgctcctccacagtattccaatgttccatcacatatacctatagttcatagtcagccacagcaacctttgcaaagtcctgcaatatataatcaacagttgcaaccacctttgccccaattgtcaaggccgccttttcctcatcagatgcattcacaagtaccaaattcatttgggttgactcatgcaaatgctccgcagcacatgttacaacaaccaatgtttcatccggttgcgaatcctcaaactaatttcctccctggccaaccaccattgcctagccagccaccaccacagcagctgtaccaggctagttcacactacaatacacaaaatacgactccaatgcaagttgataggggcgctccctgggggcgggcccctgatgctcccactcctggctctcatttccctggacaattacccgggttgcccggacaaatgacccaaggaattggtggtatccaggcaggccaagcaccactgacacctgagatggaaaagatgctagtccaacaagtcctgggcatgtccgctgagcagattaacatgttgcctccagaacaacggcaacaggttcttcaactacgagacatgctacggcaatgatagatcgtcagttgactgggtggagaagtttcagttcactgcagcagggatcccgagtgtgggtgcctgttcgttttagccttttgtatcacctgattgacatcccgactagtctgcagcctaccttggatatgcgattgtagaatggtagtcgttgtcgtcatttatagaaatgcttgggcaatatgttttccgaaggactc

SEQ ID NO: 136064 - DNA, 1617 bp, Zea Mays
gtgatagcctcatgctcgcagctcgacaaacgacagcggcctagccccgcctccccgttatccgacctatccccagcgtcgttgggtcatctccggcagctcccccgctaacacctccatggcgtcgaagcaggcggcggctggcgaagcccttgcggcccaaatcaacggcatgtcccgccctgagatgtacgacatgatgtccaagatgaagaccatgatcgaccacgaccaggagacggtgcgccgcatgctcgtcgacaacccggacgtcacccgtgcgctctttcgggtttgaattttctatacaacttcctttttgcaggcacaagtggtccttggaatggtgaaaacacccaaaactacacaagctttggacatggtccaacccacagcagtgccaacagcaccttcctcagtcaaaactactgcaccagatcatgtcagcttgcccccgcccccattacctgctaaccagcagagtgttgctcaactttctgccccgttttcatctggcttgtctaatgtgggatcgaccatggaccctcctactatttcagcaaatccaccacaatcagcacaagcaaaaggataccttatccatcagatgccttcatcagctcctcagccatctcaacatccaaatatggccctacctcatgctcctccacagtattccaatgttccatcacatatacctatagttcatagtcagccacagcaacctttgcaaagtcctgcaatatataatcaacagttgcaaccacctttgccccaattgtcaaggccgccttttcctcatcagatgcattcacaagtaccaaattcatttgggttgactcatgcaaatgctccgcagcacatgttacaacaaccaatgtttcatgtaagatctatcccaaatccatatggtcctgataactagatatcatgctctgcatactgatagatgatgtttggaattttgcagccggttgcgaatcctcaaactaatttcctccctggccaaccaccattgcctagccagccaccaccacagcagctgtaccaggctagttcacactacaatacacaaaatacgactccaatgcaagttgataggggcgctccctgggggcgggcccctgatgctcccactcctggctctcatttccctggacaattacccgggttgcccggacaaatgacccaaggaattggtggtatccaggcaggccaagcaccactgacacctgagatggaaaagatgctagtccaacaagtcctgggcatgtccgctgagcagattaacatgttgcctccagaacaacggcaacaggttcttcaactacgagacatgctacggcaatgatagatcgtcagttgactgggtggagaagtttcagttcactgcagcagggatcccgagtgtgggtgcctgttcgttttagccttttgtatcacctgattgacatcccgactagtctgcagcctaccttggatatgcgattgtagaatggtagtcgttgtcgtcatttatagaaatgcttgggcaatatgttttccgaaggactcacaaatgaactgcatgttttggtccagttcagccgcttcaatttcaagtcgtgttaaacattt

SEQ ID NO: 136065 - DNA, 887 bp, Zea Mays
ctaatcagcgtgttttgttttgtttcgtctcgtcgaccgagccgtccgtcgtcctccctggcggtctggccgcctccgccttcctccccgtgcgtctcacccttttcctctacagcttcctctgcccaatcagctcgtcctctcccctcctctccctcccgtgaactgctaaaatccctcgccaagcatttccgtcgggttaggtggtagataagccgaaaatcgagtggaaaagcatcaatcgagtgctgcgctagttgcctggttcgtcccaacaaattccaccgggaatcagggtcgtccggcagcggctgaggcgtctgggttctggaggagcggccgtcggtgaggggggatggggggcggcggcggatcctccgggccggagctgtcgacggacaacatgaaggggatagtcctggcgctgctctccagcggcttcatcggcgccagcttcatcatcaagaagaagggtctccgccgggccgctgtcgcctccggcgtccgtgcaggtcgccccccctcctgtccctctcgtactgttgaccgtggtagctggggcaggccggttttctggtcaaaagagatgtcgactttggtcggtttggagcgttttctgaattctggtgatggcatgcgcaggtgtaggcgggtactcatacctcatggagcccctgtggtgggttggcatgatcattagtaaggtttcctcgtgcaatttcagtagagaattgggcatggtgcttagatgctaataggtgtttctgagcgaaggttttcctctttcagtgattgtaggtgagattgccaatttcgtggcatatgctttcgcccccgctgttctggttactccccttggagcactcagcataattgttaggttagct

SEQ ID NO: 136066 - DNA, 1871 bp, Zea Mays
ctaatcagcgtgttttgttttgtttcgtctcgtcgaccgagccgtccgtcgtcctccctggcggtctggccgcctccgccttcctccccgtgcgtctcacccttttcctctacagcttcctctgcccaatcagctcgtcctctcccctcctctccctcccgtgaactgctaaaatccctcgccaagcatttccgtcgggttaggtggtagataagccgaaaatcgagtggaaaagcatcaatcgagtgctgcgctagttgcctggttcgtcccaacaaattccaccgggaatcagggtcgtccggcagcggctgaggcgtctgggttctggaggagcggccgtcggtgaggggggatggggggcggcggcggatcctccgggccggagctgtcgacggacaacatgaaggggatagtcctggcgctgctctccagcggcttcatcggcgccagcttcatcatcaagaagaagggtctccgccgggccgctgtcgcctccggcgtccgtgcaggtgtaggcgggtactcatacctcatggagcccctgtggtgggttggcatgatcattatgattgtaggtgagattgccaatttcgtggcatatgctttcgcccccgctgttctggttactccccttggagcactcagcataattgttagtgctggctcatttcattctgaacgagaggctgcatgccctcggggtgctcggctgcgtgatgtgcattgcagggtctgtggtcattgttatccacgctccacaggagcaggagattacttcagttaaggaaatatggaacatggcgacacaacctgctttcttgttatatgttgcgtcagttattgtgattgtttttgtcctggtgttctatttctcccctctctatgggcagtccaatgtgttgatctacactgccatttgctctttgatgggctctctttcggttatgagtgttaaagctcttggtacatcactaaagcttacttttgagggaacaaaccaattaatatatccagagacttggttctttatgcttgttgtggctacttgtgtgttgactcagatgaattatctgaacaaggcacttgacacgttcaacacggcaattgtatctccaatatattatgtaatgttcacaactcttacaatacttgccagcgtcataatgttcaaggattggtctggtcaaagccctggaagcgtcatttctgaaatttgtggcttggttgtggtgttgtctggtaccattttgttgcatgtgacgaaggattatgaaaggatcccacaatcaagaagtgtttatgcaccattatctccctctttgacaactagattaaatggagaattgttgaagcatgtcgtggatgagaggacttcggacgaagaaaaggccttgagaagacaggagatgtattagcgtgcgtcagaatatcaaaggaaatataggttactctgatggattctccggcaggggcttgtacatggcgtagtgataaccttcccatagcgattgttgattcctccattacagtttgttggtttgtgtatataactgcagcaatttgtggctaccgagtgattgcaaatctgccgaggtggtggaaggctgcagagttccaccaaaaagaatctaagtcgggtgcatagattcttatcgaattcccttcttcctttcgtaacttcctcagttttgtccacggcatttgttccatgtgagttttagagtgaatcacggaccctatgcaactgatgtacattattattgtcatagtgaagttcgtgcaactgtgaatgatgtacattattattgtcattgatgcttctgcgaaattctggtaccatggcatctctgccatttatctagtatggc

SEQ ID NO: 136067 - DNA, 1876 bp, Zea Mays
ctaatcagcgtgttttgttttgtttcgtctcgtcgaccgagccgtccgtcgtcctccctggcggtctggccgcctccgccttcctccccgtgcgtctcacccttttcctctacagcttcctctgcccaatcagctcgtcctctcccctcctctccctcccgtgaactgctaaaatccctcgccaagcatttccgtcgggttaggtggtagataagccgaaaatcgagtggaaaagcatcaatcgagtgctgcgctagttgcctggttcgtcccaacaaattccaccgggaatcagggtcgtccggcagcggctgaggcgtctgggttctggaggagcggccgtcggtgaggggggatggggggcggcggcggatcctccgggccggagctgtcgacggacaacatgaaggggatagtcctggcgctgctctccagcggcttcatcggcgccagcttcatcatcaagaagaagggtctccgccgggccgctgtcgcctccggcgtccgtgcaggtgtaggcgggtactcatacctcatggagcccctgtggtgggttggcatgatcattatgattgtaggtgagattgccaatttcgtggcatatgctttcgcccccgctgttctggttactccccttggagcactcagcataattgttagtgcagtgctggctcatttcattctgaacgagaggctgcatgccctcggggtgctcggctgcgtgatgtgcattgcagggtctgtggtcattgttatccacgctccacaggagcaggagattacttcagttaaggaaatatggaacatggcgacacaacctgctttcttgttatatgttgcgtcagttattgtgattgtttttgtcctggtgttctatttctcccctctctatgggcagtccaatgtgttgatctacactgccatttgctctttgatgggctctctttcggttatgagtgttaaagctcttggtacatcactaaagcttacttttgagggaacaaaccaattaatatatccagagacttggttctttatgcttgttgtggctacttgtgtgttgactcagatgaattatctgaacaaggcacttgacacgttcaacacggcaattgtatctccaatatattatgtaatgttcacaactcttacaatacttgccagcgtcataatgttcaaggattggtctggtcaaagccctggaagcgtcatttctgaaatttgtggcttggttgtggtgttgtctggtaccattttgttgcatgtgacgaaggattatgaaaggatcccacaatcaagaagtgtttatgcaccattatctccctctttgacaactagattaaatggagaattgttgaagcatgtcgtggatgagaggacttcggacgaagaaaaggccttgagaagacaggagatgtattagcgtgcgtcagaatatcaaaggaaatataggttactctgatggattctccggcaggggcttgtacatggcgtagtgataaccttcccatagcgattgttgattcctccattacagtttgttggtttgtgtatataactgcagcaatttgtggctaccgagtgattgcaaatctgccgaggtggtggaaggctgcagagttccaccaaaaagaatctaagtcgggtgcatagattcttatcgaattcccttcttcctttcgtaacttcctcagttttgtccacggcatttgttccatgtgagttttagagtgaatcacggaccctatgcaactgatgtacattattattgtcatagtgaagttcgtgcaactgtgaatgatgtacattattattgtcattgatgcttctgcgaaattctggtaccatggcatctctgccatttatctagtatggc

SEQ ID NO: 136068 - DNA, 1049 bp, Zea Mays
gccttgtttgtttagtccctgattttgtttctaccccatggctcatgtcctaatttttttaattcaatttgattaacctcttatccttgaatccagaatattgtctagtgccatgtaattttgtagatttctttggtagaataattatgatatttgcaaaacaacgcactgaagtgtgttactagagttaccacaaatattaagctactggttcctgttctgctttatggagtaagtagtggtttttttttttgctgtaggcacttgacacgttcaacacggcaattgtatctccaatatattatgtaatgttcacaactcttacaatacttgccagcgtcataatgttcaaggattggtctggtcaaagccctggaagcgtcatttctgaaatttgtggcttggttgtggtgttgtctggtaccattttgttgcatgtgacgaaggattatgaaaggatcccacaatcaagaagtgtttatgcaccattatctccctctttgacaactagattaaatggagaattgttgaagcatgtcgtggatgagaggacttcggacgaagaaaaggccttgagaagacaggagatgtattagcgtgcgtcagaatatcaaaggaaatataggttactctgatggattctccggcaggggcttgtacatggcgtagtgataaccttcccatagcgattgttgattcctccattacagtttgttggtttgtgtatataactgcagcaatttgtggctaccgagtgattgcaaatctgccgaggtggtggaaggctgcagagttccaccaaaaagaatctaagtcgggtgcatagattcttatcgaattcccttcttcctttcgtaacttcctcagttttgtccacggcatttgttccatgtgagttttagagtgaatcacggaccctatgcaactgatgtacattattattgtcatagtgaagttcgtgcaactgtgaatgatgtacattattattgtcattgatgcttctgcgaaattctggtaccatggcatctctgccatttatctagtatggc

SEQ ID NO: 136069 - DNA, 738 bp, Zea Mays
gccgcacaggcacaaacccaatccccacctgaccccgcagcctcattccacctaggcgcatcggcgacgacggcgttgcgccctggtccatctaccgaactcgcctacccgcggtcctcgtcgttcacaggcggcgcgccctcgtccaggtccagtcgtcctcgttcacgaaggcggcctcgtccagcctactgttccttctgctacaaattcatagtcactgatggggaaggcaaagcgtgcctcgatcttcatcaggctggtttctgcagccggcactggattcttctacgtgaagcgcaagaatcctcgtcgcatcaccgagaagcttgagtttagaaagtatgatccccgtgtgaacaagcatgttctgtttaccgaagcgaagatgaagtgagatcttgtttctccacaatgcagaactgtaataagttgtcaaccttttgcgaccagaaacctttatgccgttattagacagatgattaacgatcctatgtgtttttcctgctccaatgagctgcaagcagcagatggctagtgttttgtcattttgtgtgggaaactacaaatgaaatctggactcccatctttttctttcacaccgccatgttttgtgaaacgatgccatgttttcctctgagccggcggcgaaccgtcgagatgctcaactaaaaaccaaacgaagctgttggctctgaactgagtgctggattacttattctgttctggaaattacag

SEQ ID NO: 136070 - DNA, 761 bp, Zea Mays
gatcctcatttcctcatccattccaatcaatcggaccgacaccggctaaccctagcttctgtttggctgttgccttgcgggtggcggctgctttggtgcgctgcgcagtgcgctccgtccgtccgtcgaccggaaggccgtcccctggcccctgctcgtcgtcttcctcgggcgctcgtcttcctccgaacgcgcgcgggccgccgacctgcttgttctcctggaggagcgcgcccggcgggcaggcgacgcagtccagcggcgggttgaggaagaaggcgagcgaccggtggatccccgtccagccgtcccctgctcctcttcctcgggtcgggcgctcgtcatccactcttcctccagccctccatctgatccccgtacgaccgtcccctgctcgtcttcctggtgctcggctgctccagtgctcggcccctgctgcagtgctgctcggtcgcgtcggcacctgctgcagatctgctcgacctcggctgctcggcttcctggtaacctggttcctgctgaagtgctgattctagagtctgctgcgtacgtttagtagtatcaggtgagcaacttaagtagcaactagcaaataagtttagtagtatcacgcacatatatttatttgtagttgttcttgagataatgtcatcgagcaaccacaatcatgaccataatgtcaatgaatcgcagtcactgttgaatgtttacgttgtatgttcactgttgtatgttcactattgtaatatgctgttgattta

SEQ ID NO: 136071 - DNA, 648 bp, Zea Mays
gatcctcatttcctcatccattccaatcaatcggaccgacaccggctaaccctagcttctgtttggctgttgccttgcgggtggcggctgctttggtgcgctgcgcagtgcgctccgtccgtccgtcgaccggaaggccgtcccctggcccctgctcgtcgtcttcctcgggcgctcgtcttcctccgaacgcgcgcgggccgccgacctgcttgttctcctggaggagcgcgcccggcgggcaggcgacgcagtccagcggcgggttgaggaagaaggcgagcgaccggtggatccccgtccagccgtcccctgctcctcttcctcgggtcgggcgctcgtcatccactcttcctccagccctccatctgatccccgtacgaccgtcccctgctcgtcttcctggtgctcggctgctccagtgctcggcccctgctgcagtgctgctcggtcgcgtcggcacctgctgcagatctgctcgacctcggctgctcggcttcctggtaacctggttcctgctgaagtgctgattctagagtctgctgcgtacgtttagtagtatcaggatttttaagtgggttactggcagaaccaatattgtttctaaattctaagtgggctgttggcggggatttttccccatcggat

SEQ ID NO: 136072 - DNA, 1109 bp, Zea Mays
gatcctcatttcctcatccattccaatcaatcggaccgacaccggctaaccctagcttctgtttggctgttgccttgcgggtggcggctgctttggtgcgctgcgcagtgcgctccgtccgtccgtcgaccggaaggccgtcccctggcccctgctcgtcgtcttcctcgggcgctcgtcttcctccgaacgcgcgcgggccgccgacctgcttgttctcctggaggagcgcgcccggcgggcaggcgacgcagtccagcggcgggttgaggaagaaggcgagcgaccggtggatccccgtccagccgtcccctgctcctcttcctcgggtcgggcgctcgtcatccactcttcctccagccctccatctgatccccgtacgaccgtcccctgctcgtcttcctggtgctcggctgctccagtgctcggcccctgctgcagtgctgctcggtcgcgtcggcacctgctgcagatctgctcgacctcggctgctcggcttcctggtaacctggttcctgctgaagtgctgattctagagtctgctgcgtacgtttagtagtatcagttccttctgctacaaattcatagtcactgatggggaaggcaaagcgtgcctcgatcttcatcaggctggtttctgcagccggcactggattcttctacgtgaagcgcaagaatcctcgtcgcatcaccgagaagcttgagtttagaaagtatgatccccgtgtgaacaagcatgttctgtttaccgaagcgaagatgaagtgagatcttgtttctccacaatgcagaactgtaataagttgtcaaccttttgcgaccagaaacctttatgccgttattagacagatgattaacgatcctatgtgtttttcctgctccaatgagctgcaagcagcagatggctagtgttttgtcattttgtgtgggaaactacaaatgaaatctggactcccatctttttctttcacaccgccatgttttgtgaaacgatgccatgttttcctctgagccggcggcgaaccgtcgagatgctcaactaaaaaccaaacgaagctgttggctctgaactgagtgctggattacttattctgttctggaaattacag

SEQ ID NO: 136073 - DNA, 1047 bp, Zea Mays
gatcctcatttcctcatccattccaatcaatcggaccgacaccggctaaccctagcttctgtttggctgttgccttgcgggtggcggctgctttggtgcgctgcgcagtgcgctccgtccgtccgtcgaccggaaggccgtcccctggcccctgctcgtcgtcttcctcgggcgctcgtcttcctccgaacgcgcgcgggccgccgacctgcttgttctcctggaggagcgcgcccggcgggcaggcgacgcagtccagcggcgggttgaggaagaaggcgagcgaccggtggatccccgtccagccgtcccctgctcctcttcctcgggtcgggcgctcgtcatccactcttcctccagccctccatctgatccccgtacgaccgtcccctgctcgtcttcctggtgctcggctgctccagtgctcggcccctgctgcagtgctgctcggtcgcgtcggcacctgctgcagatctgctcgacctcggctgctcggcttcctgttccttctgctacaaattcatagtcactgatggggaaggcaaagcgtgcctcgatcttcatcaggctggtttctgcagccggcactggattcttctacgtgaagcgcaagaatcctcgtcgcatcaccgagaagcttgagtttagaaagtatgatccccgtgtgaacaagcatgttctgtttaccgaagcgaagatgaagtgagatcttgtttctccacaatgcagaactgtaataagttgtcaaccttttgcgaccagaaacctttatgccgttattagacagatgattaacgatcctatgtgtttttcctgctccaatgagctgcaagcagcagatggctagtgttttgtcattttgtgtgggaaactacaaatgaaatctggactcccatctttttctttcacaccgccatgttttgtgaaacgatgccatgttttcctctgagccggcggcgaaccgtcgagatgctcaactaaaaaccaaacgaagctgttggctctgaactgagtgctggattacttattctgttctggaaattacag

SEQ ID NO: 136074 - DNA, 1222 bp, Zea Mays
gcggcgagttctttaaggaggcgggcgacaggccggtaccggcgcggtgcctttgccttgcctgtcttggcgtggagtggcctgcattctcttctcggagaagacaagcaaagctaagcaaagcaaggcaacccattcccgttcttgtcccgttgtctttgtctctcttgtcccttgctgctcgctcgccgccgtttctcggagcgctagctgctgctgctgctgctgggagtgtgagagtgaggcgaagggccgacctgagccggggagaagaagggggcctgccggccggggctgggagacatgagcgtgaccaagttcatcaagtgcgtcacggtgggcgacggcgcggtgggcaagacctgcatgctcatctgctacaccagcaacaagttccccacggactacatccccacggtgttcgacaacttcagcgccaacgtctccgtggacggcagcatcgtcaacctgggcctctgggacaccgcggggcaagaggactacagcaggctgcggccgctgagctacaggggcgcggacgtgttcgtgctggccttctccctgatcagcagggcgagctacgagaacgttcttaagaagtgggtgccagagcttcgcagattcgcgcccaacgtcccggtcgttcttgttgggaccaagttagatctccgcgaccacagagcctacctcgccgaccatcctggagcttcagcagtcaccacggcgcagggtgaggaactgaggaagcagatcggcgctgcggcctacatcgagtgcagttccaaaacccagcagaacgtcaagtctgtcttcgatacggccatcaaagtggtccttcagcccccacggaggagggaggcagtgcctgccaggaagaagaacaggcgtggctccggatgctctataatgaaccttgtgtgtggcagcacatgtgctgcttagggagtctactagaacactgaaccggaagggaggtgaaggcgtgattcatggtgtgtaatgtgctgtggcaactggcaagttagtttgctatagatgaggatgactgctgcttttgttttccttggcccatctgctgtagttcgtcaggctcttcaagggctgactttttaccagactgcagtgttgtgtaagaagtttgctagacgctgtaactgtaatgttctccgctgatgtggtataactaagatacgagtaagcttgagcgtgttctgggccctga

SEQ ID NO: 136075 - DNA, 1548 bp, Zea Mays
gcggcgagttctttaaggaggcgggcgacaggccggtaccggcgcggtgcctttgccttgcctgtcttggcgtggagtggcctgcattctcttctcggagaagacaagcaaagctaagcaaagcaaggcaacccattcccgttcttgtcccgttgtctttgtctctcttgtcccttgctgctcgctcgccgccgtttctcggagcgctagctgctgctgctgctgctgggagtgtgagagtgaggcgaagggccgacctgagccggggagaagaagggggcctgccggccggggctgggagacatgagcgtgaccaagttcatcaagtgcgtcacggtgggcgacggcgcggtgggcaagacctgcatgctcatctgctacaccagcaacaagttccccacggactacatccccacggtgttcgacaacttcagcgccaacgtctccgtggacggcagcatcgtcaacctgggcctctgggacaccgcggggcaagaggactacagcaggctgcggccgctgagctacaggggcgcggacgtgttcgtgctggccttctccctgatcagcagggcgagctacgagaacgttcttaagaagtgggtgccagagcttcgcagattcgcgcccaacgtcccggtcgttcttgttgggaccaagttagatctccgcgaccacagagcctacctcgccgaccatcctggagcttcagcagtcaccacggcgcagggtgaggaactgaggaagcagatcggcgctgcggcctacatcgagtgcagttccaaaacccagcagaacgtcaagtctgtcttcgatacggccatcaaagtggtccttcagcccccacggaggagggaggcagtgcctgccaggaagaagaacaggcgtggctccggatgctctataatgtaagctccatctctccgccgttaatagcgatttcaatccagtgaaaccctaaaatccatctgtgaaggcttgagaatgagcagcctattggtcagacaacccagcacatacttgtaccattattatgtcaagacgacgtctggttcatctacttctgttcaaactccagacaaaaacctttggaacgatttttcgttaaaagaattgatttactgatgtgatttcttcttcttcttcttcttcttcttcttttgcaatgactctgttgtcttgcctgcaggaaccttgtgtgtggcagcacatgtgctgcttagggagtctactagaacactgaaccggaagggaggtgaaggcgtgattcatggtgtgtaatgtgctgtggcaactggcaagttagtttgctatagatgaggatgactgctgcttttgttttccttggcccatctgctgtagttcgtcaggctcttcaagggctgactttttaccagactgcagtgttgtgtaagaagtttgctagacgctgtaactgtaatgttctccgctgatgtggtataactaagatacgagtaagcttgagcgtgttctgggccctgaatgttcgttgtcgtcgatctgctatgattctgggagtgatttgct

SEQ ID NO: 136076 - DNA, 992 bp, Zea Mays
tcttccacccagtacttccaacgctggtggtcatcagaagtgtgatgcaacttgtcttgattcctcttagcctttgttcttgcagggtgaggaactgaggaagcagatcggcgctgcggcctacatcgagtgcagttccaaaacccagcaggtagtcatgccatggcccatgtggaatggtttgccgtttgattagttgaagttagacacgtatggattgttcgtactaatagatacatttactgagggtttttttttttggtaattatgttggccacactagaacgtcaagtctgtcttcgatacggccatcaaagtggtccttcagcccccacggaggagggaggcagtgcctgccaggaagaagaacaggcgtggctccggatgctctataatgtaagctccatctctccgccgttaatagcgatttcaatccagtgaaaccctaaaatccatctgtgaaggcttgagaatgagcagcctattggtcagacaacccagcacatacttgtaccattattatgtcaagacgacgtctggttcatctacttctgttcaaactccagacaaaaacctttggaacgatttttcgttaaaagaattgatttactgatgtgatttcttcttcttcttcttcttcttcttcttttgcaatgactctgttgtcttgcctgcaggaaccttgtgtgtggcagcacatgtgctgcttagggagtctactagaacactgaaccggaagggaggtgaaggcgtgattcatggtgtgtaatgtgctgtggcaactggcaagttagtttgctatagatgaggatgactgctgcttttgttttccttggcccatctgctgtagttcgtcaggctcttcaagggctgactttttaccagactgcagtgttgtgtaagaagtttgctagacgctgtaactgtaatgttctccgctgatgtggtataactaagatacgagtaagcttgagcgtgttctgggccctgaa

SEQ ID NO: 136077 - DNA, 2256 bp, Zea Mays
tttgtttaattaggtaatcaatgtatttgcaactactataaagtttgtaaacggaaaactaacgagttatgggtctgaagaggattagtaataaattgatagctaatatgataggatgtagcgatgaatacaaccgctcattggaatcagcctcatcgtacaagttgcatgtatcaaattgtggggagttcgactccagcacggcagggcggcaggtaatagccagcgcagcagagcaaataaacagccactatccgggagcggctagctgttcgttccccctccaatgccggccacccatcaccttcccctccgcgcgcgcccgtgccctcaccaccacatctaatcggctaatcagccttcggtcttccccttgcgtttctccgcgcgcccgacctccttcgctgccccatggacgctaccccgccgtcgtcgcgggacctgtcgccgcagccccggcggccggcctcctccgcggggcccgccaagcgcgtgggccttctgctcggccgctacgagctgggccgcctgctcggccacggcaccttcgccaaggtctaccacgcccgccaagccgacaccggcgagaccgtcgccatcaaggtgctcgataaggagaaggccctccgcaacggcctcgtcccgcacatcaagcgcgagatcgccatcctccgccgcgtgcgccaccccaatatcgtccgcctcttcgaggtcatggccaccaagtccaagatctacttcgtcatggagttcgtccgcggcggggagctcttcgcgcgcgtcgccaagggccgcctcaaggaggataccgcgcgaaggtacttccagcagcttatctccgccgtcgggttctgccacgccaggggcgtcttccaccgcgacctcaagcccgagaatctgctcgtcgacgagcgcggcgacctcaaggtctccgattttggcctctcggcggtggccgatcagttccaccccgacggcctcctccacaccttctgtggcacgccctcctacgtcgccccggaggtgctcgcgcgccgcggttatgacggcgccaaggcggacatatggtcgtgtggtgtcatcctgttcgtgctgatggctggctaccttccttttcatgaccagaacctcatggcgatgtaccgtaagatctacaggggcgaattccggtgtccgaggtggttttccaaggatcttagcagtctattgattcgacttcttgacacgaacccagagaccaggatcaccgtggctcagataatggagagcaggtggtttaagaaagggttccgaccggtcagattctacgtcgaggatgaccaagtgcacagcttagcagacggtgaggatgaggtgccggaactggggcctagtgagcctccaactccacctcccccgccaccaccacagaaagaggacgacggtgatgattctggttgggaatcagactcgtctgtagcatcctgcccagccacattgtcatcagaggagaggagacggcctgctggatcgctcccacggccagtaagtctaaatgcatttgatatcatatcattctcaaggggattcaatctgtcggggttgtttgaggagcgaggcaatgaagtgagatttgtctcagcacatcccatgcaaacgattataacaaaattggaggagatcgcgaaggtgaagagctttgcagttcggcggaaggactggcgggttagcttggaaggcacgagagaaagtgaaaagggtccattgacaatcggggctgaagtatttgagctcacaccaagccttgtggtcgtggaggtgaggatgaaggcaggggacaggcaagaatatgaggatttttgtgagagggagttgaaacctgggatgcagcacctggtgcaccatacagcctcggttccagatataccttctgatactgattagcttaaaaggtagtgtgctcttgattggaatgattgtggtgaagaaatttggattgaaaggatgcacctttctgtttcagcgtaatcatctgtgcaggaaaatgttattcatagatttccttagttttttttgttaatattctttctgcaatccaaaatgttttgcgatagtagttttgtgctaataccaatttatcaaatttttagttgttaaagtttaaaattatcgccattttactatagcagtatgaaatctataactctgatgttattggccatgtaactgtgctacaattatgtacattcagcttgtccaaatgtcatctgtaatttt

SEQ ID NO: 136078 - DNA, 123 bp, Zea Mays
aaaaatctggcttcctcagagaggagaatcacaatcgcatcaacagacgacgtggggccccactatcgacaaggcatataccacacgcatctctaatggcgatctcatctcgaagctgtttac

SEQ ID NO: 136079 - DNA, 1585 bp, Zea Mays
aattttcgggggccgtttcttggtttttcctctttctcctccctcctcctcctcctccttcctccttcctctcgctcgctcgctcccctcccttcccccgctccctctcctcctcctcccttcattcctacctccgctcgcgccactctcctccgaccgaggggcagggaacggtgcccacccgcccgcccgtccgaccgccatggtctcctggcggcgcagcgcgtcctggctgtcgtcggcgtcgcgctcctcgctcggcaccgccgtcggcggggaggccaaggtcacgccggaggcggatccggcggcgcagcacgacgaggccgacgaggagcgctggtcgcgcctgctgccggagctgctcacggagatcatgcgccgcgtcgacgccggcgccgagcgctggccgccgcgccgggacgtcgtggtctgcgcctgcgtgtgccgccggtggcgcgacgccgcggtctcggtcgtccgcccgccgctcgagtgcggcaggatcaccttcccgtcgtcgctcaagcagcctggaccaagggatgcgccgatgcactgttttatccggagggacaaaaaaaattcaaccttttctctctatctcagcttaacgcaggccctaacggataaagggaagtttcttttggctgctcgaaggttcagacaaggagcacatacagaatatatcatctcttatgactatgatgatctgcacccaagaagcagttcatatgttggaaagttgagatctgacttcttggggacaaagttcatcatctatgatagccaggcgccatatgacggtgccaaaccttcgaggacccgatccactcgccgctttgcaagcaagcagataagcccacaggtttcaggcggcaatttcgaagttggacaagtgacctacaggttcaacttcatgaaatcaagagggccgagacggatgcagtgcaatatccagtgccctgtaggccagggcagcgcttcggatccgtccaaggagaaaacaccctcgccgagttccttggacctgaagaacaaggctccaagatggcacgaccatcttcagtgttggtgcttaaatttccacggtcgggtgaccgtcgcctccgtgaagaacttccagctcgtcgccacagctggctccggcggtccatggggcgtcggagacgaggagacggtgatcctgcagttcgggaagatcgaggacgatgcgtttacgatggactaccggcagcctctgtccgccttccaggcgttcgccatctgcctgaccagctttggcacgaagctggcctgtgaataaatggttgccggtttaccaactatgttggggatcagattgtagggggtagtctgaactagttgccctgagcacctcagatgggagaaaactggcgataagaaacagggcggacgttgtccctataagctttgactccttgtaatcgcctaaatgattgatttatatatatatgatgtgcgcctatgttgttgaagagatgacgatgacttatagttgtaaatggcactccctttcgtttggtgacattcactcatcactcataatgcctcattccgttgt

SEQ ID NO: 136080 - DNA, 1253 bp, Zea Mays
ctcggcgcggccggcgacccatgcatgccatgagcaaaccacgccttggcagcgagtcgccgacgatgacgaagaaggcgtcgcggtcgggaggcacgggcacccagcgcccgtcgtcgccgtggagcgccagctgcaggccgggcgtgccgttggagcgcagcacggacaccagctgcgggtccgtgtgctcgccgaagccggtgacgccgcacgagtccggcaggcgctgcagcagcgggcacgcagggtagtggttgatccggaacacctggtcgctcgccgcgtccgccaccatgccgctcagcgcgtccctcggcgccacgccgagcccctccgccaccgcctccagcaccgacgtcgccaggcccctcacggaggccacgtactggttcaccgcgtccctgcacgccggaccggacctacccatcgttagaaacgcacgcgcgtggggcgcaataatggcttcgctgacactgcatgcatgctttgattgattggttgccgtaccgcagcgaggatgacgggacaggggaggccttggacaccgaggcgttgccgtcgagggcgaggaggaggtactcgagccaccccatgtcgccattgcgcccgatgcgcctgttcccgtacccgagcgggctggcggggccgcacccgcacgcgtccttggccgcctgcggcgacgcgaagaacctgacggcctcggcctccagccggtccacgacgcccgctggcacgccgtggttgacgaccttgaagaagccgaagcgctcgcacgcgtccaccacggccagggcggcgccggggctggagaggtcgacggccggcacgccggggaaggaggaggcgtccccgggctgcggggatcggagcagggagatttggtcgagagccggcggcttcgcgaggacgaccattatatatatatattgccaagaagaagcagagcaatgtacggcaacaagcggaacaggtggaggagtgcccggagctcgtgtcaccgctggtgactggagctcgagctcgagtgcatgtggtggcgaacgaagaaggcttcatggcgcgtatttatatagggggaggaggacggacggggcgccggggccccacgcggcgatacgaaacgagcggggagggagcgaacaacgttagttacgagctgttcatcgtcgtccccgtcccacctttctttgtctgtatttctgcatcgcgcgtgtttctgaactttttatccccctcggccgggccttttg

SEQ ID NO: 136081 - DNA, 273 bp, Zea Mays
ataaagatctttgagtatgttcagcaaatggattcgtatccaaatatttcaatcgcttaccagatattatttactgtgcttgtaactgttgcatcagctgagagaagctttttaaagttgaaattgttgaagaactatttaaggtcaataatgtctcaagaacggctcaacggattagccactttatgtattgagaagaaattattggacaaggttgatagtaacactattatcaacgacttcacatcaagaaatgttagaagaaatttttga

SEQ ID NO: 136082 - DNA, 285 bp, Zea Mays
atggcaggaaccggcggcgcgagggagcttctttgcgtcgcgctgctgctggccgccgttgtcgtgcagcacacctgctcggcccggccgctgcagcaggagacgacgacgacgccggcgccggctaaggagggttttggtggcctactgcacgcggccgcgcaggttcacgtggatgccgccggagcggcggcggcggcggcgcaagggcaggttggtgacgccgccgtgccgtacgaggacaagcggctgagccccggagggccagatccccagcatcactaa

SEQ ID NO: 136083 - DNA, 79 bp, Zea Mays
agcaacaatggcaaacgagcgagcgcggaggaaaagccaccttttcttcgagttctacctctagctggtcccgacgccc

SEQ ID NO: 136084 - DNA, 2476 bp, Zea Mays
cgcaggggcgtgggggacgggactggcattgccactgcccagccgcgggagcggcccctccggggggacaagcgcattaatgccactgccgcctccgccgatttaactccccgcctctatcgccctcaccttcacctgtacgccgtcccgcttcgcttcggagaggtcgctgcctgtgcctgccatcaacgttccctcgctggttgaggtagacccaccgacccccagtactagtcgggacagagatggggattgatctcaacgccgtgggggaggacgacccggcgggcgcggtgtgcgcggagctgtggcacgcgtgcgcgggggctggagtggcgctgccgcggcggggcagcgccgtggtgtacctgcctcaggcgcacctcgcggcgggcggctgcgacggtggtggggtgtcggcgccggccccgccgcgcgtgccgccgcacgtggtgtgtcgcgtcgtcgacgtcgagctacgcgcggatgcggccacggacgaggtgtacgcgcggcttgcgctggtggcgatggatacgatgtttggccgaaacatcaatgatggtgaaactgaagagaagaatggcgaggaagaggatggcgacggagaaaagaagcacgcatcacacatgttctgcaagacactcacagcttctgataccagcacacatgggggattctctgttccacggcgagctgcagaggactgctttccaccattggactatgagcagcttaggccttcccaagagcttattgccaaggatttgcatggcatgaaatggaggttccgtcatatctatagaggtcaacctcgaaggcatcttctgacaactggatggagttcatttatcaataagaagaaactagtctcaggggatgcagtcttgtttcttagaggtaatgatggtgagctaagattgggtgtgaggagagcagttcaactgaaaaatgaagctctacttgaagctgtcaactgtactgattcgaagctacttatgctgtctgctgtggccaattctttggacaacagaagtatatttcacatctgtttcaacccaagggttggtgcatcagaatttattgtgccgtattgcaagttcttgaagagcttgaactatcacttttcagttggaaccagatttaaagttggctgcgagaatgaagatgctaacgagaggtcctttggattgatcataggtattagtgaagttgatcccatacactggcctggatcaaaatggaaatctctcctgataaagtgggatggtgctactaagtacagccaccagaatagagtatctccatgggacatcgagggagttggcagctcagtttcagttactcaccgactttcctcttctgtttcgaagcgaacaaaactgtgcttccctccaagcgatttggacacgccaattctagatggaaacggtcgtccagactcagtggaaactgaacgtttccacagggtcttgcaaggtcaagaattggtgcactctagtattcatggtactgcatgctctcattcatcagatagccccagatgtcaaggctcttatggcaggagattctctgctgatgcgtggaactgcaagatgaatgatgtaatgagtgggcctcgacacctaaatgccactgggtttgcttaccagcccctaggcttcagtgaatctgtcaaattctcagaggtcttgcaaggtcaagaaatgtctcaggcggttccttccttcatgagatctgctttcaactctggcacgcagaatggcagggttcgaccatttgattatgtgcagagatcagatgcaactcaaggatacgctctccagcagtttaatctgccagcaacagaagtgcattcgccctcttctgttcttatgtttaaccaaaccatggtaccacatgctgagctagatggtgcgaccaaccgtgaagaagtacatggcagcaggtacttgtcatccaatgcaatagggagagaagctgaaccatggccatccatgcagcagcaaagagcgagtgtaaatggaagcgagcctctcgacacaactgaagcctcagctcctgcaaggaacgctgaatctggatcggtcggcaggggcgcggggcgaagcaactgtaagctttttggtttctccctgactgagaagatccttggaacggatggtggtggtgtgaaagaagggaactacgaagtggaccgtcaaactccccgggtgctagacttgtttgggcacggttctacgcctggagctctgcatgctctctgtgctgctcccttgggaatatgatgctgttctgcctagttttacaacagttagatttatgtaatccttcagccattttcatcgcgttgtacttgaccaatatgtccagcgtatgatttccagttttaattgtatgctgatgctacatatcctctcttgagatccatgcatgagaattctggcagaatgaacagaggtaaattgatgtccag

SEQ ID NO: 136085 - DNA, 1847 bp, Zea Mays
cataattgttccacatggtcttgtaatctgtcgatgcttgtcagaacttggggcaaaatgacaaggcccaaagagtgaatagcgcttaagtttgctagattaaaggtaaaacttttttctcgaagttcaggtcaacctcgaaggcatcttctgacaactggatggagttcatttatcaataagaagaaactagtctcaggggatgcagtcttgtttcttagaggtaatgatggtgagctaagattgggtgtgaggagagcagttcaactgaaaaatgaagctctacttgaagctgtcaactgtactgattcgaagctacttatgctgtctgctgtggccaattctttggacaacagaagtatatttcacatctgtttcaacccaagggttggtgcatcagaatttattgtgccgtattgcaagttcttgaagagcttgaactatcacttttcagttggaaccagatttaaagttggctgcgagaatgaagatgctaacgagaggtcctttggattgatcataggtattagtgaagttgatcccatacactggcctggatcaaaatggaaatctctcctgataaagtgggatggtgctactaagtacagccaccagaatagagtatctccatgggacatcgagggagttggcagctcagtttcagttactcaccgactttcctcttctgtttcgaagcgaacaaaactgtgcttccctccaagcgatttggacacgccaattctagatggaaacggtcgtccagactcagtggaaactgaacgtttccacagggtcttgcaaggtcaagaattggtgcactctagtattcatggtactgcatgctctcattcatcagatagccccagatgtcaaggctcttatggcaggagattctctgctgatgcgtggaactgcaagatgaatgatgtaatgagtgggcctcgacacctaaatgccactgggtttgcttaccagcccctaggcttcagtgaatctgtcaaattctcagaggtcttgcaaggtcaagaaatgtctcaggcggttccttccttcatgagatctgctttcaactctggcacgcagaatggcagggttcgaccatttgattatgtgcagagatcagatgcaactcaaggatacgctctccagcagtttaatctgccagcaacagaagtgcattcgccctcttctgttcttatgtttaaccaaaccatggtaccacatgctgagctagatggtgcgaccaaccgtgaagaagtacatggcagcaggtacttgtcatccaatgcaatagggagagaagctgaaccatggccatccatgcagcagcaaagagcgagtgtaaatggaagcgagcctctcgacacaactgaagcctcagctcctgcaaggaacgctgaatctggatcggtcggcaggggcgcggggcgaagcaactgtaagctttttggtttctccctgactgagaagatccttggaacggatggtggtggtgtgaaagaagggaactacgaagtggaccgtcaaactccccgggtgctagacttgtttgggcacggttctacgcctggagctctgcatgctctctgtgctgctcccttgggaatatgatgctgttctgcctagttttacaacagttagatttatgtaatccttcagccattttcatcgcgttgtacttgaccaatatgtccagcgtatgatttccagttttaattgtatgctgatgctacatatcctctcttgagatccatgcatgagaattctggcagaatgaacagaggtaaattgatgtccagctgttttctttatgaacaaataggtaaattgatgtttaatttcagaat

SEQ ID NO: 136086 - DNA, 706 bp, Zea Mays
ctaaggctgaacgcgctgctgctcctctgcctgtgtgcattccccgccccggcgcggtcgcagaacacgaccatggccacggccgcgccggtgtccgtcgaggggttcaactgcaccgccaaccacatgtacccatgccaggcgtacgcgctctaccgcgccggcttcacgggcgtgccgctctatctcgcggccatcggtgatctcttcgccgtcagccgcttcatggtcgcgcacgccaacaacctctccacgacggccgcgccggccaacggacagccgctgctcgtgccgctccagtggggctgcccttcccggtcccccagctcgtacgcgccgatgcagtaccagatcggctcgggggacacctactggatcgtctccaccaccaagctgcagaacctcacgcagtaccaggccgtggagcgcgtgaaccccacgccggtgcccaccgtcctcgacgtcggcaccatggtcacgttccccgtcttctgccagtgcccggccgccgtcgacaacgccacgacgctcgtcacctacgtcatgcagctcggggacacgtacgtgtccattgccgccgccttctccgtcgcctatccatagtgaaagacacgatgcggcgctcgcctgtgcatgcactgaggctgcgcactgctcctcctcctctgcctatgcgcgttccccgccccggcgcggtcgtagaaca

SEQ ID NO: 136087 - DNA, 86 bp, Zea Mays
cagaattcggattttatatttggcacccaacatgcaacactccaaaatatccaatatggtgcaaaattatattttatttattatcc

SEQ ID NO: 136088 - DNA, 118 bp, Zea Mays
gtacttttaagtggtggtgcagcctgccattggtacttcaacccatcaattgaagaagctactgctttttacaacaagtacactaattacatactttcatttaaaaaataaaatgaac

SEQ ID NO: 136089 - DNA, 820 bp, Zea Mays
agaagctgaaatatttgctttcgacactgttgcgaggacaattattgggaaaccatgtccaatggttgttgcatcatttccagatgcatcagctatcccacttgaaattacagcaatcgtttcacgaaaatacacattcattgtagtgttcaacaaccaatcatacagatttctagaaaaagcattgctcataaaaggaattgtagcatcatatggaagaatgacatcactaccaagagttcaagaaaaatatgatgtgcaccttcctcccgatccaaccaaaaataaactgataacaacaactgctcaatctccctctacagtcatgtctagactttctacggcggactctcaagtgtgagtcgaaagctaacctattctccagcaaaggataaacctgagacaaaccctcttgatgctaataaaaatagagctcctgcaacaatgcttgaatcacctacaaaaaggatcaaacaagaccctaagaatcaacaagagtagacgttgtgtacaacacagtaaggaatacttctgaacatcacgcccaaacttcaacaaatgaagcatattcctcactattttgtttgtaaatattatgtgccttcttctatgaagcaaaccttaccctcgatatactatatataatatttatgtattgtcatataatataaccatctataaactcatcagttgctacaacatattctaagcaaaccttaccctcgatatgctatatataatatctatgtattatcatgtaatataaccatctataaactcatcagttactacaacatattctcatgttatgtatataaaa

SEQ ID NO: 136090 - DNA, 853 bp, Zea Mays
tggcacctcgcatttggcacaccagaccctctcgtctcggctcgtacgttccagtgtaggcgacggcaccagcagcagcagcaggagcaggtaatggctatggcaccggcagcagcaacccgagctagagctattggtggctcaggccctagtcacttcatctccacgagcagtttcttggggccacctcccaatcccattcggctgccacgtcgcgccggcgcgaacagggccgtgctcctcggcgccgggcggcgcgacgcgtggggcgccgacggcggctcttctccctcctccgagggcggccggctggtggacgaggacatggcgacgctgcggcggcgcatccgcgaggcgcgggcggagtcgtcggaggaggacggcattcttgacgccgacgacgccggcatcccgctgccgccgaccgggtggacggagctggagcggcggcaccacgggagctacgtggtcggcgtgcgcggcgcggtcggccttctcgaggcgctcctcgtgaacgcgcgcccggggctcggcgccggcttgctggcggtgatgctgctcggcgtcccggcgtcgctgttcctcgtgtgcgcgcagctgatccggggccgctgattcagtctggtcctggatgaacgggcgctgctactgcgtcgtcgtcagtgtatagccagatgaagctgtaggtgagccgagcacaattcggcgcagagatggaacttctctaaattggttgcacgtataaactgtttcgtaacttgcatggatgtagtagtttatagaaagggttcgtgttcttctgttagtacttagtacacacagaaagattggttggcaaattcttcagttcatt

SEQ ID NO: 136091 - DNA, 576 bp, Zea Mays
cacaaaaaaatgattgaatttgacagaaccacgaattcagagctgataataaataatttaagctgatagtctctctcaacggtcctctaaccctcagcatccacagaaagacaatcgaacaaacagttcgtatccggctattcgccttagtttgagcagcacccaaccctcttcatcgcagaaacgtcatccttgacgtttatcttctcccccttgccaggggcggccgccccctcctcggaggcctccaccgtcttcttgctcacgatctggtatatctgggtcagcacctccgagaaggagctgtccacgttggtggcgtcgagggcggacgtctccatgaagtacatggactcggcctcggcgaactccttggcgtcgtcagtcgagacggccaccaggtgccggagatcggacttgttgccgaccagcatcacgacgatgctctggtcggtgtggtctctgagctccctcagccaacggcccacgttgtcgaacgtggcgcgacgggtgacatcgtagacaagcagtgcccctacggctcctcggtaataggcacttgtgattgcacggtac

SEQ ID NO: 136092 - DNA, 83 bp, Zea Mays
ctctcctggccggcggtgtcccaaatctgggccttgatgaccttgccgtcgacctggagactgcgggtggcgaactcgacgcc

SEQ ID NO: 136093 - DNA, 880 bp, Zea Mays
ggcggattctccggctctccgctgtagggttttctggtcctggtaggcgagctggggaagacgcaaggtactgcggctgcgcgcgaggggtcgtcggacgaccgacgaggacgagcggcataggcgcgtgcatggcgctcacgaacttcatcctcacggtggtgggggtgggcgcggcggtgatgctgctgcggaaagacgtcaagcagtcggccaccgtcttccgccgcaacgtgcgccacatccgcaactggctcgaggaggagtccgccgccgccgccaagtacgctccttttctccatttcgtctgtgctctcgccgcctcgcctcgcgtctatctatctgtctagtagtcttcacggcccgttcgttagccttagccattgcggctgatttggcgattagacccgcccggattggatctgagataggctagctgcctgctactggttattcagtggtggaaaaatggttatggtgtagttttagtttaatctggttagttgagctgcaattcagccaggtgggagtgaaatttaggagtgaaattaggtggcgtttggttcacagatgaaatttccaggagtatgatgagagaaatgtcgatttcttttatttattttggtagtgatatagtgaattagatactcatttgcaatatttggcgtgatggcaatgtactgtgtaatggcatagcagcgcgatgcacaaatcaaaacaagagctgaaggataatcttctccgcataagagattgaaggaatgggaggggggataagaaaatttcagttaagaaatacatgcgcataagaacagaatatgagattcataaattaatgctgacttaaaaaattacaccagctgacaaaaaaagaaagaaa

SEQ ID NO: 136094 - DNA, 732 bp, Zea Mays
ggcggattctccggctctccgctgtagggttttctggtcctggtaggcgagctggggaagacgcaaggtactgcggctgcgcgcgaggggtcgtcggacgaccgacgaggacgagcggcataggcgcgtgcatggcgctcacgaacttcatcctcacggtggtgggggtgggcgcggcggtgatgctgctgcggaaagacgtcaagcagtcggccaccgtcttccgccgcaacgtgcgccacatccgcaactggctcgaggaggagtccgccgccgccgccaaatctactgaacagtcttcagtgaaggagttggagtcccaagctgccaagaaagacgctgtgcccaaggacgacaaacattagatgatcttacaccctgtttcttgtaatgcgttggcagtttgaggtccaggattttgaattggtcctttaaaaaaatgtatgtgttgtaggacctttagttctgttggaaattttactgaataatggaagacatcttaggttcaaggttctgaaatgggatcttatatctcaatgagattatgatggtggatatctgcacatcatgtctaatctttgtcgagtcttcctgtgcttcagattaaattgtacctggaaaaaggtgtaccatcctcactctacattaatctgacaacccgttatacatgtaatccgataatggtccttgtattcagtatttgatgacataagcattgattgcgtataatct

SEQ ID NO: 136095 - DNA, 357 bp, Zea Mays
taaacagttcatgcatatccttgactgaagacgatgttgcaaaggtttcagacatcagctttggcgttgacaagaaacaagatgacgagtacaatgctcctgatgagtacaacgcattgtataagtttgctttgtactgcttgagaccatctctggaaggcgttcatattttgacgacgatgtgctcctttattttcctttatgaataccaaattctttaatgtgtcctcttgtgtggaatcaagttcctaatttagctagagcaatacttgaaaagaggaatcacaattagttgtttttcatgtgattgtataacaatttctcgtaaatgaatataatgctgactaatttactgtt

SEQ ID NO: 136096 - DNA, 2506 bp, Zea Mays
ccccttcatcgatcccgggcaaaagggaactccgcccccaccgcccctaccacgattctgccgctacaccttccttcggcgccggagatgagatgagaggatccgttattctggcgctccttgccgccgccgcctcctccttcttcggcgcggcgaccgcggcttcagaggggcggccaacggtggcagtggaggtggacccgtcgtggcggttcccgagccggcgcggcgaccgcggcttcagaggggcggccgacggtggcagtggaggtggacccgtcgtggcggttcccgagccgacgcctgcgggacgcgaaagcagcaggccatcttctccgaccccaacaacctcaccgccgattaggtaggcccgggggtgtgcaactacacggacgtctactgcgcgccgctccccttcggccccgaccgccgcggcgcgctcgcggtcgccgaggtcaacctcaaccatggcgacatcgcgggcttcctcccgccggagctcgccctcctccccgacctcgccctgctccacctcaactccaaccgcttctgcgacgtactcccccgcgcgcttcgccgcctccgcctcctccacgagctcgacctcagcaacaactgcttcgtcggcccgttcccggacgtcgtcctggacctccctgcgctgcgcttcctgggtgtccgcttcaacgacttcgaggggacgagggcaccgtcctgcctcgcctcttcgaccgcccgctcgacgccatcttcctcaaccacaaccacaaccgcctccgcttccagctcccggacaacttcggcaactcaccagcgtctgtcgttgtcctcgcgcacaacgccttcggcggctgcctcccggcaagcgtcgcaaccatgtccggcacactcaaggagatccttctcatcaacaacgacctctcctcctgcttcccgccggagatcggtctgctgcgggagctcaccgtgctcgacgtcagcttcaaccagctcgccggcccgctgccgccggagctcgccctgatgaggaagctggagcagctggacgtcgcgcacaacctgctcaccggcgcggtaccgtcggggatatgcgacctgccgcgcctcaagaacttcacgttggcctacaacttcttcacgtgcgagccgccgtcttgtgcgcgcatcgtggcgcgggacggcgaccggagcaattgcctgcccaaccgctcgtcgcagcggacgccgcagcagtgcgccgccttctacgcccgcccacttgtcaactgcgccgcattccagtgcaaatcgttcgtcccgcccatgtcgccgccgcggcggcttccttcaccgccccgccttcgccacctccaccatcgccgccgccgccatctccacctccgccgctgccttcaccaccgccacctcaacttctgtcgtcaccaccactaccgcattccccacctccaccatccctgcctcctcccgcgccagtctatcacccgccatgcctcgtcctgccgccaccgctgccctgcaccccaacgcatccatggccatcgccaccaccatgttaccctggcccattgccacccacaaaccctgtccgatatgcatcgtctcctcctccacagcagcaccatccatggccatcagtacacccagttcaatatggatcgccactgccccctctgttgcatccgtagaaaccaatctcagatgcaaggaaggaaagctggttctgctcttgcccagcccccctgtggcaatggctagcagctgccagattcaccggtgtacgtggtcattgactcattgtcacgcttagcgaatagcgttggctgatggctataggcctcgagagagagcgtggtaagctccacagaattttctgagttatggtttgtcggtgtcggtcattgctgctgaaagggaatggattaagggtggtggggctttggagcgtgtaggcttgggatttgtggttaattgtctgtgaataaaggagagattgagagggacagaggaggattgtaggtccagcgatctatcatatatctgagtgtatagagaagttccagcccagttaagttcagtcaggcataaaagtttagaaacaacaaaaattccattgtcatttgttccttttgtatcacagctaccatcgattatttgctcttatattattcactccttttctttaacatccgcacttttacttatctttttttctaggttattcttattctccgctgcatgttagtcttgttagtattatctttaaatgatctttattcgttttcttcgtttcctctcctttgctgtgttgttactttcggcaagcgattcattgcatactgcaccagtttaattggttcattggatatgttccattggtgctactgatgaacgaaaattcatcccctctctaagaaattgttcggttagaggtggattgagcgggattgaagtggatcccctcgtattcaaatacatgaacgagaatctaaaagacataaaaaaaata

SEQ ID NO: 136097 - DNA, 1600 bp, Zea Mays
ctccctctcgaagcgacgcagaaccgctcgccagtgtcgcagtcgcctcctgtccctctcctctctctttgccgctgccctcctctaagcatctccctctcctactccctcctctcaaagcacttgttggccccccaccgccgcatctgcatcccataatcgcctacgccatcgccgccgccttcgggtccttctcgctcagcctcgactgctcgctcatcttcaccgaggcgctcctcacccccgccatcccctccgtgtcggcgtgcgccggcggcatcttgcccagtctcagccgatttatccttcggtctgttagggccttatcaaaccgccgccacggcgaactcgcgccgctgccatgttcgcctcgcgcacccaccatctcctcaacaacgttcaaaccgccaaccacgacatcctcctccacaacccgacctctcacgcatcccaacttggtgcggcgtaaacgcgcagcagcacttcgcctcggtcgaccacggcctgcccccaggcgttgacatccagatccatctcgctccgatctacattcgagaagtttgtctctggcatcgattccccaatccgaatcattgccgacgtcttctttgggtggacggtcgaagtcacgcgcacgcacatcccacacttgttcctccccggcggtgcattcagcaacaccgtcttcttctccgtgtcggagcacctcgggccataggggcagacccgtgaacgacattcttttggcgtgtcacgacctcctgtcgcaagctcgatgctctccccatcgacacgtgagccccttggagggagccccgacctagattttactgagagtttctcctcatcaacctagatctcagtttctctggactttactgagcactcaacattgtgttttttggttgctggtaaattgctcatttactgctatagttgattagtaaatataccggtattagtatttatatagttactggttacttgtaatacaaacatttttcattgaagcgcgtatatggtttgtaaaataccagaacaaggtcagtacttttatcattggcgagtatcttttatgtgagtaatatttttatttccatgtttatctacttagttctcgtggcatgctgccttttcagtattggacaatgctaatggagttacaactccaaggacaggaaggtatagtgcagatggagcaggtggtgatgcttctgtagagcttacacggccgtgcaggcacgcagctgccgcgcttggtgatttgatatttgtgtatgacggtttacgtggaggtcaaggaattccatccttgtgtttgcatggacctagaaaatgcagatttaagaatgatgcgagtgatggaggcctatcaggtcaaggaatttcatcctgatgtttgcaaggacccagaaattgcagatttaagaatgagcgagcgatggaggtctatcagggagtgttcttcgttgctatccattgtgaaacatgtcctacagtatcccttgccaaccagctcctgtatctgttgcctgctcgattcgttgaagcacagagtatggagaaaacacaacatatatcgcatggattatgatttgtt

SEQ ID NO: 136098 - DNA, 952 bp, Zea Mays
ttcatcggttccgcctcccgcgaaccgtgatgcttcttctcctcacagctgcaaagcatattcgctttccgccaccgcccgatccccacaccgccacccgccgcctctaaccccgctgtcccgtcttgtgctctgacctcaccgctggtcagtgtcagaccgcatggaccccaccgaccagtcgccggaggaggtgtactccgtgtgggcccttccgccggagcccgtccgtgatcgtttccgccgcatcatggagggcctccgcgctgcatacggcggccccgcctttgagccgcacgttaccgtcgtcggtgacttccgcggacgccgctcggaagctgtcaaggtgctccgcgccgccgccgccagcgtccaaccctacactgctcgtgtcacgggggttgcccgtggcagcttcttctaccagtgcgtctacatccttctcgaccccaccgccgaggtggtgggagctagcgatcactgctgcgccaacttcggttacaatagaaaaactccatacatgccgcatgtcagcctcttatatggagaccttacagatgaggagaaggaggaggcaaggaagaaggcagaggagctggacaaggatatctatgtattagagtttgagatatctgagcttgcgctctatagaacagataccacagataaaaccttggagtcatgggaattggtggaggtgtgccatcttggctcttgagaagaagttattagtttcctctccatggtgattctgctgtaagttaactcttggaatttataatgctttgtagtgtcttgttgactactttctaagaaactggtacgtaccactggcataatactttcaatgggaataaggaatgatgtgttgtgctcttctgattgtagtaaggaataatatacaatctgtgattctctgttagttttccatgaaatatactttgtattattc

SEQ ID NO: 136099 - DNA, 1249 bp, Zea Mays
ttcatcggttccgcctcccgcgaaccgtgatgcttcttctcctcacagctgcaaagcatattcgctttccgccaccgcccgatccccacaccgccacccgccgcctctaaccccgctgtcccgtcttgtgctctgacctcaccgctggtcagtgtcagaccgcatggaccccaccgaccagtcgccggaggaggtgtactccgtgtgggcccttccgccggagcccgtccgtgatcgtttccgccgcatcatggagggcctccgcgctgcatacggcggccccgcctttgagccgcacgttaccgtcgtcggtgacttccgcggacgccgctcggaagctgtcaaggtgctccgcgccgccgccgccagcgtccaaccctacactgctcgtgtcacgggggttgcccgtggcagcttcttctaccagtgcgtctacatccttctcgaccccaccgccgagatactagatagggcccggccctcggctggacgataggacgaggcgtgggcggtgggtggcgaccgcatatcaccgatcgtgtggtgccgtggctgggctgggcggcgggctctttggcacatacgctatgtaaggtcggcggcggctcgtggcactagagccggagggcggcgatgtgtgttgcagggccaaggcggtggcgtgtctctgcgtctgggaattgcgatcattacgaatcaattgcatcggcagttcggcacatttaaacaacgctgattagtctgcacgtggggccaggtggtgggagctagcgatcactgctgcgccaacttcggttacaatagaaaaactccatacatgccgcatgtcagcctcttatatggagaccttacagatgaggagaaggaggaggcaaggaagaaggcagaggagctggacaaggatatctatgtattagagtttgagatatctgagcttgcgctctatagaacagataccacagataaaaccttggagtcatgggaattggtggaggtgtgccatcttggctcttgagaagaagttattagtttcctctccatggtgattctgctgtaagttaactcttggaatttataatgctttgtagtgtcttgttgactactttctaagaaactggtacgtaccactggcataatactttcaatgggaataaggaatgatgtgttgtgctcttctgattgtagtaaggaataatatacaatctgtgattctctgttagttttccatgaaatatactttgtattattc

SEQ ID NO: 136100 - DNA, 126 bp, Zea Mays
ggtctagtgtcagttgtttttttaaattttccccctaaattaaatatttgcaaaattagattactagttcattttgatgccatggagtggtatggaaatgcactagtttactagtttttaactttt

SEQ ID NO: 136101 - DNA, 77 bp, Zea Mays
aattgttgtcgacttcactgcccgcgctggcttttgggcaaaagccatggcccctggtgtggtctcgcgcacggatc

SEQ ID NO: 136102 - DNA, 1564 bp, Zea Mays
ctcgtgtgctcgcaaacaagcgtccgagttcgaggcgtggcggcccgttttgcatgttgcgtttgcatgccgtagcagctctgctgccgatgttcctccccttccgaacccctcgccacctcctcgtctcgtgattcgaatcactgccccgctcccattgcgaacgagccagccgccacagctgttgccaggctcaagcggaagggctcgggttcccagacgtgccgggcgatcgatcggagagaggcggcgactcgggatcgggtgagtcgctcctccgtcttccgcttccgaaacccgcctccctgcgtgatgggcctgcttgggtgcgcctgttgccgcctcgtcgtcgtcgctcagacgctcaccacgcgcgtccgccgaatgctgcaggccgggggcgcggcggcaactgcacacacggggcgaagcggcggcgatgccaacctcatcgccctttgtcggcgacagcggcaccgcgggctccccgatccgcgccgagcgagcggtcggtgagcacggccgccgctacgacgtcttcgcgtcggacgcgatggataccgacgccgccgaggcggcctccgcttcggcgggggccttcgcgctcgatggtgtccactcgcctggacgtgcgtcaccggccaacatggaggacgccggcggcgcggccgcagggcacgccgcgcgaccgccgctcgccggctcccgcagcggtttccgccgcctcggtctccgcggcatgaagcagcgcctcctcgtcgtggccaaccgcctgcctgtgtccgccaaccgccgcggcgaggaccactggtcgcttgagatcagcgccggcggcctcgtgagcgccctacttggcgtgaaggacgtcgacgcgaaatggattggctgggcgggtgtcaacgtaccagatgagattggccagcgagccctcaccaaagctcttgcggagaagaggtgcataccggtgttcctggacgaggagattgtgcaccagtactacaatgggtactgcaacaacatcctgtggccgctgttccactatctaggactgccacaggaggacaggctggcaacaacgaggaactttgagtcgcagttcgacgcgtataagcgtgctaaccagatgttcgctgatgtcgtgtaccagcactaccaggagggggatgtaatctggtgtcatgactaccacctcatgttcctgcccaagtgcctcaaggaccatgacatcaatatgaaggtcgggtggttcctgcacacaccattcccgtcatcagagatttaccggacacttccgtcccgcttggagctgcttcggtcggtgctatgtgctgatttagttggattccatacttacgactatgcgaggcattttgtgagtgcttgcactagaatacttggacttgagggcacccctgagggcgtggaagatcaaggaagactaaccagggttgcagcgtttcctattgggatagactctgatcgtttcaagcgagcattggagcttccggcagtaaaaaggcacatcaatgaactgacacaacgttttgccggtcgaaaggtatga

SEQ ID NO: 136103 - DNA, 522 bp, Zea Mays
atggaggaattggaatttcaagaagccgacgtcctgtggccatggccagacacgccgtcgccggaggaggacagcagctacgacctactactactactagcgtcgtcgtcggctcccgagctgtacgagtacgatgccgccgtcgtcaccgacttctcgtgcgaaccgttcagcgagccagctgcgtcgtgcagcgcgagctcgacgacgagctccgagcccgcccccccgctgtcgtccgactggtctgacgatggcggcggcggctccttcctttctgccgccgggctcgagctcggcgacgcgacggaggagttcctggaggcggacgtgctgtggccggacgacgccgccgccaacgacggcgcggcggagtttttgtggcgtcgtcgtcgtcgtatagaggaggccgctgttttctgcggtaaacgtgaagggcgcggcgggcctttgaaggcgtcgtctccgatagatatccccttggccaccagaggtgccgtcgccgcgcgtcgccgttggtag

SEQ ID NO: 136104 - DNA, 2001 bp, Zea Mays
atgtcgctgtcgaagccggtctcggcacgccgcctcgtgccggcgctcttcccgctcgcgcacgcggacgccgcctcggccacggcttcccgccgcgagcgccgtaaggacacgttcgtcgcgacgcccccgatccccgcgccttccccgcgggcagtgcgcctcgcggagccgctccccacgctggcgccgtcacgcctcgcgttccacaaccggatcctcgcgctcctctcggggccccaggccgacctccccgaggcggcgctcctcacccgccacgcgctccactccaactgccgcccctcatccttcacctgcgccgccgtcctcgccgcgctcctccgcacgcgccgcctcgaagacttcttcgcgctgcaccgcttcgcgctccaagccgccgtcccgcccaccgccgccacgcacgtgctctacctatccgcgctcgccgcgcgccgcctcgccgacgacgcgctccaccacctccgcatcatcgcccgccccggctcccccgtgccgccctccccgacggcctaccgcgtcgtcgtcgagtgcctcgttgcagaccacggccggctcgcggatgccgtcaagctcaaggatgagatgctcacctctggattcgtcgggccggatcccaaggtctacagccttctcatggctgggttcgtgggtgctggggatggagccaaagccttggagctgtaccaagaactcaaggacaaggttgggggcgaaccaattctggatggcattgtgtacgggactctcatgaaggcgtacttccttatgggaacgggggaaaaggttatggagtgttacaaagaggtgctgtgtgttgaatctgcggtgaggtttggggccgagagctacaatgaggtggttgatgcgcttgggcagaatgggaggttggaggatgcacttaagctgttcgacagaatgcttgaggaacatgacccgccactgcggattgcagttgatctgagaagcttcagggtgatggttgatacctattgtgctgctgggagatttgaagatgcagttgcagtgttcagaagaatgggggaatggaagctggtgcctgatgtggcatcctataataatttgattcggcacctgcagattaaccagctgatagataaggcggaggtgctctacaatgagatgtgtgagagtggtgttggtgcggataaggagacatatttactgctcacggaagcatgcttcagtgttgatcgcatcgatgatggtatctcttactttgacaaaatggacgaattggagctgaagcctgatgcaactgcatatcataaacttattgatggcctggtgggtttcagtatggtcgacaaggctcaggaatacttcaatcagatgaaggagaagggagttaacccaagcatctcaagctacgagacattgctgaaggcatatattgctgctgaccggttggatgatgcagtcaatgttgcaaaaggtattcttttgaatgagaaggttctgttcagctatggaatgagggagcttttagaaggagcattacgtggagatgggaggggaaatgacatcgccaagttatatgaggatgtggagagggaaaaggctgaagcggaagcccgggctgcagaagagaaggcgagggcagaggctcttgccagagaagagagggagaggaggagagcagagattgctgctaaggatgaagccgcagctaaagccagtgccgctgccattgaagctatcctagcccataaaaggaagacagagaatgaaggaggagcgcctgctcctgatgcaaacaccctggatggtggctttctcagtaagctaggccttaaaacagccggagaaggggcacttcaagacaatccaacagaaagtggagacgatggagaaggggcacttcatggcaatccaacagaaagtggagacgatggagagggggcacttcaaggcaatccaacggaaagaaatggaggcaatgtgcagcagggatatctgtga

SEQ ID NO: 136105 - DNA, 2542 bp, Zea Mays
tcggcaaatatacactgcgcccgtccgcctccgcaatcgacaacgaaccactgggcaccggccgcggctcgcaagtggcctgcgttcctcttccacgctccgcccacccgtcccggggcccgccgcaacccgatccctccccgcgcccaacgatgccggccggccagccgcacgcgcacgaagccgctgccgccgcctgcgtcggcagcggcgcgaaccactccaaccaccgagtgccggcgcactcgccaccgccgctccccgcggaggtggtgccggcgtaccccgcccccggagtcggaggacgacgagacctgggtgtggacgcagatcaagggcgggaggcccgccgcgacgcggacgcgggagccggcgctcgcctccttcctctacgccaccgtgttgtcccacccgtccctgccccgctccctctccttccacctcgccaacaagctctgctcctccacgctcctctccacgctcctctacgacctcttcctcgccacgctcaccgcgcacccctctctccgcgccgccgtcgtcgccgacctcctcgcggcccactcccgcgaccccgcctgcgtcggcttctcccactgcctcctcaactacaagggcttcctcgccatccaggcccaccgcgtcgcgcacgtgctctgggcgcagcagcgacggcccctcgcgctcgcgctccagtcccgcgtcgccgacgtcttcgccgttgacatccaccccgccgccgtcgtcgggaagggaatcctcctcgaccacgccaccggcgtcgtcatcggtgagacggccgtcgtcggcgacaacgtctccatcctccaccacgtcaccttgggcgggaccgggaaggcggtgggtgaccggcaccccaagattggggatggcgtgctgattggagcaggggccaccattcttggtaacgtgaaaattggtgccggggctaagattggagccggatccgtggtgctgatagatgtgccggcgaggagcacggcggttgggaaccctgccaggctgattggtgggaagaaggccgagggtgcgaatgaggaggacatgccaggggagtccatggatcacacgtccttcatacgtcaatggtcggactacaccatttgagagcggttatccaaggtctattgctcttcttttgtatcactagtaatggtgatgtaccaaataccgagtacttgctctttgttgtgtgctatggtttgtgtattgtacttagaagcctagtggtgtttatgatcattgtcagctgagtgtgccatgcctgaatactggtaaatttcgattgatggatggacaaatctgtatgagagttggttggaatttgtcacattccttatgaaacaaattctgaggacagaatgaagcgtgtaaagcgattatcttatctgatgcagtttttgttatttgatattatgccatttattctctgaagagacttattaatcttagaatagcctctcatcaagtttgttttgcatgtccactctgtaaataagtacaaagttggttggaatttgtcacagtcctgaaccaagctccaaggacagaattaagcatgtaaattgatatattatatattgcagtttttgttatttgatgtcatgctatttattctctgatactgtggttttgttaattgaataattgaatgtggtgcattgtcccatctagaagatactagatcttagaataaccttccattgagtttattttgcatgcctactttatagataagtatgctttactgccacaaacttgttatgaaacgtagtcctggagtattttcgttagtaactattatctggaaaaaaatatgtctagaggtgatgcatgtctgtatgatatattctgtttcgttggaacacttagggtgtggatacaagggctaattattagctagctatttttaagcccaaattagttctagtgcattcaaacaagagagttagtagatgagataatttttagccaagtcttcaactagttattatacaactagctagccaaccacagctaatttgggttatattttagcctcacctaggaacaaacaggcccttaaaattgctgctgctctgttcaggaagaaaactaatgttagtgtattatataaacaagttttcgctgttcgtgatggatgcggctttagttcattctcatcaactttcacatgttttcttattcattcatttctggaaggacacagattcaccatcgtttgtctgcccagagggagtacttaactaccaaattggtcagttcacatttttgttaaacctttttcttggtgtgtttcttttaactttagttatttgctttgacaattaatgtccaagtatcagacaatgcggaaggcactggttgaaatcacatgacatcacatgtgaccttttcaatttcaaaactatggatttctatatctgaaaagtaactctcatatctgtttttttccaatctcaaaacatgtgaccttggtatctgtgattaagcacaattatatttatatgcaatagggtac

SEQ ID NO: 136106 - DNA, 897 bp, Zea Mays
atggcgccggcaccctcctcctccaggaccagggccctcccccccgccatcctgtacatcctcctgtccctgcagatcgccgcggcggccgcggccatggaccccgtcgagcgggagacgctgctccgcgtcatggagtccgtctcctccgaccgcgactggcgcgaggccgccggcgccgacccctgcggctcgccgtggccgggccgcctcggcgacctcgcccagctgcagaagctggacctcagctccaacaacctcaccggcggcgtcccgcccgccatcacccgcctcagggcgctcaccttcctggcgctcagcaacaacggcctgcgcggccgcctccccgccggcctctccggcctccgcgacctgcagtacctcatcatggagaacaacccgatgggcgtcccgctgccgcccgagctgggcaacatcgcgcggctgcaggagctccgcctcgccaactccggctactcgggctccataccggacacgttcggcctcctgtccagcctcaccacgctgtcgctggagaacaacagcctcaccggacgcatcccggcggggctcagccgcctgaagcgcatgtaccacctcaacctcagcaagaacgggctggacggcgtcgtccctttcgatagcgcgttcctcaggcagctcggccggaacctggacctgagcggcaacccgggcctgtgcgtcaccgaccgggccgtcgtgccggacgtgggcgtcggagtctgcggcggcgacgtcgcctgcgaaagctcagccgccgcggagagctcgcttgtcgggagagtggtcaggagagaggtgacgaggggtcgctggccggccgggctgctcaggcccgccgcggtagcgctgtgcagctgcggccttttgctctga

SEQ ID NO: 136107 - DNA, 341 bp, Zea Mays
aggtatgggatacccggtaacaatcttgctgcaacagttttgaagtccacgatgattacatttcagatatgacctatgtggctgactcaaatcagatactggccacaagcggggatgaaactttgtctatgaacaccctgcggaggaataaagtaaggtcacaatctgaattttcagaagatgagttggtatcctcggtgctaatgaagaacggtaaaaaggttgtttgtggaactccaagtggagccctcttattatattcatggggatactttaatggttgctggtaaccttgttttcatcacacaacagtacctgctgaaataaaatatcaccaagat

SEQ ID NO: 136108 - DNA, 2120 bp, Zea Mays
tctcctctctctctccccggcatttctctctctggcgtcactcgcgtgtcaggcgcattctgcctctttctttctccccctcccctcccctcccctgcgggcttctctcacgagctcccccggcctcgccgccgccgcctgctccggcgggcgggacccagctcgcagcgtctcccctgcggcgaggtacacgatggagggagcgggaagagatgccaaccctttgagcggttacagaattggcaaaaccctgggaattgggtcgttcggtaaagtgaagatcgcggaacatatattgactggtcataaggtggcgatcaagattctcaatcgcaagaagatcagaagcatggatatggaagagaaagttaagagagaaatcaagatactgagattatttatgcatcctcatatcatacgcctttatgaggtgatagatacacctgctgatatctgtgttgttatggagtatgttaaatctggagagttgtttgattacatcgttgagaagggaaggctacacgaagaggaagcccgacacttttttcagcagatcatatctggtgttgaatattgccataggaacatggttgctcaccgtgatttaaagccagagaatcttcttttggattcaaaatgcaatgttaagattgccgattttggcttaagtaatattatgcgtgatggtcactttcttaagacgagttgtggtagcccgaattatgcagcacctgaggtcatatctggtaaactatatgctggtcctgaagttgacgtctggagctgtggagttattctttatgctcttctttgtggcactctcccatttgacgatgagaatattccaaaccttttcaagaaaataaagggtggaatatatacccttcctagtcatttgtcaccttcagcgagggacttgattcccagaatgctggttgttgatccaatgaaaaggattacaatacgtgaaatccgtgaacatgtgtggttcaagatccgacttccgcgctatttggctgtgccgcctccagacactgctcaacaagttaaaaaggtcgacgaggaaactcttaatgatgttattaagatgggttttgacaagaatcagctaattgaatctctgcaaaacagattgcagaatgaggcaacagttgcctattatttactcttggacaataggcttcgtacaaccagtggttatcttggatctgagtttcaagaatctatggactcatctttgtctcaagtaatcgctgaaacaccaacttcagcaactgaacttcgtcagcatgggttttcagaatctccaggttctggcttgaggcagcattttgcagctgaaaggaaatgggcccttggtcttcagtctcgagcacatccacgagaaataataagtgaagtgcttaaagctctgcaagaactgaatgtttactggaaaaagattggacactacaacatgaaatgcagatggagtcctggctgccttgagagtatgatgcataacagtgatagcttcagtgcggagtctgctataattgaaactgatgttttcatggagaaatcaaccccgacagtgaagtttgagattcagctttacaaaacgagggatgagaagtaccttcttgacctgcaaagggtcagtggatcacatcttctctttctggacttgtgttccgcctttctaactcagctgagagttctttgagcctgacatgattggcttcccaagcactccttgatgcacccagtggagtttcaagttacatttgagatgtacataatgaccatatataatcctccagtagattatattttctggagcatgtaatgtagacgttagaggcttgtcctggtttgccaagatggttgttacctaaggtcctaacaagaggccgcaggcgagcccagtccaattagatgatgtgaaaaatttttggcctttttttagtctttggacatgttatcaaattaaggaggtcgtgctagcacgatacccaaactaagaaataccccattgaaaactgaaaacaaagcttgctcgttcatactagtgtcaactctggcactaaagactggtgcttattttactccatagacagtaattagatgtcacattcacg

SEQ ID NO: 136109 - DNA, 1931 bp, Zea Mays
gtctgggaccatcaagacgttatcgcagtcgcagcgagctgcgagcgcctcccgatctcccaccaccaccactgaacccgctgcttcccctcctccacacctctcggtttcgggaaacctctcccccgttcccctcgaagcctacgggctcggggggcttcgatcgaatcgaatcggatcggatcggaagcatggagatctcgctcgaggcgtcgtgggtgggcgtgcagcggcacgggcaggacctggcggaccgcctcgcgcagggcttctcggggctcctcctccacgcgcagccgccgcagctgcccccatggtcgccggcggcgctgttgccgcccaagctcgtcatccccttcgacctcgacctccccgttgtccccttcgtcgccgggatgcgccgcggggtcgggaccgtggacctccccgccgtggccgtctcgtcgctcgtcgagatcggcggcaggctcgggcaggcggggtccgagctcggtgcggcggttcagcatctcgcgcgccaggtgcctgtgcctgtgcccttccggaaatgggaagccgcacagccgccgaccgtggtgacgggggatgttgcgctcgctgtggggacggttgggtccgcgaacgtcgctttggaaagggctgtagacatagggtccctcgaggtggcagcggctgctgctgcggcggccactggaagtgccactgcaggtagtgtgggcgcggttggggccatggacgacgatagactggatgatgaggaagacggatttgattgcgaaattgggacattggagaacattaagaaggctaagggcactgtaaatgtctcagcaacttacaacaccaggcaccatgactttgagagttcagtagtcgcacgaggagacctttggaggttggagtcatcgcgtggcaatttaacttcagggaatgatagctcaccacttttccttgttcaacttgggcctttactgtttgttcgagactccacgcttcttttgccggttcatctgtcaaagcaacaccttctttggtatggttatgatcgcaagaacggaatgcactccctatgcccagctatctggtcaaagcatagaaaatggatgctgatgtcaatgatgtgcctcaaccctgtagcttgttccttcatggatgtgcaatttccaaatggacaaatgacatatgttgctggtgaggggataacagcaagtggttttatccctttatttggtggattactccaagcacatgcaaagtgtcccggtgatacaagagtgagcttctccttcaagaacaaacaaggtactaggttcagtccaacgtttcagtggcctgacaattctgtttcatttggagtcgcacaagctgtagcatggaagagatctggccttatggtcaggcccagcattcaaatcagtgtttgccccactttcggaggaactgatcctggaatatgcaccgagtttgtccactctttgaaggaggaagtcagcgtaatgtgtggtttctcttgctcaagacatccctcagcattcacagctctctctcttgggcgatccaaatggaatggccaggtcggcagttcgggactagtaatcaccttggagacaccccttgacaacatggcaaggccttctttatccgttcaattgaacgggggtttcgagttctgacatttcccccgtgggctctagaatacaactgtatatactgtatctcatagcgagaagatgatatgccactgtatatattgcacacatgtagctgtgattaagtagatatcttcccaaccggtgaagtgtatagtcctaaaaacagacaaatggcttactgttttggttcactgaataaatttgaaggcttgtatgtcgtacctgtgcgttcgaagtatttgtcttcttcaataaaaattgtagtactcctatgtccgt

SEQ ID NO: 136110 - DNA, 2188 bp, Zea Mays
gtctgggaccatcaagacgttatcgcagtcgcagcgagctgcgagcgcctcccgatctcccaccaccaccactgaacccgctgcttcccctcctccacacctctcggtttcgggaaacctctcccccgttcccctcgaagcctacgggctcggggggcttcgatcgaatcgaatcggatcggatcggaagcatggagatctcgctcgaggcgtcgtgggtgggcgtgcagcggcacgggcaggacctggcggaccgcctcgcgcagggcttctcggggctcctcctccacgcgcagccgccgcagctgcccccatggtcgccggcggcgctgttgccgcccaagctcgtcatccccttcgacctcgacctccccgttgtccccttcgtcgccgggatgcgccgcggggtcgggaccgtggacctccccgccgtggccgtctcgtcgctcgtcgagatcggcggcaggctcgggcaggcggggtccgagctcggtgcggcggttcagcatctcgcgcgccaggtgcctgtgcctgtgcccttccggaaatgggaagccgcacagccgccgaccgtggtgacgggggatgttgcgctcgctgtggggacggttgggtccgcgaacgtcgctttggaaagggctgtagacatagggtccctcgaggtggcagcggctgctgctgcggcggccactggaagtgccactgcaggtagtgtgggcgcggttggggccatggacgacgatagactggatgatgaggaagacggatttgattgcgaaattgggacattggagaacattaagaaggctaagggcactgtaaatgtctcagcaacttacaacaccaggcaccatgactttgagagttcagtagtcgcacgaggagacctttggaggttggagtcatcgcgtggcaatttaacttcagggaatgatagctcaccacttttccttgttcaacttgggcctttactgtttgttcgagactccacgcttcttttgccggttcatctgtcaaagcaacaccttctttggtatggttatgatcgcaagaacggaatgcactccctatgcccagctatctggtcaaagcatagaaaatggatgctgatgtcaatgatgtgcctcaaccctgtagcttgtggttgtccccattaatcacctgcaggaaaatgggattttgaaatagagtcttcagaattaccgtgcaggaaaatgtgacttgttcataattaatgtgatgttcttattttgtaatggcagcatttgagcccatgaagaatgtgatacttattttctgtggcatgcccttttgtagaagtacagattgcatcatcttaccgctgcactatgacatatttctgctgtttattgctctttgttttgcttttttgtttcagtccttcatggatgtgcaatttccaaatggacaaatgacatatgttgctggtgaggggataacagcaagtggttttatccctttatttggtggattactccaagcacatgcaaagtgtcccggtgatacaagagtgagcttctccttcaagaacaaacaaggtactaggttcagtccaacgtttcagtggcctgacaattctgtttcatttggagtcgcacaagctgtagcatggaagagatctggccttatggtcaggcccagcattcaaatcagtgtttgccccactttcggaggaactgatcctggaatatgcaccgagtttgtccactctttgaaggaggaagtcagcgtaatgtgtggtttctcttgctcaagacatccctcagcattcacagctctctctcttgggcgatccaaatggaatggccaggtcggcagttcgggactagtaatcaccttggagacaccccttgacaacatggcaaggccttctttatccgttcaattgaacgggggtttcgagttctgacatttcccccgtgggctctagaatacaactgtatatactgtatctcatagcgagaagatgatatgccactgtatatattgcacacatgtagctgtgattaagtagatatcttcccaaccggtgaagtgtatagtcctaaaaacagacaaatggcttactgttttggttcactgaataaatttgaaggcttgtatgtcgtacctgtgcgttcgaagtatttgtcttcttcaataaaaattgtagtactcctatgtccgt

SEQ ID NO: 136111 - DNA, 1847 bp, Zea Mays
agcgagctgcgagcgcctcccgatctcccaccaccaccactgaacccgctgcttcccctcctccacacctctcggtttcgggaaacctctcccccgttcccctcgaagcctacgggctcggggggcttcgatcgaatcgaatcggatcggatcggaagcatggagatctcgctcgaggcgtcgtgggtgggcgtgcagcggcacgggcaggacctggcggaccgcctcgcgcagggcttctcggggctcctcctccacgcgcagccgccgcagctgcccccatggtcgccggcggcgctgttgccgcccaagctcgtcatccccttcgacctcgacctccccgttgtccccttcgtcgccgggatgcgccgcggggtcgggaccgtggacctccccgccgtggccgtctcgtcgctcgtcgagatcggcggcaggctcgggcaggcggggtccgagctcggtgcggcggttcagcatctcgcgcgccaggtgcctgtgcctgtgcccttccggaaatgggaagccgcacagccgccgaccgtggtgacgggggatgttgcgctcgctgtggggacggttgggtccgcgaacgtcgctttggaaagggctgtagacatagggtccctcgaggtggcagcggctgctgctgcggcggccactggaagtgccactgcaggtagtgtgggcgcggttggggccatggacgacgatagactggatgatgaggaagacggatttgattgcgaaattgggacattggagaacattaagaaggctaagcaacttacaacaccaggcaccatgactttgagagttcagtagtcgcacgaggagacctttggaggttggagtcatcgcgtggcaatttaacttcagggaatgatagctcaccacttttccttgttcaacttgggcctttactgtttgttcgagactccacgcttcttttgccggttcatctgtcaaagcaacaccttctttggtatggttatgatcgcaagaacggaatgcactccctatgcccagctatctggtcaaagcatagaaaatggatgctgatgtcaatgatgtgcctcaaccctgtagcttgttccttcatggatgtgcaatttccaaatggacaaatgacatatgttgctggtgaggggataacagcaagtggttttatccctttatttggtggattactccaagcacatgcaaagtgtcccggtgatacaagagtgagcttctccttcaagaacaaacaaggtactaggttcagtccaacgtttcagtggcctgacaattctgtttcatttggagtcgcacaagctgtagcatggaagagatctggccttatggtcaggcccagcattcaaatcagtgtttgccccactttcggaggaactgatcctggaatatgcaccgagtttgtccactctttgaaggaggaagtcagcgtaatgtgtggtttctcttgctcaagacatccctcagcattcacagctctctctcttgggcgatccaaatggaatggccaggtcggcagttcgggactagtaatcaccttggagacaccccttgacaacatggcaaggccttctttatccgttcaattgaacgggggtttcgagttctgacatttcccccgtgggctctagaatacaactgtatatactgtatctcatagcgagaagatgatatgccactgtatatattgcacacatgtagctgtgattaagtagatatcttcccaaccggtgaagtgtatagtcctaaaaacagacaaatggcttactgttttggttcactgaataaatttgaaggcttgtatgtcgtacctgtgcgttcgaagtatttgtctt

SEQ ID NO: 136112 - DNA, 1381 bp, Zea Mays
gagaaaccacggccgacgtggcggcgcgcggggactttccgctccgccatgcaagcgcgcgccaagcccccgggatagagacgggacggacgggcccgtctgaccgacgaacctgttctccccgcagcggacgaaccctcctcgctcagtcctcgatcccggccggccggcagagatctcgccgccgtcgcgcgctctacctgcgccccgctgatgagttccgagagcgactccttggcctcacggcggtccaagaaacccaagtattccaagtttacccagcaggagcttccagcatgcaagccaatgttaactcctggaatcgtcatcggtgctttctcgctcatcggtgtcttcttcgtcccgatcggcctcgcttcgctatccgcgtctcataacatcgttgaggtgatagatcgatatgacgccgagtgtgtgtccgccaacgacaaggtcggcttcatccaggacaccaagaccgacaaggcgtgcacaagaaagatcaccgtgccaaagccgatgaaagggccgatacacatatactaccagctcgagaatttctatcagaaccatcgacggtacgtgaagagccgtaacgacatgcagctgcggaacaagggcgacgcgagcacgatcgccaactgcgagcccgaggccaccagcgaggacggcggcaagcccatcgtgccctgcggcctcatcgcctggagcctgttcaacgacacctactccttctcgctcaacagcaaggccgtccaggtgaacaagaagaacatcgcctgggacagcgacaagatcaagaagttcggcagcgatgtctaccccagcaacttccagaaaggggggctcatcggtggtgctaaactggacgagaaaataccactgagtgagcaggaggacctgatcgtgtggatgcggaccgccgcgctcccgacgttcaggaagctgtacggcaggatcgaggcggacgccatggcgagcgacgagatcacggtggtgatccagaacaactacaacacgtacagcttcgggggcaccaaggcgctggtgctgtccaccacgtcgtggatcggcggcaggaacaacttcatcggcgtcgcctacgtcgccatcggcggcgtctgcctcttcctcgccctggccttcgtcatcctctacgtcatcaagccaagggcgcttggagacccatcgtacttgtcatggaacagagagaacccagaccatcccaactgagggaaggctagctgctagacctgctctcggtctcgtacagtgtgtgcagagtgaagaagactatttgctgtgttcattgttgatttgttttgtccataagttaaacggaattaatctgatgcgtggaatcaagcaaaatgttgtgttc

SEQ ID NO: 136113 - DNA, 1397 bp, Zea Mays
gccgagggcagtgtgaaaacggcactgtccccgcaaagaaaagcagacccctcgccgccgcgtacctcctcgttggagcacgatcttgctggacgtcgccgcattcccaaatccgttaggcaatggcgccccctctcctctcgccaccgctgcttgccgacgcactcgcgacgccgccgcggtctttcctctgctcccgcccaacgcggcaactgccaaccgtcgggctcgccggagccgtacgtggcgaccgggggagatggagtgtgcggagaagggatcccagggtatttgccacctccacggaagcggatcgtgaaaggtcggaggaggatgtcgccgacgattactattccgttctgggtgtgatgccagatgcaacccctgaggaaattaagaaggcatactacagttgcatgaaggagtgccaccctgaccttagcggggaccaccctgacgtgacaaacttctgcatgttcatcaacgaagtttactcggtgttgagtgatccagcacagcgtgctgtgtatgatgagatccatgggtacacagcaacagcaatcaaccctttctttgatgacagtgcaccgaaggatcatgtgttcgttgatgagtttacctgcattggatgtaaaaactgtgccaatatttgccctggagtctttcaaattgaggaagactttgggaggtcaagagtctattcccagtcaggtagcacagagctaattcaagatgccattgatagttgcccagttgattgtattcactggacttccgctgcacagctgtcactcctcgagaacgagatgcgtagagtagagagggtgaatgttggtttgatgcttgctggtatgggagcttccatcaatgttttccggatggcaagtgctcgttgggaaaagaggcaagcaaaagtcttggagaaagccagaacacggatggtgaaacaggagacgtcagacacgaggagctcttggagcgaggtctgggcatcatccccaccacgagacgaccaaagcaacggcggtaatgatggggaagcatcggagagggccaagagagcagcagctgctgccaggcggtggcgagagttctccaggcgaggtgcggacaggcctccaacgcacaagcttcccgaggcagtgggcaacaaggattagtagtagtagtaaatttgatcatattggctaaatgtacagtgccattgtctgtagaggcttgcagtgccttcccagctttgcacgcactcatgtgctccatttgtaaaatctaggtgagtaggtatatagtgatgttgataacctgaacctgtacgtagaagacaacaagcacccagtgctgcagaacaaaggtcaaacatgtacaatacaatagaacgaatacaagtgtatacatac

SEQ ID NO: 136114 - DNA, 1643 bp, Zea Mays
gccgagggcagtgtgaaaacggcactgtccccgcaaagaaaagcagacccctcgccgccgcgtacctcctcgttggagcacgatcttgctggacgtcgccgcattcccaaatccgttaggcaatggcgccccctctcctctcgccaccgctgcttgccgacgcactcgcgacgccgccgcggtctttcctctgctcccgcccaacgcggcaactgccaaccgtcgggctcgccggagccgtacgtggcgaccgggggagatggagtgtgcggagaagggatcccagggtatttgccacctccacggaagcggatcgtgaaaggtcggaggaggatgtcgccgacgattactattccgttctgggtgtgatgccagatgcaacccctgaggaaattaagaaggcatactacagttgcatgaaggagtgccaccctgaccttagcggggaccaccctgacgtgacaaacttctgcatgttcatcaacgaagtttactcggtaagagcctgcaatcatgttttaaatttatgcacgctgcgtgcaaaacgttttcttattggttattgcttttgaaatttgtcgttgcactgagctaacatggggtgtgcaagggcaggtgttgagtgatccagcacagcgtgctgtgtatgatgagatccatgggtacacagcaacagcaatcaaccctttctttgatgacagtgcaccgaaggatcatgtgttcgttgatgagtttacctgcattggtatattgattctctcttgtgaatagaaatttttttaagggtcataaggagcatgattcgtgtatctactctgttgcgtctgcaatattgcaggatgtaaaaactgtgccaatatttgccctggagtctttcaaattgaggaagactttgggaggtcaagagtctattcccagtcaggtagcacagagctaattcaagatgccattgatagttgcccagttgattgtattcactggacttccgctgcacagctgtcactcctcgagaacgagatgcgtagagtagagagggtgaatgttggtttgatgcttgctggtatgggagcttccatcaatgttttccggatggcaagtgctcgttgggaaaagaggcaagcaaaagtcttggagaaagccagaacacggatggtgaaacaggagacgtcagacacgaggagctcttggagcgaggtctgggcatcatccccaccacgagacgaccaaagcaacggcgatggggaagcatcggagagggccaagagagcagcagctgctgccaggcggtggcgagagttctccaggcgaggtgcggacaggcctccaacgcacaagcttcccgaggcagtgggcaacaaggattagtagtagtagtaaatttgatcatattggctaaatgtacagtgccattgtctgtagaggcttgcagtgccttcccagctttgcacgcactcatgtgctccatttgtaaaatctaggtgagtaggtatatagtgatgttgataacctgaacctgtacgtagaagacaacaagcacccagtgctgcagaacaaaggtcaaacatgtacaatacaatagaacgaatacaagtgtatacatacattcgctgtaccatcgcggtacgtagaacccctgtaaccgc

SEQ ID NO: 136115 - DNA, 2296 bp, Zea Mays
gccgagggcagtgtgaaaacggcactgtccccgcaaagaaaagcagacccctcgccgccgcgtacctcctcgttggagcacgatcttgctggacgtcgccgcattcccaaatccgttaggcaatggcgccccctctcctctcgccaccgctgcttgccgacgcactcgcgacgccgccgcggtctttcctctgctcccgcccaacgcggcaactgccaaccgtcgggctcgccggagccgtacgtggcgaccgggggagatggagtgtgcggagaagggatcccagggtatttgccacctccacggaagcggatcgtgaaaggtcggaggaggatgtcgccgacgattactattccgttctgggtgtgatgccagatgcaacccctgaggaaattaagaaggcatactacagttgcatgaaggagtgccaccctgaccttagcggggaccaccctgacgtgacaaacttctgcatgttcatcaacgaagtttactcggtgttgagtgatccagcacagcgtgctgtgtatgatgagatccatgggtacacagcaacagcaatcaaccctttctttgatgacagtgcaccgaaggatcatgtgttcgttgatgagtttacctgcattggatgtaaaaactgtgccaatatttgccctggagtctttcaaattgaggaagactttgggaggtcaagagtctattcccagtcaggtagcacagagctaattcaagatgccattgatagttgcccagttgattgtattcactggacttccgctgcacagctgtcactcctcgagaacgagatgcgtagagtagagagggtgaatgttggtttgatgcttgctggtatgggagcttccatcaatgttttccggatggcaagtgctcgttgggaaaagaggcaagcaaaagtcttggagaaagccagaacacggatggtgaaacaggagacgtcagacacgaggagctcttggagcgaggtctgggcatcatccccaccacgagacgaccaaagcaacggcggtaatgatggggaagcatcggagagggccaagagagcagcagctgctgccaggcggtggcgagagttctccaggcgaggtgcggacaggcctccaacgcacaagcttcccgaggcagtgggcaacaaggattagtagtagtagtaaatttgatcatattggctaaatgtacagtgccattgtctgtagaggcttgcagtgccttcccagctttgcacgcactcatgtgctccatttgtaaaatctaggtgagtaggtatatagtgatgttgataacctgaacctgtacgtagaagacaacaagcacccagtgctgcagaacaaaggtcaaacatgtacaatacaatagaacgaatacaagtgtatacatacattcgctgtaccatcgcggtacgtagaacccctgtaaccgcagtgtaggtgtagcttctcgcttttgtgtggctgtgcttgtgcagatgaattccggggcaaatttcctttggcagcagtggcacattctcgcgcatctgccaaaggagaagttgcccagaaatgcaggtgcacatcctgggtctcgcgcgctcggagccaatgaatgttctgcgtgtcgtgtgttggtgtgtatgtaggcgcaggctactgatgactgtgtgtgcactgtgcagggtatttgtactcgctcctggaactgaagagtggtatgtaaggcgcttctgtgctgctgcagatcaaaggcacgatgaggaatcaaatgaggatatacctcaggacaatgcctggtccagccgtcgtctagacgacgctgtcgctgcccacctacgaggagaaagaacaaaaggcatgcaatgcaggctggaatggcgcgctacgtgttgggaggcaagcaagctttctttactcttactccgagctgagccggaggatcggagatagggcaggcttttgcagattattcccggtcctggctccggatcgagaccactgcaagatcgacgagaggatcgaatcgtggaaaggcgagcgagccctaaagagtcggatcggagtgggcggatatccacgagcatgttcgtctcgtcgtcgccgctgcttgcattgtgtggatcggtgggcggtggctcctgcctgcttcggaccggcggatcgggatcggccctctcctcctggcagcgcggccgcggcgcatgcaagcaccacgcgggcggccactaatggctgtgcgatcggtgatgcatggggctcgtcgtgtgctgaaaaccaggcctgacatgtggttcgaactttattac

SEQ ID NO: 136116 - DNA, 1393 bp, Zea Mays
cggcactgtccccgcaaagaaaagcagacccctcgccgccgcgtacctcctcgttggagcacgatcttgctggacgtcgccgcattcccaaatccgttaggcaatggcgccccctctcctctcgccaccgctgcttgccgacgcactcgcgacgccgccgcggtctttcctctgctcccgcccaacgcggcaactgccaaccgtcgggctcgccggagccgtacgtggcgaccgggggagatggagtgtgcggagaagggatcccagggtatttgccacctccacggaagcggatcgtgaaaggtcggaggaggatgtcgccgacgattactattccgttctgggtgtgatgccagatgcaacccctgaggaaattaagaaggcatactacagttgcatgaaggagtgccaccctgaccttagcggggaccaccctgacgtgacaaacttctgcatgttcatcaacgaagtttactcggtgttgagtgatccagcacagcgtgctgtgtatgatgagatccatgggtacacagcaacagcaatcaaccctttctttgatgacagtgcaccgaaggatcatgtgttcgttgatgagtttacctgcattggatgtaaaaactgtgccaatatttgccctggagtctttcaaattgaggaagactttgggaggtcaagagtctattcccagtcaggtagcacagagctaattcaagatgccattgatagttgcccagttgattgtattcactggacttccgctgcacagctgtcactcctcgagaacgagatgcgtagagtagagagggtgaatgttggtttgatgcttgctggtatgggagcttccatcaatgttttccggatggcaagtgctcgttgggaaaagaggcaagcaaaagtcttggagaaagccagaacacggatggtgaaacaggagacgtcagacacgaggagctcttggagcgaggtctgggcatcatccccaccacgagacgaccaaagcaacggcgatggggaagcatcggagagggccaagagagcagcagctgctgccaggcggtggcgagagttctccaggcgaggtgcggacaggcctccaacgcacaagcttcccgaggcagtgggcaacaaggattagtagtagtagtaaatttgatcatattggctaaatgtacagtgccattgtctgtagaggcttgcagtgccttcccagctttgcacgcactcatgtgctccatttgtaaaatctaggtgagtaggtatatagtgatgttgataacctgaacctgtacgtagaagacaacaagcacccagtgctgcagaacaaaggtcaaacatgtacaatacaatagaacgaatacaagtgtatacatacattcgctgtaccatcgcggta

SEQ ID NO: 136117 - DNA, 1285 bp, Zea Mays
actggtccatagggtcactggcatgtggttcccactctgcagactctgtccacaccggctcacgagggtgccacctcccttctcgtttcttcctgtcctggtgtcctgcccacctctcctctgatcctctccgccatttctgtgcgcatctggagctgttgttctaaacccccaaaccctccgtcctaacctctgcgccaccggcgtcaccaccgccggagccgcagccatgaacgccttcaggttcctcggggacatgacccacctcttctcggtcctcgtcctcctcctcaagatctacgccaccaagtcctgctcaggggtgtcgaggaagacgcaggagctgtacatgttggtgttcgtggcgaggtacctggacctcttcacggattatgtctcgctctacaactcggtgatgaaggtggtgttcatcaccagctcggcggccatcgtgtggtgcatgcgccgccacccgcaggtacgaaggacgtacgacaaggagcaggacaccttccgccacacggtgctcgtcgccgccgcattcctgctcgcgctgatattccacgagcggttcaccttccgcgagatatgctgggcattttcaatctatttggaggcagtggctattctcccacaattagtgttgctccagagaagcagaaatgtggataacttaactggacaatatgttttcttccttggggcctaccgtgcgttttacattctaaactggatttatcgttatttcacggagggtcatcgcagcagatggatcccttggcttgctggtttggtgcaaacagctctgtatgcagatttcttttactattatttcttaagttggaagaacaatgtgaagctcgagttgcctgcttgagcatgcttcgttttgccagaaagcgtgcaagctacgtgactcaagttttatagaatttagttgattatatgggcatggagagacttggtaatgacgtgagcagttgcagttgatgccaaacccttgatcttgtctgcgaaaattggcatttgtgtttcccatggccaagacgatacgattccaaagctaacagatgctgctgcacagaagtaggctagttcctttttgtacctcaatacttttgatatggaaaatcatatacagttcagttggtctgtttaacattcgatttcacttgctccaaacgaaaaatgcgatccaatgttcgtgcgatttctgtgtaaaactgttacacttttgactgtcctcaacaatccattttttatatataatgtcttggtgttactt

SEQ ID NO: 136118 - DNA, 1637 bp, Zea Mays
tcccctagtagagtcagaagccccaatccatcagcagattgaataatctggcatcattggagcgtacgtccactacgaagtacgaccaatctggccgccttgtgagttgcgagttgcgacttctagcatatcatcggcatcgcctgctctgctggtgaagagcgaaggccgaaggggccaagaccacacgccttccaaggtccacacctaccccaagagccgcccgccccatcagccgccacgatgtgcaccctggagcagcgcggccgcgtcttcgtcctcacccttaccggcgacggcgagcaccgcctgggccacgccctcatctcctcgctccgatccgccgtcgcctccgcggcggctggtgcggccaaggcggggcccggggccgcgctcgtcaccgtcggcgagggccgcttcttctccaacggcctcgacatcgggtgggcgggaacctcccgcgcgcgcctaggcgagctcgtcgacgcgctccgcccgctcgttgccgacctcctcgcgctccccatgcccaccgtcgccgccgtcaccggccacgcctccgcgggcgggtgcctcctcgcgctctgccacgactaccgcatcatgcgcggggaccgcggagtgctctacatgagcgaggtcgacatcggcctccccctcccgccctacttcatggccgtgctccgcgccaagatcaccgccgccaacgcgctccgcgacgtcgtgctcaggggcaagaaggtcagggccgcggagggcaaggatatgggcatagtggatgccgtctacccctctgcgctcgagacggcggaccaggccttcaagtttgccgagcagctcgcggcgaggaagtgggacggaggcgtctacgcgtccataaggatgtccatgtaccctgaggcctgcaggtcagttggaatcgtcgaggagagcgatgaggagaagcggaagcacttcgcttctaagctctaacttcgtgattggctgatgagagggtttctgtggaagcatggaggaacctacacattctgtatctgtacatcgtccaaccattggcgctgtcgctacgtgtgaagtacacaccgtgtacttgtgcagaccttgtaatttttacttgcctggtagcgggaaataaatcgaagctcctctcaccctttcttgaataatttgccccagtaacattatcgatatgtgttcatgtgttgtgcttgattccacataatttcttggtcctgggagtttggaagcttagaacttgcgaatggtcccgtggtggggtatcttgcaagttgcaagcgggtacactccttggctgcagctcgccatggattagctcttttccggctttgattgaccggaaaatttccataacgaaattgtcgcatcatgtctaacatgagatgacgagagtgcctcgatcatgtcagtgtcatgctggctgtactatttaggcttgtttcaaaggaaagaaaaattgacatgaattttgaggaatggcatttacgtacaaagttgcttacgaatttggactagaagatacaactctgagtcgtacagaattttggtgtagcttttgttttgtagggcatataaaatctagaaactctagaatgattttctaaatacaagagtcagtt

SEQ ID NO: 136119 - DNA, 2507 bp, Zea Mays
aatttgactgatgttgttggcttgtagtaagaattgcttagtttgcgatccaattcagtcgaggttcatctatatccaaggttagtggattttggaaactttttccgaattaatcaactttagacataaacagtggcagggctagaagtgaaatagatgggcaattacgtacttcactggaggacattaataaccgaaggcaaccttagagaagaataaatccaacaataaaatcaatctaagggttcagtgttattgttttagtaataacaacagtatctgaaatatggggaattggtctttccatctccatctccctgtcatcgtactactaggtactagctacaatttcaaattgtttgtgcttttctatttgattccatgagatttttgtttttatatgcaactgattttgtgaggatttaatccaagctgggaggatgagtctaacaaggctttgacccactgccatctatcatattttttgttattctagtctcgtgattgttttgttagtggaacaattcctcaagaaagacccacaagtttggacagctactactgactactgtgatataaaataacctaaagagcaagtagtataggtatatagctaacttattagtattttgaatatcatgcttgacaatcatgatacaatcacattttttatcatgattgtgaatttaatttgaaggtgacctgcaaaactgatatttgcatcactgtcacttttgactatgcatttatgatggacctaacctattagtttccccatatcccggataaaaaatctacctagtttcagtatagctctggcctttgagagaagcaattttattgggattcatctggagctagatgttgctacttgctaatccatctggtgtgaatcagcttcctttgttgcaatttcctattgcatagagcatctccaacaaggtacctcaaaatagtgcccccaaattaaaatactagatcagttaaagtgattaggacaccaaaaacaaattgaggtccaataattaaaccataaatcatgtatcttaggaagtaaattacattattagaaaagaaaatattttgaatgatgtagaaaacaaagatagggcactaatctgagttgtagtatatttgggtcacttcatagtgtgcctatatttttttaataaaaatttataaaatgaggtattattggagctgtttttttttatgaattgagccctatatttcatttaaggcactgttggagatgctccaagactgggttttaggccaaaggccaggtctcatgctttttgtgacaataagactggtgccgtagtgtatatggtattatggtgtcactttaagcagttacagtcttactggaccttgaggtctccattttcagcagtgtggtgcccaagtaccatcacccagaatcgttctatcgtaccaccaaaatcatcttcatgggtttactgctcagatcacatatggttaacttgtatatttggtaccaaaaatcccctcctgatcattgtctcatgtaacctagtttgcagtttgcatcaatacatagatgatcttacatagcgtcactgtacgattgagaatccacttcatggtatgcatttatgaccttttaatcatcatttatttagattcacaagtcatgttggaacaaaaagtgctgtcggaacttgaattacctcctggcatccgatatgtgtatgctgtgcttttctaagatggttttttgttcgtatttctgctctgtggtcatgtggcagctgtaaacctctctgcctggactgtctggaattgctacaaatcaactctgttcgagtttctgaaccagcccctcttttcttttctgcagggtttctgtggaagcatggaggaacctacacattctgtatctgtacatcgtccaaccattggcgctgtcgctacgtgtgaagtacacaccgtgtacttgtgcagaccttgtaatttttacttgcctggtagcgggaaataaatcgaagctcctctcaccctttcttgaataatttgccccagtaacattatcgatatgtgttcatgtgttgtgcttgattccacataatttcttggtcctgggagtttggaagcttagaacttgcgaatggtcccgtggtggggtatcttgcaagttgcaagcgggtacactccttggctgcagctcgccatggattagctcttttccggctttgattgaccggaaaatttccataacgaaattgtcgcatcatgtctaacatgagatgacgagagtgcctcgatcatgtcagtgtcatgctggctgtactatttaggcttgtttcaaaggaaagaaaaattgacatgaattttgaggaatggcatttacgtacaaagttgcttacgaatttggactagaagatacaactctgagtcgtacagaattttggtgtagcttttgttttgtagggcatataaaatctagaaactctagaatgattttctaaatacaagagtcagtt

SEQ ID NO: 136120 - DNA, 1354 bp, Zea Mays
acatataaaaaaatcgaaaattgggctaaaaatcaaaatagaaaaagtctcctgcctccgcggccgtgccgagccggcatccccttccgtcccccacccccagcagcgatcgcgacgacccgagccggcaagggtgacaggcggctgacgagccccatgggagacaacaagtctccgctgagcctgagcccgatgggcgggcgcgaccgggaccgggagctcctcatcccggtctcgggcggcggctcggcgcccggcgacggggtcgaggacggggacagggcctcctccgcctccgccgcgctatcctcctccggccgcgaggctttccataaggttgtccgcagttgggcttcaaagaagttcatgactggatgtgtaattctcttccccatagcaataacgttctacatcacctggtggttcattcattttgttgatggattcttctctccaatctatgctcaactgggaatcaacatattcggtcttggctttgtcacatctgttactttcatatttttgatcggagtctttatgtcatcttggcttggggcatctgtccttagccttggcgagtggattattaagcgcatgcctcttgttcgtcatatctacaatgcatcgaagcaaattagtgctgcaatatcaccagatcagaacaaacaggcgttcaaggaagtggtcatcataaggcatcctcgtgttggagaatatgcgtttggtttcatcacatcgtcagtatccctccagagttattctggtcaagaagatctttactgcgtctatgtcccaacgaaccatctttacattggtgatatcttcatggtgaattcaaaggatgtcataaggccaaatctttctgtgcgtgaaggcatcgaaattgttgtatctggtggtatgtcgatgccccaaattctgtcaaccctcgacccgcagatgatccttggggacagaaccggaccaagcagaagctgaagctgctacgagccctttgtttacctttgtgctgatgattgttagtaacattttcatacaggctaccacgagtacggcaaactagactccgagcacaagtatctgtatattaagtaggtgtaggtgactcacacggtttgattatttgctggactctgtaccatggtttgtagtttgtactgcatccgatgcaagaaagaagcatctcacctgtctgtgatatatccaactgttgtcaaattactatcctctgtgtagtccttgattctcatctgacaacgttgaattgggttcttgacttgtcgatggttagctgcattcttttcttctatgtttgttctatctatgtgcggaacttattctgcatccttcgaac

SEQ ID NO: 136121 - DNA, 1942 bp, Zea Mays
gccgcgaaaccctagtgcacaagggccctctatataatagcgcgccggcgatctcaagttctcaacctacgacgctgccgccacctatctcaacgaagctttttcttccctccggtgtggatccacactcttcatgcgcgggattgggttttggatctgctcctgtgttttcattatttgctggtttctctttttgatcggggatttgagatacgtatttggttgtggacgatgaagattgtatctattggtctcgttcgtcgtaactggcatctgattggattgccttgccgaccatcctgatatatcaccacccatattccgagtccgctgcctacagtcctcagtccccatcgagattttcttatctatttagcctttgttccatgatttactactattgttttctggccgatgattaaatcaaaaaaatagacaagcatatgtccgaatccatctatgtggataagcctaatcttctctatgaggtcggccacatcttctaggtttactgtttttttttcatttgatcttattttgattcatctaggggccgaagacgaaatatatggatgttatttttgtatgatacattttgattacaaaaccatttctgccttccttctgaggcccctcttcatttggatcttgttattttgtacgttgtgagtttattttgtgatctatataagtggttcatggcttctcctaaggtcgggtgatgagtaaatgtgcatagttcagatgatcaaccctagtggttttgattaccttgaataaatagtctttcgctcctaactgacgaccttatcaacgcccagtctttcttggattagataagtttcactttgctgtaagattttggtcgtcagaaaatgataaaaatttgcttgttttgaagtcttgcgagattttttttatttttccgcacatgcggaggaagtattgaaatgcacatgtaaagaggccccgagtttgatcctgaatactcgggctcctaaccttggtgtgcgagagtttaatctggcgattcactcttctttgagagcgcagatgcttcccatcgtgccctcactgtgaattgtcgcacaattacttaaaagcagccatattttcgtgtaaagaattgttttcgcttcgtttgattgtcagaatttggcagcaaagaattgaatcgatgttgaataccaaatcagtttggatattgaaatgggcttcaaatcaaattcttgtttggatggacaagaatttggtatgtaaaatcatagggaattttccaattccaaaggatgggctagacaacctttgaattccaagccctgaggagtacagaactgtgaactgcacgattggaaaaaggtcagccgattccacccaaaaggagtgcacggcctctgaattgtgcgcggccatggttactaaaatgaacagtagtgtggaattggattccaatgtattgctattcagaataaaacatcagcatttgcttcagccaataccatttcctggattctgagtgccaatcatccaacggggtgttaatatgctcctgtcgctatcaagtgcttgtacagactgcagagttttgaatttgtatataaaatataaagatcgattaaacttgccgaacctttttattaggaagccatcgtaggggtcaaaacaaccgatatgtattgaaaataaatatactttttaggtactgaagaacaagtattagcatgcaaccattgaagggttgaggtgaataggagttgaataaattttcttcacaagaagctggccaaaaaaatgagaccggccgattttgtagattagccggccttctagctgattttgtagtattctttttatagcattagtgctgctatttgtaatagttaaatattattactatttttagtgataagtgatgtcggatgaatcgatttggtttgggaat

SEQ ID NO: 136122 - DNA, 546 bp, Zea Mays
atggtcgacgggtgggggtcgtcggatccggatacccgcgccaagaatcgcgtggatcttctagatcacacgggagctcgaccacaagtccgacggcgagaccatgaagtggctgctgcagtatgccgagccggccattatcgccgccaccggcatatgcttgcctcccatcgcgcccatcaatttgtatgttccaccgcgtggtctgatcaggcgcctaggccccagcacatcacatctcctctattctccggccttggagcagcagctcgtgatttcagctcaagggctctatggaagggagcattcgtcgatgctttcctggctagaataaagaagaacagagaaaacatgaatcggaagaagatttggtctcgtagatcttctattttgcctgaatttgttggttccactgtgctcatttacaatgggaaaagtcatgtccggtgcgagatcactgaagggaagggaagtggagaggaggagcatcacagtgcacttatcactcagcgaggcataggaacagtagtctgttataacatctga

SEQ ID NO: 136123 - DNA, 332 bp, Zea Mays
gttttattagtatgcacaattcaaacaagttttgtgtgtttatacaatcacaatggacagttgatcaattgcttatacaataatcaattctttcgtggcttcatccacctcatcgttggttcttcgttgtttaataataagggtctggttcatagaaccagtctgtgctgcactcttggctcttgcctatacgggttgttttgttgttgggttcgtgtaaataaaaaaagaggagtgacacaaacgattaactgttgccgaatttcaacttgtttagtagttcctaatttcctagcctcatgcctagcatttacgaaagatcatttggaaag

SEQ ID NO: 136124 - DNA, 1200 bp, Zea Mays
atgaagctcatgatcacagtactgacacaagggcagcaccctgaatttaaatacctgacacatatgcacctaggatcctttcgaaaaagaagatcatgcccaatgctcgagggcgccactgaagacatggacctcatgggccggctcctcgatgagctcgacctgctgcagcgccactccccggatgtggaccttgacatggtggacatggaccttcttaaacatattgtagttcacaaaaaattcatcagcattactaaatatcactgcaagcttggtcttactgttttgcttgcttgtgtcactatgaaatttaaaattctagaggaaccgaagctggggagagcatggaagtttttatcatcaatgtctgaaatagtcgacttgaagaagctctttgctccatcaaccattgcagtgtactttagtggagggatgccacccatatgcagaggatctgtggaaataagtaaagataaacaagttaacatttcaaggtgtgaagttatgtggacgttgcaaggtgtactttgggcaaatgtagtctgcaagcaatctctgacagtaaatggcgaagaaagtgtcaaggttgggtttgagatgattgatgctattgtggaagctaaggccatatctgttagcagtagaaatgaatttgttaggcaaaataaattttcaaagtcgtcaaaagatgaacttaatggttctgaagtgaagcatgaagatgctccagagtacgaggatgttcctctgcagaaagatccaccagaaggttcagaagagttcagtaaacaggttgatgaagcctttcttaattatgaggtggccaagaagaggatgtatgcttttagtacgacaacttatattggttttcaggctgtaatgaccgaggaaatgtcagaaaaatttcgtggtttgcctggagtagttttcattttgcctgattcatatctatatccagaaacaaaggagtacggagccacatggatggccacaaggactacagacgtaggggatccaacgttcttcttctccacttcccagttcctacgcacggacgattcttctttcctccttcaaccttcttctgtggacacacattgcagcaaagagaaggaagagagaggagcacatccatggaaaaaggaaaggcttcgtaggggcttgctggcttatggacacactgggagctgcgactag

SEQ ID NO: 136125 - DNA, 657 bp, Zea Mays
ggaaactcccatgcatggaagaggaagagtaggattgactaaaagtgccaaaagggactgagaactgctcctcatcagttgcatgatgggtacccatcaggtagaaatgaatttgttaggcaaaataaattttcaaagtcgtcaaaagatgaacttaatggttctgaagtgaagcatgaagatgctccagagtacgaggatgttcctctgcagaaagatccaccagaaggttcagaagagttcagtaaacaggttgatgaagcctttcttaattatgaggtggccaagaagaggatgtatgcttttagtacgacaacttatattggttttcaggctgtaatgaccgaggaaatgtcagaaaaatttcgtggtttgcctggagtagttttcattttgcctgattcatatctatatccagaaacaaaggagtacggagccacatggatggccacaaggactacagacgtaggggatccaacgttcttcttctccacttcccagttcctacgcacggacgattcttctttcctccttcaaccttcttctgtggacacacattgcagcaaagagaaggaagagagaggagcacatccatggaaaaaggaaaggcttcgtaggggcttgctggcttatggacacactgggagctgcgactag

SEQ ID NO: 136126 - DNA, 897 bp, Zea Mays
atgccagtggttgagctgtggttgctgctgccttctgctgcacctccggtcgatctggtcgcttccaacgtctgcgcgcccaacgcttctcaccttccgtcgccttccctctcacacgcacccacccgccgccagtcacagctaccacgcagctgcaccgtgcacccacccgtgacctatatatcccgcggcgccggctctcttgacctctcgccgccggcgcgcgcgctgttcctgtcgatggaaaacttgccgctccttggaggcatccggcagcaaccaaacactcagctggctactgctacgtgcctcgctgcgccgcagccggagcaacatgcgtgcagggatgcgacgacgacgacgtctctcgtcgttccggccatgagtttcccgccggctgccgtggactgggcgtcgctgcttctcccgcgcagcacgtcggggggcgcgaacgaactggagagcggcggcggtatcgctgaaacggtggccgggagcagcgctagcgcgacgacggcaggagagggggataacaataagaccggaaaggccgggaggggcggcggcagggggaagaaaaaggcgagccgaccacggttcgcgttccagacgcggagcgaggacgacgtcctcgacgacggttaccggtggcggaagtacgggcagaaggccgtcaagaacagcgcgtttccaaggagctactaccggtgcacgcaccacacgtgcgaggtgaagaagcaggtgcagcggctggccaaggacacgagcatcgtggtgaccacgtacgagggcgtgcacaaccacccgtgcgagaagctcatggaggcgctcagccccatcctcaagcagctccagctcctctcgcagctccagtcctgcactaatcaactcctctga

SEQ ID NO: 136127 - DNA, 1345 bp, Zea Mays
atgccagtggttgagctgtggttgctgctgccttctgctgcacctccggtcgatctggtcgcttccaacgtctgcgcgcccaacgcttctcaccttccgtcgccttccctctcacacgcacccacccgccgccagtcacagctaccacgcagctgcaccgtgcacccacccgtgacctatatatcccgcggcgccggctctcttgacctctcgccgccggcgcgcgcgctgttcctgtcgatggaaaacttgccgctccttggaggcatccggcagcaaccaaacactcagctggctactgctacgtgcctcgctgcgccgcagccggagcaacatgcgtgcagggatgcgacgacgacgacgtctctcgtcgttccggccatgagtttcccgccggctgccgtggactgggcgtcgctgcttctcccgcgcagcacgtcggggggcgcgaacgaactggagagcggcggcggtatcgctgaaacggtggccgggagcagcgctagcgcgacgacggcaggagagggggataacaataagaccggaaaggccgggaggggcggcggcagggggaagaaaaaggcgagccgaccacggttcgcgttccagacgcggagcgaggacgacgtcctcgacgacggttaccggtggcggaagtacgggcagaaggccgtcaagaacagcgcgtttccaaggtggatcgtctctttatcgatgctcatgcatgcatgcatgtctcttgtactatatatgctagcttcaatcgtgtgctgtggaaactggaaacaacgcaatgttggcatgcatgcaatgcaggagctactaccggtgcacgcaccacacgtgcgaggtgaagaagcaggtgcagcggctggccaaggacacgagcatcgtggtgaccacgtacgagggcgtgcacaaccacccgtgcgagaagctcatggaggcgctcagccccatcctcaagcagctccagctcctctcgcagctccagtcctgcactaatcaactcctctgaatatccacctggtctgacgacacagctggcagcctattagcctagctggccaccatcagcgtacgtgatgagctaatgcaaatttactgctaagtgtacaaaacaaactgttgatcgatcgatcggcagtggtaacgacacaaggaacgactgtctctctaaattactacagcgtgtagctggtcttatacagatgattcaacagatatgtacgtgattcatgcatatacacagatgattcaacagaaatgtatgtccgcggatcagcgtcctttgtaatgaagccgtaatttatttgcacaatttaagggctgtttggtttgctaa

SEQ ID NO: 136128 - DNA, 88 bp, Zea Mays
cgtaccctgccatgcgatggatcgatcgccaagacgacatggcttccagattagcattgccgaagtgaaccatgcatgacgaggacgc

SEQ ID NO: 136129 - DNA, 3912 bp, Zea Mays
gctcggcaccggctagcttggactccgctccgcttgtccgcggcacgagcacgagggtgcctttctttctttctttctttctttctccacgcacacacgcgcgcgcagttggggagagagaaagaggggtgactacgagctaccgcgttttaggtcgcgccggcttggactgttgcgtgagctatatctttttctcgctcgctcgctcccaaatcgtcaaaggaagtttggtggtggtggtggcttcattgcttcaagcagcggccggggggtgaggaggacagacagacaagggggaaggagtgatgcgaggaggaggaggaccgggcgtcggcacgccggggcgcccgcgatggggctccggcgccacgacgccgcggtcgctgagcacgggctcctctccgcgcggctcggaccggagctccgacgacggggaggagctggtcgaggtcacgctggacctgctggaggacgataacattgtgctgcggagcgtcgagccggcggcggccgcggctgctccggctccgccccgccgccacccggaccctaccccgtcctcgtccgcggccccgtcgcgctcgcgctcgcccgcgatgcgccggacctcctcgcaccgcctgctgcagttctcgcaggagctcaaggccaccgccagccgcgccaagcagttctcgcaggacctcaccaagcgcttcacgcgcacccagagccgcgccaatctcgcgggggagccaccggctgccgcgccctcgggcatcgacgccgccctcgaggcccgcgcccagcgccgccgccgcgcgcagctcgaccgtaccaagtccggcgcgcagcgcgcgatccgcggcctccgcttcatcagcggcggcaacaaggccagcaacgcctggatcgaggtccaggccaacttcgaccgcctcgcgcgcgacggctatctctcccgcgccgacttccccaaatgcatagggatgacggagtcacaggagttcgcgatggagctcttcgacacgctgagccgccgccggcagatgcaggtggacaggatcaacaaggatgagttgcgcgagatctggcagcagatcaccgataacagcttcgactcgcgcctccagatcttctttgacatggtggataagaatgcagatggccatatcacggaggccgaggtgaaagagatcattatgctgagtgcttctgctaataaattgtcgaggcttaaggagcaagctgaggagtatgcagccttgatcatggaggaacttgatcctgaagggcttggctacattgagctttggcaactggagacattgctactgcaaaaggatacctatgtcaactacagccaggccttgagctacacaagccaagcactaagccagaaccttgctggtctaaggaaaagaagtccaatccgaaaaattagcagcacattgaactactatctggaggacaactggaaacgtgtttgggtgcttgcagtatggattggaataatggctggattgtttatttggaagttcattcagtaccgtaaccgttatgtctttgatgtgatgggctactgtgtcacaactgcgaaaggtgctgcagagactctcaaactgaacatggcacttattctcttgcctgtatgccgcaacactatcacctggctgcggaatacgaaagctgcacgggcattgccgtttgatgacaacattaacttccacaagactattgcagcagcaattgtggttggtgttgtccttcatgcagggaaccaccttgtatgtgattttccacggctcattagttcatcagaggtgaagtatgctccactgcgcaaatactttggggaaaataaaccaacatatctggatctggtaaaaggagtggagggcataacagggataatcatggttgtgtgcatgcttatcgcttttactctagcaacaaggtggttccgccgtagcctggtgaagcttccaaggccatttgacaaactaactggcttcaatgcattctggtactctcatcatttgttcatcattgtgtacatatcacttgttattcatggagagtgtctataccttatccacgactggtacaaaaggacgacatggatgtaccttgctgttcctgttggtctgtatgtaggggagaggactctgaggtttttcagatcgggcagttattctgtccggttattgaaggtggctatatatcctggtaatgttttgacattgcagatgtctaaacctcccacattccgttacaagagtgggcagtatatgtttgttcaatgccctgcagtttcaccttttgaatggcatcctttctcaattacttcagcacctggggatgactatctaagcattcatgttcgacaacttggtgactggacacgggagctcaaacgggtattctcagcagcttgtgagccacctgtgggtgggaaaagtggccttcttcgagcagacgaaacaaccaagaaagcgttaccaaaacttttgattgacggaccatatggttctcctgcacaagactacagcaagtatgacgttttactacttgtcggattaggtatcggtgccacaccttttattagcatactgaaagacctgctcaataacatcatcaaaatggaggaagaggaagaagcttcaagcgatctttacccaccaattggtcgcagcaaggcacatgttgatcttgacacccttatgaggattacctcaaaaccaaagagggtactgaagacaacaaatgcttacttttattgggtgacacgtgaacaagggtcttttgattggtttaaaggggtcatgaatgaaattgctgaactagatcagaggaatatcattgagatgcacaattatctcacaagtgtttacgaggaaggggatgctcggtcagcactcattacgatgctacaagctctcaaccatgccaagaatggtgttgatatagtttctggaactaaagtgcggacacattttgcaaggccaaattttaaaaaggtcttatctaagatagctaccaaacatccatatgctaagattggagtgttctactgcggggctccagttctggcacaggaactaagcaagctctgttatgaattcaatggcaagtctacaacaaaattcgaattccacaaggagcatttctgacatacaacaaggttaatgcagaatattggaacaagggggagaagatgtgatgtatgtaagtcacttgtgctttaacatgttgctttcttggcgatgagtttgaaagagcaagggattctgcacaaggtgttgtatcaccacagcttactccgcatttgtgatactactgtcccccagttacaactgcattatctattgcttgagatactaaaatacaataagatcgcatagaaaggaaaatgggggtcagcagcacatcacacaaggtttccatcgaaggttcaagagcacataccccaggtggagtagcaagggaatctctcccatggagtccacaaccataaattgtgattatataagtagcgtgatgtaggacacatacaatgaaggccaggatgtcacaaggctacctaactgtatatttgcatgcagctgagtggctgactgaggccacaagtttgatctaactttgtacttgtacacagggttgaaaaacaggaagaaggtacattttgtttttgtaagtagcgtaggttggtagtgactgggctcagattgggggccctcaagtttcattaaagcttgttccgttgcctcgttgagtggtaggttgcatttttttttaggacagatctggctgattcatgtatatctttactgaaggccatgttttttttaaaaaatttatgatgctgtctacatgttgatatggaaaggattaaatgtggaaaatgatatgtatacctgtgctaatttggcg

SEQ ID NO: 136130 - DNA, 3863 bp, Zea Mays
gctcggcaccggctagcttggactccgctccgcttgtccgcggcacgagcacgagggtgcctttctttctttctttctttctttctccacgcacacacgcgcgcgcagttggggagagagaaagaggggtgactacgagctaccgcgttttaggtcgcgccggcttggactgttgcgtgagctatatctttttctcgctcgctcgctcccaaatcgtcaaaggaagtttggtggtggtggtggcttcattgcttcaagcagcggccggggggtgaggaggacagacagacaagggggaaggagtgatgcgaggaggaggaggaccgggcgtcggcacgccggggcgcccgcgatggggctccggcgccacgacgccgcggtcgctgagcacgggctcctctccgcgcggctcggaccggagctccgacgacggggaggagctggtcgaggtcacgctggacctgctggaggacgataacattgtgctgcggagcgtcgagccggcggcggccgcggctgctccggctccgccccgccgccacccggaccctaccccgtcctcgtccgcggccccgtcgcgctcgcgctcgcccgcgatgcgccggacctcctcgcaccgcctgctgcagttctcgcaggagctcaaggccaccgccagccgcgccaagcagttctcgcaggacctcaccaagcgcttcacgcgcacccagagccgcgccaatctcgcgggggagccaccggctgccgcgccctcgggcatcgacgccgccctcgaggcccgcgcccagcgccgccgccgcgcgcagctcgaccgtaccaagtccggcgcgcagcgcgcgatccgcggcctccgcttcatcagcggcggcaacaaggccagcaacgcctggatcgaggtccaggccaacttcgaccgcctcgcgcgcgacggctatctctcccgcgccgacttccccaaatgcatagggatgacggagtcacaggagttcgcgatggagctcttcgacacgctgagccgccgccggcagatgcaggtggacaggatcaacaaggatgagttgcgcgagatctggcagcagatcaccgataacagcttcgactcgcgcctccagatcttctttgacatggtggataagaatgcagatggccatatcacggaggccgaggtgaaagagatcattatgctgagtgcttctgctaataaattgtcgaggcttaaggagcaagctgaggagtatgcagccttgatcatggaggaacttgatcctgaagggcttggctacattgagctttggcaactggagacattgctactgcaaaaggatacctatgtcaactacagccaggccttgagctacacaagccaagcactaagccagaaccttgctggtctaaggaaaagaagtccaatccgaaaaattagcagcacattgaactactatctggaggacaactggaaacgtgtttgggtgcttgcagtatggattggaataatggctggattgtttatttggaagttcattcagtaccgtaaccgttatgtctttgatgtgatgggctactgtgtcacaactgcgaaaggtgctgcagagactctcaaactgaacatggcacttattctcttgcctgtatgccgcaacactatcacctggctgcggaatacgaaagctgcacgggcattgccgtttgatgacaacattaacttccacaagactattgcagcagcaattgtggttggtgttgtccttcatgcagggaaccaccttgtatgtgattttccacggctcattagttcatcagaggtgaagtatgctccactgcgcaaatactttggggaaaataaaccaacatatctggatctggtaaaaggagtggagggcataacagggataatcatggttgtgtgcatgcttatcgcttttactctagcaacaaggtggttccgccgtagcctggtgaagcttccaaggccatttgacaaactaactggcttcaatgcattctggtactctcatcatttgttcatcattgtgtacatatcacttgttattcatggagagtgtctataccttatccacgactggtacaaaaggacgacatggatgtaccttgctgttcctgttggtctgtatgtaggggagaggactctgaggtttttcagatcgggcagttattctgtccggttattgaaggtggctatatatcctggtaatgttttgacattgcagatgtctaaacctcccacattccgttacaagagtgggcagtatatgtttgttcaatgccctgcagtttcaccttttgaatggcatcctttctcaattacttcagcacctggggatgactatctaagcattcatgttcgacaacttggtgactggacacgggagctcaaacgggtattctcagcagcttgtgagccacctgtgggtgggaaaagtggccttcttcgagcagacgaaacaaccaagaaagcgttaccaaaacttttgattgacggaccatatggttctcctgcacaagactacagcaagtatgacgttttactacttgtcggattaggtatcggtgccacaccttttattagcatactgaaagacctgctcaataacatcatcaaaatggaggaagaggaagaagcttcaagcgatctttacccaccaattggtcgcagcaaggcacatgttgatcttgacacccttatgaggattacctcaaaaccaaagagggtactgaagacaacaaatgcttacttttattgggtgacacgtgaacaagggtcttttgattggtttaaaggggtcatgaatgaaattgctgaactagatcagaggaatatcattgagatgcacaattatctcacaagtgtttacgaggaaggggatgctcggtcagcactcattacgatgctacaagctctcaaccatgccaagaatggtgttgatatagtttctggaactaaagtgcggacacattttgcaaggccaaattttaaaaaggtcttatctaagctccagttctggcacaggaactaagcaagctctgttatgaattcaatggcaagtctacaacaaaattcgaattccacaaggagcatttctgacatacaacaaggttaatgcagaatattggaacaagggggagaagatgtgatgtatgtaagtcacttgtgctttaacatgttgctttcttggcgatgagtttgaaagagcaagggattctgcacaaggtgttgtatcaccacagcttactccgcatttgtgatactactgtcccccagttacaactgcattatctattgcttgagatactaaaatacaataagatcgcatagaaaggaaaatgggggtcagcagcacatcacacaaggtttccatcgaaggttcaagagcacataccccaggtggagtagcaagggaatctctcccatggagtccacaaccataaattgtgattatataagtagcgtgatgtaggacacatacaatgaaggccaggatgtcacaaggctacctaactgtatatttgcatgcagctgagtggctgactgaggccacaagtttgatctaactttgtacttgtacacagggttgaaaaacaggaagaaggtacattttgtttttgtaagtagcgtaggttggtagtgactgggctcagattgggggccctcaagtttcattaaagcttgttccgttgcctcgttgagtggtaggttgcatttttttttaggacagatctggctgattcatgtatatctttactgaaggccatgttttttttaaaaaatttatgatgctgtctacatgttgatatggaaaggattaaatgtggaaaatgatatgtatacctgtgctaatttggcg

SEQ ID NO: 136131 - DNA, 1542 bp, Zea Mays
cgggcccaacggcccaaatataatagcgtagtcgcgcgcgcacggccgacaccacgcgggcgagtcggcagccggcacacggtgattctgtatccaggcatcggcgtcggccaccaccggccgatggtggagctgagcgagctcttcctgcggcgcggcctcgccgtgaccgtcgtcgtcgtcgtgccgcccgccgcgtcgacggacgcctcgtccgcggttgcgcgcgccgttgaggccaacccgtccatcaacttccacatgctgccactgccaccgcccaacaccgttcccccggccgccgtcgagcaggaccagggccaggagccgccgcacaatccgttcgccctcctccgccaatcgaacgcgccgctccgcgactacctccgctcggcgctccaatccgcctccgtgtgcgcgctcgtcctcgacatcttctgcgtcgacgcgctcgacgtcgccgcggatctcggcgtgccggcgtacctcttctacacctccggcgccagcagcctcgccgtcagcctgcacatgccgcagaagcaggccgaggtgaacgccagcttcggggacatcggcgacgcgccgctctgctttccgggcgttcccgcgttcagacccacggagctccccgtgaacgccctcgaccgcgacaaccaggtgtacagggtgttccttagcgcgttcgagcgggtcccggcatgccgcggcatgctcgtcaacacgttcgagtggctggagcccagggtggtggccgccctcagggacggcgcgtgcgtcccgggccgtcccacgccgccggtttactgcgtcggtccgctggtctctggaggcggagaggtccaggacaagaagcacgcgtgccttgtgtggctggacgcgcagccggagaacagcgttgtgttcctctgctttgggagcatgggctcgttctccaagaggcagctcgaggcgatcgccaccgggctcgagatgtccgggcagaggttcctgtaggtggtacggagcccgcggcccgacggcacggggttgtatgccgacggtaatcgtcagctacccgaacccgacctcggcgagctcctgcgggaggggttcttggagaagaccaaagcgcgagggctggtggtcaagtcatgggcgccgcaggtggacgtgctccggcacagggcgaccggcgcgttcgtcacccattgcggctggaactcgattctagaggggataacggcaggcgtcccgctgctgtgctggccgctgtacgcggagcagcggctgaacaaggtgttcatggtggaggacgcgagggtcggggtggaaatagcagggtacgacggggaggtggtcactgcggaggaggtggaggcgaaggtcaggtgggtgatgcactcggaggacgggcgtgcgctccgtgggagctcaatggcggcgaaggagaaggccctggaggctctgcagcaaggtggcacgtctcacaacgctttgctcgagctcttgtccgatttgggaatgcgtcacagtagcgagtgaagttgtcagatatcgtcg

SEQ ID NO: 136132 - DNA, 3506 bp, Zea Mays
tgaaatataacggcaagtatatacgtgccggtaaatggtgccagcatcgtctcgtcgccatgtatttaagcgtgccggtgcagctaattggttccagatcttatcccttccagttccaggcagcatccccagcctgacgaaggaattgaggacgctcgagctcgagctacgtcaggatccaacaccaccatggttacgggaaagaagaggacgttcgtgctctacccgtcgctgggcgtgggccacctgatcccgatggtggagctggccaagcacctcttgcgccacggccacggcgcgctcatcgccgtggtcaacccgcccgacaccgacgccgtgtcggccgccgcggtggagcgcctcgcggcggccaacccggccatcgcgttccgcctcctgccggtcccggccagcccggacgccggcgcggactgggtgaagcgcgacctggacacgctccggctcgccaaccccgtgctccgggacttcctgctccggtcccagcccgcagccgacgccgacgcgctcatcctcgacatgttctgcgtcgacgcgctcgacgtcgcggcggagctcggcgtcccggcctacttcttcttcgcctccgcggcgggggacctcgccatgttcctcaacctgccgtacctctaccccaccctgccgtcgttcagggacatgggcgaggcgccggtgcgctgccccggcatgccgccggtccgggcgatggacatgccgctgacggtgcaggacagggacagcgaccggaccaaggtccggatgtaccagttccgccgcatcccggaggggaggggcgtgctggtcaacagcttcgcctggctggagcccagggcactgagagcgctcggcgacggcgtctgcgtgcccggccgcccgacgccgagggtcttctgcgtcgggccactggtcaacgacggcagcagcacggcggggggcggggggaggcacgagtgcctggcgtggctggacgcgcagcctaagcggagcgtcgtgttcctctgcttcggcagcaagggctccttccccgccgcgcagttacaggagatcgcccacgggctggagagctccggccaccggttcctgtgggccgtgaggagcccgccggaagaaccggacacggacctggggaagctgcttcccgaagggttcctggacaggaacagagacagaggcatggtggtgaaggactgggtgccacaggcagaggtggtgcggcacgaggcggtccgcgcgttcgtcacgcactgcggctggaactccacgctcgaggccatcatgtctggcctgcccatgatatgctggccgctgtacgcggagcaggggctcaacaaggtgttcatggtggaggagtggaggatcggggtggagctgcgcgggtacgaaaagttcgtcaaggcggaggagctggaagcgaaggtcagactggtgatggaggctgaggaagggaggatcctccgggagaggctcgcggtggcgagggagaaggcgttgggggctactaaggaaggcgggtcttctgaagtggcattcgcggagttctttggagatttggacaagagcagctctccgtcggtaaacggagaatgcgattgaattgatcactggtgtgctggtgtggcagatggactgcgaacgtatatatactttaggattcaatatcacttagtattttgacagtacgagactaaaatattgcatctgtggtatgggaataaaattggattcaagcagagcgccacttgcgttgcgtgttacaatgtgattgtcagttttaccttattttatgaatcaatccactgatgattgtatctagcaatagcgtattctgatttttagctagaatatgctacccaggaatgctcgcagttctttatcacccagcatatatttatttgtcaaactcatgctccctcgaatctctttgggagaaatcaaccgaacaaacccggaaatatctcacatagatcatagtccaagctaacattagaacagatcaggtaacaggatcagccatgatgctcactttagtgcatgatcatttggcgagcatgatatccttcaagaactcctcaaacgccatccgcgacggcccgccatcagccagcgcctctgccgccttctcctttgccaacgccagcctctccctgagcttctccccttcctcagactccatcaccagcctcaccttcttctccacctccgccgcgctcaccagctcctcgtcgtagccgtccatcaccaccccggccttgatctcgtccactacgaacaccttgttcaccctctgctcggcgtacatcggccagcacagcatggggacgccggccgacgccgcctccagcaccgagttccacccgcagtgggtcatgaacgcgcccgtggctgcgtgccgcagcacctccacctgcggcgcccacatcttcaccaccatccccctgtcactcgtgcgctccagaaacccctccgggagcagcgagtccaggtccggctcaggacgcgcgaggaagaacttggtcgggtcctccggcgggctccgcacgacccacaggaaccgatgcccggagctctccagcccgcgagcgatctccttcacctgcgccgcggagacggcgcccaggctgccgaagcagaggaacaccacgctccgttccggctgtgcgtccagccacgacaggcacgcgtgccgctcccctttctccgccgcctcctggcccctgacgataatcgggccgatggggtaaaccggcggcgtggggcgaccagggacgcagacgccgtccctgagtgccccgacggcccgcgcctccagccactcgtaggtgttgatcagcaagccccgagcctcggggacgcggccgtagtgcacgatccgcgaggcgcaggtccgggccgcgcggtcgagcacggtgtgaggcatgtccgaagccgggatcggcgggacgccggggaagtggaggagcgccttgcccatgtctttgaagctgggcccgccctccgtcgtggcgaagtagtggggaaggtggaggaacgcggcgaggtcgccagcgcaggaggtgtagtagaagtaggccgggatgccggcggatgcggccgcgtcgagcgcgtcgccgcagaagaggtcgagcacgagcccggcgacggagggaagggagcggaggaaggcggtgagggaggggactgtgaggcggagcgcgtccagcatccggaggaaggggtccgggtccgggacagggtagtccggcggcgggaggtggtggaaggatacggcggggttggcggcctcgagcgtggcgacggcggatgcggaggaggcgaagaagtcggcagtggacgacggcggggtcgggacggcgattatgacagccaggtcgcggcggaggaggagcttggcgagctccaccatggggatcaggtggcccacgccgaggcaagcgtgcagcaccacggtcgggtgaggactgggctccgccatcagcgtcagcgatgag

SEQ ID NO: 136133 - DNA, 1189 bp, Zea Mays
agaagaacaatgtatgtacactgcatgtcttcctcctgggtccaataatgtactgctgtcaagcaaaaacttttgtcctagttatggtagctctagccgaacagttcacatctccatcacccattaatcacccaaacctgtccaaaaacaaacggaacaatcagattggtatcccagagtcgataaaagcggtatcaatcaaacagactaagggaaagaatgggagatgagaaaaatgtcaagcgccatcacctgctccggcgacggtcggcggcatactgcgacagcgggacaagctccgagagtggggtagagagcggcgtggcgacgggggttgggatgggggacgagcggcagacggggcacgacgcgctacgacgcagccacgcgtcgaggcaagtgaggtggaacctgtgcctgcactctggcatcacccgcagcatctcgccctccttgtactcgcagaggcagatggagcacgcgacctccgtgtccgcccccgccccggccttggagaagggcaccatcggatacgacgcgatgacggaggcgtcgagcccgacgggggaggccgcggcggcggggccgcgggaggaggacccaggcgagtcgtagtcctccgcgacgaagacgacgcggggcacggtgatggagatgtggccggagctggaggcggaggaggcggcgtgcctggtggagccgacgccgacgccggctccggtgccgaacccctggctggcggccccgcggcggaggcagaagtaggaggcgagcagcaccgacgcgaggagcacgaggaatccgaacgcgatggcgatcgcgtagccgaggccgagcgaggcgagcgggtcaaggaaggacatggctctctcgctccccacgtggtggtcgtgggcggcggcggcggcggcggcggggctgtggtcgtggggcgggatggcatgctgcgcgggggaggggcagaatgggaagagggtatttgtttgcgggagcttaggtttccgggggggctggatctggttgttggccgcattaattgccggggaaggaggagaagccgagaaggggaatcggagtaatggcgggggactgggcgggtgcacctcgctgccgtgccgtgctctggtgtggacggtggtggccttggcctgtgtgggaactggaagagtggagtggccaagcgggagat

SEQ ID NO: 136134 - DNA, 191 bp, Zea Mays
ggatctataaagtgatggattactactattacgacgactcaaccaattatatgtttatattgattttgaatagtttttatccaaatgaattatatagaagctgactgaaaagctgagtgtttggcaatccgcagcagcttttggtggccagaagctacgaaaagccgaaacatacagggctttggttgctg

SEQ ID NO: 136135 - DNA, 718 bp, Zea Mays
tggcccgcacaaccgtttccgcgtgggacacgaacgcagcgggaaagagaaaaaagtagaaaaagcgaaaagcctagtagcacaaggctacaagcctacaagcaaccgcgtccgcgtgtggagcaaggaaggcgaggggagccgagcgggcaaccggcggcgacagacatggcggagcagcacaaggaggagtcgggcgtgacagtgctggacaagatctccgacaagctccacgggcgcgggggcggctcgtcttcgtcgtcggactcggacgacgagcgctcgtcggcgacggccgccgtgaaggccaagatctaccgcatcttcgggcgcgagaagcccgtgcactccgtcctcggcggcggcaagcgtaagcccggacctcaactcctcatcctcaagcctcttctccgatctccactagagggccttcgtcttgtttggtctttatagagatgagatccaaccgctttggcgttgcttcacttgtcaagcgttggtgaactattattgatctgtagccgcatccatgtggacaaatgcaaattcctgggtagagatcttgggcgtctgggaaaccgctcgacttccgatccgatgtggtttgggtcaaatttctgcggcattgtctccacgatgcgagtatggcgcgaccagattactgtctctgtcgctgtaagatttgcctttacgccaggagtaagttatcgggctattc

SEQ ID NO: 136136 - DNA, 1432 bp, Zea Mays
tggcccgcacaaccgtttccgcgtgggacacgaacgcagcgggaaagagaaaaaagtagaaaaagcgaaaagcctagtagcacaaggctacaagcctacaagcaaccgcgtccgcgtgtggagcaaggaaggcgaggggagccgagcgggcaaccggcggcgacagacatggcggagcagcacaaggaggagtcgggcgtgacagtgctggacaagatctccgacaagctccacgggcgcgggggcggctcgtcttcgtcgtcggactcggacgacgagcgctcgtcggcgacggccgccgtgaaggccaagatctaccgcatcttcgggcgcgagaagcccgtgcactccgtcctcggcggcggcaagccggccgatctgtttctatggaggaacaagaggatctctggtggggtgctcgcaggcgcaactgccttctggctgctgtttgaggtcatggattaccacctcctcaccctgctatgccactgcctcatcctcaccctggccatcctgttcctctggtccaatgccacgactttcatcaacaagtctcctcctaacatccccgaggtgaagatcccagatgacctggctgtgaatgttgcacgttccctgagatatgagatcaacaggggttttgctaccttgagggagattggccaaggccatgacctcaagaaatttctgattgtgattgcaggactgtggatcctttctgttcttgggagctgctgcaatttcctcaccttgtcttacatagtttttatggtactgtacactgtaccggtcctgtatgagaaacatgaggataaggttgatgcttttggtgagaaggccatggtcgagctgaagaggtactacgccatcttcgacgagaaatgcctatcaaagattccgaagggcccattaaaagacaagaagcaacattagaagcttagaatcagataagggtctgcggtgatttatcatctcttttgaccattattcgtcggttttggtggatggatgtgattccatgtctaaatacctggacgtgctctagtgttttagtgtggtcagtagcaatgttctaaattatctgagattacgctgaatcatgttctgaagtccacgtttaacgttgctctccctatcctttggaagtggcaatttcctcaatgtctgtaatatatctagtctagtgctatttcttaatctgacctagcgtcatgatgaacccttcttggatatttatttatttgtgccactggacatggtaattagagagcacgtaaattgtacatttgccatcatactcattagacgtgagacgtgttagtgtggtatcgatgcttgcactggagatacgatgctcaataacgccaagtttagaaaagtagcccttagagcatcttcaacaatatatagggttctattcagaaaaaaaaaa

SEQ ID NO: 136137 - DNA, 1746 bp, Zea Mays
tggcccgcacaaccgtttccgcgtgggacacgaacgcagcgggaaagagaaaaaagtagaaaaagcgaaaagcctagtagcacaaggctacaagcctacaagcaaccgcgtccgcgtgtggagcaaggaaggcgaggggagccgagcgggcaaccggcggcgacagacatggcggagcagcacaaggaggagtcgggcgtgacagtgctggacaagatctccgacaagctccacgggcgcgggggcggctcgtcttcgtcgtcggactcggacgacgagcgctcgtcggcgacggccgccgtgaaggccaagatctaccgcatcttcgggcgcgagaagcccgtgcactccgtcctcggcggcggcaagccggccgatctgtttctatggaggaacaagaggatctctggtggggtgctcgcaggcgcaactgccttctggctgctgtttgaggtcatggattaccacctcctcaccctgctatgccactgcctcatcctcaccctggccatcctgttcctctggtccaatgccacgactttcatcaacaagtgagttagtgggatcccttaaaacttgtgttgtggttttatttatgctgataatgctagtttaacccggtttacacgtttatgcagcatctgcatgtttttcatggctgccaccactattatcttcaccttatattttattaagagcatatatcacctagtggcctgtagttgatcagcataactcttggattgtgacataattgccatgcatatttaggtctcctcctaacatccccgaggtgaagatcccagatgacctggctgtgaatgttgcacgttccctgagatatgagatcaacaggggttttgctaccttgagggagattggccaaggccatgacctcaagaaatttctgattgtatgttgactggctggattttcttctgcatagacttgtgttacttaaggcagttctttctgaatgtaactaatgtgcttatctctactgtcaggtgattgcaggactgtggatcctttctgttcttgggagctgctgcaatttcctcaccttgtcttacatagtttttatggtactgtacactgtaccggtcctgtatgagaaacatgaggataaggttgatgcttttggtgagaaggccatggtcgagctgaagaggtactacgccatcttcgacgagaaatgcctatcaaagattccgaagggcccattaaaagacaagaagcaacattagaagcttagaatcagataagggtctgcggtgatttatcatctcttttgaccattattcgtcggttttggtggatggatgtgattccatgtctaaatacctggacgtgctctagtgttttagtgtggtcagtagcaatgttctaaattatctgagattacgctgaatcatgttctgaagtccacgtttaacgttgctctccctatcctttggaagtggcaatttcctcaatgtctgtaatatatctagtctagtgctatttcttaatctgacctagcgtcatgatgaacccttcttggatatttatttatttgtgccactggacatggtaattagagagcacgtaaattgtacatttgccatcatactcattagacgtgagacgtgttagtgtggtatcgatgcttgcactggagatacgatgctcaataacgccaagtttagaaaagtagcccttagagcatcttcaacaatatatagggttctattcagaaaaaaaaaa

SEQ ID NO: 136138 - DNA, 518 bp, Zea Mays
gatttctcaccatgcaagtttgcaatatatatggacatctatatagtccaggatagtcctctcattgtattcacaatttcagatccaacgacgacccttggatccgcacatgaaaccccgcgagcatattggcagcgcccgcgctaggtattccttattatccccatctcggtggtccgtcggtgggcgccgatcgacgcggcgcggcgccgcgacttgctgttgatgtctgccgctgtttggttccagcggactgcagtggcagtgcagggcatcatcatcacaattcacacctgggccctcacgcacacgatcatcgagtcgatcgagcgagcgaactcccaaacattatcgacattagtgctgcaagatgggccgtgccgtgctggcccggcacgagcccgtcgtgcttcgggcttcaaagtgtcgggccgggccagcacgaattacttccgggccgggccttatcgtgactatagactaaaatagaggcccagcacggcactaaagcccgccgt

SEQ ID NO: 136139 - DNA, 1300 bp, Zea Mays
ctcccgcgcgcgacctataaaaccccgcgcaacggaaggtgaggtagtgatagtgagcgacgccacgggacaggcatggcgagccgcgagcggcagcacacccgcagctacgactacgactacgagcacctcgtgctcgacccggcgtctctgggcgtgccgtgggccgacccggccgccgtggagatcccgccgcagctcctcgccgcgctcggggagtacctctccggctccgcggcccgcggggacgtcgaggcggaggcggacgacgagttcatgatgcacgagttcaaggtgcggcggtgcgcgcgcgcgcggagccacgactggacggcgtgcccctacgcgcacccgggcgaggccgcgcggcgccgggacccgcgccgcgtcgcctacgcgggggagccgtgcccggacttccggcgccgcccgggcgccgccaccgccgcgtgcccgcgcggggccgcctgcccgctcgcgcacggcaccttcgagctgtggctccacccgtcccgctaccgcacccgcccctgccgcgcgggcgccgcctgccgccgccgcgtctgcttcttcgcgcacgccgcggccgagctccgcgccgccgcgaatcccaaggacgggtgctctccgctctcgctctcgctctcgccaaagtccaccctgcaggcggcgctctgggagtcgccgccggtgtcccccgtggagggccgcaggtgggtcgacgagccgtcggaggacgccgacgccgacgccgagatggaggagctgatgctcgcgatgcgggagctcagcttcaggaaggcccaggcgtcgccagcgccggttctgcctgccgtcacagaggacgacgggccggacttggggtgggtgtcggagctggtgatgtaggcgaggcatatgccagcgcctgcccggtgccgacgcccgaaattaatcaaagccaagacgtggacgccgccatctccagaggcgcctctcgccgtttggaacagcttcattaagcaatgtttatttttagcatttccatgaattgcatcattcttctgtggatagaccaaacatggtgcaagtattaatactgcaatctgtaagcgtggcgtgtgtgccccccttctctttttttttccggagaccatggcctcactcaacatgctactgtcgtccatggttttcgttcgatcgtgttactactaccagtaccagtgtacgtctaaccaagtgcagttggcagtgtgtgttccattccatccctgcagctgcagggatcgatgttgcatttgcaaaataggaacccaagcaa

SEQ ID NO: 136140 - DNA, 2032 bp, Zea Mays
ctcccgcgcgcgacctataaaaccccgcgcaacggaaggtgaggtagtgatagtgagcgacgccacgggacaggcatggcgagccgcgagcggcagcacacccgcagctacgactacgactacgagcacctcgtgctcgacccggcgtctctgggcgtgccgtgggccgacccggccgccgtggagatcccgccgcagctcctcgccgcgctcggggagtacctctccggctccgcggcccgcggggacgtcgaggcggaggcggacgacgagttcatgatgcacgagttcaaggtgcggcggtgcgcgcgcgcgcggagccacgactggacggcgtgcccctacgcgcacccgggcgaggccgcgcggcgccgggacccgcgccgcgtcgcctacgcgggggagccgtgcccggacttccggcgccgcccgggcgccgccaccgccgcgtgcccgcgcggggccgcctgcccgctcgcgcacggcaccttcgagctgtggctccacccgtcccgctaccgcacccgcccctgccgcgcgggcgccgcctgccgccgccgcgtctgcttcttcgcgcacgccgcggccgagctccgcgccgccgcgaatcccaaggacgggtgctctccgctctcgctctcgctctcgccaaagtccaccctgcaggcggcgctctgggagtcgccgccggtgtcccccgtggagggccgcaggtgggtcgacgagccgtcggaggacgccgacgccgacgccgagatggaggagctgatgctcgcgatgcgggagctcagcttcaggaaggcccaggcgtcgccagcgccggttctgcctgccgtcacagaggacgacgggccggacttggggtgggtgtcggagctggtgatgtaggcgaggcatatgccagcgcctgcccggtgccgacgcccgaaattaatcaaagccaagacgtggacgccgccatctccagaggcgcctctcgccgtttggaacagcttcattaagcaatgtttatttttagcatttccatgaattgcatcattcttctgtggatagaccaaacatggtgcaagtattaatactgcaatctgtaagcgtggcgtgtgtgccccccttctctttttttttccggagaccatggcctcactcaacatgctactgtcgtccatggttttcgttcgatcgtgttactactaccatacaaacaaaaaagaaaacagggcttccaatatgttccaatggatctgtatattgtatataatctcttgaggcaacggagccacgaaagcgaagcgccgccggattgcagcaaaacaacgtgtctcaaacgacggtggtgcgtggctggctgcacaagttgcccaggcttttcgctgggttcctcgcccccacgccacgcgaccacgggtttaggattagggctccccctgttcggctgccaagttgggctctcgagttgcggtttttgcaaatctcgctgcgaggcagagtggtttctccttgatgcgacatcacaagaaagtaggaggcggaaagctcgcgactcatattacatccacggtggtaatggctcgccatttcttcataaaatggtagagcactagataaatgtttaaaaataactataaatgggtctttaaatcttatagtgtaaaatttagagtctgtcacctttacttacatcacctactttgagcactttttttcatcgacaatattcttcctcttttctgtaatttctcatcacgattgttgaccttgaacggatccgccttatctccttcaacaaaggttcttgagctttccaaaattcatgattgggttttttttccataacatgggagccgcatggccttccatttctaacacctaccatctgtcgtcttcaagctcttagctaggtggctcacaacgttcatccacctatctgagtttcttgccaacacttcaacttcagggttctggtcttgccatttcaagttttcagctctgtcctggtggacagcgttgatcggcaagctaaggcagaatcggt

SEQ ID NO: 136141 - DNA, 465 bp, Zea Mays
atggagtgcggcagttcctggcggctcccggcggtggtcgtcggcatccttttctgcgcggctctcttctcgccgcccgccgccgcgctcaacatcggcatccagtccgccggcgacggggtggttgatggcatgttgggaaggcgggagaaccctggagaacatgaagccatgcggaagatgaaaaatgagtttatggtgaactgggatgatctgagaacaagggagaaagaatgtgtattagtacttgctgcaactaacaggccatttgatcttgatgatgttgttgttaggcggcttagaaggaggttgatggttaatttgccagatgcatcaaataggagaaaaattcttagtgtaatactagccaaggaagatatggcagacgacgttgatctagaaactatagctaacctgacagaagggtactcaggcagtgatctcaaggatcttcatcgagtctaa

SEQ ID NO: 136142 - DNA, 1927 bp, Zea Mays
cagatctgtcgcaaactcgcaacccaatacgccatctattcccgtcgctgtcgtccacctgtttttttcgttgatccgcagccgccccttccttctcccatttcggcgtctcgaagccagtagattattcatttctcgatccacaaatccctccacactctccatcccgaaccctgaaatcgaggagcgcgggaggacgccgcaaagcgcgttggctcttagggtttgccggtagggttgggaggctccgatccgggcgcgcaggcatgaggattcgggagctccgagatgggctggaggtggaggacgacgagcgggaggagcagggatcggaggttggcagtggttacggggaggttgtcgcggttgtgcgactgcgggcgaagcgcgctatcgttggtgccggcgcgagggtcctgttctatccgacgcttctctacaacgtgctccgcaaccggttcgatggcgagttccgctggtgggatcgcatcgacaagtatgttttgctaggtgctgttccgttctctagcgatgttctgcgcctgaagcaacttggtgtaagaggagttgttacactcaatgaaccctatgaaactctggttccgacatccttataccaggctcatggaatcaatcatctcaaaattcctacaagagactacctgtttgccccatccctggagcatatttgtcgtgcagtggattttatccattgtaatgaagtgcaaggtggtagcacctatgtccactgtaaggctggaaggggacgaagcaccactatagttttgtgttttttgatcaagtacagaaatatgactcctgaagtagctttggatcatgcgaggtctgtgaggcctagagtgcttttagcgcccgcacagtggcaggccgttaaaatgttcagcaagctcaacgctagatgcctttccatacagagctcgaacccaacttgctcagcactatcttatgaggaatccagtgaactgtcaagcacgctgagcagcagatgccttcggattcagagctcaaatgaggtctcgataacttgtgaagaatccaatgaagcatcctttggagaccctgaagttgatggctacaccaccactgagtttgacaccgagcattttgttttacctcgttgtcgaagtatgctgtccagaccaacgagccccactgggtgtagtgatgcagtcttcataaccgaagaagatctagagggctatgagacctacgccgatgacgggaaggacgttgtcgaagtgcaagtagtggttcgccacaagcccatcatgaggaaactctcctgcttccttgggtccttgaagcttaccggcaattgcgagccaccacctggccgtttgaccgaggttcgagcctgctaggtggatcagctatggtttccgcatctgtttttcgctctttgtacatcggcagagtgtaattaccggcataagtttgcacagcctgcggaattccctcgggacagaactgtatgttgtggcatgtgggtggcgagataaatttggctatcgggagccgggagacctgtgggttgttgcagggagtgcgagagatctgtgtgcatatctggtatgaatgttttccttgtaataaaaagatgtttccttcttgtaataaaaaagatgtactccctccattaataaagctgcacttcccccccccccccccaaaaactaaacaacttgtaatttaaacaatactgccatttatagtacaacataagtgttactgtattaaagtaaccataatatgctctctttagaactcttacctaaatcataaaccgttgtggctttttaagatacactccttccgtcatctcaaaatataattcgtttatactaatatacattcattacttaatggtgtatttgtttctctcctaaattatataagttggattata

SEQ ID NO: 136143 - DNA, 914 bp, Zea Mays
gtcaccagtcagaaaacagtgggatcgagttgtttcactgcacgagcacatcctccggcgaccaccggcctccctctccgtcctctagcgaccgaccaacgcgccgagcgaagatgtcgtggcagacgtacgtggacgagcacctgatgtgcgagatcgagggccaccacctcacgtcggcggccatcgtcggccacgacggcgccacctgggcgcagagcaccgcattccccgagttcaaggccgaggagatggctgccatcatgaaggatttcgacgagccggggcacctcgccccgaccggcctgatactgggaggcaccaagtacatggtcatccaaggcgaacctggagctgtcatccgtggcaagaagggatccgggggcatcactgtgaagaaaacagggcagtcactcatcattggcatctacgacgagcccatgactcccgggcagtgcaacctggtggtggaaaggctgggcgactacctgctcgaacaggggatgtaatgacaaccccttcccctggaatgcatgttgatgatgttgctggttccaacttcgttttcagtaataataacaacaaagcgaagaccctcctacctaccctatttgcttgagcggctcttgtccgcgccacaagataccaattgttgcgctgggaatattcagctacgatgacccgctttagttcagtttctttttttttgggggttggttcgatcatttggctgtagcgtgaatcgcttggacaacagactccaattactaagcaaatatttttcttctgcatatatttgaagaaccttgttcaggcccccctttcgaaatgaaatgcgggaaatttttttcttgtttccaatgtcttttttattatgtgaaaaaagaaccgattcatgtgaaataattcttgta

SEQ ID NO: 136144 - DNA, 1445 bp, Zea Mays
gactcggctaaaccctttgctttctcctgcctctcctagaagaccaattaagtcccatggaggacagctccggagagaggggtcctccttccaccccgcagctgctaaacctcatccgagacgagagagaatggacggtgaccagagaggtagtggaagacggaggagcggggtcgacatcagcaacagcaacggccgcaagcccagaccaccccgaggaggacgactactccaagcttgagctgaggctctgcctccccggagcccaagacgacgagagaacgccgccgccgccgggagagaaggggacctgcacggcgctctccctcggctctggttgcttcccgtcgcatccgaagctcgccgccagcgctggtgctagtgctactgctgccacctgggcaaagagagggttcttggcaaccgttggtgccaaagcacaaggttattgtaggcaggaggaggacagcgaagggtgtgggaacgagctaacattgggaggtgaaaacatggcaggtgagacgaagaaagggtgctgctgtcccccatcgtcgtcgcatgactcggatgccgggcctgctgtgcacagaggtgatgttcttccggtggttggttggcctccggtacggtccttcaggagaaacctggcaaatgccagctcgtctaagcaatccctcgagcagcaacaacaaaacgatgatgaagcctcctgtgacaaggcgaagcagacctgcaagagaagcccgctcatcaaaataaacatggacggcatccccattgggaggaaaataaacctctcagcgtacgacagctaccagaagctttcgtctgccgtccaagatttgttctgtggcttccttgatgcagcccagaaggatgaatctagagggcgaggagcagaagagaaaatgttctcagggttgttggatggaactggtgagtacactttagtttgtgaagacagtgaaggaggcaggacactagttgggcacctaccatggaatgtatttgtttctaccgctaagaggctgagggtcatggaaagctctgaacttcctcatggactgattaaaactgcctccgagagggctgatgactgatatgaggccaagtcgcgcccagccttcgaatcatgcaattgcaagctatgtcaatcattggcttcttcggatggccctttttggcttgtagagagaaatctaataagataatgttagcatatcgcagatgccctgaatgcactgtgcaccttctgtaattttcctcgctctgtttcagatgtggtgctgatcagtgctattccacatggtctagtatgtctacgtttactaaaggtaaagaatgtgcttttagtgtgatgtgtggtggttttcagctaactacactgagacacaaaatgcatacgtaaaaacattaggaatcggacagcagaccaaaaaaaaaaa

SEQ ID NO: 136145 - DNA, 1442 bp, Zea Mays
gactcggctaaaccctttgctttctcctgcctctcctagaagaccaattaagtcccatggaggacagctccggagagaggggtcctccttccaccccgcagctgctaaacctcatccgagacgagagagaatggacggtgaccagagaggtagtggaagacggaggagcggggtcgacatcagcaacagcaacggccgcaagcccagaccaccccgaggaggacgactactccaagcttgagctgaggctctgcctccccggagcccaagacgacgagagaacgccgccgccgccgggagagaaggggacctgcacggcgctctccctcggctctggttgcttcccgtcgcatccgaagctcgccgccagcgctggtgctagtgctactgctgccacctgggcaaagagagggttcttggcaaccgttggtgccaaagcacaaggttattgtaggcaggaggaggacagcgaagggtgtgggaacgagctaacattgggaggtgaaaacatggcaggtgagacgaagaaagggtgctgctgtcccccatcgtcgtcgcatgactcggatgccgggcctgctgtgcacagaggtgatgttcttccggtggttggttggcctccggtacggtccttcaggagaaacctggcaaatgccagctcgtctaagcaatccctcgagcagcaacaacaaaacgatgatgaagcctcctgtgacaaggcgaagcagacctgcaagagaagcccgctcatcaaaataaacatggacggcatccccattgggaggaaaataaacctctcagcgtacgacagctaccagaagctttcgtctgccgtccaagatttgttctgtggcttccttgatgcccagaaggatgaatctagagggcgaggagcagaagagaaaatgttctcagggttgttggatggaactggtgagtacactttagtttgtgaagacagtgaaggaggcaggacactagttgggcacctaccatggaatgtatttgtttctaccgctaagaggctgagggtcatggaaagctctgaacttcctcatggactgattaaaactgcctccgagagggctgatgactgatatgaggccaagtcgcgcccagccttcgaatcatgcaattgcaagctatgtcaatcattggcttcttcggatggccctttttggcttgtagagagaaatctaataagataatgttagcatatcgcagatgccctgaatgcactgtgcaccttctgtaattttcctcgctctgtttcagatgtggtgctgatcagtgctattccacatggtctagtatgtctacgtttactaaaggtaaagaatgtgcttttagtgtgatgtgtggtggttttcagctaactacactgagacacaaaatgcatacgtaaaaacattaggaatcggacagcagaccaaaaaaaaaaa

SEQ ID NO: 136146 - DNA, 639 bp, Zea Mays
gcttgattcgttaggaggagttaacagtcttataaattcaactctcaacgagcgcgagagggacattattcgattatatcatggcataggaaagcagtgccatacatgggaggatatcagcagacaattcgggttgtcgagggagcgcgtgaggcaggtagggctcgttgcgatggagaagctgaagcatgctgcaaggagggaacatttggatgcgttgcttgaggaatactgagtgagatgttcttcgcttgagtcggttaattccaccgttgcagtggttgtatatactcggaaacataggggggcaggcacatcatccttgaaaggcttcactgccactcactcactctgcagataactatacatgtacatctgtgacgatcagtaggcatgcatagttaaaagcatctgtggctgcaaaatcgtcaaggcgatccaacaaaaggagaaccttttttttgggtcttggaagctttacaaagtgtgatgtggtatgtatatgcaaatgtaatgtatcagtaattcagtagagcaataacgtttatgtcctggatttgtattcttgtccagttacatagaaggaaaaaatgcttacaactgcagacaatttgcctttcacgaaaaaaaagattacaa

SEQ ID NO: 136147 - DNA, 88 bp, Zea Mays
cagccagattctccccacagccagattttcagaaaagctggtcagaaaaaagctgaaccaaacaggccctatatcaccattgtaagct

SEQ ID NO: 136148 - DNA, 3515 bp, Zea Mays
gttcacagttcacaccacgcggtccgcgatggcaggccaccaccgcgcccgccgagtaaacggcacgcgcgcgcccccgcgccggccgtcggcggaaaaaatcacgcggagccggagccaccccgaaaagccacgcacgtcgccaacaaccgttctacgcgtccagcccctgctgtgcgcctgcgtctggctcgccctgctgctggcgtgcctcccgcgccaggccgcggcgcaggacgccgaggcgcggctgctgctgcagatcaagagcgcgtggggcgacccggcgccgctcgcgtcgtggagcaacgcgaccgcggcggcgccgctcgcgcagtgcagctgggcctacgtgctctgcgacggggccgggcgggtcagctcgctcaacctcaccaacgtcacgctggccggccgcaccatccccgacgccatcggcgggctcacggccctcacggtgctcgacctgtccaacaccagcgtcggcggcggcttccctgcgtccctctacaactgcgccgccatcgcgcgcctcgacctctcccacaaccagctcgccggggacctcccggccgacatcgaccggctcggcgccaacctgacctacctcgccctggaccacaacaacttcaccggcgcgataccggcggcggtgtccaggctcaccaacctcacgtacctcgctctcggcggaagccagctcaccggcaccatcccgccggagctcggccagctggttaaccttcggacgctcaagctcgagaggactcccttcagtgccggcacgctgccggagtcgttcaagaacttgaccaagctaacgaccgtctggctggccaagtgcaacctcaccggcgagatcccgagctatgtcgcggagctggcggagatggagtggctcgacctgtccatgaatggactcaccggaaacataccgtccgggatatggaacctccagaagctgacgaatctgtacctgtacaccaacaacctctccggcgacatcgtcatcaacaacgggacgataggagcggcaggtttggtagaggttgacctgtccgagaacatgctgactgggaccatcccaggaagcttcggaagcttgacgaagctaaggctcctcattttgcacgacaacaatctcgtcggcgagataccggcaagcatagcccagctaccgtccttggtatacttgtggctgtggagcaacagcctcagcggagagctcccgccggggctcggaaaggagacgccggtgctgagagatatccagatcgacgacaacaacttttccgggccaataccggcggggatctgtgagcacaaccagctgtgggtgctcaccgcccccggtaaccgcttgaacggctcaataccgaccggtcttgccaactgctcgagtctcatatggttgttcctcggaggtaaccagctgtccggcgaggtgccggccgctctatggacggtgccgaagcttctgaccgtgtcgttggagaacaatggacggttgggcgggagcctgccggagaagctgtactggaacctgtcgaggcttagcatcgacaacaaccagttcaccggaccgattcctgcatcggctactaatctcaagcggttccacgccagcaacaacttgttctccggcgacataccaccggggttcaccgctgcgatgccccttctgcaggagctggacctgtcggcgaaccagctgtctggggcaatcccacagagcattgcgtcgctcagtggcatgtcgcagatgaacttaagccataaccagctcaccggcggcataccggcggggttaggctcgatgccggagctcaccctgctggacctttcgtcaaaccagctttccggcgccataccgccggcgctgggaacgctgagggtcaaccagcttaatctgtcctccaaccagctcaccggcgaggttcccgatgcgctcgcccgtacctacgaccaaagcttcatgggcaatccaggcctctgcaccgccccgccggtgtcgggcatgcgctcgtgcgcggccccgtcaaccgaccatgtctcgccgcgtctccgtgcgggcctcctcgccgcgggcgccgcgctcgtcgtcctcatcgcggcgctcgccgtcttcgtcgtccgcgacatcaggaggcggaagcggcggctcgcgctggctgaggagccctggaagctcaccgctttccagcccgtggacttcggcgaggcctccgtgctgcgcgggctcgccgacgagaacctcatcggcaagggcggctcggggcgcgtgtaccgcgtcacgtacaccagccggagcagcggcgaagcggcgggcaccgtggccgtgaagcgcatctgggccggcgggagtctggacaagaagctggagcgcgagttcgcgtcggaggtggacatcctcggccacatccggcacagcaacatcgtgaagctcctctgctgcctctcccgcgcggagaccaagctactcgtctacgagttcatgggcaacggcagcctggaccagtggctgcacggccacagcaggctggccgggaccgggactgccatggtcagggccccgtcggtccggcgtgagccgctggactggccgacgagggtcaaggtggccgtcggcgccgcgcgcgggctgtactacatgcatcatgagtgctcgccgcccatcgtgcaccgcgacgtcaagtccagcaacatcttgctcgactcggagctcaatgccaaggtcgccgatttcgggctcgcccggatgttggtccaggccggcacgaccgacacgatgaccgccgtcgccggatcgttcggctacatggctcccgagtccgtgtacacgaggaaggtgaacgagaaggtcgacgtgtacagcttcggggtcgttctcttggagctgaccaccggtagattagccaacgacggcggtgagcacggctccctggccgactgggcgtggcggcacctgcagtccggtaaaagcatcgccgaggccgcagacaagtccatcgcggacgccggttacggtgaccaagtcgaggccgtcttcaagctcggcattatatgcaccggtcgccagccgtcctcgcggccgacgatgaagggtgtgcttcagatactgcagcggtgcgagcaggcgcaccagaggaccttcgacgagaaggtcgccgactacgacgccgctccgctgctgcaggtgcatggaggtagccgccggaaacaactctccgatgccgaagtgatcgacgacgatgggaagggcggtttcgactgcaatgtctgaagaaaagcagaatgagcaatggctatgggaaccctgaccacctgaggccagaacctagcatataggacgccatgtgcttgtgcacgctctttgccagagcaaaggatagtcatcacagctcattacaacaacactgatggacagtgccaccccgtaatataggtttttatgtactgtaacagcgaaactataaaactaaatccaatcatatatttgacgaagcagtgaagag

SEQ ID NO: 136149 - DNA, 1071 bp, Zea Mays
aatgagcatcttgagctgcgcgtggatgtccccgcgcaggccgcgctccatctcggcgaccatggcgtccgcgatgccccgcagcagcgccgtgggcgtggcgaggctgcgctccacctcctcgatcaccgcggccgcgcgccgcctcctctccgcctccgcggaccccaggagcgcggcgtcgcgcttgcgccggcggtgcaccagcaccgccgccacccccaccgccgcgcacgccacgaccgccgcgcccaccaccacggacttccccatcgccgccgccgccgccgatcctgatccctagcctcgcgcccgcggccgtcgagcgagcgggtcgatccggacgcgcgcacgggtttccgcgctctggatccgaggacgaggccccaactcctccagcgaactactacttcttcttccttggcttccccgcccgcgtaggagaggaggaagacgggggccactggcacgggcgttttaaccggtagccaactacccctcgtccttcccggaattcacgggtccacccctcggattcggacggctacgatccgcttcgcgtcgaactggacgggctggatcggagcgtgggggtggacggatctggggacccggggggcttgtctagtaaatatggatatatatatattcgctaattacccgattggtgtgagattagttggaggatggaaatcgattagcgactctgctcgcgcaagaaatgggtcaccaaacagtcggtggcgcgtcgtggtagccagtacaggctgacaggtggttcctaccgtctcggggccacagatcagggaggcagcggagattgcgtcggggccttgagctcgaatcagaaggtaattagacgagggatgccgcattcaaagcggggggtcttgtcccacgtggacggtcggaccccagctgagattccggacgccaggacggggatgcctcgcggtcgcgggcctgttggagattcgtgtagtacggtgctgtcatccgcgtggaggttgcaaggtcaactgccagcaactgtgtctgtgtccccggtggacgaacagctctctttcttca

SEQ ID NO: 136150 - DNA, 2108 bp, Zea Mays
acttcctttccgggtttcccgcgtccatccaacgccctcgcttcgccttttcacgcattcccccgctgctgcagctaccagcaccaagccacgccggccgccatggggcgcgcgatgaggtggctcaagaaggtgctcaccggcagcagcaagaaggaagcgtcggacggggttcgcaaggcgcgcgatgccgcgtgcgccggcgccggcggtggcggtgaccacgggctgggcccgccggcatcggagaagaggcggtggagcttcgccaagccgaggagcagcgtgtctggctccgcccggaggccctccgtcgccgccggggagctgtcgcaggtgcgcccgtgcagctgcggccttgagcgcgaggtggaggccgccgccgtcatccagaaggccttcagaggctacttggtgagttcatccgtcgtagtattgcccctacaagaaatgcattctttctttctttccgttcatgattcgttgcaggctttttttgtttgtttgtttgtttcactcacaaaaacgaaatcgaaatggttctgctacgtatggaggagcactgctcagccgaagattttaggtggttttggccattcctttgctctctgtcggtccagttttccagttccaagataatgaacggattacgggtgaaacagatgcgcatgaatttcgcagattctttttgcattcgcattgggcaagacacatttgacttgtctagccgctgcaaacccatacggagtagctgcttgctggtgtttctttccgtcgagccgtttagccactgctcgtttgtttaatcaatcccttcctttttgttaattggtagagtgcttcgtgaaccgcgcagcgtgacgcacctagtcgtcacccccagctgtttgatgcgcaattcttttcggtttcccatgcgagacctgcggcgctccgacgtgatgtgactgttaaaattttgaatttgtttcgcaacgcaaggctcggaaggcgctccgcgccctcaagtcgctcgtgaagctgcaagccctggtgcgaggctacctcgtgaggaagcagacggccatgacgctgcgcaggctgcaggccctcatgcggctccaggccaacacggcggcgtcccggagatccactgaacaagtgaggacattgatgagcactaaaccaatcacgttttagattttaatttttcttcacttctgcattttgcacgcacaggagcgtatcgttgcgcgggtgaggccactggccgtgcctgctgctgcggtgcaccgccggcggctgtccgacggcggggacgccgctggcggcttcgaccgcagcccgaggatcgtggagatggacacgtgcgagctccgctgccggtcgtcccggatcacgagccggtccgccggcggcgacccggcgggcgactcaccgctcctcctgcgctgccacgagccggcgtggtgtctccaggggcgagagctcgagcccccgcctccgcctccgcctccgcaccccaagacgacgcacaacacgccccgcctcggcgcgttcgcgggctacctcggctcgccggcgaagcgcgcggccgcgtgccgggactccgggagctgcccgcggtacatggcgggcacggcgtcgtccgtggcgcgcgcccggtggcagagcgcgcccaggcagcggcgcggcgagcagcagcagcaggcgcccgcgggggatgcagacggggcgaggcccagccccagcgtcggccgcggcgggtcgaggatgcacgcgcggccgcaggagctgcaggcgccggacagcttcagcctcaagagctcggaggccagccgcgtggaggtggagggctcggagctgagcgacgaggtcaccagggactactacctggaccggctctggtgattccgcctggtgtagaagaggaggaggcttaacatttcggtacatagtgaaatgtcatgactaagctacgactaatctcaactaccttggaggtcgagtatcagagtaggtatggtatcatagagaaggaaataaatggtgttctactgctacctgtgaccatttgaaaaagaaaatggaaaagaaaacaactgcctcacctagtagtgcagctgcaa

SEQ ID NO: 136151 - DNA, 782 bp, Zea Mays
gattgagcgccgtctctatattcaagcagaacacataagaagtcaaaatgttatcatgaagagaagagaacagaagtactgttcaaaaattaaagtacttgaaatgttggtaaatggcacaaatgaagaaaaccagatggcaataaacaggcttcagatagtcaagaatgagaagtcaaaaatcgaagagaggagaaaacttagtgagcaagatgttcatcgattgatgagagagaaagaacattctgaaaacatcatagcaaacctaaagaaagatatagaagccatgaatagattgcatgaacagcaacttgagcaaactgaaagaaaggcaaaggaaatggaggagcaactaaccaccaaagtaaaagaagtagagtatctcttgctacaatcgaagaagaaagttgaagaagttgagactgcttccaggctaaaatcacagttatgggataagaaagaggacaattttcagagtcacatggataatcaacaactaattatcaaggacataagaatattgtcgcgatcatgtgaaaatgatatgtatgcacttcaaatgcagtggagaaatgagatctctaacttaggatctgggttaaaatgtttggttgatgctgctgaaaattatcataaagtcttggcggagaaccaaaagttatttaatgaagtgcaagaactaaaaggtaatataagagtatattgtcgtgtgaggccatttctttcgggtcaagacaaaaagtctactacaattgactacatgggggaaaatggtgagcttc

SEQ ID NO: 136152 - DNA, 1607 bp, Zea Mays
tcagactggttctggcaaaacttacaccatgagtgggcctagcacatcgaagcaagattggggtgtcaattatcgggctttaaatgatttgtttgatatttcactaagtagaagaaatgccttctcatatgaggtgggtgtacagatggttgagatatacaatgaacaagttcgtgatttgctatcaaatgatattgcacagagaaggcttgggatttggagcacttctcaacccaatgggcttgttgttccagatgcaagcttgcactcagttaagtcgacatctgatgtattagacttgatggaaattgggcaagcaaatagagcagttggttcaacagcactaaatgagcgaagtagtcggtcacacagtattctaactgtacatgttcgagggttggatttgaagaatggatctacctcgaggggttgtttgcatcttattgatcttgctggtagtgagagggtggagaagtctgaagtaactggggatagattaaaagaagctcaatacatcaacaaatcactttctgcgttaggcgatgtgatttttgctctgtcacagaaaagtatccacgtgccttatagaaacagcaagctaacacaagttcttcaaagttctttaggtaatcaagtatttatttactaccagtaaactagatcttaaatagatttatgtgaatattttaaatatttgtactaccttttgctttcttccaggtggacaagcaaaaactctaatgttcgttcaaataaatcctgatgttgagtcatattcagaaactataagcactttaaagtttgctgaaagggtgtctggagtagagttaggtgctgcaagaagcaacaaggagggaaaggatataaaagagctactggaacaggttgcgtctttgaaagacacaatttcacgcaaagatatggaaatagagcagctccaagtcatcaaagacaaagcaaaatccccaaatttattgttagatagaaatgggcctggcttgacaaagattacagtaaaccaacctagccaactattatcaggcgaacgaatgctcaagtctagtgacagagttctatcagatcctcctgataacagagattctaaccataatttgacggatactgctccagtgagcttagatgaagcagaatatgatggcaatgcatctgatgatggtttatcaggtgaagccgagaattacaattcagctgctgagatgacagcggaacggttgcatggaattccatcaagaataagcagattcactctcacaaaaaacgggcaaccatctatgtctagatcaaaatcaaaggatgctaagactccaagtaatgcaaaagctccatctagccagttaacaggaggttcttcagccagggggtctaaaagatggcagaagtaaagcacgatcatgttgctcgtgttgatgcacattgtaattgaaatgtgaatttgctgggtagctgtgttagaaagttaggcatttttagttttaatttaatccagaaaaacagtgcgatatatgtgatgacatgtatgtgcatgtgtgtataactactcgcataagcagtaaacaacaatgaaacatgcacaaatacgaagaaca

SEQ ID NO: 136153 - DNA, 1513 bp, Zea Mays
tcagactggttctggcaaaacttacaccatgagtgggcctagcacatcgaagcaagattggggtgtcaattatcgggctttaaatgatttgtttgatatttcactaagtagaagaaatgccttctcatatgaggtgggtgtacagatggttgagatatacaatgaacaagttcgtgatttgctatcaaatgatattgcacagagaaggcttgggatttggagcacttctcaacccaatgggcttgttgttccagatgcaagcttgcactcagttaagtcgacatctgatgtattagacttgatggaaattgggcaagcaaatagagcagttggttcaacagcactaaatgagcgaagtagtcggtcacacagtattctaactgtacatgttcgagggttggatttgaagaatggatctacctcgaggggttgtttgcatcttattgatcttgctggtagtgagagggtggagaagtctgaagtaactggggatagattaaaagaagctcaatacatcaacaaatcactttctgcgttaggcgatgtgatttttgctctgtcacagaaaagtatccacgtgccttatagaaacagcaagctaacacaagttcttcaaagttctttaggtggacaagcaaaaactctaatgttcgttcaaataaatcctgatgttgagtcatattcagaaactataagcactttaaagtttgctgaaagggtgtctggagtagagttaggtgctgcaagaagcaacaaggagggaaaggatataaaagagctactggaacaggttgcgtctttgaaagacacaatttcacgcaaagatatggaaatagagcagctccaagtcatcaaagacaaagcaaaatccccaaatttattgttagatagaaatgggcctggcttgacaaagattacagtaaaccaacctagccaactattatcaggcgaacgaatgctcaagtctagtgacagagttctatcagatcctcctgataacagagattctaaccataatttgacggatactgctccagtgagcttagatgaagcagaatatgatggcaatgcatctgatgatggtttatcaggtgaagccgagaattacaattcagctgctgagatgacagcggaacggttgcatggaattccatcaagaataagcagattcactctcacaaaaaacgggcaaccatctatgtctagatcaaaatcaaaggatgctaagactccaagtaatgcaaaagctccatctagccagttaacaggaggttcttcagccagggggtctaaaagatggcagaagtaaagcacgatcatgttgctcgtgttgatgcacattgtaattgaaatgtgaatttgctgggtagctgtgttagaaagttaggcatttttagttttaatttaatccagaaaaacagtgcgatatatgtgatgacatgtatgtgcatgtgtgtataactactcgcataagcagtaaacaacaatgaaacatgcacaaatacgaagaaca

SEQ ID NO: 136154 - DNA, 849 bp, Zea Mays
cgcacgcacgcacaagccacgcactcgcacagcggcacacagactcccaattccaaaccctagacgttgacggcgacggtaggtcgacagctctagccaggcagccagccacgagcccacgacgaccgtggaggcctcacctcctcggctcttcatctcacgacggcacagcctgcaagcaagaggccgctctgatccctcgcgccggacttgacgacaggtgactgcctgactgcatggcatctgcaagtggcagtgggtgcgcaagcactggagcatcccttgttgctacgaacaccctggctgtggctgtgcaagacacaactccagttaatggagctggagaaggagaagatggagaaagaacaactgatattggagtgaaagagtctgatacaaagaaaaggaaaccaaaaagacaaacatctggtgtttgggactactttatcaagtccactgtgacagagaagggagataagggcgagaccgaggaacaaatttgggcaaaatgcaagaagtgcaagttcaaaacttgtggtgaatcatcgaggggcacaactatcttctggaacaatttgaaatcaaggcactacatacatagagggcagcaagaactacatgttcagaaaggtgaaggtaacaatgctattgttcaaaatttcaagtatgatcctgaagctagcttgaggaagtttcatctggctatagttatgcatgagtacccctttaagatggttgaacatgaatattttgttgatttcatcaagtctttgcgtccacactttacattcttgtgccgcacaaccactaggaatgagataatgacaatgtacatggatgaaaaaaaat

SEQ ID NO: 136155 - DNA, 549 bp, Zea Mays
atggcatctgcaagtggcagtgggtgcgcaagcactggagcatcccttgttgctacgaacaccctggctgtggctgtgcaagacacaactccagttaatggagctggagaaggagaagatggagaaagaacaactgatattggagtgaaagagtctgatacaaagaaaaggaaaccaaaaagacaaacatctggtgtttgggactactttatcaagtccactgtgacagagaagggagataagggcgagaccgaggaacaaatttgggcaaaatgcaagaagtgcaagttcaaaacttgtggtgaatcatcgaggggcacaactatcttctggaacaatttgaaatcaaggcactacatacatagagggcagcaagaactacatgttcagaaaggtgaagatcgcaatgacaaggtaccgtcaattgttgaggagttcatggcagatgaaaatgaatatagctcgacaattgaagagggacagaaccaagctgacaatgaaggaaatggtgaggatagtgaggatgagggcagcgatatggagttatga

SEQ ID NO: 136156 - DNA, 96 bp, Zea Mays
gaaattcaatttttggaccgaaattcacatcagggcccgaaattcaatttttgacctgaaattcacatcagagccctaaattcaaaacaaataaaa

SEQ ID NO: 136157 - DNA, 1704 bp, Zea Mays
atgatcagaattcagaagttgcgacaagtcgtttgaccgcaagagaaagttccgtaggccgatgtgaactcgggctggcccgtgccaattactagcgtcgcacaaggcacagagcggcccaataaagccgagcaaccgcaagtctgcaaccaggaaggagcaggcaaaagaatcggcgcccctccactacactgcaggctgcagcagcggccggccagcaggagggaaaggacagctccgaagcccgaaccctcaacccccagccgaccccgcccatggcctcctcctcccactcccggcgcggccgcagcgcacggcaggcccccttcttccgcgacctcgccaccccgatcccgtcccaccgcggcgtctcgcgcttcgcctcgggggcttccccctccgcggccccctccgccacgccgccgccgccgcccatcttcaccctcgacgacctctatgcctccgcggacttctccccggaccccaccgcgtccgacctcctccccgtcgcgtcgtccccctccccccgcgccgccgccagctgctcgccgccatgggacctgtcccggggcaaggtgtccctctcggcaccaggatcccccatggatggggtcgttgagccggcccggaaagaggtactcgctttgccgccgcctgcgagccctggcaccccacctcctgccacgacagcggaggttcagtcaccggtgtcccccgcgcaagcaccggctaggacggagccggtggcgaacggtggggaggccgaacgggaggagtggatcactgtatttggattttctattggagtcaccaaccttgttcttcgggaattcgagaaatgtggagtaatattgagacattactctggcccaagagatggaaattggatccacatattgtacgagcgctcgtatgatgctcgcaaggctcttcagaaaaatggtatgcaactaagcaacagtctgatagttggagtaaagcctattgatgcagtgcaccggcagcagctggacaagggtttcgctcaaagcaatcaaggtggatttatggtttccttgccttcaaagtcactgggcttgaagagcgtaggtgcatcaaaccagttaggagccttgccccgcccatatgacccgaaagctaacacgaatgccagccgagatgctggccgtcgtgcaactggcagcgttgctgcaccagcaaaatcaattgtaaccaatgtgatggatttgatatttggcatttgatatggcaatgagaaccaatcatccggaatattctctgtttcttctgtttacttgttcgagaatgccagcatgccaaagattcagcagcaaattttgctgaagtttgagagcttactgagtgaacttccttttggcgtgtaacattaaaattattcaattttcacgtttaatcgaagttatgttgtctcatgtccatatgagggcagttgtatgttaatggccatggtgtatgtcttgtttctgtctctccctcggcctcgaaaaaaaagtgctggtgtaatttcgagaaatcatatgttgctctcaggagtgtcgtgtcatctagagtgttttttgagtggatgaattgtgtcattttgttgtgttaatagcctcataggttggtaattgcaaggcaagagattggatgctttcggctgaaagcctgaaacgaaactctgaatctctaatggtgctttca

SEQ ID NO: 136158 - DNA, 972 bp, Zea Mays
ccctaattgtaggtgccttgtatgataaattgatacggttctgttggcacttcttctacagattttctattggagtcaccaaccttgttcttcgggaattcgagaaatgtggagtaatattgagacattactctggcccaagagatggaaattggatccacatattgtacgagcgctcgtatgatgctcgcaaggctcttcagaaaaatggtatgcaactaagcaacagtctgatagttggagtaaagcctattgatgcagtgcaccggcagcagctggacaagggtttcgctcaaagcaatcaaggtggatttatggtttccttgccttcaaagtcactgggcttgaagagcgtaggtgcatcaaaccagttaggagccttgccccgcccatatgacccgaaagctaacacgaatgccagccgagatgctggccgtcgtgcaactggcagcgttgctgcaccagcaaaatcaattgtaaccaatgtgatggatttgatatttggcatttgatatggcaatgagaaccaatcatccggaatattctctgtttcttctgtttacttgttcgagaatgccagcatgccaaagattcagcagcaaattttgctgaagtttgagagcttactgagtgaacttccttttggcgtgtaacattaaaattattcaattttcacgtttaatcgaagttatgttgtctcatgtccatatgagggcagttgtatgttaatggccatggtgtatgtcttgtttctgtctctccctcggcctcgaaaaaaaagtgctggtgtaatttcgagaaatcatatgttgctctcaggagtgtcgtgtcatctagagtgttttttgagtggatgaattgtgtcattttgttgtgttaatagcctcataggttggtaattgcaaggcaagagattggatgctttcggctgaaagcctgaaacgaaactctgaatctctaatggtgctttca

SEQ ID NO: 136159 - DNA, 920 bp, Zea Mays
ctgtatttatttgactattttgtcacttctgatgtttacatgcatcatagtaaatgtttctagattgctatctgacagtcttaaaactgacaacttcaccatcatgtatgtggtcctgcagcgctcgtatgatgctcgcaaggctcttcagaaaaatggtatgcaactaagcaacagtctgatagttggagtaaagcctattgatgcagtgcaccggcagcagctggacaagggtttcgctcaaagcaatcaaggtggatttatggtttccttgccttcaaagtcactgggcttgaagagcgtaggtgcatcaaaccagttaggagccttgccccgcccatatgacccgaaagctaacacgaatgccagccgagatgctggccgtcgtgcaactggcagcgttgctgcaccagcaaaatcaattgtaaccaatgtgatggatttgatatttggcatttgatatggcaatgagaaccaatcatccggaatattctctgtttcttctgtttacttgttcgagaatgccagcatgccaaagattcagcagcaaattttgctgaagtttgagagcttactgagtgaacttccttttggcgtgtaacattaaaattattcaattttcacgtttaatcgaagttatgttgtctcatgtccatatgagggcagttgtatgttaatggccatggtgtatgtcttgtttctgtctctccctcggcctcgaaaaaaaagtgctggtgtaatttcgagaaatcatatgttgctctcaggagtgtcgtgtcatctagagtgttttttgagtggatgaattgtgtcattttgttgtgttaatagcctcataggttggtaattgcaaggcaagagattggatgctttcggctgaaagcctgaaacgaaactctgaatctctaatggtgctttca

SEQ ID NO: 136160 - DNA, 3205 bp, Zea Mays
ttttcatctcttcgactgttcgatggccacgaataaaattttggttatctcaataaaatatactcctactattcaaactaaaaaaatcgatctagtattacatttacaacgacacaccgtgtctgcgcattatagtaggccgaagcgggattcaatcaaacaaccccgttccgacaaatagaagcgttctcaggggcttactcgcgaaaagctcaataaatcccgagtcgtagcacgggactggagcacccaacccaagttcacgatcgcgaggtcttcgtctccgcctgggtccagctctcggatttccgcgcgttccacttccacccacacacacacccccaaggacgcaggccgcaatggcggagcccgaggtctcccccgcagcggccggcggcggcgggcggctccgcaacgccttcgggggcgtgctctgcgccttcacgcttctcctcatcggcgtcgtcgccttctcgatccgcctcttctctgtaatcaagtacgagagcgtgatccacgagttcgacccctacttcaacttccgcgtcactcagtttctgtccaagaatggaatttatgagttctggaactggtttgatgataggacatggtacccccttggccgtgtgatcggtggcactgtgtatcctgggttgacattgactgctggaactatgtggtggttgctgaactctcttaacatcccattgtcggtggagacagtttgtgtgttcacagctccaattttctcagcaaatgcatcatgggctacctacctgctaacaaaggaagcgaaaggtactggagctggattaatggcagcagccattttagcaatggtcccctcatatatttcaagatctgttgcaggcagctatgataatgaagctgtagcaatatttgccttgatatttacattttatctatatgtaaagacgctgaacacgggatcactcttttatgcaacactcaatgctctctcatatttctacatggtctgctcttggggaggctacacattcattatcaatcttatcccaatgcatgtcctcttgtgcattgtaactggtcgttattcttcgcgtctctacattgcatatgctccccttgttgtacttggaacgcttctggcagcattagtaccggtggttggttttaatgcagtaatgacctctgagcacttcgcatcatttctggtgttcataatccttcacgtggttgctcttgtgtattatatcaaagggcttttgactcctaggctgttcaaagttgctatgactcttgtcatatctgttggcttagctgtttgttttgcagtagtagccatacttgttgcattggtggcatctagtccaacgaaaggctggagtggccgcagtttgagtctacttgacccaacttatgcaagcaagtacatccccatcattgctagtgtcagtgaacaccaacctcctacctggccctcgtattttatggacattaatgtgttggccttcctgattcctgctgggattatttcatgcttcttgcctctgtctgacgcaagctccttcatggtcttgtacttagtcactgcagtttatttttctggagtaatggtacggcttatgcttgtccttgctcctgctgcgtgcattttatctgggattgctctatctgaagttttcagtgtgctcacacgatccattaaattgcagctgtcaaaattatttgatgatagccctacttcttcaggtgacagtagcccagagagttctacaaattcaacaaaaaatgaaaataggaatgaaaaacacgaaatagctccaaaggaaaaaacatcaaagaagaaccggaagaaggagaaagaagtggcagagagtgttcctgtaaagcctaaaaaggaaaataggcttttggttctgccttttgaattatctgttatgggtattttattgctcatcgtattaggtggtttctatgtggtccattgtgtatgggcggcagctgaagcgtactccgcgccttcaattgtgttgacatctcgttcacgagatgggttgcatgtttttgatgatttccgtgaagcttacgcatggctgagccataacacagatgttgatgacaaggttgcttcctggtgggactatggttaccaaacaactgcaatggccaacagaactgtgattgtagacaataacacctggaacaacactcatatagcaacagttggtacagcaatgtcgtccccagaaaaagcagcttgggaaatcttcaattctttagatgtcaaatatgtgcttgttgtctttggaggacttgttggataccctagcgatgatatcaataagttcctttggatggtacgaataggaggtggtgtgttccctcacattaaggagccagattatcttagggatggtcaatatcgcgttgatgctcaagccactccaactatgctgaattgcctcatgtacaagctttgttactacaggtttgtggagactgatggaaaaggctttgacagagtaagaggatatgaaataggaaagaagcatttcaagctaacacattttgaggaggtatttacaacccaccattggatggtccgcatatataaactgaaaccccagaagaacagggttcgaggcaagctgaagaagttgaaggccagtgccaaaactagtcccacacttgcggcagggcgaaagaacccgtggcaataggtgaagttaccaatagtgccatttacctgatactttgttggtagatcaagtgcgctaggttggtgaaccagaaaactacagaactagattagagatctggactattgtattggaccctcgttatatgttctcccaaccggccgggtgctgatgaaatttttgatagaccagaggagtttatcaatcccatgggtttgagattggatggcggcgataattttctagtgacaggggttgtttaagactacctgttacttgctgttttgtgtaacctacaatttttcttacaaggtacttctctactggggtgatagtgagttcaggacatcgtgagcactgagcactgaggctatatccactatccagcaaagaaggcaaaatgcaaaatagggtatcgcacggcactttagcacaatggcatgtctctaatagggtatgcattaggaggtaaaatgcatatgagaggggatatgcaaaatacagtattgatttgcatatgc

SEQ ID NO: 136161 - DNA, 2544 bp, Zea Mays
gttcacgatcgcgaggtcttcgtctccgcctgggtccagctctcggatttccgcgcgttccacttccacccacacacacacccccaaggacgcaggccgcaatggcggagcccgaggtctcccccgcagcggccggcggcggcgggcggctccgcaacgccttcgggggcgtgctctgcgccttcacgcttctcctcatcggcgtcgtcgccttctcgatccgcctcttctctgtaatcaagtacgagagcgtgatccacgagttcgacccctacttcaacttccgcgtcactcagtttctgtccaagaatggaatttatgagttctggaactggtttgatgataggacatggtacccccttggccgtgtgatcggtggcactgtgtatcctgggttgacattgactgctggaactatgtggtggttgctgaactctcttaacatcccattgtcggtggagacagtttgtgtgttcacagctccaattttctcagcaaatgcatcatgggctacctacctgctaacaaaggaagcgaaaggtactggagctggattaatggcagcagccattttagcaatggtcccctcatatatttcaagatctgttgcaggcagctatgataatgaagctgtagcaatatttgccttgatatttacattttatctatatgtaaagacgctgaacacgggatcactcttttatgcaacactcaatgctctctcatatttctacatggtctgctcttggggaggctacacattcattatcaatcttatcccaatgcatgtcctcttgtgcattgtaactggtcgttattcttcgcgtctctacattgcatatgctccccttgttgtacttggaacgcttctggcagcattagtaccggtggttggttttaatgcagtaatgacctctgagcacttcgcatcatttctggtgttcataatccttcacgtggttgctcttgtgtattatatcaaagggcttttgactcctaggctgttcaaagttgctatgactcttgtcatatctgttggcttagctgtttgttttgcagtagtagccatacttgttgcattggtggcatctagtccaacgaaaggctggagtggccgcagtttgagtctacttgacccaacttatgcaagcaagtacatccccatcattgctagtgtcagtgaacaccaacctcctacctggccctcgtattttatggacattaatgtgttggccttcctgattcctgctgggattatttcatgcttcttgcctctgtctgacgcaagctccttcatggtcttgtacttagtcactgcagtttatttttctggagtaatggtacggcttatgcttgtccttgctcctgctgcgtgcattttatctgggattgctctatctgaagttttcagtgtgctcacacgatccattaaattgcagctgtcaaaattatttgatgatagccctacttcttcaggtgacagtagcccagagagttctacaaattcaacaaaaaatgaaaataggaatgaaaaacacgaaatagctccaaaggaaaaaacatcaaagaagaaccggaagaaggagaaagaagtggcagagagtgttcctgtaaagcctaaaaaggaaaataggcttttggttctgccttttgaattatctgttatgggtattttattgctcatcgtattaggtggtttctatgtggtccattgtgtatgggcggcagctgaagcgtactccgcgccttcaattgtgttgacatctcgttcacgagatgggttgcatgtttttgatgatttccgtgaagcttacgcatggctgagccataacacagatgttgatgacaaggttgcttcctggtgggactatggttaccaaacaactgcaatggccaacagaactgtgattgtagacaataacacctggaacaacactcatatagcaacagttggacttgttggataccctagcgatgatatcaataagttcctttggatggtacgaataggaggtggtgtgttccctcacattaaggagccagattatcttagggatggtcaatatcgcgttgatgctcaagccactccaactatgctgaattgcctcatgtacaagctttgttactacaggtttgtggagactgatggaaaaggctttgacagagtaagaggatatgaaataggaaagaagcatttcaagctaacacattttgaggaggtatttacaacccaccattggatggtccgcatatataaactgaaaccccagaagaacagggttcgaggcaagctgaagaagttgaaggccagtgccaaaactagtcccacacttgcggcagggcgaaagaacccgtggcaataggtgaagttaccaatagtgccatttacctgatactttgttggtagatcaagtgcgctaggttggtgaaccagaaaactacagaactagattagagatctggactattgtattggaccctcgttatatgttctcccaaccggccgggtgctgatgaaatttttgatagaccagaggagtttat

SEQ ID NO: 136162 - DNA, 2796 bp, Zea Mays
gttcacgatcgcgaggtcttcgtctccgcctgggtccagctctcggatttccgcgcgttccacttccacccacacacacacccccaaggacgcaggccgcaatggcggagcccgaggtctcccccgcagcggccggcggcggcgggcggctccgcaacgccttcgggggcgtgctctgcgccttcacgcttctcctcatcggcgtcgtcgccttctcgatccgcctcttctctgtaatcaagtacgagagcgtgatccacgagttcgacccctacttcaacttccgcgtcactcagtttctgtccaagaatggaatttatgagttctggaactggtttgatgataggacatggtacccccttggccgtgtgatcggtggcactgtgtatcctgggttgacattgactgctggaactatgtggtggttgctgaactctcttaacatcccattgtcggtggagacagtttgtgtgttcacagctccaattttctcagcaaatgcatcatgggctacctacctgctaacaaaggaagcgaaaggtactggagctggattaatggcagcagccattttagcaatggtcccctcatatatttcaagatctgttgcaggcagctatgataatgaagctgtagcaatatttgccttgatatttacattttatctatatgtaaagacgctgaacacgggatcactcttttatgcaacactcaatgctctctcatatttctacatggtctgctcttggggaggctacacattcattatcaatcttatcccaatgcatgtcctcttgtgcattgtaactggtcgttattcttcgcgtctctacattgcatatgctccccttgttgtacttggaacgcttctggcagcattagtaccggtggttggttttaatgcagtaatgacctctgagcacttcgcatcatttctggtgttcataatccttcacgtggttgctcttgtgtattatatcaaagggcttttgactcctaggctgttcaaagttgctatgactcttgtcatatctgttggcttagctgtttgttttgcagtagtagccatacttgttgcattggtggcatctagtccaacgaaaggctggagtggccgcagtttgagtctacttgacccaacttatgcaagcaagtacatccccatcattgctagtgtcagtgaacaccaacctcctacctggccctcgtattttatggacattaatgtgttggccttcctgattcctgctgggattatttcatgcttcttgcctctgtctgacgcaagctccttcatggtcttgtacttagtcactgcagtttatttttctggagtaatggtacggcttatgcttgtccttgctcctgctgcgtgcattttatctgggattgctctatctgaagttttcagtgtgctcacacgatccattaaattgcagctgtcaaaattatttgatgatagccctacttcttcaggtgacagtagcccagagagttctacaaattcaacaaaaaatgaaaataggaatgaaaaacacgaaatagctccaaaggaaaaaacatcaaagaagaaccggaagaaggagaaagaagtggcagagagtgttcctgtaaagcctaaaaaggaaaataggcttttggttctgccttttgaattatctgttatgggtattttattgctcatcgtattaggtggtttctatgtggtccattgtgtatgggcggcagctgaagcgtactccgcgccttcaattgtgttgacatctcgttcacgagatgggttgcatgtttttgatgatttccgtgaagcttacgcatggctgagccataacacagatgttgatgacaaggttgcttcctggtgggactatggttaccaaacaactgcaatggccaacagaactgtgattgtagacaataacacctggaacaacactcatatagcaacagttggtacagcaatgtcgtccccagaaaaagcagcttgggaaatcttcaattctttagatgtcaaatatgtgcttgttgtctttggaggacttgttggataccctagcgatgatatcaataagttcctttggatggtacgaataggaggtggtgtgttccctcacattaaggagccagattatcttgcaatgttatctgcagagggatggtcaatatcgcgttgatgctcaagccactccaactatgctgaattgcctcatgtacaagctttgttactacaggtttgtggagactgatggaaaaggctttgacagagtaagaggatatgaaataggaaagaagcatttcaagctaacacattttgaggaggtatttacaacccaccattggatggtccgcatatataaactgaaaccccagaagaacagggttcgaggcaagctgaagaagttgaaggccagtgccaaaactagtcccacacttgcggcagggcgaaagaacccgtggcaataggtgaagttaccaatagtgccatttacctgatactttgttggtagatcaagtgcgctaggttggtgaaccagaaaactacagaactagattagagatctggactattgtattggaccctcgttatatgttctcccaaccggccgggtgctgatgaaatttttgatagaccagaggagtttatcaatcccatgggtttgagattggatggcggcgataattttctagtgacaggggttgtttaagactacctgttacttgctgttttgtgtaacctacaatttttcttacaaggtacttctctactggggtgatagtgagttcaggacatcgtga

SEQ ID NO: 136163 - DNA, 3168 bp, Zea Mays
caaccagaaaaactagccgaagcaaacccattccacaagcacctggtgggatcatctcatcatcagaaacaaagagagagattccgtgcccacttgttgtagtagattgtgaggattgaggagtagcaaagagaagcagccatgaatccggacaacttcacccacaagacgaacgaggcgatcgtgggggcgcacgagattgcggtggaggccggccacgcgcagctcacgccgctgcacctggccgcagtgctggctgcggacaagggcggcatcctgcggcaggccatcacgggggcgtcggggggcgacggagcggccggggactcgttcgagcgcgtgctgaacaactcgctcaagaagctgccgtcgcagtccccgccgccggactccgtcccggcgtccacggcactgatcaaggtcatccgccgggcgcagtccgcgcagaaaaaacgcggggactctcacctcgccgtcgaccagctgctgctcggcctgctcgaggactcgcagatctccgactgcctcaaggaggccggcgtgtccgcggcgcgggtgcgcgccgagcttgagaagctccgcggcggggaggggcgccgcgtggagtccgcgtcgggggacactaacttccaggcgctcaagacatacggccgggacctcgtcgagcaggccgggaagcttgatcccgtcatcggccgcgacgaggagatccgccgcgtggtgcgcatcctctcgcgccgcactaagaacaaccccgtcctcatcggcgagcccggcgttggcaagacggccgtcgtggagggcctcgcgcagcgcatcgttcgcggcgacgtgcccagtaacctcctcgacgtccgcctcatcgcgctcgacatgggcgcgcttgtcgcgggcgccaagtaccgcggcgagttcgaggagcggctcaaggccgtgctcaaggaggtggaagaggccgaggggaaggtcattctcttcatcgacgagatacacctcgtcctgggcgcgggcaggacggagggttccatggacgcggccaacctgttcaagccaatgctggcgaggggacagctcaggtgcatcggcgccaccacgctggaggagtaccgcaagtacgtggagaaggacgcagcgttcgagcggcggttccagcaggtgttcgtcgcggagccgagcgtgcccgataccgtcagcattctgaggggactcaaggagaagtacgaggggcaccatggcgtgaggatccaggaccgcgccctcgtggtcgcggcacagctctccgcgaggtacatcatgggtcggcacctgcctgacaaagccatagacctggtggacgaggcctgcgccaatgtgagggtgcagctcgacagccagccggaggagattgataacctggagaggaagagaatccagcttgaggtcgagctccacgcgctcgagaaggagaaggacaaggccagtaaagcccggctgattgaggtcaggaaggaattggacgatctgagggacaagctgcagcccctgaccatgaagtacaggaaggagaaggagagaatcgatgagatcaggaagctgaagcagcgccgcgaggagctccagttcaccctgcaggaggccgagcgccggatggacctggcccgtgtggccgatctcaagtacggcgccctccaggaaatcgacgccgcgatctccaagctggagagcgaaacaggggagaacctgatgctcaccgaaaccgtcggccctgaacaaattgcagaggtggtgagccgttggacgggtattccagtgacccggcttggccagaacgacaaggagaggctggtcggcctggctgacaggcttcaccagagggtggtcggccagacagaggctgtgagcgccgtcgcagaggcggtgctgaggtcgagggccggtcttggcaggccacaacagcccactggctcgttcctcttcctgggtccgactggcgtggggaaaactgagctggccaaggccctagccgaacagctgttcgacgacgagaaccttcttgtccgcatcgacatgtcggagtacatggagcagcactcggttgctcgcctcatcggagcaccacctggctacgtcggccatgaagagggtgggcagctgactgaacaagtgaggaggaggccgtacagcgtgatcctgttcgacgaggtcgagaaggcccatgtcgccgtgttcaacaccctgctccaggtcctcgacgacggcaggctgacggatgggcaaggcaggacggtggacttcaggaacaccgtgatcatcatgacatcgaacctcggcgccgagcacctcctcgctgggatggtgggcaagaactccatgaaggtcgctcgcgatctggtcatgcaggaggtgaggaggcacttccgccctgagctgctgaaccgtctcgacgagatcgtgatcttcgatcctctgtcccacgagcagctgaggaaggtcgctcgccttcagatgaaggatgtggccgtccgtcttgccgaaaggggcatcgctctggctgtgaccgacgccgcattggacatcatcttgtctctctcttacgatccggtgtacggcgcgcggccaataaggaggtggatcgagaagagggtggtgacgcagctgtcgaagatgctgatccaggaggagatcgacgagaactgcacggtctacatcgacgccgcgcccggtaaggacgaactggtctacagggtggaccggagcggcggtctggtgaacgctgagacggggatgaagtcggacatcctgatccaggtccccaccagctccaccaggagcgacgctgcgcaggccgtcaagaagatgaggatcatggaggaggacgaggacggcatggacgaggagtaaaaggcgggccggaggacgcggagctgcgcccaggccgcaggtctggcgccggcatcatcgagtgtcttttgaataagcgtgtagataagcccgtgaatgtggaaacgaggatgagatgatgttcttgtaacgctgctgtttgtcaagcatggacgaatgctctcatatcatcatatggtgtcaaagtgacaaagtctctcaatcgatgtcttgatgtcattatttttatctccctgaatgtttttacatgttttcctctattcattgtatcctttatgcatacacgaa

SEQ ID NO: 136164 - DNA, 3000 bp, Zea Mays
gccagcccccccaaaccctaggctgccgccaacccgactggctcccccctcactcttctcccgccatgaactaccgcttccagaacctcctcggcgcgccgtaccgcggcggcgacgccgtgttcgcgggagactcacccgttctcctctccgctgttgggaatcgcgtggcctccactgacctcactgcctcctcgtctctcacgcttccgttcgagtcctcatccaacgtcacccgcctcgccacttccccctcgggcgacttcctcctcgcagccgatgacaatggccgcgcgctctacgccaacctccgccgccgcgccgtactccaccgcgtttccttcaagggcgcgccatcagccgtccgcttcagccccgacggtcagctcatcgcggtggccgtcgggaaggtcgtgcagatctggcgctccccggggtttcgcagggagttcttccccttccacctcctccgcactttcccgggcttcgccgctggcgtgacagcattcgattggtcaccggactctgcgttcctcctcgcgtcctgcaaggacttaacagctcggctcttgcctgtcaagaagggactaggaggcaagcctttcctcttccttggccatcgcgcggctgtcgtgggtgccttctttgccacggacaagaagacaaggagagtcaagggggtttatacagtctccaaggatggagctatctttacatgggatttggtggaaggaaatgaggaaaatgatacttcacctccgccatcaccagggacgccagagcaggggtcaaaacaaaatgtcgtcgatgccatggaactggatggtgggagcaggaaaaggaagattttgggagaattagagggactagacactatgctgcatttggcaaaatgggagctgcgggaaaagcatttcttcatgcagtcaccggctaagttaacagcatgtgattaccaccgagaactcgacatggtggtggttggattctctagtggagtatttgggctgtaccagatgccagactttgtgtgcctccatctgttgtcaatatcaagggagaagatcaccactgctattttcaacagttcggggagttggcttgtctttggatgtgccaaacttgggcagcttctggtgtgggagtggcggtcagagagctacattttgaaacagcagggacactactttgatgtgaattgcatcgcatactcaccagattctcagatattggccactggggctgatgataacaaagtcaaggtctggacagtttcatctgggttctgtttcataacattttcggagcatacaaatgctgtaactgcggttcattttatggccaataaccattctcttctaagtgcctcccttgatgggactattcgagcatgggatttgtttcgctatcgcaacttcaggacatttaccaccccttcacctaggcagtttgtttctttaaccgcagaccagagtggagaagtcatatgtgctggaacacttgattcgtttgagatatttgtttggtcaatgaaaactggtcgattgttggatgtactcagtggtcatgaaggaccagtgcatggtctaatgttttcaccaattaatgctattctggcttcatcatcatgggacaaaactgttcgcctctgggatgtctttgagagcaagggtgcagtggaaacttttcagcactcacacgatgttcttactttagcttatcgacctgatggaaggcagatagcatgcagtactttagatggcctaattcatttctgggatccatctgatggtttgttgatgtataccattgagggacgcagggatattgctgggggtcgcctcatgacagataggagatctgcagctaatacaagtataggaaagtacttcacaacattgtgctattctgctgatggaagttctattttagctggaggaaacaccaaatatatttgcatgtatgatgttggagaacaggtgctgttgcgtaggttccagatcactcgcaatctctcattggatggagttcttgattttctgaactcaaagaagatgacagatggtggtgcactagatcttattgacgatgaagacagtgatgttgaagaaggaattgatcgacatactagaggaaacttagggcttggtttacctggatcaatggcaaatcgtggaagacccatggctcggacaaaatgtgttaagtttgctccaactggaagatcgtttgctgcagcgaccactgatggtgttttattgtactcagttgatgaatcatttatttttgatccaacggacctcgacatcgacgttacgcctgagttgatccagccgatgtgagagcaatttgttcggcaattccttacaagtatctccaaagattgattgatactttcgctagtctcttggaaagttgtccccatctggaatttatcctcctgtggtctcaggagctatgtaaggttcatggccactatattcaacagaactccagaactttgcttccttctctgaaatcattgcagaagtctataacaagactacatcaggatttggcagatacttgctcttctaatgagtacttgttgaaatatctttgcactgctggtacgaagaattaggttgtgctggaaaatatctttgcaccgatctccctgacgatttctataggaggttgttgtgcttgcaaacccagacgcatgcgagctctgagcagttctgctttggacctctagggggattggcatccgggcttaatcctctgggcagtggctgttgtgttcagaactactgagctgaagcaacaatgtaacatgatcgatcctctggagaaagttgagctgtctggttttgtcagtgaaacgagagaaaaaaaatgtcgggaacgattaaagttatgtaacttaccgtgttatcaaatgtttggaccagaactggaaattgatatttgtcatgaatcaaatagaagaaacatgttatattcactcctgtttttttt

SEQ ID NO: 136165 - DNA, 3100 bp, Zea Mays
gccagcccccccaaaccctaggctgccgccaacccgactggctcccccctcactcttctcccgccatgaactaccgcttccagaacctcctcggcgcgccgtaccgcggcggcgacgccgtgttcgcgggagactcacccgttctcctctccgctgttgggaatcgcgtggcctccactgacctcactgcctcctcgtctctcacgcttccgttcgagtcctcatccaacgtcacccgcctcgccacttccccctcgggcgacttcctcctcgcagccgatgacaatggccgcgcgctctacgccaacctccgccgccgcgccgtactccaccgcgtttccttcaagggcgcgccatcagccgtccgcttcagccccgacggtcagctcatcgcggtggccgtcgggaaggtcgtgcagatctggcgctccccggggtttcgcagggagttcttccccttccacctcctccgcactttcccgggcttcgccgctggcgtgacagcattcgattggtcaccggactctgcgttcctcctcgcgtcctgcaaggacttaacagctcggctcttgcctgtcaagaagggactaggaggcaagcctttcctcttccttggccatcgcgcggctgtcgtgggtgccttctttgccacggacaagaagacaaggagagtcaagggggtttatacagtctccaaggatggagctatctttacatgggatttggtggaaggaaatgaggaaaatgatacttcacctccgccatcaccagggacgccagagcaggggtcaaaacaaaatgtcgtcgatgccatggaactggatggtgggagcaggaaaaggaagattttgggagaattagagggactagacactatgctgcatttggcaaaatgggagctgcgggaaaagcatttcttcatgcagtcaccggctaagttaacagcatgtgattaccaccgagaactcgacatggtggtggttggattctctagtggagtatttgggctgtaccagatgccagactttgtgtgcctccatctgttgtcaatatcaagggagaagatcaccactgctattttcaacagttcggggagttggcttgtctttggatgtgccaaacttgggcagcttctggtgtgggagtggcggtcagagagctacattttgaaacagcagggacactactttgatgtgaattgcatcgcatactcaccagattctcagatattggccactggggctgatgataacaaagtcaaggtctggacagtttcatctgggttctgtttcataacattttcggagcatacaaatgctgtaactgcggttcattttatggccaataaccattctcttctaagtgcctcccttgatgggactattcgagcatgggatttgtttcgctatcgcaacttcaggacatttaccaccccttcacctaggcagtttgtttctttaaccgcagaccagagtggagaagtcatatgtgctggaacacttgattcgtttgagatatttgtttggtcaatgaaaactggtcgattgttggatgtactcagtggtcatgaaggaccagtgcatggtctaatgttttcaccaattaatgctattctggcttcatcatcatgggacaaaactgttcgcctctgggatgtctttgagagcaagggtgcagtggaaacttttcagcactcacacgatgttcttactttagcttatcgacctgatggaaggcagatagcatgcagtactttagatggcctaattcatttctgggatccatctgatggtttgttgatgtataccattgagggacgcagggatattgctgggggtcgcctcatgacagataggagatctgcagctaatacaagtataggaaagtacttcacaacattgtgctattctgctgatggaagttctattttagctggaggaaacaccaaatatatttgcatgtatgatgttggagaacaggtgctgttgcgtaggttccagatcactcgcaatctctcattggatggagttcttgattttctgaactcaaagaagatgacagatggtggtgcactagatcttattgacgatgaagacagtgatgttgaagaaggaattgatcgacatactagaggaaacttagggcttggtttacctggatcaatggcaaatcgtggaagacccatggctcggacaaaatgtgttaagtttgctccaactggaagatcgtttgctgcagcgaccactgatggtgttttattgtactcagttgatgaatcatttatttttgatccaacggacctcgacatcgacgttacgcctgagaaagtagaggaagctcttgcagaaaaccaacaacaaagagcccttatacttagccttcggttaaatgaggatttattgattaagaagtgcatattcgcagttgatccagccgatgtgagagcaatttgttcggcaattccttacaagtatctccaaagattgattgatactttcgctagtctcttggaaagttgtccccatctggaatttatcctcctgtggtctcaggagctatgtaaggttcatggccactatattcaacagaactccagaactttgcttccttctctgaaatcattgcagaagtctataacaagactacatcaggatttggcagatacttgctcttctaatgagtacttgttgaaatatctttgcactgctggtacgaagaattaggttgtgctggaaaatatctttgcaccgatctccctgacgatttctataggaggttgttgtgcttgcaaacccagacgcatgcgagctctgagcagttctgctttggacctctagggggattggcatccgggcttaatcctctgggcagtggctgttgtgttcagaactactgagctgaagcaacaatgtaacatgatcgatcctctggagaaagttgagctgtctggttttgtcagtgaaacgagagaaaaaaaatgtcgggaacgattaaagttatgtaacttaccgtgttatcaaatgtttggaccagaactggaaattgatatttgtcatgaatcaaatagaagaaacatgttatattcactcctgtttttttt

SEQ ID NO: 136166 - DNA, 2535 bp, Zea Mays
acgatctcctcctgcgagcgagatctcaccaccgcagcggcgccgtggccatggcgggaaggtactaccagggccagggcggtggcgggggcacgtccatggaggtagtcagcacgccgaaccaggagctggccctcaccaactgtgcatacgtctgccccgcggacctccgtcgcttccccaacgcgctcgccgtcgtcgccgactcctgggtcttcaccctacgtgaacacaatgctgtcgcaagcgggcgcattgccttgaatgctattcaacgtcgtcaggcaaaggtttcagctggggattctgttactgttagcagttttgtcccccctgatgatttcaagttggctttgctcactttggagctagagtatgccaaggcaagagccaaccgaaatgacgagctggatgctgttgtgcttgcccaacaactccgtaagaggtttctggatcaggtcatgaccttggggcaaagggtgccatttgaatttcatggaacaaactatgtattcaccgtcaatcaagctttgctagagggtcaagagagttctacaccattggatagaggattcttgtcaagtgatacatacatcatatttgaggctgctcctaattcaggaattaaggtgatcaaccaaaaggaagctgctagcagcaaacttttcaaacataaagagtttaacctggaaaaattggggataggtgggttaagtgctgaattcactgacatatttcgtagggcattcgcttcaagagtctttcctcctcaagttgtcagtaagttgggcatcaaacatgtaaaaggtatactgctatatggacctcctggtactggcaagactcttatggcacgacaaattggaaaattattgaacggaaaagatcccaagattgtgaatggacctgaagttctgagcaagtttgttggagaaaccgagaagaatgtgagagatttgtttgctgatgctgaaaatgagcagaggacacgaggtgatcagagtgacctccatgtaattatatttgatgaaattgatgccatctgcaagtctagaggatctacccgcgatggtacaggtgtacatgatagcattgtaaaccagctccttacaaagatagatggtgttgaggcgttgaataacgtattgcttattggaatgaccaatcgtaaagatttgcttgacgaagctttattgagacctggacgattggaagttcacatcgagataaacctgcctgatgaaaatggtcgtttccaaattcttcagattcatacaaataagatgaaagagaattctttcctatctccagatattaatcttcttgagctagccgcaaggacaaagaactacagtggagcagagttggaaggtgttgtcaaaagtgctgtctcgtatgctttgaaccggcagataaccatggatgacctcactaaacctttggatgaggaaagcattaaggttactatggatgactttgtgaatgcacttcatgaaattactcctgcatttggtgcttccaccgatgatctcgaaagatgcagattgcgaggtattgttgactgtggtaaggcacataagcacatttaccagagagctatgctccttgtagagcaagttaaagttagcaaaggtagtccacttgtgacttgcctgttggaaggtcctgctggaagtggtaaaacagctatggcagcaagtgttggcattgacagtgattttgcatatgtgaaaattatatcagcagaaacaatgattggtttcagtgaaagcagtaaatgtgcacagatttgcaaggtttttgaagatgcatacaagtctcagttcagcatcatagttcttgatgatatcgaaaggttactggagtatgtagccattggaccacgtttttcaaacttgatctctcaaactcttctggtcctcctcaagagggttcctcctaagggaaaaaacctgcttgtgattggaacaacaagcgaggttggcttcctagaatctgttggaatgtgtgacgtgttctctgtgacataccatgtccccaagctgaaaaaggaggatgcgaaaaaggtattgcatcatcttgatgtgttcgatgacggggaccttgatgcagcagcagaagcactggatgatatgccaatcaagaagctgtacacgcttgttgagatggctgcacaggggccaaccggaggaagtgcagaagcaatttatgccggagaagacaagatagatatcaaccatttcttcagcatcttaagtgatattatccgttactgagcccgcatggatcctaggtatccagtgggaggttatttgcacctgtgcttcatcaccccttgtggcatccttacagcgtgttaagagtggtttgatgtgttgtttttgtttggtgcgcctactagagctgttggatttgaccagaggcgaattccacgatatagcgttttttgtattgtatgacgatgtttctacagttgataataggatccagctatagacctcagaaaagaaatgaatttcattctccttttacata

SEQ ID NO: 136167 - DNA, 108 bp, Zea Mays
cagaaattcattcagaccctctgcgtctcaggaaaaaaaatcagaaggaaattgagtacacgtatagtaggagcagggcccacggcccaggcccacgcagtggcgggc

SEQ ID NO: 136168 - DNA, 95 bp, Zea Mays
ggtggccaaggagcaatggaatcacgtatatatatcaaacattaaatgtgttaagtgcatgtagctacgcctctttcctgaaatcctgtaagtgc

SEQ ID NO: 136169 - DNA, 2155 bp, Zea Mays
atctgaaatagagttcttttttttgtattactcctcattaggatgtatatattaatcatcctaatttaatatatattaatcatcctaatttaattaggttctaatcccaattagtagtaaagtattttcttttttatttaatagtctctgactatcattaaataaagggtagagcaatcttttttctagagattctagagaaagtgagacaaagtgaagcgaaagagttttctttgtataagaattaggtctatatcatatctaaatagaagggaaatcaaaaagaagggaagtggggattacattggatgaatccttaaggaagacatatcacaaaagaaataaaggctaaagtaagcgctccttgcctttggtttgagcaaaacagattcttgtttcaccgaggaaaagagagaagttctggataaattgacaatgtcaacttgaattgactaattcagttccgcctattccacattaatgggagtacatttatgtttctgcttcacgaatatgatattttttggacatttctaataatagcaagccttattcctattttggtattttggatttcaggacttttagccccggttagtgaaggaccagagaagctttctagttatgaatcgggtatagaacccatggggggggcttggttacaattccgaatacgctattacatgtttgcgctagtttttgttgtttttgatgtggaaacagtctttctctacccttgggcaatgagtttcgacgtattgggtgtatccgtttttatcgaagctttcatttttgtgcttatcctagttgttggtttagtttatgcatggcgaaaaggagccttggaatggtcttaactgaatattcagaaaaaaaaaaaaaagaaggaaaagattccattgagacaattatgagtttgattgagtttccgttactcgaccaaacaagttccaattccgttatttcaactacaccaaacgatctttcaaattggtcaagactctcaagtttatggccccttctatatggtaccagttgttgtttcattgaatttgcttcattaataggctcacgattcgactttgatcgttatggattggtaccaagatcaagtcctagacaagcggacctaattttaacagctggtacggtaacaatgaaaatggctccatctttagtgcgattatatgagcaaatgcctgaaccgaaatacgtcattgctatgggagcctgtactattacagggggcatgttcagtacagattcctatagtactgttcgaggagttgataagttaattcctgtggacgtctacctgccgggttgcccgcctaaaccagaggctgttatagatgccctaacaaaacttcgtaagagatagcgcgagaaataattgaggatcgaactctatgtcaaagtcaaaagaaaaatagatcttttactacccgtcacaaactttatgttcggcgcagtactcacactggaacttacgaacaagaattgctctatcaatcaccatctactttagatatatcttctgaaacttttttcaaatccaaaagttcagtatcttcctacaaattagtgaattaggaggggttcttttgtgcagaaaaagaaagaaaagagcagtacaatctttcaaacttgcatttgaaatgtgaaatatttatacaaagggggagagatcaagacaatgcagcagggttggttatctaattggctagttaaacatgacgtggttcataggtctttgggcttcgatcatcgaggagtagagactttacaaataaaagcgggggattgggattccattgctgtcattttatatgtatatggttacaattatttacgttcccaatgtgcttatgacgtagcacccggtggatctttagctagcgtgtatcatcttacgagaatacagtatggtatagataacccagaagaggtatgcataaaagtctttgcccaaaaggataatcctagaatcccgtctgttttctgggtttggagaagtgccgattttcaagaacgcgaatcttatgatatggtgggaatttcttatgataatcatccacgtcttaaacgtatcttaatgcctgaaagttggataggctggcccttacgtaaggactatataacccccaatttctat

SEQ ID NO: 136170 - DNA, 2088 bp, Zea Mays
gattcaaaatatcaaaggggaagaactttaaaaattgtaaaataaagattaggttttgggttgcgctatatctatcaaagagtatacaataatgatggatttggtgaatcaaatccacggtttaataacgaaccgtgttaacttaccataacaacaactcaattcctatccaattccttcctatcgaattcctatagtaaaattcctataggatagaacgtcacggggtgttcaccttatatatgaatgaaacatattcattaactttaccatactcctttttttatttaatgagttgatattaattaaatatctttttttttagatttttgcaaaggtttcatttacgcctaatccatatcgagtagaccctgtcgttgtgagaattcttaattcatgagttgtagggagggacttatgtcaccacaaacagaaactaaagcaagtgttggatttaaagctggtgttaaggattataaattgacttactacaccccggagtacgaaaccaaggatactgatatcttggcagcattccgagtaactcctcagctcggggttccgcctgaagaagcaggagctgcagtagctgcggaatcttctactggtacatggacaactgtttggactgatggacttaccagtcttgatcgttacaaaggacgatgctatcacatcgagcccgttcctggggacccagatcaatatatctgttatgtagcttatccattagacctatttgaagagggttctgttactaacatgtttacttccattgtgggtaacgtatttggtttcaaagccttacgcgctctacgtttggaggatctacgaattccccctgcttattcaaaaactttccaaggtccgcctcacggtatccaagttgaaagggataagttgaacaagtacggtcgtcctttattgggatgtactattaaaccaaaattgggattatccgcaaaaaattacggtagagcgtgttatgagtgtctacgcggtggacttgattttaccaaagatgatgaaaacgtaaactcacaaccatttatgcgctggagagaccgttttgtcttttgtgccgaagcaatttataaagcacaagccgaaactggtgaaatcaaggggcattacttgaatgcgactgcaggtacatgcgaagaaatgattaagagagctgtatttgcaagggaattaggggttcctattgtaatgcatgactacttaacaggaggattcaccgcaaatactactttgtctcattattgccgcgacaacggcctacttcttcacattcaccgagcaatgcatgcagttattgatagacagaaaaatcatggtatgcatttccgtgtattagctaaagcattgcgtatgtcggggggagatcatatccactccggtacagtagtaggtaagttagaaggggaacgcgaaataactttaggttttgttgatttattgcgcgatgattttattgaaaaagatcgttctcgcggtatctttttcactcaggactgggtatccatgccaggtgttataccggtggcttctgggggtattcatgtttggcatatgccagctctgaccgaaatctttggagatgattccgtattacaatttggtggaggaactttaggacatccttggggaaatgcacctggtgcagcagctaatcgtgtggctttagaagcctgtgtacaagctcgtaacgaagggcgcgatcttgctcgtgaaggtaatgaaattatcaaagcagcttgcaaatggagtgctgaactagccgcagcttgtgaaatatggaaggagatcaaatttgatggtttcaaagcgatggataccatataaaataaaaaaaaaagcaaaatagaaagagaaaaaataagttaagaaatgcagtaattcttctttattcctctaattgattgcaattcaattcggctcaatcttttctaaaaaaaaaaaagactgagccgaattgaaatagatcttgatacgatcatgagacttgacaaatcgagattcttctattctatatatctagaatatagaaaggtataatacaataaacaaatataaatcaaaata

SEQ ID NO: 136171 - DNA, 138 bp, Zea Mays
gtaaaagtggaaaaaaatagaaatgtaacaatgaggcttgccttattatggaattttactgaacattttatatttgaagccaaaaccaaaatttaaagtcaatttgaattttggaaaatgacattagaaaagaagtac

SEQ ID NO: 136172 - DNA, 1782 bp, Zea Mays
cagtgatccagtccgtggccgtggcgtgctggaccggcggctaggcgggcacgtcagccgccagctaagcgaccaactcttcaaaaccccggtctctccctcgagcagtcgagctcctccggtctctgccatgaacagcaaatgagcagagctcccaagccgttcaatctccagatcatttccctctcgtcctgctccaatccactcgccggccatctccacaggctcgcctcggctgctgcagctgggttttgctccctgagccgccggatttcgacaggggtcgggtcggccgtccgatggggagcagggtgaaggaggacgagaggaacgagaagatcatccggggtctgctcaagctccctggcaaccgccggtgcatcaactgcaacagcctggggccacaatatgtatgcacaagcttctctactttcatctgtactaattgcagcgggatacaccgagagttcagtcatcgtgtaaaatcagtatcgatggctaaattcacttcccaagaagtttcggcacttcaggaagggggcaatgagcgtgctaaggaaatctatttcaagcattgggacttgcaaggccctgttattgacagtagtgatgtacatagactcagaaatttcatcaagaatgtatatgttgaacggagatattcagaccaaagaattggcgaacatttagcgcaagcaaagaaaccatcatcttcgaggaccgacgatcccagccctgcaacattcaaagatgctaaattatatatgtcaaaaaatctgattgacttcgattcagatctggaacctcctcaaggtgttgctcagactgatattcagaagggctcttcacctcaaacagatgttggttgggcaacttttgatgatgctacatccaaaaaaactacaaccatgccttcaacttccagtactaattttttggagggtccaatgctacagatcgccgatttgacatcagcaccacaaattagattttcaaatgccaagtccttgtcttttgccccgtcaaatcgtggaaaccaactgaaccaacagaatttctctcctgtgaatactacacagtacagcaatactctgttgaacagagctactagtgctccagtgcatagccaggatatttttgcaatgagctatcgtccagtatcttcagcctggaactggcaaccaaatcccagtgtaaacatgcagtacggacaacatcgcacgcattatcctgttgggattgtaaatacaactcaacttgcccatccatatccagtgaatcctgttagcttggcaggagggcctgcatcggctcatgcctccaccaggtttccttctttaacttctatgcaagaagcattaccaaatctgggcagtaccgcagtgctgtcgcgtgctccagttcatcagtacatggttcagcaacatacagttcaagtaccgaattatactttcccctccggatatgaaggaaccagagggatcgccgcaactgccagcacatacggattacctccaatggatcagcgtttggctgcgcagaatctgcaggtcatgaaccacggttctttaccccgagttggtgggaacccgtttgcttagtgttgttacttcggtcacctcagttcggtcgtttgtgtatagttttagcatttgatgatacggttttgtcgtgagaagatgcgagtggaataatgtagctgatcaagcagagtggcaacaagtgcctgacaggttttgtgtatatgatttttattttcgctatggaaggtgtcgattgctc

SEQ ID NO: 136173 - DNA, 100 bp, Zea Mays
gtgctaagaagaaacatcactttagaactaagcatgtcagttcaaaataagaaacctccagatgtgctaagcatcaccgattgatcacccaaacctgtcc

SEQ ID NO: 136174 - DNA, 1832 bp, Zea Mays
gccccttcctacacacgactacacgagtacacgacgccgcgaagaaatctctccacgcccacggcctgacggccacgctcctcgcctgcttcgccgatgccagcgcactcctcccaccttctctcccgcaacccgtagccccacgacagcctccccctccccttccacctccgatcccatggcaccgcgccccgccgccgcagttttcgtcgttgccgccgtggtggtcctgctccctcctcccgcggcggcggcggcgccccccgtgggggtaaactggggcaccatgatgtcgcaccccatccacccatctgcggtggtcgagatgctgcgcgccaacggggtcgaccgggtgaagctcttcgacgccgacccctggacggtctccgcgctcgccgggtcaggcgtccaggccatgctcgccgcgcccaacgaccagctcgcctccctggcccgcgacccgcgccgcgcgcgcgactgggtccgccaaaacgtcaccgccaacatcaacgccggcgtcgacgtcaggtatgtggctgttggcaatgaaccttttctgaagagctataatggcagcttcatcaacattacctttccagcactcaagaacatgcagagggctatagatgaggctggctttggccaacacatcaaagtagttgtgccattgaatgctgatatctacagctcccctgagaacaagccagtgccatctgctgggactttccgcaaggatatcaataccctcatggttgacattgttaattacctccatgcaaatgatgcaccctttgtggttaacatctacccatttctcagcctatatcagaatcccaactttccgctgaatttctccttctttgatggcgctaccaagccagtgtatgatcaaggaatggtctacaccaatgtgtttgatgccaactttgatactcttgtctggtcattaaggaaagctggtgtgcccgacatgagaatcattgttggtgaagttggctggccatctgatggtgataagaatgctaacaccaaatatgcacagaggttctataatggttttctgaagaaaatgacaaaaaatgtcggcacgcctctgagacctggtcgtatggaagtttacctgtttgcgctgattgatgagaaccagaagagtgtcctgcctggacgctttgagcgtcactggggactattcacatatgatggaaaaccaaagttctctatggatctcagtggaaatggcaagggcagtgtagctgaagtgaaaggggtgcagtacttgccaccacaatggtgtgtattcaacaaggatacaaaggataagtacaaagatctgccagcctctgtaaactatgcatgctcaaatgcagattgtacaccactggggtatgggtcctcatgcaatggtctcagccatgatgggaacatatcatatgcattcaacatctatttccagacaatggatcaggatgtcagggcttgttcttttggaggccttgcaaagatcacaacgacaaatgcttcacaaggagggtgcttgtttccagtacagattacgagtgcttcagtaacagtggtgccactgatatttttgcctatgctagtctctgtgatcactctactatagacatggaaggctagtagtaagcactgaaatattaggttactgaagcaggaataggtttgcacatgacacaggaaagaagagtcacccaagataaagttgacgaggaagacaaattgtcgaactcgaaccgagtcgttttctctgtgctactggcactagtaacatacctgtattaactttggacagtgggaaagctaaaattttgaca

SEQ ID NO: 136175 - DNA, 1652 bp, Zea Mays
gctgtacaactctatttataaaggccaggccaggccagggaggcagagacgaataagccaggcaaaggacgcgcgcgcacgaacggctcgctctctctccgacacccagatccctcccgtttcaggaaacgcgaagattccgccgtccaaccccgagccgctccgctccgtcgattcgggcatggcgccgaaggagagccagcagcagcagagtccggccgaggtggcggcgccggccgcgcggagcatcccggacgaggcgcggcggctgctgcacgagctggccgcggcgtgggaggacgtggccgggtgcgggtcgcgcgagcccgaggtggtgccgctcaagggcgccatgaccaacgaggtgtaccgggcgcggtgggccaccggcagcggggactcgtcggcgccggggcagagtgacgcgcggacggttctggtgcgggtctacggggagggcgtcgacctgttcttcgacagggaggacgaggtgcgcacgttcgagttcatgtcgcggcatggccacggcccccgcctcctcggccgcttccccaacggccgcgtcgaggagttcatccatgccaggacactttcagctcctgacctacgtgatccggggatttcagccatcatagcctccaaactgagggaatttcacagcctcgacatgcctggttcaaaatccgtgctcatctgggaaagattaaggaactggctcagaactgccaagagcctgtactcctcctctgatgaaaccgaagagttctgcttggatagcatggaggaggagatcgctgcgctggagaacgagttctcaggggagtgcgagcgcgtaggattttgccataacgatctccagtatgggaacatcatgatcgacgaagagacgaggctactgaccatcattgactacgagtatgcaggttttaacccagttgcttatgacatcgcaaaccatttctgtgaaatggccgcagactaccattcagaaaagcctcacatattggactacagcaaatatccagataccgatgagcggaagcaatttgtgcggacatacctgagctcctcaggtgaggaatctgaagaggaggtagagaacctgatcaaaagcattgagaagtacaccctcgccagccacctagtttggggcctatggggaataatttcggatcatgtcaacgatatcgacttcgactataaggattacgctaggcagaggttcgagcagtactggctgaagaagccgaccatccttgcttctcagactgctgaatagaacccacccatcaggttctgcactccaccgatgtgctgcacatagcttgtccattcttctctgctcattgagacttgaggtctgtgtccctggggaacaaggctgtgaagaaaaggctggacccagaagtcagctcaggcattcaggtagatcacaggcctgttaatagtgtgaggcgacatactgttgataaaaaaaccctgactgcatgttgtatgatggtatggtcacttggtgtgtgcgtgcgcgtgagtgtgcgtgcttggtttactggctagattagtgctgcatctgcctctgtgcgcgcttcagtgtatgcaaaacatacgtattggaaatcagataaagattcctgcaggttctgtacctctgt

SEQ ID NO: 136176 - DNA, 898 bp, Zea Mays
ttctgttttgttctgtgtttctgtgacttgcatttccgatccattacaccgcattttcagtatacatagtgaaggataattaaatggtgtatccaatcaaagtattgtatatgtgttgaagttaacaatgttactcttctgcatttcatctgatatttgtatagcgtcttatgacaaggactgtgacctctgttctggattgtgtggttctatatataaatgactgattaaacataacaggaggggaaggatttgtgctttcttctgcacttgtttggactgcactctgaactagacacgttatgatggggggtttaaactgggcttatgaattttacccctggttacatcgatgatttgtttcaatctaatgtgcctccttacattttttttgcttaggtaagggcagagtttctctccgccgatggcaaagtgatctcaacttcaagtcaaccatgcatgctcaagttcaaaagcgtacacatgcacttcatcgagacttttctccagagcgtctctcttctgtccggctactcatcggaatctcaggttattatactgaagatgaggggtatcacccaaggtctggaaccaacaactgcggtgaggataatcctggagcaaagagcagagtttggtcgcggcgtaggcattccagagatatatgctgcatcactaaagctcgagggcgaacttcctctcgtcagaagattgctctggaactggaggtggaccttttttgactggagcagcacggggttgtttgtttttgaattgctgtttgggcttgtgtgctgtagatcctgtatatttcccaggagtggacataatgttgctgctccttaagaccttgggctaacctcatgtaacgtattatacaatttccgatatacacgga

SEQ ID NO: 136177 - DNA, 1829 bp, Zea Mays
tcaattttttggtcctcgactaccctaggttcaaatcctaggtccgccattgcacctgaagcgtagctctaggaacaagacgtgtctagttgtgtgcgttgggactgggggaggaataagggattgatggccaacagcgagtatgagtacgtgaagagggagttcgagtttgatcgctgcctcccgccctctaactggatcgttgtccgtatcgacggttgccacttccacaggttctcaaaggtccacgcctttgagaaaccaaatgatgagaacgctctaagattaatgaacgcttgtgccactgctgtgctcgagaaatttcctgacatagcctttgcttatggtgttagtgatgagtacagtttcattttcagagaggaaacagagttctatcaccggcgagaaagcaaaattctctctttatgtgtttcctacttcacttctgtgtacgtaatgaagtggaaagacttctttcctaacaaagagctgaaggagccaccatattttgatgctcgagctgtatgttacccgaatttgaagactattcgtgattatttggcttggagacaagtggactgtcatataaataatcagtacaatacctgcttctggatgttggtgaaatctggaaaaagtgaacaagaggcccagctagctttgaagggaacatttgcaaaggacaagaatgagctgcttgctaaacaattccaaataaactatgatgatgaactggctatgttccgcaaaggatctagtgtttaccgagagaaggtagaaacaactgtgaagattgatgactatggggagcccataaaaagaccaagattgaaagttacagtggcacatgttgataccatagggactgcgttttgggaaaaccatccacacattcttcgagaaggaaaatttatgcacgggtttgtaaagaaatttggcatcaatcacatattttcaccttgtaattggatcattgttcgcatcattgcttgccaatttgaccaattctcaacaattcattcatttgacaagccaaatgatgagactgcactaaggctgatgaatgaatctgcatctttgatgatggagcaataccctgacattgtctttggctatggttttagcaatgagtatagttttgtgttccatgagaagagtgaactataccagagacgggaaagcctaatcctttcatcatgttcttcatatttcacttctctttacatgacgaaatggaaagagttcttcccctacacagaattaatgcagacaccacactttgaggcagatgctctatgttatccaaaactaaagatcatatgtgaatacttatcatggaggcaagcagagtgtcatgctggcaaccaatacaacacatgcttttggatgctagtgaaatctggaaaaagcgaaaaagaagcccatgagatattgaagggaacgttgtctaaagataaaaacgagttgctttttcagcaattccaaatgaactacaacaatgaacctgctatgttccgaaagggttcatgtgtctatcggcgaaaggtggaagaacttgcgggggctgaggacggcggcaatggcacatcaagagagcggtggcatgtgaaggtggaccacgttgacctagggcccggtttctggcgaaagcacccgtggttaatgactaattgcactcagtagtcccgactgatacatggtttttgtactggtttatcagtgtatgtaactcttgctgacacaggtctagaaacgaaagacggttgtttgttcacacatcgaggcttctcttcaccctctattatgttctgatggttttctgagtcgtc

SEQ ID NO: 136178 - DNA, 90 bp, Zea Mays
atatattctattcttttaagtctctttttattgtttctttctgagttggaacccaatagaagccacgttcagaaatcaagttcaggtacg

SEQ ID NO: 136179 - DNA, 1542 bp, Zea Mays
atgccgccgccctccctcgtctccatcctccccgccgcgtccatctcgccacgaagacgccaagcaaagcaccccaagacccccaccgcgagccatcccttcttctcccgaagacttgtgtcccaaccgccgcgccacgcctcgatctccccctccgctgccggcgggagcgggagcgacgagctccaccttctcgagaagccgttacctgccgtcgcagaggataacgaggccgaggaggagctcgagtctgctccggtgtcatcaacagaagaagcgctcgcgccttttctcaagttcttccaggtgaagagcaccgaccccgacgtgggcgcagacaccgcggatggcgaggtgccggaggaggcgtcaaggagagatgtattgtccgccgctggtgagcgtggggttagttactacgaccccaagcccggggacttcgtcgccggcgtcgtggtccggagtgacgggaggacgctcgacgtcgacatcggttccagcggcgaaccagcgctgatgctggccaaggagtcggcgccggtgcccgcggaggagttcgggtacctagcgtgcgacgtcgcgtccaagtgtgcggcggagtttgcagcggaagggcgggtcggcgtcgtggtcaggcaattcaggggaggaggagagggggacggggaggcgatcatcgggaggaatgggaaggagaaagttgcgccggtgctgcgcgccgataatataactctaatatacttatttcctgctctcaaaggcttgaagctcaagctgttaaagcgtggttccgagaatggttttaataaaatgtatggggtattgaagtttgtagaaataaaacagctaaatgtacccatcaagatcaaaatttatgagtggaatgctagtggcttgctatctagaattgagggccttcgggcattccttcccaaacctgagatgatgactagaccaagaaatttcactgacctaaagaacaaagttgatcaagaaatgcatgtctgcattacgaggattgatgaagagaccaacgaattgataattagtgaaaaagaggcatgggcggtgacatgccttagagaagggactctcttgcaaggcacagtacgcaagttgtttccatacggtgcacaaattaggattggcgagactaacagaggtggtttactacatatctcgaacatgacacatggcaagctgagatctgtggctgatgtgctgaaagtcggcgagacggtgaaagctcttgtcataaaatcaactccagacagaattgctctgagcacaaaggacctcgagagcgaacctggattgcttatcactaacaaagagaaggtgttttctgaggctgaagagatggcgcgaagataccgggagcaaattgcagagccacagccacctggatccattgccgcggaagactcctgtgacgatgctgtccccttcaacgacgaatcccggtcctatgctaactggaagtggctgaaatttagcaagtccgacgacgtggcaaaccccaaatctggcgtcgaatcgtaa

SEQ ID NO: 136180 - DNA, 345 bp, Zea Mays
cgaaaacgaacggaaacggaaatactaacggaaactcataatttaatacaaatagaaatgttattcatgtttgactagtgattgattggcataacaataacataaaacaaatagatatagagaggcaatattctattgttgtttggttgctaaatgtgtacatttagctacatccgatgttgtttaagactttagatcacttgtcatttgaaaagagccggtggttacaatgaccaattgtgctataatttgtcacctaaatacacgaggatttagtttatatactaatgcatattatgctcgtcccatatttgtcaaatacggaataaatacgggttcaatccg

SEQ ID NO: 136181 - DNA, 3182 bp, Zea Mays
ggtaacgtagcagtaaatcatccatgcaccattccaccacctgcggcagtgccggagtgcccacgagccatcctccgcaataaaccggcggcgtgcgacgtggggcccagacgtcggtgtcaccgaacccgtcccgccccactaggaggacgaagcgaagcggttacgttccgttgcacggtggggcccgacacacgagctcgtcacagtcacaccctccagtggctcgggctctttttttttcttccctttttcttttccgcgcagctgatttattttctctcgctctcgccttcgcggcgctgcctgcgcagtactacgagctagcaggctagcagcaccaggaccaggagcctcttcccacacttccgctctccctctctctctttcctctcgagaatggttgtgtaggcgggcgcaggagggaggagagagaggggagctagctagggttttgcgtcgccgccttctgttacccttaggctctgaacccctccggtccggtgcggcggcggattaggctccgatggggaagtctccggcgaagtggatcaagtccgtgctcttcgggaaaaggtcgtcgtcgaggtccggctccaccaaggccaaggatttatcgaagggtacgactaacaaagcagcagctgctgctgctgctgctgccgggaaggagcccgcgttctctgagagctctccggtcatctcggagcctgtgcttgttagcgcccacaacaatgagaccgcgcgggaggccgctaagggtgagaattccagcgtgcaagaagtgccagtgactgatgtcagtcaagacttggagaagcagggcactgttgggtctgatacgtctaatgatgctgagaggttgagggaagagcaagcggccgtgaaggcacaagctgccttccgtggttatctggcacgccgagcattccgtgccctgaaagggatcataagactacaggcactgattcggggacatcttgtaaggaggcaagctgtttcaactctccgtgccacatggttgattgtgaagtttcaagcccttgtccgtggaaggaacgttagactttctaatgtttccattcaagcaactacggaactttcccaacagaacttcgggggttctaaacctggttcctggaaggagaagttgtcttcaaatgcatttgctcggaagcttctctcttcaccaattgtggttgaggctcttcacgtccagtatgatgagatggaccctaattcggccttcaattggttagagaggtggacagtaagtcatgtctggaagcctatttcccaaccaaagagagttggcactgatgctaagcctcatacaaggaaggccagttatgcaatggaaacagagtcagcgaaattaaagcgtaatgcacggaagagccctgcagtgccatttgagccttctcaaacaaacaccaccattgaaaatgagaagacaagacggaatccaaggaaattaagtagcactcctgctgagtcagttcccgatggccagttaacagaacttgagaaggttaaacgtagccttaggaaggttactagttccacggttgaaacctcaaaggtgcctagcccaacaactgagattcctgaccgtcaagaggtacaatgtgagagaccactaagaagtgcaaagcaagctccaattcatgttgagaatcaagaacctcagaatgttaatctatcggagaatgcaaagatggatattctggtaccagatatccagcctgacgtggaagttgcttcagatctagtcacaatcacaaatgaagaaaaagttgatgagacaccgtctgttgttgctccagcggctgaaattatgccactgcaagacatcaacagcgaagaaaatgctttggtgaatgatgtggaagagagatccaaagaagaacattcatctactgataacctgaaaggcagcaagaggaggtcttcattctcagctaaacctgaatatccagaaaatggctccaaaaattctccagccctgccaagctacatggctgctacacaatctgcaaaggcgaaactgcgggggaatagttcaccaagacttagctctgattcagcagagaaaaacgggttcactcgtcgtcactcccttccgtcccctaacaatggtaagataatttcacattctccacgtacgcaaaggccaacccatgctggtggcaaggacggagcaaaaggcgacaaggctatgctgtcatcaagagatgcgagcgagagaccactgaaagctgagtggagacgctgaggtggcgaatcaaaaccccaaaccctccatttggttagtgcaactatttgggtcggtggatggcgtctgcagtttgctcaacttatttacagggttttgggtcatgccttttgtgatgtatagctgaagtattttcccggtttgttttgtttcccagacccccagacttacccccccccccccccccccccccccccccctcctgcttactgagagggctgctgatgttagagagaacgagaacatgtatggattgagttgaacagaacaatcttagtcccgtttggtcaaatctgggctgcgttttgactgatggttgtgtgtcatttatggttattgcccttgaggtcgtagtattcttttccaaaggttcttgtcttcctgatctggttgtcatgcaacgcaaggcggcttgcgaaaaggaaccatgttgtaccatgcgatcaaagtagaagtaactctacgatgcttcagattgcttcaatgcacggtaactctacgatcaaaaagtagaagtaactctaggaagacatggccagatgttgttccaagtgacatgaggtcaagcacaggtcaatggccacagatgatgccatactattacatatgcatagttcttaagacgacgcctgttcccattttgtgctctcggcgaattgacgaattcaggctgagttctagatggctttgggaatagcaattggatctccattgtctatctgcagtgcttgtcagtcttggagcctaccagctcaatgaatgacaattatggtaggtgagcttggtcatcccatggatgcagattaaaggtggttggatgatcaatgaaccagggctacttttttactattattattgtgactgtcctgtagcttaggaccagatgaggtcgacctcggaagtgctt

SEQ ID NO: 136182 - DNA, 2801 bp, Zea Mays
agtaagaatccaggctttggccgcttccggcgtttcttgtcttgtggatgaatttgtggtcgtggagtagatctgtgaactgatgttcggttctgctgcaggctctgaacccctccggtccggtgcggcggcggattaggctccgatggggaagtctccggcgaagtggatcaagtccgtgctcttcgggaaaaggtcgtcgtcgaggtccggctccaccaaggccaaggatttatcgaagggtacgactaacaaagcagcagctgctgctgctgctgctgccgggaaggagcccgcgttctctgagagctctccggtcatctcggagcctgtgcttgttagcgcccacaacaatgagaccgcgcgggaggccgctaagggtgagaattccagcgtgcaagaagtgccagtgactgatgtcagtcaagacttggagaagcagggcactgttgggtctgatacgtctaatgatgctgagaggttgagggaagagcaagcggccgtgaaggcacaagctgccttccgtggttatctggcacgccgagcattccgtgccctgaaagggatcataagactacaggcactgattcggggacatcttgtaaggaggcaagctgtttcaactctccgtgccacatggttgattgtgaagtttcaagcccttgtccgtggaaggaacgttagactttctaatgtttccattcaagcaactacggaactttcccaacagaacttcgggggttctaaacctggttcctggaaggagaagttgtcttcaaatgcatttgctcggaagcttctctcttcaccaattgtggttgaggctcttcacgtccagtatgatgagatggaccctaattcggccttcaattggttagagaggtggacagtaagtcatgtctggaagcctatttcccaaccaaagagagttggcactgatgctaagcctcatacaaggaaggccagttatgcaatggaaacagagtcagcgaaattaaagcgtaatgcacggaagagccctgcagtgccatttgagccttctcaaacaaacaccaccattgaaaatgagaagacaagacggaatccaaggaaattaagtagcactcctgctgagtcagttcccgatggccagttaacagaacttgagaaggttaaacgtagccttaggaaggttactagttccacggttgaaacctcaaaggtgcctagcccaacaactgagattcctgaccgtcaagaggtacaatgtgagagaccactaagaagtgcaaagcaagctccaattcatgttgagaatcaagaacctcagaatgttaatctatcggagaatgcaaagatggatattctggtaccagatatccagcctgacgtggaagttgcttcagatctagtcacaatcacaaatgaagaaaaagttgatgagacaccgtctgttgttgctccagcggctgaaattatgccactgcaagacatcaacagcgaagaaaatgctttggtgaatgatgtggaagagagatccaaagaagaacattcatctactgataacctgaaaggcagcaagaggaggtcttcattctcagctaaacctgaatatccagaaaatggctccaaaaattctccagccctgccaagctacatggctgctacacaatctgcaaaggcgaaactgcgggggaatagttcaccaagacttagctctgattcagcagagaaaaacgggttcactcgtcgtcactcccttccgtcccctaacaatggtaagataatttcacattctccacgtacgcaaaggccaacccatgctggtggcaaggacggagcaaaaggcgacaaggctatgctgtcatcaagagatgcgagcgagagaccactgaaagctgagtggagacgctgaggtggcgaatcaaaaccccaaaccctccatttggttagtgcaactatttgggtcggtggatggcgtctgcagtttgctcaacttatttacagggttttgggtcatgccttttgtgatgtatagctgaagtattttcccggtttgttttgtttcccagacccccagacttacccccccccccccccccccccccccccccctcctgcttactgagagggctgctgatgttagagagaacgagaacatgtatggattgagttgaacagaacaatcttagtcccgtttggtcaaatctgggctgcgttttgactgatggttgtgtgtcatttatggttattgcccttgaggtcgtagtattcttttccaaaggttcttgtcttcctgatctggttgtcatgcaacgcaaggcggcttgcgaaaaggaaccatgttgtaccatgcgatcaaagtagaagtaactctacgatgcttcagattgcttcaatgcacggtaactctacgatcaaaaagtagaagtaactctaggaagacatggccagatgttgttccaagtgacatgaggtcaagcacaggtcaatggccacagatgatgccatactattacatatgcatagttcttaagacgacgcctgttcccattttgtgctctcggcgaattgacgaattcaggctgagttctagatggctttgggaatagcaattggatctccattgtctatctgcagtgcttgtcagtcttggagcctaccagctcaatgaatgacaattatggtaggtgagcttggtcatcccatggatgcagattaaaggtggttggatgatcaatgaaccagggctacttttttactattattattgtgactgtcctgtagcttaggaccagatgaggtcgacctcggaagtgctt

SEQ ID NO: 136183 - DNA, 1316 bp, Zea Mays
tctttctcttcaagaaaacgtcaaaaaaacgtcagcaccaggctcctccctctaataaatagcggcgggcctctgtcagctcacagctcagtcctcttcaaccccgtttcgccgcccctagcccaaatcccccacctactcgccgccggcgccgtctcagcctcatccttctccgctagccatggccgccgcgggtcccgggctctactccgagatcgggaagaaggccagagatctcctatataaggactaccacacggaccagaagttcacgctcaccacctacgccgccaacggagctgccattactgctgcaagcacgaggaaagatgaagctatctttaatgaaatccagagccagctgaagcacaacaatgtgactgtggatgtgaaagcaacttcagaatcaaatgtgataactacaatcacagttcatgagctgggcacaccaggcttgaaggcaattttatgtgttcctttcccgtaccagaaatctgcaaaggctgaactccagtatttgcaccaccatgctggtgttgctgcaagtgttggcctaaatgcaaaccctgttgttaacctttctggtgtattcggaactaaagctattgctgttggcgctgatgctgcatttgatacttcttctggggacttaaccaaatacaatgctggactgagctacacgacgcctgactttgttgctgcagcgactttgaacaacaaaggagacaacattgccgcttcctactaccactcggtgagtccaaccacagccgtcggaggagaactgagccacagcttctcgaccaacgggaacaccatcacctttgggacgcagcatgccctggaccctctgaccactgtgaaggcacgcttcaacaactacggcatggcaagtgcactgatccaacacgagtggaggcccaagtcactggtcaccatctccacggaggtggacaccaaggccatcgagaagagctctaaggttgggctctccctggtcctcaagccctgaggtcaccagcttctgcttttgggatgttaggtttatttttatttttatcagcagctgaagtccagtaaacaagcttggactaaacttgtcaactttggtgcccatcccataaactcaattcgttgtctgttaccatatcctaaactacctgagaggtttatgttacaatttacgtcgtgcttctgattcttttcgctgtctaatattgggtgttgtttggctcaccccttaaatttggagaaacttcggtatggttcaccattacccagattttaactatttgatcgatcgcatctttatattc

SEQ ID NO: 136184 - DNA, 756 bp, Zea Mays
atggagtcgtggcggaggcggacgctgctcaaggtcatcgtcctcggcgacagcggggtcggcaagacgtcgctgatgaatcaatacgtgagcaagaagttcagccagcagtacaaggcgacgatcggtgccgatttcctcaccaaggaggtgctcattggcgacaggctcgtcaccttgcaggtgctcgtcttggcctgattttcggctaactcgttcctgcacttgcaccggccaccaatgaggaaacgggccatgcatgcggcggtcgtcctagtatagtgttatgctatgcccctacccctactgtgtatgcagatatgggacacggcgggacaggagaggttccagagtcttggcgtggcgttctacaggggtgccgattgctgtgtgctggtttatgatgtcaatgtcaagagaagctttaatacgctcgatacctggcatgatgagttcctcaatcaagctggcccatcggatcctcagcgctttccgttcattttggtcgggaacaagattgatttagatggcgggagcaaacggatggttccggagaagaaagcgagggaatggtgcgcctccaagggcgatattccatacttcgagacctctgcgaaggaggaccacaacgtcgacactgctttcctatgcatcgccaggctcgccttggagcatgagcatgaccaagacatttacttcaagacagttgcggaacaagtcccggacactgaacagacaagcggatgtgcttgctag

SEQ ID NO: 136185 - DNA, 621 bp, Zea Mays
atggagtcgtggcggaggcggacgctgctcaaggtcatcgtcctcggcgacagcggggtcggcaagacgtcgctgatgaatcaatacgtgagcaagaagttcagccagcagtacaaggcgacgatcggtgccgatttcctcaccaaggaggtgctcattggcgacaggctcgtcaccttgcagatatgggacacggcgggacaggagaggttccagagtcttggcgtggcgttctacaggggtgccgattgctgtgtgctggtttatgatgtcaatgtcaagagaagctttaatacgctcgatacctggcatgatgagttcctcaatcaagctggcccatcggatcctcagcgctttccgttcattttggtcgggaacaagattgatttagatggcgggagcaaacggatggttccggagaagaaagcgagggaatggtgcgcctccaagggcgatattccatacttcgagacctctgcgaaggaggaccacaacgtcgacactgctttcctatgcatcgccaggctcgccttggagcatgagcatgaccaagacatttacttcaagacagttgcggaacaagtcccggacactgaacagacaagcggatgtgcttgctag

SEQ ID NO: 136186 - DNA, 1149 bp, Zea Mays
atggcggcagtcggagcgcacccagtgctgtaccaccacccggcgccggcgggcgacgcctcctccatgtcctcctacttctcccacggaggcagctccaccacctccagctctgcgtccagcttcaccgccgcgctcgcgccgacgacgacggcgctcgccgagcatttcgacatctccgagttcctcttcgacgacgctgcgggcgctggggtcgccggcgcgccaggtgtgttcgccgatggcgcggcccgccccgtcgtcctgccggtgccggatgccgctggtggtggtgcaattatcggcgcagccgctgggggcgcggctgcggcgtcggaggtgccagagcggccgcggacgacgcggatcgcgttccggacgaggtcggagatcgagatcctggacgacggctacaagtggaggaagtacggcaagaagtccgtcaagaacagccccaacccaaggaactactaccggtgctcgacggaagggtgcaacgtgaagaagcgggtggagcgggacaaggacgaccccagctacgtggtgacgacgtacgaggggatgcacaaccacgtcagccccagtacggtgtactacgccagccaggacgccgcctccggccgcttcttcgtcgccggcacgcagccaccgggctccctcaactgatccccggcggcccatcgcgacgtacggtccgctccaccctaccaccgcacctatctggtttcgactcccagatggcaggctggcagctagctagtcggcggtatacactagtaagtagtagtaggataggccggccgacacccgataggtgatcggctggtgggtcggtttcccgaggtggatttctcgtttgggtttctagcacacccctccgctcctccctcttttccccgtccttttcctgctccgatcatggaaagggccggcggctggctggctggctggctgttgcgatcgaatagtatgtagtggtggtggtgctgctgttcatgctgggttccaagagaggtttaatttcccattgccttgagctcagctaaattattagtccgggacggaaatgtagcatatactgcattgaccgtgtaataagatgtacagaggctgtcccaacgttggacacaagatacttagattatatct

SEQ ID NO: 136187 - DNA, 1122 bp, Zea Mays
atggctgaattagatgctagaagaactgaagtgcggaataaagcagctataaccgttcagagtagatttcgcactcatgttgctcgtgagcaattccttgcattacgcatgacatcaatatcttttcaatcttttgttagaggtaaggtgttgctagttggtatcgcaagtggaaacaatgctcatgtcaggtggaattatatactgagagtaccattatatattgcagtgatattggcctccattacattgcagacaggtttaagggcctttggtgcttataacgagtacattatcagaaaacaaaataaagcttctatttgtgtccaggcttgttggcgttgccatagagatcatttgaattaccttaaaatgaaaagatcagtgttaatttatcagtgtgcatggagaagacggattgctagagaagaactcagaaagctcaaaatggctgcgagggacacagaagccctgaaggtggagaaggagaaacttgaggagcacgtggaagagctgactagccgtttgagcttcgaaaagaatcttaggattgatctagagaagagcaaggcaagagaaatttgcaaactacaggccactcttcgtgagatggaacagcgggttgaagaagccatagagatgcatgaaagagaattagccaaaaaggctattgaggaagctttagctcaagaaagggaaaagatcaccgtattgactaatgaagtcgatgagttgaaggtattactatcaagagaacgagaagaaaacagtgcaactaagagtgcactcgttgttgttcgtgaagaaaatgatgtgctgaataagaaaattgtggttgcagatgcaagcatggagcagcttagagatactgtaacgagggttgaagaattaatgagacaaattgcaaatgccaagggaaaatccactgagcttcagattgctgtgcaaaggttgcaagaaagtttaattgagggagaagctactttgcttgcagaaagaaaagaaagtgatgcagccaagaaatcactcactgaagctcatgtaaaaaacgaggaactattcaataaaattgaagtagctgagcataacgttagtatcttccaagacgacatccaaaggtga

SEQ ID NO: 136188 - DNA, 171 bp, Zea Mays
atcaatttcaggcttggtgataatacagcgaaagacactttgctgctatctgagaaacgtgagaaggatgccctgaaggaagcacttactgagtctgaatacaaaaatgaagagttactgataaaaactgaagaagccaacaaaaaagttgagcatcttcaaaacactata

SEQ ID NO: 136189 - DNA, 1878 bp, Zea Mays
atggcagcttctttggaagctgaaagacaagaaaatgaagcaatcaagaggtcccttgttgaagctcaggagagaaacgatgcattatttaagaaagttagggatagcgaatacagggcccaccagcttcaagatactgtccaaaagcttcaagtagatgccatatctagactgtctagctttgtaatggagagacaagatggtgatggtgtcaagaatgcacatactgaggttcatggaacaaatgaagatctaatgaggagaaatgaaaacctcctaaaaaggaatgatgacttggtgaagaagattgaagattctgctatacttgttactgagcttagagggaacttggaaaggttagaagggaaagctgctaatttagaggctgaaaatcaattgcttcgtcaacaagcaattgcaactcctccatcaacagcaaagtcttctcaagctgcatgctctaaaatcagtatgatccatagatgtcaagaaagtggtcatattttaaatggcaacgtagcatatgctgaaatgaagtcctcaaccggtcaaacagaaatgagaccctcgatgggcagttcccttgatttgattaaccacaaggtttatgaaaatgggcaaagcttgtttaatgatgtatatcagcaccagcaaccccagaatcatcaacagttattgctgaaatatattacccaatatcttggattctctgggagaaaacctattgctgcgtctcttatatactactgtcttcttcattggagatcttttgaagaagcaaagacaactgtctttgacagtattatacaaattgtaaactcagcaactgaggctcaacatgatacgagaagcttggcctactggctgtccaacttatccacattgtcagttctcctgcaacgttcatttaaagccaccagggcaactgcctcaactccacatagacgaagaatttcctgtgaaaggatttttcaagccaatcaaacttcaagcagtggacttgcttgtctcagtgctcaatcagtggatggaggtaccgtgtttcaccaaattgaagcaaggtatccggcttcgctcttcaagcagcagctagtggatcaggttgaaaaggtgtatggagtgataagcgataaaataaaaaaggagctaaacccattacttgagttgtgcatacaggatccaagaacttactcaaatcaagcaaaggccttgatgtctccttctagtggcttgggccaacaggatcaactcatgcattggctgagcatcgtgaaaatcttcaacagctatttgcatgtcctcagagccaatcatgttccctcaattttggtccacaaattgcttacccaaatattttctgtggtcaatgtgcaattgtttaacaggctcctcttgaggcgtgaatgctgttcctttagcaatgggcaatacatcaaagatgggctaactcaactaagatattggtgcaatgacgtcagtcaagagtttgcagactcagcatgggtagcactgaggcatataagacaagctgttgactttgtggtaatttctctgaagccgataaggacatgggaagagatatgcaatgatatttgcccggctctcagtttgcagcagctagagcggatagtcggtatgtattgggatgatttaaagggaacaaatgtaacttcagccgagttcatgtcaagcatgagagctatgctgcgcgaagaatcaaatagcgtctccagcttttcggtcctgctggatgatgattccagcatacccttttcgcttgaagatatttcgaagtcaatgccaaacattgaggagacgtcagttaatgacctgctgcctttcatccgcgagaaccaaagctttgcgtttttattgtag

SEQ ID NO: 136190 - DNA, 2113 bp, Zea Mays
atggcagcttctttggaagctgaaagacaagaaaatgaagcaatcaagaggtcccttgttgaagctcaggagagaaacgatgcattatttaagaaagttagggatagcgaatacagggcccaccagcttcaagatactgtccaaaagcttcaagtagatgccatatctagactgtctagctttgtaatggagagacaagatggtgatggtgtcaagaatgcacatactgaggttcatggaacaaatgaagatctaatgaggagaaatgaaaacctcctaaaaaggaatgatgacttggtgaagaagattgaagattctgctatacttgttactgagcttagagggaacttggaaaggttagaagggaaagctgctaatttagaggctgaaaatcaattgcttcgtcaacaagcaattgcaactcctccatcaacagcaaagtcttctcaagctgcatgctctaaaatcagtatgatccatagatgtcaagaaagtggtcatattttaaatggcaacgtagcatatgctgaaatgaagtcctcaaccggtcaaacagaaatgagaccctcgatgggcagttcccttgatttgattaaccacaaggtttatgaaaatgggcaaagcttgtttaatgatgtatatcagcaccagcaaccccagaatcatcaacagttattgctgaaatatattacccaatatcttggattctctgggagaaaacctattgctgcgtctcttatatactactgtcttcttcattggagatcttttgaagaagcaaagacaactgtctttgacagtattatacaaattgtaaactcagcaactgaggctcaacatgatacgagaagcttggcctactggctgtccaacttatccacattgtcagttctcctgcaacgttcatttaaagccaccagggcaactgcctcaactccacatagacgaagaatttcctgtgaaaggatttttcaagccaatcaaacttcaagcagtggacttgcttgtctcagtgctcaatcagtggatggaggtaccgtgtttcaccaaattgaagcaaggtatccggcttcgctcttcaagcagcagctagtggatcaggttgaaaaggtgtatggagtgataagcgataaaataaaaaaggagctaaacccattacttgagttgtgcatacaggatccaagaacttactcaaatcaagcaaaggccttgatgtctccttctagtggcttgggccaacaggatcaactcatgcattggctgagcatcgtgaaaatcttcaacagctatttgcatgtcctcagagccaatcatgttccctcaattttggtccacaaattgcttacccaaatattttctgtggtcaatgtgcaattgtttaacaggtaagttttgggtcgtcctatcatattttcttcttggaaatgacagttttcacttctgttcctggggcgttctcttccttatttgaaaacaggctcctcttgaggcgtgaatgctgttcctttagcaatgggcaatacatcaaagatgggctaactcaactaagatattggtgcaatgacgtcagtcaagagtttgcagactcagcatgggtagcactgaggcatataagacaagctgttgactttgtggtaatttctctgaagccgataaggacatgggaagagatatgcaatgatatttgcccggctctcagtttgcagcagctagagcggatagtcggtatgtattgggatgatttaaagggaacaaatgtaacttcagccgagttcatgtcaagcatgagagctatgctgcgcgaagaatcaaatagcgtctccagcttttcggtcctgctggatgatgattccagcatacccttttcgcttgaagatatttcgaagtcaatgccaaacattgaggagacgtcagttaatgacctgctgcctttcatccgcgagaaccaaagctttgcgtttttattgtagtggagaggacacgaatccttagatttgttgtatgagattgcaggccagtctgtgtggagttactatccgtctgatgggtatgcgttgactttacacgtgctactgtttgattacctagcttacctgcatccacaggaactctc

SEQ ID NO: 136191 - DNA, 446 bp, Zea Mays
taacgtcgagcatctcgcgtgcgtcgtgcccgggcatcgccgccacggccgtgtccgtcgtcgtaacggacagccgttccccgtgcataggaatccacatcgtgctgcacccccgcagggcgtagcggagctcggtgtggcttgccaaaatggagaagtgactgctgggcccccatttggacagggagcaaagtggagaattcacgatctgtccctgatattttattttttctttggtacccaacagcaaatccagctatcaaaggtacacaattgagcagtgtccagtagccaataccacgtttatagagtagtgtcctagagcagatttacccattctataccagcaccgacgtagaaaagcaagaggaaggacagaacactgcactgtactgctatgtaacagtatgtacaccacgtccacgtgcaaccctttttcactgttc

SEQ ID NO: 136192 - DNA, 111 bp, Zea Mays
ccgatgttcttggtcttctttagacctttctctctacttaatataatgatgcgcagttctcctgcgtgttcgagaagagaaagaaaaatattgccaaatttcttatattaa

SEQ ID NO: 136193 - DNA, 223 bp, Zea Mays
cttgatgccctccacggaggaatggatgtcgtggaccgacccttcgatgcggggacgccatgcttcgaaggaggaagtgatgttctccagggatgcgacacggcccgatgcatccgccgccagcgcgtcgagacggtccatcgccaccgcctgcatctccgccatctggccgtcgagatgcgcccgtaagtcgcgccccaggtccgctcggggcagaacacct

SEQ ID NO: 136194 - DNA, 1725 bp, Zea Mays
gcgccggcccacacttcaacggatccactcggcaccggaccatttgctattgggcttccttgttcgccggcccatcacttcatcagttcctgctctcctgtcgtcccccaattccaggtcgcctacaggaatactgacacgctgtcgcccccgtcgtgcgacgccgccggctgggcatcgccccggaactcctcctgaaggcccctcatcacgctcttgcaggttctggacggacgtgggaggccccgcggcgcccgtacgtatatctagcggcgagacggcaagctcccgccccatctccgccgcctccgctccccgtcgtccggctgcgctgttgctgctcatacggatcaagctcggctacacccgtttctgcgagcagatcagaggacgccatcgtcgggtcggtagggatgggacatgttcactccgatcaaaaggcgaagaaattggcgagtgagtctttctctctctctcctatcccgcgcctctgcttcgtcctcagccagccttggaagagtggccaagggtggggatcagcgactcgaagcacttgaagacgagatcaatggagcagaagggccgaaacgctaactgggatcgctggaacccaagagggggcggcaaccttctcctgtttgggggagaaatcgcaatctaagctggcgcctaaggactccacatgcttcgtcggaagcaaaagtggaccagctgggatcttcttctggagacggtagcactccagttatttgcgaacaaagagttataattccaaacgggcatggggagaagcttgttggtttattacatcgaacaagttcaaagaatcttgtgatcctttgtcatggattccaagccacaaaggatgacagcatcttggttgaccttgctgatgccatcacaaaggaaggaattagtgcttttcggtttgatttttctggaaatggggaaagtgatggtgaattccagtatggaagctacagaaaagaggcagctgatttgcgctctgtagtattacatttctcagaacagaaatatgacataattgctcttatcgggcatagcaaaggaggaaatgctgttcttctttatgcttccaagtaccatgatgtccctgccattgtgaacatttctggccgctttgcattagagcgaggtatggagggacgccttgggaagaatttcatgaggagaataaacgaagatggatacattgatgtgaagaataaaaaaggggagttgcagtaccgggtgtcgaaagcgagtctggatgaccggctgagcactgataccctattctccagccgtgccataagcgaaggctgcagggttctcacgatccacggcgccaaagacgagatcgtcccggcggaggacgcccggcagttcgcggcgaacatccgcaaccacgagctgcgcatcgtcgcagatgccaaccaccgttacaccgggcacagggaggagctggcctcgctggtgctgggcttcctcagctcccatccctaccagatcacgtcgcgcttgcgtccgagactctagatagagtagagcacacccacttgaccgtttgcgaacaaaaaaaaatcccctgtaccaatctaagagttgtgggtgtggtgatgtgtttatccagaaccagaacacgagcacctgccgtccaaatcagcgtgactcgctctcgctctagaatttcaaaaaaagtcagtgccaggcatctaacagcaa

SEQ ID NO: 136195 - DNA, 1994 bp, Zea Mays
gcgccggcccacacttcaacggatccactcggcaccggaccatttgctattgggcttccttgttcgccggcccatcacttcatcagttcctgctctcctgtcgtcccccaattccaggtcgcctacaggaatactgacacgctgtcgcccccgtcgtgcgacgccgccggctgggcatcgccccggaactcctcctgaaggcccctcatcacgctcttgcaggttctggacggacgtgggaggccccgcggcgcccgtacgtatatctagcggcgagacggcaagctcccgccccatctccgccgcctccgctccccgtcgtccggctgcgctgttgctgctcatacggatcaagctcggctacacccgtttctgcgagcagatcagaggacgccatcgtcgggtcggtagggatgggacatgttcactccgatcaaaaggcgaagaaattggcgagtgagtctttctctctctctcctatcccgcgcctctgcttcgtcctcagccagccttggaagagtggccaagggtggggatcagcgactcgaagcacttgaagacgagatcaatggagcagaagggccgaaacgctaactgggatcgctggaacccaagagggggcggcaaccttctcctgtttgggggagaaatcgcaatctaagctggcgcctaaggactccacatgcttcgtcggaagcaaaagtggaccagctgggatcttcttctggagacggtagcactccagttatttgcgaacaaagagttataattccaaacgggcatggggagaagcttgttggtttattacatcgaacaagttcaaagaatcttgtgatcctttgtcatggattccaagccacaaaggatgacagcatcttggttgaccttgctgatgccatcacaaaggaaggaattagtgcttttcggtttgatttttctggaaatggggaaagtgatggtgaattccagtatggaagctacagaaaagaggcagctgatttgcgctctgtagtattacatttctcagaacagaaatatgacataattgctcttatcgggcatagcaaaggaggaaatgctgttcttctttatgcttccaagtaccatgatgtccctgccattgtgaacatttctggccgctttgcattagagcgaggtatggagggacgccttgggaagaatttcatgaggagaataaacgaagatggatacattgatgtgaagaataaaaaaggtctagcctttctttacttgattaataatacgtcatttttttcatgttaatcttattatgagtctgattcaatggactatcccttagttttctaatcaattagcacagggtcatcaaacaaatgcatgcgtctgatctggtgtcaatcttgaaactgtcaaaaactaaactataggctcggtgtttctgctcactctttccaagccaggacacatggcaatgcgattgtaaagaggatcatgcatcgcgttgttttggtggttgtgcaggggagttgcagtaccgggtgtcgaaagcgagtctggatgaccggctgagcactgataccctattctccagccgtgccataagcgaaggctgcagggttctcacgatccacggcgccaaagacgagatcgtcccggcggaggacgcccggcagttcgcggcgaacatccgcaaccacgagctgcgcatcgtcgcagatgccaaccaccgttacaccgggcacagggaggagctggcctcgctggtgctgggcttcctcagctcccatccctaccagatcacgtcgcgcttgcgtccgagactctagatagagtagagcacacccacttgaccgtttgcgaacaaaaaaaaatcccctgtaccaatctaagagttgtgggtgtggtgatgtgtttatccagaaccagaacacgagcacctgccgtccaaatcagcgtgactcgctctcgctctagaatttcaaaaaaagtcagtgccaggcatctaacagcaa

SEQ ID NO: 136196 - DNA, 1442 bp, Zea Mays
gcgccggcccacacttcaacggatccactcggcaccggaccatttgctattgggcttccttgttcgccggcccatcacttcatcagttcctgctctcctgtcgtcccccaattccaggtcgcctacaggaatactgacacgctgtcgcccccgtcgtgcgacgccgccggctgggcatcgccccggaactcctcctgaaggcccctcatcacgctcttgcaggttctggacggacgtgggaggccccgcggcgcccgtacgtatatctagcggcgagacggcaagctcccgccccatctccgccgcctccgctccccgtcgtccggctgcgctgttgctgctcatacggatcaagctcggctacacccgtttctgcgagcagatcagaggacgccatcgtcgggtcggtagggatgggacatgttcactccgatcaaaaggcgaagaaattggcgattatttgcgaacaaagagttataattccaaacgggcatggggagaagcttgttggtttattacatcgaacaagttcaaagaatcttgtgatcctttgtcatggattccaagccacaaaggatgacagcatcttggttgaccttgctgatgccatcacaaaggaaggaattagtgcttttcggtttgatttttctggaaatggggaaagtgatggtgaattccagtatggaagctacagaaaagaggcagctgatttgcgctctgtagtattacatttctcagaacagaaatatgacataattgctcttatcgggcatagcaaaggaggaaatgctgttcttctttatgcttccaagtaccatgatgtccctgccattgtgaacatttctggccgctttgcattagagcgaggtatggagggacgccttgggaagaatttcatgaggagaataaacgaagatggatacattgatgtgaagaataaaaaaggggagttgcagtaccgggtgtcgaaagcgagtctggatgaccggctgagcactgataccctattctccagccgtgccataagcgaaggctgcagggttctcacgatccacggcgccaaagacgagatcgtcccggcggaggacgcccggcagttcgcggcgaacatccgcaaccacgagctgcgcatcgtcgcagatgccaaccaccgttacaccgggcacagggaggagctggcctcgctggtgctgggcttcctcagctcccatccctaccagatcacgtcgcgcttgcgtccgagactctagatagagtagagcacacccacttgaccgtttgcgaacaaaaaaaaatcccctgtaccaatctaagagttgtgggtgtggtgatgtgtttatccagaaccagaacacgagcacctgccgtccaaatcagcgtgactcgctctcgctctagaatttcaaaaaaagtcagtgccaggcatctaacagcaatctcct

SEQ ID NO: 136197 - DNA, 1232 bp, Zea Mays
atttcttattcattgattacataagtaggctagctgcctgcccctatctagctagagatccttatctccttaaaactctcctaaaaactcttaacaaactaataactaataaccttcctagacaatctcaactgataaccttactagacaaactactaattgataaccattacacaaatatgtgaaccaaacggcacctaaatgaagtctcgtacatagtttataaggacacttggcctgctaaccgaatggaggaaccaaactcttgaaattgaggcaataatctaggcgcggtgaccgcgtctacgtcacgctgagcgcgtccgcgtccctggtaccatgcttcttgccagagtagtggtggccccacatgacatacacattgcaggagaattatttgacctgtcatttactcctatagttcaaaatacttggccaagtttgcatgaccattctttttctggtgatgtgttttcatctttgtgagtaacagactgtgccacccacgctattcattcaagtaacacgacagacttatatggtcttactgcctgtgttcctttgcttcaggaggaaatgctgttcttctttatgcttccaagtaccatgatgtccctgccattgtgaacatttctggccgctttgcattagagcgaggtatggagggacgccttgggaagaatttcatgaggagaataaacgaagatggatacattgatgtgaagaataaaaaaggggagttgcagtaccgggtgtcgaaagcgagtctggatgaccggctgagcactgataccctattctccagccgtgccataagcgaaggctgcagggttctcacgatccacggcgccaaagacgagatcgtcccggcggaggacgcccggcagttcgcggcgaacatccgcaaccacgagctgcgcatcgtcgcagatgccaaccaccgttacaccgggcacagggaggagctggcctcgctggtgctgggcttcctcagctcccatccctaccagatcacgtcgcgcttgcgtccgagactctagatagagtagagcacacccacttgaccgtttgcgaacaaaaaaaaatcccctgtaccaatctaagagttgtgggtgtggtgatgtgtttatccagaaccagaacacgagcacctgccgtccaaatcagcgtgactcgctctcgctctagaatttcaaaaaaagtcagtgccaggcatctaacagcaatctcct

SEQ ID NO: 136198 - DNA, 1478 bp, Zea Mays
ctggtagtggtagtctggtagactggtagtagtagtagttggtttgttcaggcctcagggcaggggaccgcctcctcgaacaggccacagcccgcagcgcagggggtagcgaggagtgcgagaggaggcgagtgggtccaaacaccagagggaggggagggcaggcgaatgagcgaggaggcggcgcgggcgggagtggaggagtccatcgggcagcggcggcggcgggatgggcgcggggaggcggcggcggcggggcgggtgtgggagttcgagcgggatctggtggccggcgcgctgatggggggcgccgtgcacaccgtggtggcgccgatcgagcgcgtcaagctgctgctgcagacccaggacggcaacgccgcgctgctgggcagggcgcgcaagttccggggcttcgccgactgcgtcgcgcgcaccgttcgggacgagggggtgctctcgctctggcgcggcaacggcaccgccgtcatccgttactacccctccgtcgccctcaacttctcgctcaaggatctgtacaggagcatactgaaagatgctggaacctcatcagacaataagttcacttctattgctcttagcaacttctttgctggtgctgctgccggatgtacaaccctggtcctcatctatccgctcgacattgctcacactcgtcttgcagctgatatcgggcgtacagacacccgccagttcagaggcatccgccacttcatccagaccatctacaagaaaaacggcatcagaggcatatacaggggattaccagcatcgctccacgggatggtcgttcaccggggcctgtactttggcggcttcgacactgccaaggatgtcctggtccctttggagtcccccctgtggcagcgctgggttgcagcccaggcagtgacatccatggcagggctcatctcgtacccactggacaccgtgcgccggaggatgatgatgcagtcagggatggaggtgcagatgtacagcagcacactcgactgctggaggaagatatacaggctggaggggatccggtcattctaccgtggtgcattgtctaacatgtttaggagcactggtgcagccgccatacttgttttgtatgacgaggtcaagaagttcatggacaggggtaggttgtaacagctatagaggggtttctttcacagaattttggattcgatatgggaagtgggattaggccaaaaggtgcaaggagcagcagctcgagcattttgtaactggatgctggtttcctcctgcttactaacctgctcgatgtaaccgagcctgaaggttctgactcgcgaacaatgcagcttgttcagttcacctcatctttacctcttcgaggttccacttatgggttgtttgttgcctgcacggaggggcctgcgccatagttaaacccataatcacgtacttcattcttttttttatttgtcttgttttagtttaaaaataaa

SEQ ID NO: 136199 - DNA, 933 bp, Zea Mays
aacacttttgctcgctcgccttccctcccacttccacatggccgatctcctccacgcgcgcttcctctcgctccccttggccccgaaccctagccccgccctccccgcgagcggcgcgcggcgggtgcccccggtccccgtgcctcgccaagctcctcctcgccggagaccgagtggtgcccggtgcagccggagcagcgccccgtgaagtgtgaacgagtacgaggcgctcgcggcctcccttcccttctcccgggcggcgggggacctccgatcctactgctcccgcctcgcgctcacgggcgccgccgtcgcgctcttcgtcgggctccccgtcgccgccttcggggcacgcggcggggccggcggcgacgctctgcacctcacgctcggcgccacggggtccgggatcctcgccgtcacgctcgcggtcatgcggatgtacctcgggtgggcctacgtcggcaaccgcctgctcagcgccacagtggagtatgaggagacgggatggtatgatggacaggtcaagcctgtggtaaacagagtgaagttcaccttggtgggtctggcaggctccctcatcctttgcattcttctttacttgggatgcgtaccggtggaaggtctatcccggaagtgtacagtgacgttgccgcaaggtcatttgggcctgatgcgttctgtggagaagctgatctgtcgtagcatcgcaaagcgtggagcatgagaagtttttagatggtggtatatggtctcatagggtaggtatacaagttcccctttgtcttgccttgtggttggtggatggttccatttctgtacggggttttttatccatcagttactgcatcagggtaatgttaataagtaatatttgatagcacgtagtgccgttatttttatagtggcaagctccttacgaaagtttatatg

SEQ ID NO: 136200 - DNA, 3327 bp, Zea Mays
ccggtctacaaattgtgtggtagaaatggagcagtcacactgtgggacgaaagtcattattgcttccttcttgctactttccctgtctgtgacaaaaaaaactctggaaaaaaaaatcaaaagagaaccatgtttgaaaccgcggagagaaaaaaaaggaaatcgatgtccgtgctgcatccggtcaaacatgccgtcgccggccggcgtccctgttggaaaacccctccggcctccactcctcggtccaaccccataattctccataacaagtccaagggggtagcgagcgctagcgcggcatccagatcacaccgtgccggcccgtccgcccgctttggtcgtctgtcgtcacaccccacctccccaacaaaacatctcgccgctaggatagcgaggcagctctgccttattgcaagctaagcttccgatttactgattaattgtgcgttaatttcccactaaaccactgtcggtcgccgccgcttcacatccagctcggtgggcggccttagagagagagagagagagagagagagagagagagagagagagaccgaggcagcctgggatccggtcgggcggtcgatgctacggccggtgtcgggtgtcgccggggcatggctagccaggctgcgcggcgaggaggagtgatgaggccaccgagcagcggcgtgcgcgcggcggccgcgcggtcgccggccgcctcgttcctgctggccgctgcggccgtggccgcgctcgtcggcgggttctacttctggctggtggtctcgtcgttccggctccccgactcgggcgacgccgggtgtcgccccgacggcgaggggtcgtgggcggtcgggatgttctacggcagcagtcccctcgcgctccgccccatcgagctggaagggagaagcaatggcaacagctcggcgtggccggtagcaaaccccgtgctgacatgcgcgaccgcgacggaggcggggtacccgagcaacttcgttgctgacccgttcctctacatcgagggggatacactatttcttttctttgaaacaaaaacaacaacctcaatgcaaggtgatattggagttgcaagaagctttgaccaaggtgcgacgtgggaatttcttggcatcgctctagatgaggcatggcatctgtcatatccttttgtgttcaagtatgagaatgagatttatatgatgccagagggaaacaaaaagaaggagctgcgcctttatcgtgctattaagtttccccttgaatggacattggagaaggttcttgtcaataagccactcattgatgcctcattaatccaatttgagggatattggtggctatttgcctctgattttacacggcatggcgttgagaagaacgcagagcttgagatttggtacagtaactctcctcttggtccttggactgagcacaagcaaaatcctatctacaaatcagacaaaagtctgggagctcgaaatggtgggaggctctttgtttttgaagggtcattatatcgccctggtcaggattgcagtggtacttatggtcggagggttaagttgtacaaagttgaaaagttaagcaaggaagaatacaaagaagtccccgtaaatcttgggatagatgaaccaaagaaagggagaaatgcatggaatggcatgaggttccatcacatggatgcgcaacgacttgcatctggtgcatggattgctgtgatggatggtgatcgagtcccttcaggcgattcaaccagacgttcgctcattggttacatagctttcctgctggccagtgcccttgtcatttttgtgggttttatgaaaggtgcaatcacttgctacattccttccagtttatgggttcctcttacaaggagaacagaattaccccgcatcttctctgtgcaccgcttcaaccagaaagtccgcagatattctaccagtatcagcagatatatctctgcggccaaaactaagctcggtgaaaagacctggtccaacatgcttttcttctgcgtagttgctctatttactattgtgaatgtctgcattgccgtgcatttcttatacggtggcaatggtgctgaagaggcatatacgtatcaagggcaacactctcagttcaccatggtcacaatgacatacgaagctcgactctggaatttgaaagtattcattgaacactactccagatgtgaatcagttagggagatagttgttgtctggaacaaaggtaaccctccaagcagtgacgcttttgactctactgtgcctgtgaggatacgagttgaggagatcaattctcttaacaacagattcagggtcgatcctctgataaagacccgtgctgtttttgaactggacgatgacatcatgatgacttgcactgacttagagaaagggtttagggtctggagagaacaccctgaacggatggcgggcttttacccccggatgatagatggcaaccctctgcaatacaggaacgagaggtatgctaggggtaagaacggctacaatctgatactcacaggtgctgccttcatggacagcgagttcgctttcaagacttactggagcgagaaagctcgtgaagggagggactatgtgcacaagaacttcaactgtgaggacttgctcatgaattttttgtatgcgaacgcaagctccacaaggactgtggagtatgtccaccctgcgtgggctatcgatacatccaagctttcttccgtggccattagccgggacacccagaaacactacgatatcagaacagattgcttggcaaagttctcctccatctatggccccctccctcagaaatgggagttcggcatgcgtgaagatcattgggacaaataggatggcaatggtggtacacaacggactggttaaacctttttttgttaatcccctagaaagttttgtagcttggggtctacggtgaagtttgtaggtcctttgggcagaagtgcccttggtttgtgatgtacctattatattcgcctagaagcttagaatctgatcaggaattcaggatagacaattgttcaaaagtttttgaagttaatgctgaaacagaccaaaggcagtgcagtatctgtgaattgtgaaaggcagagacagagagggaatttggagactgcatagggattagtgggtaggaagttcagacttcagattgttgggttcccttgtctctgcagtttgtgtacatgtcttcctttctaagattggactagcgtgttgtgtgattttttaccgtaagaattctttttacagctcgtagtgtttttttatttcggtctaatgaggactttctgaaccattggct

SEQ ID NO: 136201 - DNA, 330 bp, Zea Mays
atggaaggcgctatcagtccagctttattaccccaccatcgaacgccgcactgcatcaaaaactgcaactcggtgacagttctgcacctcgtttcgaatgaactccgtagacgtatccgactatccgctagggaaacaaagttcgtccccaacctcccaattcctagccttacaggtcacagatcagcatcatacacggcgcctgaatttcctcagaagtccatcccgctcatctgcggcatacggctggctattctggacttggttgccgggagctcggagacagcggcctccgtggttgccatcagcagggaaacactgcccaacagc

SEQ ID NO: 136202 - DNA, 1174 bp, Zea Mays
cactgatccaccgaaagcacaaccgccgccgtttcttcatctcccatcttcgtcgtcttcgcagcaccggcgctccattttccgctctcggcacgcaggcgacggcggcggcgctcaggcttgggatctcaacgacggagtcagcggtttcccctccccctctcgccagccgcctcgcgccttcgcctccggtcctccgcacaccggctggtgaccctgcgtgcgtgcctctctctctcctcccgccttcggtggatcgtcaacgccgccaggccccggcatctgagccgcgcgcggcctgagggcagcgagagccagcagatgctgctccaccaaggtggtcgcgcatgcccaaagcgaagcgttacccgtcctcttagcgctgaagcgtgcgcttagtgccggcttttggaaccctgtatcataccgaattgcgcattatagaaattggctaggactacactgggtttgccattggccatgacgtgtgctgcttacagtatcagaggtcctctcatgcttgctgcaaggcgcagctcggatgtgttcgctagtagcaagtcgtgcaatggcaagtcttcggtgtcttaccccgttattcagtggtggagcagtaactgctcatccttcacaatgcggcatgtcgcctcccatcatcacttgattgttaaggcttcagcaacgtggcactcaaaagcttcagcaactgatgcagccactgcttccgatgagaggataactgtactggtcattggtggtggaggcagggagcatgctctttgttatgccttgaaccgttccccatcatgtgctgcagttctatgtgcccctggtaatgctggtattgctcagtccggggatgcaacatgtatttcagatttggacatctccagtagcgatgatgttatctcgttctgccgcaagagggaagtgggaatggttgtagtgggtcctgaagcccctcttgtcgcgggtcttgtgaatgaccttgtcaaagttgggataccaacctttggcccttcatcagaggctgcagcattagaaggatcaaaggacttcatgaagaagttgtgtgataagtacaacatccctacagccaaggtacttacttccttttcatttatgggataagttactcttggcatgactataggattatgtttacgtaaatgcc

SEQ ID NO: 136203 - DNA, 947 bp, Zea Mays
tacattgtaatatatgtttgaacttgaactttatggataatttcctttgctgcatcttcattatgcctttctagtagtacatcttcgaagtacaccacacacatttcagacgaatcatttagctgaaatcgtgtgcttgacctgtgactgaaatatttttctcatggtattccaactatccttttctctactgatctattttttgtgtcattataggttctgatgatgcgattagaatctgatttggcacaagttctgttatctgcttgccagggagagttaggcaatgtttcactaacctggtcacccgaaatggcaatggtggttgtgatggcaagccagggatacccgggcccttataaaaaggggaccgtgataaaaaacgtggacaaggctgagcaggtgtctccggctgtcaagatattccatgctgggacagcactagatggagacggcaaccttgttgccgttggagggcgagttcttggtgtcactgccaagggcaaggacattgaagaagcaagggcaagagcatatggtgcggtagacgctgtcgagtggccagaagggttcttcaggcacgacattggttggagagcactgaggcagaagcaagcggcaaaataggtagcagctacccatgaccacgagattttcctagactaccacaactacggtgagcttgtagtgtttgcaagtaataaaaagggaaacggtgtaacgttcactgatttttttttggttgtggaacagcaggttgttcaaattttaacacctgcggatttcagcatgatttggtagatgtttgaaccgagattatgttcagagtctagacaagcgctagcgtgaaagcagcgccatctgaattctgaccatttgtctttcagttctcggataagtggacctcctatatgactgtgatatctcaaaccaaacacttcagagtg

SEQ ID NO: 136204 - DNA, 1763 bp, Zea Mays
cttgttgcgtctccttctattttgtcgcgtcccgtctcgcctcggcttctcctccccccacatcccagtgccgagtgtccccacacaaccaagcggaagcttcggtcgaacagagggagtaagcagttgcgtttcgcattgcgcggcgccgatgggggcgtcggggaagtggatcaagtcgctggtggccctgaaggcgcccgagaaggcggcggggcacaagggcggtcgcaaatggcgtctctggcggagctcgtcggccacgtccagggccagcgccggagagggcagtgcgctggcgtccgagtcttcttcggcgtcggccgactcgttcaactcggtcctcgccgccgtggtccgcgcgccgcccagggatttcctgctcatcaggcaggaatgggccgccgtccgcatccagaccgccttccgcggattcttggcgagacgggcgttgaaggcgctgaggggcatcgtccggctgcaggcgctggtgcgcggccggcgcgtgcgcaagcaactggccgtcacgctcaagtgcatgcacgcactgctgcgggtgcaggaacgcgcccgggagcgccgggcgcgctcctccgctgatggccacggctcacagggccaggacgcgctcaacggctgtgccagttctaccaaagacgctatggaacaatggtgtgaccgccacggatctgttgctgaagtaagatcaaatttacacatgaagcatgaaggtgcagcaaagagagaaagggcaattgcctatgctctgtctcaccagcctcggggttcaagacagaaggggacaccaagctctcctgctaactgcgttagaagccatgatcctaatgggtgcaatcaggacttcagttacttagacggatggatggcaacgaagccatgggagaccagatctacggagcgaaaccatagcgactcgcagctcgcgaagcactgcgaggagccgaacttgcccgcctccaagctttccgatgccagctcagttaagatcagaagaaacaatgtcacaactagggtatctgcagcaaagcgtcctcctccatcttcagtgctgtcagctgcttcttccgactccgcgtacggcgacaagagccctcggtcgagaccatcggtgacgctgacgtctgctaccaccaacactgtcttagcgtcagaagcaagatcagacagtggcgacaccggaggcccgaactacatgagcttgaccaagtctgccaaggcgaggctgagtggatgcagcggcagcagtcatcacaggtcgttccagcgaccacggtccggggacatgtcgagggtgacactgtcttcgatcgacacccagagcaacgcgggctcggagatttcagtcacctcgaagagactgaacagcatgtccctgaacctgaaaggccggagcttggacaaggagaacgaggaggattgatccaccaacggacaaagcagctgtcgtaggtctggtggtagtactaccacgcgttcaaagcagcatctctgtatttacggaatttacggaggaagacgaggtttatctctttcataaactccacacatgtgagagagctctggcactagtaggtcaccgcttctatcatcattatcatccttagtttagtttagtgcgtgagttttgtacacatccaatcgatgtccagttcctaatttcattgtctctagtttgtacccataaattagtaatgtaagtacttatatcagcacgcaaagggcagctatcttgcgttccattt

SEQ ID NO: 136205 - DNA, 1306 bp, Zea Mays
atcgattacagcactagcccccccgccggccttaatgcccgcgcgccatcacttgctggggggagctctgccgagacacgcacgctgctggagataggcatccagacacggcaccaccagtccaccaccaccaccaccaccaccgtgacgtgagtgcccgagcgcgcggccgccatcaggctcccccgtcgtcctcgccgggcggctaggtcagagccgggagaggcgggggccggcggcgctaggctaggctaggctaggcagcggcgtacgtgcgtggccgccgcgcgatcggcatgggcgacggcgaggcggcggtgccgagcaggttccgcacggtctgcgtcttctgcggcagcaacgccggccgccgcaaggtgtacgccgacgccgccctcgagctcggccacgagctggtgcggaggggcatcaacctcgtctatggcggcggcagcatcggtctgatgggcgtgattgctcggacggttcgtcacggcggctgccatgtcctcggggtgattcctaaagcgctcatgcctattgagatatcaggtgaaagcgtgggagaggtgagggtcgtggacgacatgcaccagaggaaagccgagatggctcgtcagtcccaagccttcatcgctctcccaggggggtacgggacgatggaggagctgctggagatgatcacctggtgccagctcgggatccatgacaaaccagttgggttgctgaacgtggacggctactacgaccccctgctcgccctgttcgagaaaggcgccgccgagggtttcatcagcaccgactgcagccagatattcgtctcggcgccaaccgcgagcgagctgctcacaaagatggagcaatacacgcgggtgcaccaggaggtagccccagcgacgagctgggagatctcggagctcggctacggcagaggaggagacgccggcgccgccacgccgccagcagcagcagcaggaggagcagaagagggaaaaggcggctcgtagcacccacatccatctcctgaagcgttaccttcctccacctactgcttgctgatgtgatgacgcgtctgttacggtttcctggcaaatttgtttcgtcaaagtcgacctctccaaagtccaaaacccggttgaaccaggtgccgggtcgggacgtactggggagacgacgatgatatctctgtgttgggtgcttggattgtgtaagcttgctgctgctggtactattcttgttttctttactttttccccggtgtgtggtgcttgtggaaatggaatctgtgctggtgcattgcagtgca

SEQ ID NO: 136206 - DNA, 541 bp, Zea Mays
ggcgagctagctagctagtacatgtacatcttcgatatacatacgctttttttgttcacgtacgctagctgttgtggctctttgcctgtgtccagcaatacacgcgggtgcaccaggaggtagccccagcgacgagctgggagatctcggagctcggctacggcagaggaggagacgccggcgccgccacgccgccagcagcagcagcaggaggagcagaagagggaaaaggcggctcgtagcacccacatccatctcctgaagcgttaccttcctccacctactgcttgctgatgtgatgacgcgtctgttacggtttcctggcaaatttgtttcgtcaaagtcgacctctccaaagtccaaaacccggttgaaccaggtgccgggtcgggacgtactggggagacgacgatgatatctctgtgttgggtgcttggattgtgtaagcttgctgctgctggtactattcttgttttctttactttttccccggtgtgtggtgcttgtggaaatggaatctgtgctggtgcattgcagtgca

SEQ ID NO: 136207 - DNA, 1627 bp, Zea Mays
gggagtagatcgaggaccatcctcgctaccctgcaggccggcactgcactgcagtcttcagaactcgtcagtcacagatcggtgcaggcggtctgcacctgcatcacctaaccaattcctcgattagtctgctgttgcgatttgcgaggcaggtcaggtactgacgtattgcatttgcatgcctagctagctgatagatgatcttgtttcttctctgctttgctctgtgtatgtgttcactgcaggagaatttgtaattgcaaaccgcctcacaaattggtactgactgaaagatgatcttgtgtttcttcattctgtttgcacgaagctgcaatctttttgcagcagccactaaacctgtaccaagtcttcttgcctgagggcagaggcaggctccgtcagtcacgccggcggcgtacagatcatggaggactttggcggctggaatatgcagtatgcagcagagctatgcctgccaagccgccgggacgacgacgacgacggcctcctcggtgatttcctaggcggcggcggtttggacatccgttctgaccatggcggcctcaacctgccctcgtcgcaccctgctgtccagaaccttgtgccctgccacggcggcgtgagtctttccgtttccgacgccttcatgggcctggacacggcggatatgctcgctagcgtcaccggcgcactggactgcagcctcctcgacacgtttgcttgcggttcggacgccgtcgtcgtcgccgaggagcccgccgcgcagcccaccgcgtcgagcaacgccttctccggatacagcagcaccacgggcggcaattacggcaacatctcctccggcgagtccaacacgtacggcggcagcggcggaggccatgacacggaggttgcgtcgccgacctgcgcctcgaagcggaagctggccggcaagtaccctgcaatagccgcggcgtcggccacagccacgacgaaaacggcggaggggcaggttgcagccccgcggcgtggcacgaagcgcgactccgcgacgtcgtcttcgtcgaccagcgccacggtcgccgggcatggcggcggcaaccatgcggccggaggaggcgggtcgtcgtcggtcggcgacgggaacgggtacgagccggactcggaggcaatagcgcaggtgaaggagatgatctaccgcgcggcggcgatgcggccggtgcaccagctcgtgtgcggggccgccggcggcgagccgccgtcttcgtcccagaacaagccgcggcgcaggaacgtgcggatctcgagcgacccgcagacggtggcggcgcggctgcggcgggagagggtgagcgagcgcctgcgcgtgctgcagcggctcgtgccgggcggtagccggatggacactgcgtccatgctcgacgaggcggccggctatctcaagttcctcaagtcgcaggtcaaggcactggagagggcaaaccctagtagtaatggtggctacaacgacagcagcttcctgccgcagagttacacggggtgcctcggtgtcgacggtggcaccagtgctgcctttggaagcgatggcgccattgggggctacggctacgtaaaacccggtaggaacatgcaccggtagcgatgcaataat

SEQ ID NO: 136208 - DNA, 1577 bp, Zea Mays
gggagtagatcgaggaccatcctcgctaccctgcaggccggcactgcactgcagtcttcagaactcgtcagtcacagatcggtgcaggcggtctgcacctgcatcacctaaccaattcctcgattagtctgctgttgcgatttgcgaggcaggtcagctgcaatctttttgcagcagccactaaacctgtaccaagtcttcttgcctgagggcagaggcaggctccgtcagtcacgccggcggcgtacagatcatggaggactttggcggctggaatatgcagtatgcagcagagctatgcctgccaagccgccgggacgacgacgacgacggcctcctcggtgatttcctaggcggcggcggtttggacatccgttctgaccatggcggcctcaacctgccctcgtcgcaccctgctgtccagaaccttgtgccctgccacggcggcgtgagtctttccgtttccgacgccttcatgggcctggacacggcggatatgctcgctagcgtcaccggcgcactggactgcagcctcctcgacacgtttgcttgcggttcggacgccgtcgtcgtcgccgaggagcccgccgcgcagcccaccgcgtcgagcaacgccttctccggatacagcagcaccacgggcggcaattacggcaacatctcctccggcgagtccaacacgtacggcggcagcggcggaggccatgacacggaggttgcgtcgccgacctgcgcctcgaagcggaagctggccggcaagtaccctgcaatagccgcggcgtcggccacagccacgacgaaaacggcggaggggcaggttgcagccccgcggcgtggcacgaagcgcgactccgcgacgtcgtcttcgtcgaccagcgccacggtcgccgggcatggcggcggcaaccatgcggccggaggaggcgggtcgtcgtcggtcggcgacgggaacgggtacgagccggactcggaggcaatagcgcaggtgaaggagatgatctaccgcgcggcggcgatgcggccggtgcaccagctcgtgtgcggggccgccggcggcgagccgccgtcttcgtcccagaacaagccgcggcgcaggaacgtgcggatctcgagcgacccgcagacggtggcggcgcggctgcggcgggagagggtgagcgagcgcctgcgcgtgctgcagcggctcgtgccgggcggtagccggatggacactgcgtccatgctcgacgaggcggccggctatctcaagttcctcaagtcgcaggtcaaggcactggagagggcaaaccctagtagtaatggtggctacaacgacagcagcttcctgccgcagagttacacggggtgcctcggtgtcgacggtggcaccagtgctgcctttggaagcgatggcgccattgggggctacggctacgtaaaacccggtaggaacatgcaccggtagcgatgcaataatgtaaccattgatgtgagtgagcgatatatgagagaagtactgcagtactgctactggattttgaggttaataaagatttactgtatttcggaggaataataatcaaaacgatttaatttaa

SEQ ID NO: 136209 - DNA, 1797 bp, Zea Mays
ctcctcacctggcatccagagaggaagggaagggaggaactcgggggcacacagcacagggggtcgtccggaatttcctctgcttccgcttaccaccgaaacctctgtcttgaaggaagaatccgttcctctgcttgatctgtattcttatagtggagaagagaagccgaggacgattaatagagctggaaggtgaattgacgcttagtatttgaagctcgtcgccaaatggagaaagaggcgaggaaccactaccgcacgcggggatcctcgcgcggcagcggcggcggaggcaccgctgccgagcgcgacctgctgttacagtggggcaaccggaagcgcctgcgctgtgtcaaggtgcagcgccgcgacgtcgaggccgccgccaccgcggccgccgagaaggccgccatcagccagcgccgcgccgcggccgcagccgcagccgcgcagcaccacccaaccggccacacccaccaccgcgttctcaggaagtcagaagagtttgcaatcatgaaattgccagcacggcaacgacagaatgacaggatccacacagttgcttcaccagacagggagtgccctggtagaggtaacaacaacaacggagttccacagacctatccggatgacaagaaaggctcttcatcagggagtgaggggtccatctggccgaagtttgaaatcaccctgtcaaacagggaaaaggaagaggatttcctggtgttcaaaggatccaagctgcctcaaagacccaagaaaagagctaaggtcatccagagaaccgtcaattttgtatgcccaggaacgtggctatgtgacttgactcttgaaagatatgaagtccgggagaagaaggtttccaagaagcgccccaggggattgaaagctatgcacgacatggacagtgactcggaataaataaaagaagatcactgaacatgagaagctgaatattagaaagaaggccaggacagatcctgcagatggaggccgacgagaaaacgtcctgatggaatgaatggccgtatcaacgattcgccacttctcgtgattgctactggagatcagtttgttccaaaaggacttatggagatcggaggacggccgaaatgtcaggaagctgcatggaagaacagaagagagccgcaggagctggaattcctggacattactattcagttccctctgtaaagcagcaacgctgttttgcaagcctcccatgctaatttcgcgctgccaaatattagcgtgatcgcgaagctagccagtcctggcgcgtctagtttgccgggttgtctgacaacaaaagttagtatgaatatgaaagggccttccttaatgttttttcccacttggtgctgtataaaggttcagtgtatattccattcaggagaatgagaaaaagttcaacactccagtgtgggtggattcaaaacaggcgacttttaattttgaaagtttcagtagatttgttagtttatagtttatattttgaaagtttcagtagtgtccaatggaactcgatgtgtaattcaaaacaggcagacttttaattttgaaagtttcagtagttttattagtttatattttatacagacctactattttcgtctaaaaaagagagaaattcatattagacactagaaaacttttttcctatttaacacttcggttatttcagaccaataacggtgttatgttctagttttacccctattttttttctaaccatgatatttccttttgctagctaaagaaaatatgatagttggaaataaaaaacatcaatagcca

SEQ ID NO: 136210 - DNA, 1776 bp, Zea Mays
gggagaaaccctcctcttgctcggccgtgggcagaggcccccggacggcattcctgcacatcgacctcattctgcaatcccctcatctacgtgtgaacagtaccacaccgtctccgccagcagctccaatcccccaccgatctagcaactataacattaatacattttcctataaacttggtcaatgttagacaaatctatgtcatatcgaatgtttgaatgataattatgagtattaaatatatttcaactataaaactaattatacagatattcagacatttgatgtgacatgaactaaactttagtcaagggaaccaaacacaaagattaaagtcgaatctgcataagtgcatgagatttagaatactggatctaacgaatagcagcaagtgaaaaggccaccgaaatgtaatccccggcctacaagtccctagcaaacaagccgtaccttcccagacctaccctcacggagtcaaccagactaagccaaggcagaccgaaatcaagggacgctgcgccccaagggcgcgcgcgcacggcgcacatcttgtagggtttgcggaggggagagaaggttgcgtaccgaatccagcgatgaggcaggaggccgcgactacgggctccttaacgacaaagatcttgagcttctccatcaccgccatggctgccgcctctgcttccactactccgcttcgccttcgcgtaaccctcgcccgctgccgtcgctggagacgagagaggccagagggatacaagccagtgctctcctccgatctgtggacgtgggcccgtgtcttgagcggagagacttcgacgcccagcccgtctacgaccgtggtccagtgggccacgatccattttgtttgttgggctgaggcccgtaccgataatcccattaaatgatatggtcacggcatattcagagctgcagactggaatattcctcgcgcgcgcgcgaataatctacccggacgagcgaatctactgtcggtcgcagcgccgttttctcgctctcgcgctcgccttacctgggatgggatggcaccgcacgcacacgaccatccttctctcctctcttcacctaccgattctgcgcgcatagaagaggcactccttcatcgtcagctgcctttcgcatgtcggcatgcatcttgcccgacaccacgctggcccgtggggtagtcgccgcacgccgagcaccggcaggctgcgcagccgtcgaccatgattttgccaagcgttgtaaagcgccatgtaggaaagaagatgcccagcgacgcgacacgaaataagcagcaaagcttcgattccaaatctcggtatggtacagatactcttataggagcaggccgagtttcacatgtgttagcagatgctactctaaaatcatcatctcccatctcgactaccacaaggtctcaagaacagtgtacatgtatttggttctgcagaatcagaggaagttcagtaagttgcaaagccacaagacagataatttgatccgcaggcactgcaagggaaagaacagaacaggatggatatccttttaccttatgacttacgactcaattgctgcaacccttactggcttcatcacccttacaatgttcctcatgagttcaaaccccatgagtatcatgcctatgagataaaggaagctcagttgcagcttcccaagcaagttatagaccgctgcggtagcgtctacgcctgcatctgttcgcaccatgacggtgatgggtctcgcagaaatgagcgccccggtttctgatg

SEQ ID NO: 136211 - DNA, 1108 bp, Zea Mays
tgtagtactaacgtttgatttctccaacttttcttgccaggcaaagtaagaaggcttatcttcttatcgatttctctgaccatctccaaataagtgtgtgagtataccaactctttgaccctctatctaatatatgacttaatgaagggactcatttggattttctttcagctacgtcctaggtgctgtttttcttcagctctgccaagttttgcaacttgcagaacatccagttgttcagaaacttgtagatcccagtcttttcatccatcgttttacaaaacttttgctgggattgggaagaagaaataatgatgtctcggacacagctttacgcattgtagctagcatgaagagagattggatgcaggcaggtgtttcctctttcttttgtccttcataacttttctttcacaaggctgtgattggctttactgccctgctctatgttccagactaggaggaagccaagcggattatgtggtgcagcattatacattgctgcactctctcatgggtgtaattacaccaaggcagatattgtctctgttgtgcatgtgtgtgaggccactctaacgaagcgattgatagagttcgaaaatacagattctggcagcttaacaattgaagaatttctggcaacagctgatgaatctaatgaagagcctgtttcaaaacattcgcccaagtctggagaaattatctgcaaacacaaggataaaggttttgagcattttgctcatggactttgtgaaaaatgctacaataagttcactaaactgtcgggtggactagaaggtggttctgtccctccagcattccaacgagctgaaaagaaaagacttgaagctgctaaaagggctgaagaagctgcagcagctaaggaggcagcgctggaagaatctctttgcgacacacagaattctgaggttgagagtgccatgactcctagaaagggtttaagtggagataaatcttcgaaaatgggatcagagggactcataaatgactctatgccacccaaggatcctgaagagggaggtttgttacttcctgaatcatcatgcactgcagtaatttcagttttcttcttttgaatccttgtttg

SEQ ID NO: 136212 - DNA, 1416 bp, Zea Mays
tttctttttatagacatgactgagtgatgatattatttgttccatgcctttttcgtcatcagtgttggtcaatgtaaaaactctgagtgtttatatcgtttcttgtctttttcaggacaagcctcagccgccacctgagggccgtcttcctgatgccaccaagggttctgaccacctgaggcaagtctttggcaagcagatgggtttgagtgatcaggacatcgttgccctctctggtggccacaccttgggaaggtgccacaaagagcggtctggttttgagggggcctggactacgaaccctttggtctttgacaactcttacttcaaggaacttctgagtggtgacaaggagggccttcttcagctcccaagtgacaaagccctgctgagcgaccctgtcttccgccctcttgtggagaaatatgctgcagatgagaaggcattctttgatgactacaaagaggcccacctcaagctctccgaactggggtatgctgatgcttaaatggcccatatcctggagcgggatacaaactgctgcctcatgctctctctcatgagacaaggggggcaggttgttgtgcttgcaagtatctgttgcagatgttgttcatgcctgtaacgtaccacaacatactgttgtgtttgatggtattatagtgctatgctggacatctcgcagtcaattcgttttgatgatgatgtggaggatggaaaaagtcatgaactcaaagtgtactctctggaccgtataagagctgttacaattaattttagtgactctaacaagcttggagaaggaggatttggtcctgtctatatgggaactttacctgggggagaagtagctgtgaagaggctttgtaggaattcaggtcaaggccttgaagaattcaagaatgaggtcatacttattgcaaagttctagcaccgcaatcttgtaagattactagggtgctgcatacatagggaagagaagatccaggtgtacgagtacatgcctagcaaaagtctagatgcattcctcttcaatcctgaaaagcaacggcttttagactgaagaaacagtttgatataatcgaaggcattgctagagggctgctatatctccaccgggattcgaggctgcgagttgttcaccgtgatctcaaggccagcaacattctcctggacgcggacatgaaacccaagatatcagattttggaatggcaaggatgtttggaggggaccaaaaccaattcaacacgaatcaggtcgtcggtatatttggctacatgtctactgaatacgcaatggaaggtattttctccgtcaagtctgacgtctatggcttcggagtcctgatcttaagcttccactgtcacgaggactccttgaacatcgctggatatgtaaacactggtggttactaa

SEQ ID NO: 136213 - DNA, 761 bp, Zea Mays
aggatccatcggttcgtgagagcgttgctccgtgtagctacaattaaggaaccgtcgccgccgcgcgcccctgccctcgccgccgcccggtctcgcctcgacgcctcccatagcgatctgcttactcttttaagccggtggccggagctccggcggccctctccctcaccggattcggcgccctcttcagaggattcggcgccctcttcagagccctcgctaacctgctcgaccgctccccaccgcccgcggtcatctcccacctcgcgcgaccgccgtcctctcttcacctgttggtcgcccctgtcctcgcgacgaagacgccgccgccaagctatcctctctatctctctatctatctatctatctcatcagattgatatcagctgatcatccctggctgtgtagttccatctgcaatggtttactgcactcattgcgctgattactgcccctccataaaggatcctgacaaaggatacatatgttgtggtacatgtgggaaggttcttgaccaggaggtatacactgatgagcctacttttgttaaggataacaaagggcagagtcgcttagctggaagtattcttgaaagcattgagtctggatattcaatgtctcgtcaaagaaccttagacaaaggtatggtttttagggcacatatttattttactttttgtggtactctgtaaactctttttttggctttattttaccagggagggatgagattaggcagattgtcaataacttacatatca

SEQ ID NO: 136214 - DNA, 875 bp, Zea Mays
ctacaattaaggaaccgtcgccgccgcgcgcccctgccctcgccgccgcccggtctcgcctcgacgcctcccatagcgatctgcttactcttttaagccggtggccggagctccggcggccctctccctcaccggattcggcgccctcttcagaggattcggcgccctcttcagagccctcgctaacctgctcgaccgctccccaccgcccgcggtcatctcccacctcgcgcgaccgccgtcctctcttcacctgttggtcgcccctgtcctcgcgacgaagacgccgccgccaagctatcctctctatctctctatctatctatctatctcatcagattgatatcagctgatcatccctggctgtgtagttccatctgcaatggtttactgcactcattgcgctgattactgcccctccataaaggatcctgacaaaggatacatatgttgtggtacatgtgggaaggttcttgaccaggaggtatacactgatgagcctacttttgttaaggataacaaagggcagagtcgcttagctggaagtattcttgaaagcattgagtctggatattcaatgtctcgtcaaagaaccttagacaaagggagggatgagattaggcagattgtcaataacttacatatcagcggtggagaaactatcgttagcaaggcatttcgcttctacgagctagctctcgaccgtaattttaccagggggcgtagaacaacacatgttgcagctgcttgcctttacattgcctgcaggcaaagtaagaaggcttatcttcttatcgatttctctgaccatctccaaataagtgtgtgagtataccaactctttgaccctctatctaatatatgacttaatgaag

SEQ ID NO: 136215 - DNA, 2436 bp, Zea Mays
ctacaattaaggaaccgtcgccgccgcgcgcccctgccctcgccgccgcccggtctcgcctcgacgcctcccatagcgatctgcttactcttttaagccggtggccggagctccggcggccctctccctcaccggattcggcgccctcttcagaggattcggcgccctcttcagagccctcgctaacctgctcgaccgctccccaccgcccgcggtcatctcccacctcgcgcgaccgccgtcctctcttcacctgttggtcgcccctgtcctcgcgacgaagacgccgccgccaagctatcctctctatctctctatctatctatctatctcatcagattgatatcagctgatcatccctggctgtgtagttccatctgcaatggtttactgcactcattgcgctgattactgcccctccataaaggatcctgacaaaggatacatatgttgtggtacatgtgggaaggttcttgaccaggaggtatacactgatgagcctacttttgttaaggataacaaagggcagagtcgcttagctggaagtattcttgaaagcattgagtctggatattcaatgtctcgtcaaagaaccttagacaaagggagggatgagattaggcagattgtcaataacttacatatcagcggtggagaaactatcgttagcaaggcatttcgcttctacgagctagctctcgaccgtaattttaccagggggcgtagaacaacacatgttgcagctgcttgcctttacattgcctgcaggcaaagtaagaaggcttatcttcttatcgatttctctgaccatctccaaataagtgtctacgtcctaggtgctgtttttcttcagctctgccaagttttgcaacttgcagaacatccagttgttcagaaacttgtagatcccagtcttttcatccatcgttttacaaaacttttgctgggaagaagaaataatgatgtctcggacacagctttacgcattgtagctagcatgaagagagattggatgcagactgggaggaagccaagcggattatgtggtgcagcattatacattgctgcactctctcatgggtgtaattacaccaaggcagatattgtctctgttgtgcatgtgtgtgaggccactctaacgaagcgattgatagagttcgaaaatacagattctggcagcttaacaattgaagaatttctggcaacagctgatgaatctaatgaagagcctgtttcaaaacattcgcccaagtctggagaaattctctgcaaacacaaggataaaggttttgagcattttgctcatggactttgtgaaaaatgctacaataagttcactaaactgtcgggtggactagaaggtggttctgaccctccagcattccaacgagctgaaaagaaaagacttgaagctgctaaaagggctgaagaagctgcagcagctaaggaggcagcgctggaagaatctctttgcgacacacagaattctgaggttgagagtgccatgactcctagaaagggtttaagtggagataaatcttcgaaaatgggatctgagggactcataaatgactctatgccacccaaggatcctgaagagggaggtgaaaattgtgaaggcaatgcagatccagaaagcctttctgacattgacgatgcagaggttgatgggtaccttcacaatgaggaagaaacacaatataaaaagattatctgggaggaaatgaacaaagagtaccttgaggaacaagcagccaaggaagctttggcagctgaattggcagctagagggattgatccagaagcgggaaagaaaaaacgaaaacgtaatgaaggcacgaagagctcgacacctgctgaaacaccagcagaagccacgtgcaacatgctgaaacggaagggacttggttcaaagatcaatgtgggagctgttgacgaattgtacaagactaaagatgaagttggcagcgcaaacaatgaagaagagatggagttcgacgcactgtttgggccggacaatgctgccggtgagacggtcgatgacggttacaattacaactatgggggatacgacgacgatggcgcagaaggctacaatggccttgatgacgatttcgatttctaggatgtaggagtagggcatttgcagaacggcaacgctgaccagcacgggcaagattcttcacgtgcacattatatatagttttttttggttaagtttcgacgattattatggagctcgattgggtagtcattgtatatttatgtttgaaactaggttctgcctggttgtagttgtaacggactaataagggcccgtttggtacagcttcagctcctgattctaagcgaggatctggaggagccgtgccaaacggatattttttaaactgattctcgtgtggagccgaaagattgagagtcgtttttgtgaag

SEQ ID NO: 136216 - DNA, 2022 bp, Zea Mays
aattgaagctcttgtgcttgtttgttaatatgaaaactgacatgtttgattatcagatgttgtggtacatgtgggaaggttcttgaccaggaggtatacactgatgagcctacttttgttaaggataacaaagggcagagtcgcttagctggaagtattcttgaaagcattgagtctggatattcaatgtctcgtcaaagaaccttagacaaagggagggatgagattaggcagattgtcaataacttacatatcagcggtggagaaactatcgttagcaaggcatttcgcttctacgagctagctctcgaccgtaattttaccagggggcgtagaacaacacatgttgcagctgcttgcctttacattgcctgcaggcaaagtaagaaggcttatcttcttatcgatttctctgaccatctccaaataagtgtctacgtcctaggtgctgtttttcttcagctctgccaagttttgcaacttgcagaacatccagttgttcagaaacttgtagatcccagtcttttcatccatcgttttacaaaacttttgctgggaagaagaaataatgatgtctcggacacagctttacgcattgtagctagcatgaagagagattggatgcagactgggaggaagccaagcggattatgtggtgcagcattatacattgctgcactctctcatgggtgtaattacaccaaggcagatattgtctctgttgtgcatgtgtgtgaggccactctaacgaagcgattgatagagttcgaaaatacagattctggcagcttaacaattgaagaatttctggcaacagctgatgaatctaatgaagagcctgtttcaaaacattcgcccaagtctggagaaattctctgcaaacacaaggataaaggttttgagcattttgctcatggactttgtgaaaaatgctacaataagttcactaaactgtcgggtggactagaaggtggttctgaccctccagcattccaacgagctgaaaagaaaagacttgaagctgctaaaagggctgaagaagctgcagcagctaaggaggcagcgctggaagaatctctttgcgacacacagaattctgaggttgagagtgccatgactcctagaaagggtttaagtggagataaatcttcgaaaatgggatctgagggactcataaatgactctatgccacccaaggatcctgaagagggaggtgaaaattgtgaaggcaatgcagatccagaaagcctttctgacattgacgatgcagaggttgatgggtaccttcacaatgaggaagaaacacaatataaaaagattatctgggaggaaatgaacaaagagtaccttgaggaacaagcagccaaggaagctttggcagctgaattggcagctagagggattgatccagaagcgggaaagaaaaaacgaaaacgtaatgaaggcacgaagagctcgacacctgctgaaacaccagcagaagccacgtgcaacatgctgaaacggaagggacttggttcaaagatcaatgtgggagctgttgacgaattgtacaagactaaagatgaagttggcagcgcaaacaatgaagaagagatggagttcgacgcactgtttgggccggacaatgctgccggtgagacggtcgatgacggttacaattacaactatgggggatacgacgacgatggcgcagaaggctacaatggccttgatgacgatttcgatttctaggatgtaggagtagggcatttgcagaacggcaacgctgaccagcacgggcaagattcttcacgtgcacattatatatagttttttttggttaagtttcgacgattattatggagctcgattgggtagtcattgtatatttatgtttgaaactaggttctgcctggttgtagttgtaacggactaataagggcccgtttggtacagcttcagctcctgattctaagcgaggatctggaggagccgtgccaaacggatattttttaaactgattctcgtgtggagccgaaa

SEQ ID NO: 136217 - DNA, 95 bp, Zea Mays
tatctactcgagacagtctaaagggtattgtgcattcacctcaaaagattgcaagtggtgatgtagcattgccgtctctctcacacacaaaaaga

SEQ ID NO: 136218 - DNA, 1087 bp, Zea Mays
atcatcagtagctagctgttcgaagctttcagccgatcgagcaccatcgtcacagtcagtagtagccaagcatatttctttctccgagtgatttgcgctgagcgatcagttcatccagagcgagcggagctgagctgagctgagcgagcttgcgttgcttgagagaccctgctgccatggcttcccaccaggacaaggctagctaccaggccggcgagaccaaggcccgcaccgaggagaagaccgggcaggcggtgggggcgaccaaggacacggcgcagcacgccaaggaccgggcggcggacgcggcggggcacgcggcgggcaagggccaggacgccaaggaggccaccaagcagaaggcgtccgacaccggcagctacctgggcaagaagaccgacgaggccaagcacaaggccggcgagacgacggaggccaccaagcagaaggccggcgagacgacggaggccgccaagcagaaggcagccgacgccatggaggccgccaagcagaaggccgccgaggccgggcagtacgccaaggacaccgctgtctccggcaaggacaagtccggcggcgtcatccagcaggccactgagcaggtgaagagcgcggcggcgggcgccaaggacgcggtgatgagcacgctggggatgggcggggacgacaagcagggcgacgccaacaccaacaaggactcctctaccatcaccagggatcactagacgcgtgtatgcacacgcacttggtccgatcctgtcgtccgtgaccctgtttgcttgttcgcgagtccagtatgggtttgtgcacgttttcagtgtcatggtttccttctctacgaaatttggtgttgtaagtttgattcgcaggtacgttgctgtgttttttctgcgtcatcatgtctgtaaacgagtcgggcgggtttgagtgtcctttgttgtgataataaagttggtaaatcgtaattaatatatagcatgcgactgtcttgctatggcctagtatgtgtgttttgtagttttcatcagtgtgtgttgtgttagatataatcttaactttcgaagacaagtacgggacccaaaaaaaa

SEQ ID NO: 136219 - DNA, 707 bp, Zea Mays
gcgacgcgaagagggcagcagcaagcagccgttcccccaaaaaaggccagagctcagcagagccccgcaggccgcacccaccagaaaccccagtcgatcggcggcggcgatgtcgctgtcctcggtgaagatcggcgaggaggtttggctcacatgcctctcccacgccctcactaccgagaccgaggaggtcatgggcctcctcctcggcgacatcgagctttccagcaagggcgccaccgcccttatatggggagcgtctccgcagatgaggtgcgagcggaagaaggaccgcgtcgaggtcaacccggagcttctcgccgccgcatccgcgcaagccgagaaaatgacggccaccatcaagaagactacgagggtgatcggatggtaccactcgcacccacatatcactgttctgccgtcccatgtaggtaaaaaattcacatttcctccatcggtgaatcattttgtgcccagggttgcacatttgcttcaactagctcaagtggcctgtggccccggtttgatgttggcgtttgcttgtctcacagaatagcggtaatgctgtcaaatatgtgtctgttcgatattcacagactacctcaagtgatttatcccttactagatcccaacttatgttcacttgccatttctgataatggatatcaagtatgataactgtcatagcactaagtactaagtagctt

SEQ ID NO: 136220 - DNA, 1208 bp, Zea Mays
gcgacgcgaagagggcagcagcaagcagccgttcccccaaaaaaggccagagctcagcagagccccgcaggccgcacccaccagaaaccccagtcgatcggcggcggcgatgtcgctgtcctcggtgaagatcggcgaggaggtttggctcacatgcctctcccacgccctcactaccgagaccgaggaggtcatgggcctcctcctcggcgacatcgagctttccagcaagggcgccaccgcccttatatggggagcgtctccgcagatgaggtgcgagcggaagaaggaccgcgtcgaggtcaacccggagcttctcgccgccgcatccgcgcaagccgagaaaatgacggccaccatcaagaagactacgagggtgatcggatggtaccactcgcacccacatatcactgttctgccgtcccatgtagatgttcgtacccaagcgatgtttcagttgctggatacaggctttgtgggccttatattttcttgttttagtgaagatgctcaaaaggttggaaaaatccaagtgactgcctttcagtcagagggtggacaacagcatgcccttcctcttgccattgctccagttattgaccttgattcatcccttagttcatcagataatgcactcacttcacattctgcattggttgaaggcatggaacaggacacaggggattccagggcctcaaagcataacaaggcacctttagaagtggagtgtcagattgcagtcgaaaagtgggcttcattacttccaactagcgaaagggcctctaactgagttggttaggtggtttgaatagtactcctcaggaattcgactaggtttaaaaaatcctctcatttgtcccacactcccatgtcaaagcacaggtgtgaggcccgaccctagtcgtggttgttattacacgggctactgtaccgttgtgtatgagtgtggtaggggttttcttttttttcctcgaacacacaggagggttgcatatctttatattaaaagaagataaacaagagggggttggaatgcccgagtacaacccactcaacacccacactagctagactagagttatatttgcgcctgagcacagaaaggataacggctgatgaaagccaacctatctatcaggttctagggctaacaagagggaaattcctcgagccccggccaacgaaccacaaaaaagcctcatcagcaa

SEQ ID NO: 136221 - DNA, 1871 bp, Zea Mays
gcgacgcgaagagggcagcagcaagcagccgttcccccaaaaaaggccagagctcagcagagccccgcaggccgcacccaccagaaaccccagtcgatcggcggcggcgatgtcgctgtcctcggtgaagatcggcgaggaggtttggctcacatgcctctcccacgccctcactaccgagaccgaggaggtcatgggcctcctcctcggcgacatcgagctttccagcaagggcgccaccgcccttatatggggagcgtctccgcagatgaggtgcgagcggaagaaggaccgcgtcgaggtcaacccggagcttctcgccgccgcatccgcgcaagccgagaaaatgacggccaccatcaagaagactacgagggtgatcggatggtaccactcgcacccacatatcactgttctgccgtcccatgtagatgttcgtacccaagcgatgtttcagttgctggatacaggctttgtgggccttatattttcttgttttagtgaagatgctcaaaaggttggaaaaatccaagtgactgcctttcagtcagagggtggacaacagcatgcccttcctcttgccattgctccagttattgaccttgattcatcccttagttcatcagataatgcactcacttcacattctgcattggttgaaggcatggaacaggacacaggggattccagggcctcaaagcataacaaggcctggaaaagatctttggatttctactctcatcctgacacaaatcattccacgaattatcaacccaatgaaaacactctcgctctgtacaatcctgataacacacaagaagcgcctgttgatccatacgattcagatatgactcaaagcctccaggaggctttgcaccggtcaactatggacataagtggtgcagagtatagagggaaggaggtgccactttttgtgctcccgacaaggtatctcctcaagctggacaccacgatgacctcgtactgtgatatgcaacgagtcctgtttgaagaggagcaatcagcatataatcaagctatgcaacaaaatatttgtgatgggaaaattcaccctcttacatccattcactgtacgtctacatacaactcctctctatgcaaactaatggagtattgtttgagtccagctgttattacgcttcaggaccgcctgaaggaaaatgaacttcggctatctatgttaaaagaggagtgtaagcaactggaggctgatacccaaggcatgagaaatggttctcctcgtcgcctcatgaatcacggagctggtggcagcggttcacctatggctcagagcaggcatcctttctccagccaagggagccctagaagcccgagcggcggcagccggaggagggcttgatgatgatcttgctccgcctgatgcgttgatgaactgtccgttgtggcttaaccagatgcttcctgaaaacccagatatttgacggacgaagtgcccccagacaacagacactgtacctgtacatacccattgccgttcagcgctgtgctattgtggaactccaacggtctcattgtgctttttttttgtagtattgggggggttccttatcctgttgccggagctgtgccattatcctttccatggttcatggttggcatgagcttttatagcctgtacactgtagactctgtactagaggttttccagaaaggctgaactgccgctgctgggatgtgttgttccgggcatattcaaagatgaaggctttctttgcttttgtaattgaaaaaaaaacccgacttcggtagcaatacattttcttgaaatgctataactctaagctacagccacagtgccacaccttgcctggatagtgccatagctgttt

SEQ ID NO: 136222 - DNA, 1667 bp, Zea Mays
atggcggggctgcagcggtccagcgagacgttccggcggtcgggctcgtcagggcttgtgtgggacgacaacaagagcttctcgggggagatcaagccggcggaggaggacggcggcgcgggcgcggcgcgggcggtggagcgcagccgctccaccgggcacgcgcacgccgggtacagggccacggggcgcgtgccgcccgcgctcgacccgccgtcgccgcgcgtcgccgtgtcggcgcgcgcaacaatggccaaggccgtgccctcgccgctcgcggccgtggccgtgttggcgctgctcctcctgtgccgcggcgccgaggcccgcgtcctcctcacgctcgacgacttcggcggcgtcggcgacggcattgccaacgacacccaggctctcctggacgcgtgggccgccgcgtgcagctccacccaggaggccgtcctcgccgtgccggccgggaaggtctaccagatctggccggtgcagctctccgggccctgcaagaagaggctcaagctgctgatttccggcgcgatcgtggcgccgtcgagccccgacgagtgggccgggcgggaccccatgaagtggctctacgtctacggcgtcgacggcctgtccgtcagcggcggcggcaccatcgacggcatggggcagcagtggtgggccagcacctgcaagcgcaagaagacccagccgtgctactcggggcctcgtccaaaggcggtgcacttcgaggagtgccgggaggtgagcgtgcagggcgtgacgctgcagaacgcgcagcagttccagctgacgttcacgcgctgctcctgcgtgaaggccagcttcctccgggtggtggcgccggcggacagccccaacaccgacggcatccacctcaacgacacctcccacgtccgcatcacggacaacctcatctccacaggggacgactgcgtctccatggtcggcaattgctctgacgtccgtgtgaaagacatctcatgtgggcctggccatggcatcagcatcggaagccttggaaagaaccggaccaccgacatggtggaggacgtgaaggtcgacacctgcttgctcaccaacacgaccaacggcgtccgtatcaagagctggcagggaggcacgggcttcgcgcgggacctgcggttcgagaacatcgtgatgaggaacgtctccaaccccatcatcatcgaccagtactactgcgaccagcccacgccctgcgccaaccagacgcaggcggtggaggtgcgcagggtggagttcgcgggcatccggggcacgtcggcgacgccgcaggcgatcagcatcgcgtgcagcgacgccgtgccgtgccgggacctggagctggcgaacgtcaacctgacgctggagggcggtggtgccggccgagccaccgccctctgctaccgggcgtcggggaagagcgccggcaccgtggtcccgccgtcctgcctcgccaggtcctgactgagactcacctagcgaagcagtggccgaagcgcgtatacacccacatgctgcatggctgtcgattggagctgttgccatacccaaacaaaaccaacctgttgattgtacacgccgttgttgacgacaaggaaacacagagaagaaatatcggagcttcttacctgcaaaatgtcgttcgcacttaaaaaagg

SEQ ID NO: 136223 - DNA, 1694 bp, Zea Mays
ggcaaatctcgtgtccgtcgcgcgtcactcaccagcttagcttcctccgggtccggggaaaggcagacgcagagccgccggcacagcacagaggccgcgcgcacatgcatgctacccgctaggtgtcgtactgctactactactgctgccacagtgcaccacctacttcttccagcagcacacgctggcgcctactagtacttctcccgtcctcccctctcctctcatcaacctctgctgacctccccgacccccgaggccgttcgttcggtgcctgcactgcgcagcagcgccggctgctggagctggtcggcgcgcgcaacaatggccaaggccgtgccctcgccgctcgcggccgtggccgtgttggcgctgctcctcctgtgccgcggcgccgaggcccgcgtcctcctcacgctcgacgacttcggcggcgtcggcgacggcattgccaacgacacccaggctctcctggacgcgtgggccgccgcgtgcagctccacccaggaggccgtcctcgccgtgccggccgggaaggtctaccagatctggccggtgcagctctccgggccctgcaagaagaggctcaagctgctgatttccggcgcgatcgtggcgccgtcgagccccgacgagtgggccgggcgggaccccatgaagtggctctacgtctacggcgtcgacggcctgtccgtcagcggcggcggcaccatcgacggcatggggcagcagtggtgggccagcacctgcaagcgcaagaagacccagccgtgctactcggggcctcgtccaaaggcggtgcacttcgaggagtgccgggaggccagcttcctccgggtggtggcgccggcggacagccccaacaccgacggcatccacctcaacgacacctcccacgtccgcatcacggacaacctcatctccacaggggacgactgcgtctccatggtcggcaattgctctgacgtccgtgtgaaagacatctcatgtgggcctggccatggcatcagcatcggaagccttggaaagaaccggaccaccgacatggtggaggacgtgaaggtcgacacctgcttgctcaccaacacgaccaacggcgtccgtatcaagagctggcagggaggcacgggcttcgcgcgggacctgcggttcgagaacatcgtgatgaggaacgtctccaaccccatcatcatcgaccagtactactgcgaccagcccacgccctgcgccaaccagacgcaggcggtggaggtgcgcagggtggagttcgcgggcatccggggcacgtcggcgacgccgcaggcgatcagcatcgcgtgcagcgacgccgtgccgtgccgggacctggagctggcgaacgtcaacctgacgctggagggcggtggtgccggccgagccaccgccctctgctaccgggcgtcggggaagagcgccggcaccgtggtcccgccgtcctgcctcgccaggtcctgactgagactcacctagcgaagcagtggccgaagcgcgtatacacccacatgctgcatggctgtcgattggagctgttgccatacccaaacaaaaccaacctgttgattgtacacgccgttgttgacgacaaggaaacacagagaagaaatatcggagcttcttacctgcaaaatgtcgttcgcacttaaaaaaggttcggattaaaaaaacacaacttgatt

SEQ ID NO: 136224 - DNA, 1617 bp, Zea Mays
tcgtactgctactactactgctgccacagtgcaccacctacttcttccagcagcacacgctggcgcctactagtacttctcccgtcctcccctctcctctcatcaacctctgctgacctccccgacccccgaggccgttcgttcggtgcctgcactgcgcagcagcgccggctgctggagctggtcggcgcgcgcaacaatggccaaggccgtgccctcgccgctcgcggccgtggccgtgttggcgctgctcctcctgtgccgcggcgccgaggcccgcgtcctcctcacgctcgacgacttcggcggcgtcggcgacggcattgccaacgacacccaggctctcctggacgcgtgggccgccgcgtgcagctccacccaggaggccgtcctcgccgtgccggccgggaaggtctaccagatctggccggtgcagctctccgggccctgcaagaagaggctcaagctgctgatttccggcgcgatcgtggcgccgtcgagccccgacgagtgggccgggcgggaccccatgaagtggctctacgtctacggcgtcgacggcctgtccgtcagcggcggcggcaccatcgacggcatggggcagcagtggtgggccagcacctgcaagcgcaagaagacccagccgtgctactcggggcctcgtccaaaggcggtgcacttcgaggagtgccgggaggtgagcgtgcagggcgtgacgctgcagaacgcgcagcagttccagctgacgttcacgcgctgctcctgcgtgaaggccagcttcctccgggtggtggcgccggcggacagccccaacaccgacggcatccacctcaacgacacctcccacgtccgcatcacggacaacctcatctccacaggggacgactgcgtctccatggtcggcaattgctctgacgtccgtgtgaaagacatctcatgtgggcctggccatggcatcagcatcggaagccttggaaagaaccggaccaccgacatggtggaggacgtgaaggtcgacacctgcttgctcaccaacacgaccaacggcgtccgtatcaagagctggcagggaggcacgggcttcgcgcgggacctgcggttcgagaacatcgtgatgaggaacgtctccaaccccatcatcatcgaccagtactactgcgaccagcccacgccctgcgccaaccagacgcaggcggtggaggtgcgcagggtggagttcgcgggcatccggggcacgtcggcgacgccgcaggcgatcagcatcgcgtgcagcgacgccgtgccgtgccgggacctggagctggcgaacgtcaacctgacgctggagggcggtggtgccggccgagccaccgccctctgctaccgggcgtcggggaagagcgccggcaccgtggtcccgccgtcctgcctcgccaggtcctgactgagactcacctagcgaagcagtggccgaagcgcgtatacacccacatgctgcatggctgtcgattggagctgttgccatacccaaacaaaaccaacctgttgattgtacacgccgttgttgacgacaaggaaacacagagaagaaatatcggagcttcttacctgcaaaatgtcgttcgcacttaaaaaagg

SEQ ID NO: 136225 - DNA, 1720 bp, Zea Mays
tcgtactgctactactactgctgccacagtgcaccacctacttcttccagcagcacacgctggcgcctactagtacttctcccgtcctcccctctcctctcatcaacctctgctgacctccccgacccccgaggccgttcgttcggtgcctgcactgcgcagcagcgccggctgctggagctggtcggcgcgcgcaacaatggccaaggccgtgccctcgccgctcgcggccgtggccgtgttggcgctgctcctcctgtgccgcggcgccgaggcccgcgtcctcctcacgctcgacgacttcggcggcgtcggcgacggcattgccaacgacacccaggctctcctggacgcgtgggccgccgcgtgcagctccacccaggaggccgtcctcgccgtgccggccgggaaggtctaccagatctggccggtgcagctctccgggccctgcaagaagaggctcaagctgctgatttccggcgcgatcgtggcgccgtcgagccccgacgagtgggccgggcgggaccccatgaagtggctctacgtctacggcgtcgacggcctgtccgtcagcggcggcggcaccatcgacggcatggggcagcagtggtgggccagcacctgcaagcgcaagaagacccagccgtgctactcggggcctcgtccaaaggtgaacgaacgctctgctcctctttgtctcagctggttgatcgccgacggtggatgcgatccatccttattccgtcttttgcgttgcattgcatggcatgcaggcggtgcacttcgaggagtgccgggaggtgagcgtgcagggcgtgacgctgcagaacgcgcagcagttccagctgacgttcacgcgctgctcctgcgtgaaggccagcttcctccgggtggtggcgccggcggacagccccaacaccgacggcatccacctcaacgacacctcccacgtccgcatcacggacaacctcatctccacaggggacgactgcgtctccatggtcggcaattgctctgacgtccgtgtgaaagacatctcatgtgggcctggccatggcatcagcatcggaagccttggaaagaaccggaccaccgacatggtggaggacgtgaaggtcgacacctgcttgctcaccaacacgaccaacggcgtccgtatcaagagctggcagggaggcacgggcttcgcgcgggacctgcggttcgagaacatcgtgatgaggaacgtctccaaccccatcatcatcgaccagtactactgcgaccagcccacgccctgcgccaaccagacgcaggcggtggaggtgcgcagggtggagttcgcgggcatccggggcacgtcggcgacgccgcaggcgatcagcatcgcgtgcagcgacgccgtgccgtgccgggacctggagctggcgaacgtcaacctgacgctggagggcggtggtgccggccgagccaccgccctctgctaccgggcgtcggggaagagcgccggcaccgtggtcccgccgtcctgcctcgccaggtcctgactgagactcacctagcgaagcagtggccgaagcgcgtatacacccacatgctgcatggctgtcgattggagctgttgccatacccaaacaaaaccaacctgttgattgtacacgccgttgttgacgacaaggaaacacagagaagaaatatcggagcttcttacctgcaaaatgtcgttcgcacttaaaaaagg

SEQ ID NO: 136226 - DNA, 1703 bp, Zea Mays
tcgtactgctactactactgctgccacagtgcaccacctacttcttccagcagcacacgctggcgcctactagtacttctcccgtcctcccctctcctctcatcaacctctgctgacctccccgacccccgaggccgttcgttcggtgcctgcactgcgcagcagcgccggctgctggagctggtcggcgcgcgcaacaatggccaaggccgtgccctcgccgctcgcggccgtggccgtgttggcgctgctcctcctgtgccgcggcgccgaggcccgcgtcctcctcacgctcgacgacttcggcggcgtcggcgacggcattgccaacgacacccaggctctcctggacgcgtgggccgccgcgtgcagctccacccaggaggccgtcctcgccgtgccggccgggaaggtctaccagatctggccggtgcagctctccgggccctgcaagaagaggctcaagctgctgatttccggcgcgatcgtggcgccgtcgagccccgacgagtgggccgggcgggaccccatgaagtggctctacgtctacggcgtcgacggcctgtccgtcagcggcggcggcaccatcgacggcatggggcagcagtggtgggccagcacctgcaagcgcaagaagacccaggtaagtaacaaccaaccacctaacccgtctgagcctgcaccttttcgcaatgaaagccgcctccctgaagtctcctactcttgcagccgtgctactcggggcctcgtccaaaggcggtgcacttcgaggagtgccgggaggtgagcgtgcagggcgtgacgctgcagaacgcgcagcagttccagctgacgttcacgcgctgctcctgcgtgaaggccagcttcctccgggtggtggcgccggcggacagccccaacaccgacggcatccacctcaacgacacctcccacgtccgcatcacggacaacctcatctccacaggggacgactgcgtctccatggtcggcaattgctctgacgtccgtgtgaaagacatctcatgtgggcctggccatggcatcagcatcggaagccttggaaagaaccggaccaccgacatggtggaggacgtgaaggtcgacacctgcttgctcaccaacacgaccaacggcgtccgtatcaagagctggcagggaggcacgggcttcgcgcgggacctgcggttcgagaacatcgtgatgaggaacgtctccaaccccatcatcatcgaccagtactactgcgaccagcccacgccctgcgccaaccagacgcaggcggtggaggtgcgcagggtggagttcgcgggcatccggggcacgtcggcgacgccgcaggcgatcagcatcgcgtgcagcgacgccgtgccgtgccgggacctggagctggcgaacgtcaacctgacgctggagggcggtggtgccggccgagccaccgccctctgctaccgggcgtcggggaagagcgccggcaccgtggtcccgccgtcctgcctcgccaggtcctgactgagactcacctagcgaagcagtggccgaagcgcgtatacacccacatgctgcatggctgtcgattggagctgttgccatacccaaacaaaaccaacctgttgattgtacacgccgttgttgacgacaaggaaacacagagaagaaatatcggagcttcttacctgcaaaatgtcgttcgcacttaaaaaagg

SEQ ID NO: 136227 - DNA, 1557 bp, Zea Mays
ctgctctgctgctgcaactgcaagcgcggaatctgttcgatgatggcgcggggcgccgtgctgctcctgctcgcggccgccttcgccgcggcgctcctgccggacgccgcggaatcccgcatcctcctcacgctccacgacttcggcgccgtcggcgacggcgtcgcggacgacaccaaggccttggccggcgcgtggacggccgcgtgcgccgccgcggacgacgtcatcctcaacgtgcccgccggcgggacattccggatctggccgctcacgctcgccggaccctgcaggagcgagatcaagctgctcatttccggggacatcgtcgcgccggaaagcccccaggactgggggcaaggccagagcgaccagtggctccacttccacaaggttcgggacctcacggtcaccggcgggggcatcatcgacggcagagggcagcagtggtgggcgcagtcgcttgcgcgcgcgcagcccgctcccaaggctgttcacttcgaggactgccaggggatcagcgtgaagggcatcaccttgcagaacagccagtcgtaccacctgacgttcacccggagctccgacgtcgaggccaattacctcagggtgacctcgccggagcacagcgtcgacaccaagggcattcacctcgttgactcgtacaatgttcacgtcatggataacctcatctccacaggtgatgactgcgtctccatagtgggcaactgcacggatgtccgtctaagagccatctcatgcggacctggccatggtatcagcatcggaaccttaggagtaaacagctccgtcgattacgtggagaagatcaaagtcgacaccttgttcatctcaaacgccgagaacggcgtgcgcgtgaggaccaccgagaacggcggcggcggcggcttcgctcgcaaggtgaagttcgagagcatcgtcatgaggaacgtcaccaaccccatcatcgtcgaccaggggatctcctctgacgatccgccaccttcatcgcctgaagcagtagcactggccgcgacggcgtcggcggcagtgcaggtggagaagatcaactacatcgacatcacgggcacgtcggcgtcggagcgcgcggtcacgttctcgtgcagcgacgcccggccgtgcaggcgcctgtcgctcgacaacgtgaacctgacccaggtggacgggagcgaggcgtcgtcctactgccgccaggcgttcgggaggagcgtcggcaccgttgtcccggagtcctgcctctccaaggaggacttcgtccaccacgtcccgccgcagcgttctgaggaagacggagaagactcagaatcgtgaatctgtggcggttcctgcttggctctggccagattagttttgtcaagggatctctgatactactagttgcttcggatttttgttggaactataggtgttgttggggcttttcccctaggcctagtcctctagtgcagtgcagatctgtctgtgtgaactgaagaaccatgttgctgcccaactttggtttccagtattcctaaacgtttccagcctttctgtgactaa

SEQ ID NO: 136228 - DNA, 1504 bp, Zea Mays
catcagcctgtacattctctctctcctctctcggccttcttcgcgtgtttccctctttttcttaggccgccctctacacttctcgacataaccatcgagagggcggtcgagagaaacgagagcggcagacaccatggggagctcgaggaccatcgttgcgtcccccctgctcctcctcgccctcctcctcctggctttcgcggccaccgccgaggcccgcgttgtccccgagctgtttggcgaggaccaattccagcggacatgcaaccaggtgcacttcaggaagatgtgccagagcttgacgaggctcccgagggtgacaacgccgcgcgaactgctgctagcgtcgatgcgcgtcgcggcggagaaggccagggaggccaagagccgggtggacgagttcgcggcgaggaaccacgagggccggccgatggagtccatcctcggagcctgcagcaacgggtacgacaacgttgtgcagacgctcgaggaggcgcggaagatcgtcgccacgcggccggcggcgggcacccaggcccaggccgacgacatgaacacgaagctgtcggccgccgtcacgagcgccagcgactgcgacaacgccttcgccgacttcccggcgattaggtccccattcttgcccatgcagcggaacgtctaccgcctcgtcgacaacgtcctcaacatcttcgtcgtcgtcaaccagccggagcacgcgcacaagcacgggcactagccgcgtgcgcgctggccggcctgccagttgtaagagccgggatggtgttgtatcgatctcctttctgcacttgaatatatatgtgaacaaggcttgagaaaaatctgtattgctagttgtagtgtaacttgatcaggttactgctaacacggaatttcaggtttagcttcttgttcttggtttcaaaaaaaaaatgtgtgtctcgccaaaagtacgacttcactttttggcagccggatgttagctgttgaaaattaactcatttttaattgctggtaacatacacctaagggggtgtttggaaacaaattttttctgctgttattatatattttgaggtggttgataactcatcttaaatctatgtatactactccgtactcgatactcatctgaaactatagtattgttaatactgcacttgttttgcagttttggaaccaaaatttctcccaaacatcatgatgtattggatactttgtaatcgaaaactgaagtattgtaaataatagtaatatcatgataaaagtatgctacaatatttgaaaaactgcagttttaaaaaccgtgttcctaaatagagcctaagggcctttttggaaatacagttttgaaatattgtagttttgagataccataatttacaattgtacatgacataaatactacgttattattttaccacagtaaaacaacagtattgttcaaaaccgaggcctatttggttccattgaaaaataaagtatatatagagagaagagaagaaaa

SEQ ID NO: 136229 - DNA, 86 bp, Zea Mays
ggagaatcagatcaattattacactatcttgtgaccacgcaaatgtcctacttaaaattcaattataacattataagaccatccaa

SEQ ID NO: 136230 - DNA, 1647 bp, Zea Mays
aataaaaaagaaaaacagaaaataagcacatcctcctccatcaccaaattgacgattatatcgaaaatctggacggcggcggactcgattgtagcagcagccgccgggaacaagatggcggcggcgttgtcgcagctggacgacgagatcgtccgcggcatggccatcggcgctgtcttcaccgactatgccgggaagataaactgcctcgacttccaccgcaaggaagatctcctcgtcacttccagcgaggacgactccatccgcatgtacaacatcaccagcgcgacgttgttaaagactacatatcacaggaaacatggtgctgaccgtgtctgttttagtcatcatccaagttctatcttatgctcttcacgatacaacctagagtctgcagaatcacttcgttatctgtcattgtatgacaaccgttgcttaagatacttcaaaggacacaaagacagggtcgtttcattatgtatgtcgcctgtcaatgatagctttatgtcaggatcacttgatcacagtgtcagaatatgggatcttcgcgtaaatgcttgtcagggcatactaaggctgcgtggtagaccttctgtcgcatatgatcagcagggacttgtttttgctgtagcaatggaaggaggtgctattaagttatttgattcccggtcatatgacaagggtccatttgacactttcttggttggtggagatacagctgaagtttctgacatcaaatttagcaacgatggcaagtctatgcttttgacaacaactaacaaccatatatatgttctggatgcatatggaggggataagttgagtcatattatcttacccattttctttgcttcagatacccatccttgtggtgcacattttctgatgttacatccttttgctaatatctcaacgtaatttgcagaggtgtggctttagtttagagccatctcccaatgtaacaaatgaagctgctttcactccagatggtcaatatgtaatttcaggatcaggtgatggaaccctgcacgcttggaacatcaatacagtacaagagattgcttgttggaacagtcacattggtccgattacagcattgaagtgggcccctcgtcgagcgatgtttgcaactgcatcaactgccctaactttctggattcccaaccaatcgaattaggatcaggtgcatggagaaagaagggatgtgacttcatgtatgttaacgtagcaaatgttcatatcttgttcttttgtccaaaagatagatgccatgtatgaaatcacttcattaccatctacggaaacattgacatgtttccaggcagatacttgttgtagtgctcccttatttatatgtactatactaatacacctgcctgttaaattgttgtaacatagttctaggcagatacttgtagtgcctccttccttattttattttatgtacacttgcctgttaaattatcgtgttcttgaaagaccggggggtgttcggtttgaggaatcaaactattcaaaatgaggtggtgcattatggatccattattcaaatttagtgggatgaccacatttctaatattagtactaactatgaagaatgaggtgataatgaatcaaattatttcattctaaaaaccaaacaaaaaa

SEQ ID NO: 136231 - DNA, 91 bp, Zea Mays
aggatgttctctacatcgtcatacttgtccaaattctcgccagagagcagaagggcacatgcaacctttgataaagcagcatatcagtaac

SEQ ID NO: 136232 - DNA, 1121 bp, Zea Mays
ccacgcccatacacagagctagccacaagcagacaccgatcgccattgcaagtggcagcagcgggtcgatcgacgacgacgttgcccacccagtctcttaatttgtcgccgtcgtcgtcggggcaggcagatcgtcgagagctagctagctgctagcgcgggagggagggagagggagaatgggacggctctcctgcggcggcggtggcggcggcggcgtgcagcccaagctccgcaaggggctctggtcgcccgaggaagacgagaagctgtacaatcacatcatccgacacggcgtcggctgctggagcactgtccccaagctcgcagggctgcagcgctgcggcaagagctgccgcctgcggtggatcaactacctccgccccgacctcaagcgcggcagcttctcgcagcaggaggaggacctcatcgtcgcgctccacgagatcctggggaacaggtggtcgcagatcgcgtcgcacttgccggggcggacggacaacgagatcaagaacttctggaacagctgcctgaagaagaagctccggcagcgcggcatcgacccggccacgcacaagccagtcgccgcggcggaggcgagcgcggcgctgccggacgctcgagaccacgaccgtgagcccggaggagccggcgccggcgccgacgccgacggcctggcgcagcagagcaagcagccggcggcggccgtgttcgacccgttccctgtggtcgacttcggcttcgacctgagcggcggcggcggcgtggcggcattgtacggcggcccgtacgacgccgccgccggcaaggcgtcggcggacgacggcgggttcgtggccgactacagcagcgtgctggacgtgtcggagaacctgggatacggggagagctccagcaacagcagcaactgggggaacggcgcggagatgggcaatgccgccgccgccgtgctcgacggcgaggtgctgcactgggccaagccggagccgtacacggagctggagcagcggagcgcggggcaagccgccgcggacgacgacgcgctgcatcataggttcttgctgccctgcggccaggagcagagcctggcgcatctcgacttcggcttggaatacttctga

SEQ ID NO: 136233 - DNA, 2286 bp, Zea Mays
tgcaccgggtccatgggccgagcatgcgcgcgtttgggcagctcgaccgttcggccggtacgagtgtatgaaccgggtccagagacatgaccggaacctctccttctcgcatcaccctcccggagtctgcccccacgcccacccattgaaaagcagagcggctgccgctctcctcctcctccttcctggacaaaatcatcagctcccgaaatccaaattgaaacagggacggattcctgtgccggcggacgggatgtcaggccctctcgaccgatttgctaggccatgctttgaagggtttgtacataacgatgaaaggaaagagagcagatctgatgcagacaactcagaaggagataagaagactaagattgggtctttcaagaaaaaagcaattaatgcggggaacaaattcaggcattccttgagaaggagaagcaaaaaaaagaccgaaaggggggattccatcaaggacataagggacgttaaagagcttcaagatgttgagacattccgacaatgcttaattgatgaggatttgctgccaccacagcacgatgattatcacatgatgttaaggttcctaaaagcacggaaatttgaagttgagaaagctaagagtatgtggtcagacatgatcaattggaggaaggaattcggagtcgacaaaatagaggaatttgactacaccgagttagatgaagtgacagagtattacccacaattttatcatggagtagataaagagggaagacctgtctacatagaattagtaggaaaagttgatgcaaacaagctaatacaagtgacaaccctagatcggtatgtaaaataccatgtcaaagaatttgagaagtgcttccagatgaaatttccagcttgcaccattgctgctaaaaagcacatagattcgtccactactattttggatgtgcaaggcgtgggtttcaagaacttctcgaaatctgccagagaattaatcacacgattacagaagatcgacagtgataactacccagagacactgtgccggatgtatataattaatgctggccaaggcttcaagatgttatggagcacaataaaatcattcctcgatccaaaaactgcttccaagatccatgttcttgggaataagtatcaacataagttgctcgaaataattgacgagtgtgaactgccagaatttcttggtggcaaatgcaattgtattgaaggttgccaaagatctgacaaaggtccttggaaggatcccaacataataaagagagtcctcaatgacgaggcaaactacggcagacaaattgtgaccatatccagcattgatggaaaaataatacgttatgctaggccagatcacccaactagaaaagggagtgatgcatctgccgagtctggatctgaagtggaagatgtaacatctcctactgcatcaaggaacctgattacacatcctattttgacccctgttcacgaagagtcaaaattgtcgccacatggttccacatttgttgctcatgcttctattgaagaaaacattcctgttgtagacaaggttgtggatgatggatggggtactcccagaggtagtctccaagcttcttcaggttcgttgccctcgagaaacacgcacggcacattcgaaggactgagagttcaagctgtcgcatggctgacgttcttgatcacggcccttttcgccacgctctgttccgtcccgagcaagatggccagaaggatctccagccagtctagcaagcacgacgactaccgcggcgagtatcctcaagaggaggaggagcacaaggaggagttccggcctccgtctcctgccccgtcctacacggagaaggacgtgctctcgtcgatgctgagacggctcggtgagctggagggcagggtgcaggtgctcgagacgaagccgtccgagatgccgtttgagaaggaggagctgctcaacgcagccgtccgccgcgtggacgcgctggaagccgagctgatctccacgaagaaggccctttacgatgctctgatgcgacaggatgagctgctcgcgtacattgacaggcaggagctgatcaagttccgtaaaaagaagttctgcttctaagatctgaccatggagcagctggtcatgtccggagccgttcgtgtatattgttggatcgcggctagtacggtgaatgatgtaatgtgtccatctgtacaagtgtgtaacggaacggtgtaagtatagtaggaaaacaatgtgttagctgtgcggtagcacttgtgtgctagcctaaa

SEQ ID NO: 136234 - DNA, 1238 bp, Zea Mays
ccgggtccagagacatgaccggaacctctccttctcgcatcaccctcccggagtctgcccccacgcccacccattgaaaagcagagcggctgccgctctcctcctcctccttcctggacaaaatcatcagctcccgaaatccaaattgaaacagttgcaggcgattctgagctcgggttttgttccggggacggattcctgtgccggcggacgggatgtcaggccctctcgaccgatttgctaggccatgctttgaagggtttgtacataacgatgaaaggaaagagagcagatctgatgcagacaactcagaaggagataagaagactaagattgggtctttcaagaaaaaagcaattaatgcggggaacaaattcaggcattccttgagaaggagaagcaaaaaaaagaccgaaaggggggattccatcaaggacataagggacgttaaagagcttcaagatgttgagacattccgacaatgcttaattgatgaggatttgctgccaccacagcacgatgattatcacatgatgttaaggttcctaaaagcacggaaatttgaagttgagaaagctaagagtatgtggtcagacatgatcaattggaggaaggaattcggagtcgacaaaatagaggaatttgactacaccgagttagatgaagtgacagagtattacccacaattttatcatggagtagataaagagggaagacctgtctacatagaattagtaggaaaagttgatgcaaacaagctaatacaagtgacaaccctagatcggtatgtaaaataccatgtcaaagaatttgagaagtgcttccagatgaaatttccagcttgcaccattgctgctaaaaagcacatagattcgtccactactattttggatgtgcaaggcgtgggtttcaagaacttctcgaaatctgccagagaattaatcacacgattacagaagatcgacagtgataactacccagagacactgtgccggatgtatataattaatgctggccaaggcttcaagatgttatggagcacaataaaatcattcctcgatccaaaaactgcttccaagatccatgttcttgggaataagtatcaacataagttgctcgaaataattgacgagtggttagtattttttttgtgtgccgtacatttatgttgtttattacttccattctaatttctgcttaatgcatgcatgcagtgaactgccagaatttcttggtgg

SEQ ID NO: 136235 - DNA, 2563 bp, Zea Mays
ccgggtccagagacatgaccggaacctctccttctcgcatcaccctcccggagtctgcccccacgcccacccattgaaaagcagagcggctgccgctctcctcctcctccttcctggacaaaatcatcagctcccgaaatccaaattgaaacagttgcaggcgattctgagctcgggttttgttccggggacggattcctgtgccggcggacgggatgtcaggccctctcgaccgatttgctaggccatgctttgaagggtttgtacataacgatgaaaggaaagagagcagatctgatgcagacaactcagaaggagataagaagactaagattgggtctttcaagaaaaaagcaattaatgcggggaacaaattcaggcattccttgagaaggagaagcaaaaaaaagaccgaaaggggggattccatcaaggacataagggacgttaaagagcttcaagatgttgagacattccgacaatgcttaattgatgaggatttgctgccaccacagcacgatgattatcacatgatgttaaggttcctaaaagcacggaaatttgaagttgagaaagctaagagtatgtggtcagacatgatcaattggaggaaggaattcggagtcgacaaaatagaggaatttgactacaccgagttagatgaagtgacagagtattacccacaattttatcatggagtagataaagagggaagacctgtctacatagaattagtaggaaaagttgatgcaaacaagctaatacaagtgacaaccctagatcggtatgtaaaataccatgtcaaagaatttgagaagtgcttccagatgaaatttccagcttgcaccattgctgctaaaaagcacatagattcgtccactactattttggatgtgcaaggcgtgggtttcaagaacttctcgaaatctgccagagaattaatcacacgattacagaagatcgacagtgataactacccagagacactgtgccggatgtatataattaatgctggccaaggcttcaagatgttatggagcacaataaaatcattcctcgatccaaaaactgcttccaagatccatgttcttgggaataagtatcaacataagttgctcgaaataattgacgagtgtgaactgccagaatttcttggtggcaaatgcaattgtattgaaggttgccaaagatctgacaaaggtccttggaaggatcccaacataataaagagagtcctcaatgacgaggcaaactacggcagacaaattgtgaccatatccagcattgatggaaaaataatacgttatgctaggccagatcacccaactagaaaagggagtgatgcatctgccgagtctggatctgaagtggaagatgtaacatctcctactgcatcaaggaacctgattacacatcctattttgacccctgttcacgaagagtcaaaattgtcgccacatggttccacatttgttgctcatgcttctattgaagaaaacattcctgttgtagacaaggttgtggatgatggatggggtactcccagaggtagtctccaagcttcttcaggttcgttgccctcgagaaacacgcacggcacattcgaaggactgagagttcaagctgtcgcatggctgacgttcttgatcacggcccttttcgccacgctctgttccgtcccgagcaagatggccagaaggatctccagccagtctagcaagcacgacgactaccgcggcgagtatcctcaagaggaggaggagcacaaggaggagttccggcctccgtctcctgccccgtcctacacggagaaggacgtgctctcgtcgatgctgagacggctcggtgagctggagggcagggtgcaggtgctcgagacgaagccgtccgagatgccgtttgagaaggaggagctgctcaacgcagccgtccgccgcgtggacgcgctggaagccgagctgatctccacgaagaaggccctttacgatgctctgatgcgacaggatgagctgctcgcgtacattgacaggcaggagctgatcaagttccgtgtacgttactgcactgttctcccgcccttctttcttactccatctttcgacatatataaataaatgtgtgtgctatcacgttcccactctctgaatgtctgatcattaacttgttgaccttgttcttaaggtaaagctactcactcactcccatctagtactgcaattgattcttgtccccccgtgtatgccttctgcagaaaaagaagttctgcttctaagatctgaccatggagcagctggtcatgtccggagccgttcgtgtatattgttggatcgcggctagtacggtgaatgatgtaatgtgtccatctgtacaagtgtgtaacggaacggtgtaagtatagtaggaaaacaatgtgttagctgtgcggtagcacttgtgtgctagcctaaattgtaatcttgcaagtcggtgcatagctgattgcgcaccaatacgtagttatgaatggaatcgcactcgtgttcgtataaaataaaataaattagcagcgccaaatgtttaaaaa

SEQ ID NO: 136236 - DNA, 2647 bp, Zea Mays
ccgggtccagagacatgaccggaacctctccttctcgcatcaccctcccggagtctgcccccacgcccacccattgaaaagcagagcggctgccgctctcctcctcctccttcctggacaaaatcatcagctcccgaaatccaaattgaaacagttgcaggcgattctgagctcgggttttgttccggggacggattcctgtgccggcggacgggatgtcaggccctctcgaccgatttgctaggccatgctttgaagggtttgtacataacgatgaaaggaaagagagcagatctgatgcagacaactcagaaggagataagaagactaagattgggtctttcaagaaaaaagcaattaatgcggggaacaaattcaggcattccttgagaaggagaagcaaaaaaaagaccgaaaggggggattccatcaaggacataagggacgttaaagagcttcaagatgttgagacattccgacaatgcttaattgatgaggatttgctgccaccacagcacgatgattatcacatgatgttaaggttcctaaaagcacggaaatttgaagttgagaaagctaagagtatgtggtcagacatgatcaattggaggaaggaattcggagtcgacaaaatagaggaatttgactacaccgagttagatgaagtgacagagtattacccacaattttatcatggagtagataaagagggaagacctgtctacatagaattagtaggaaaagttgatgcaaacaagctaatacaagtgacaaccctagatcggtatgtaaaataccatgtcaaagaatttgagaagtgcttccagatgaaatttccagcttgcaccattgctgctaaaaagcacatagattcgtccactactattttggatgtgcaaggcgtgggtttcaagaacttctcgaaatctgccagagaattaatcacacgattacagaagatcgacagtgataactacccagagacactgtgccggatgtatataattaatgctggccaaggcttcaagatgttatggagcacaataaaatcattcctcgatccaaaaactgcttccaagatccatgttcttgggaataagtatcaacataagttgctcgaaataattgacgagtgtgaactgccagaatttcttggtggcaaatgcaattgtattgaaggttgccaaagatctgacaaaggtccttggaaggatcccaacataataaagagagtcctcaatgacgaggcaaactacggcagacaaattgtgaccatatccagcattgatggaaaaataatacgttatgctaggccagatcacccaactagaaaagggagtgatgcatctgccgagtctggatctgaagtggaagatgtaacatctcctactgcatcaaggaacctgattacacatcctattttgacccctgttcacgaagagtcaaaattgtcgccacatggttccacatttgttgctcatgcttctattgaagaaaacattcctgttgtagacaaggttgtggatgatggatggggtactcccagaggtagtctccaagcttcttcaggttcgttgccctcgagaaacacgcacggcacattcgaaggactgagagttcaagctgtcgcatggctgacgttcttgatcacggcccttttcgccacgctctgttccgtcccgagcaagatggccagaaggatctccagccagtctagcaagcacgacgactaccgcggcgagtatcctcaagaggaggaggagcacaaggaggagttccggcctccgtctcctgccccgtcctacacggagaaggacgtgctctcgtcgatgctgagacggctcggtgagctggagggcagggtgcaggtgctcgagacgaagccgtccgagatgccgtttgagaaggaggagctgctcaacgcagccgtccgccgcgtggacgcgctggaagccgagctgatctccacgaagaaggccctttacgatgctctgatgcgacaggatgagctgctcgcgtacattgacaggcaggagctgatcaagttccgtaaaaagaagttctgcttctaagatctgaccatggagcagctggtcatgtccggagccgttcgtgtatattgttggatcgcggctagtacggtgaatgatgtaatgtgtccatctgtacaagtgtgtaacggaacggtgtaagtatagtaggaaaacaatgtgttagctgtgcggtagcacttgtgtgctagcctaaattgtaatcttgcaagtcggtgcatagctgattgcgcaccaatacgtagttatgaatggaatcgcactcgtgttcgtataaaataaaataaattagcagcgccaaatgtttaaaaatgaggcgcaagagagtgcccaggaacatattcccactcgcaccaaatgcttccagtgtttgagtcctgcgtgcaatgcattgatcacggctcgcacttggaaacttctcctcccaactatacaagcttttttcattctactgcagatagcggctgcggcaaggactgcacgtctgcacctacggtaggtggcctacccatcctcatctcttttccccccacaaccgctgaaccaaatctcatcaccaacgtaacgaaaagttcaatggtttaacagtgcaaccg

SEQ ID NO: 136237 - DNA, 441 bp, Zea Mays
gggcgaggccaagggcccaaggcgtcgagcacgtttctggagacggaacgcgatatggagctgcggttgcggggcacgcctgcctgcggcgagagcgagatgcacggtggtgggtgtgggggcggtcgcgcgggccggcgtgtctgcgttgctttgttgccacatttgtcggcaactcccaaattaatagtaagtttgccgagaagatgtccaagcctttgctgttggacgttgctttgggtttgggatatacggggggtgggttggaaattagatgtggttgggtaaagggttagatggatccgtgacttgtccacgaggtgccgatgcgtctgtggtgtggctgtcacttcatgcgctccgtccgaggatgaaggttccattgttctcactcaactactcaagcggttaccgcgtgttcggataacccagttactgtta

SEQ ID NO: 136238 - DNA, 1514 bp, Zea Mays
ctagaagacgggcagaggaggaggaggagcaagaaaggaaacagggggccatttggccgtgaaaaagtacttttttactatttcttcagcataaatatcgagatggagtacaatcggatcaccggtgaaattcgcgtaaacatctagctgttgccgatgcgcataataagcatccgcagctcctacattgtgcacagggtcgtcgccaacgtccgagtcagcgtcaaaaagctcagactccgattcgtctcctcccccgaaaattccgtagctcgtcgtctcagatgccggcgcagccacgggcgcctgctccgacgatgtcgccaccgccgtgctgggaatttcacactgcgtcgatggaaatctcacttcttggccagcaacggcggcggcggcggcgttaggaagttcggagtagccgctggacacttcgatccagccatcgtcgtcggattcccagtccggcaacgccgagcaagggcctgccagtgccctgatcctgtctgttgcgctctctgacatctcctcctcctcctcctcctcatctaactcccaaaatgcggcatccaacgtgctcttgggagacacccacctgggctttgcatcatcctctgcttcgccggcggacgccaagaacgggtgctccagcagctgcgccgccgtccaccgctcgctggcctctcgcctcaggcacttgtccaggaaatccttggtctcggccgacagccactccggcgcctccggcacggcgtccgtgtacccgatcaggcgcaccgcggcgggcacgtcgtccacgtgcgtccacggggcgcgcccggtggccatctcgatgacggtgcaccccagcgcccagacgtcggcggcggggccctggtcctccccgcgcgccacctcgggcgccatgaacgccggggtgccgccgatcgggcccccggaccccgccctcctcgcgcacccgaagtccgcgagcatggcgcggccgtcggccccgatcaccacgttcctcgccttgacgtcgccgtgcaccacgccctcctccccgtggaggtaggcgatcccccgggccacgtccgccgcgtacgcccgcacggcgggctcctccaggcggcccccgttccggcccaccgcgtcgaccagcgagccgccgggcgcgaactcgaggagcagctggaactcccctcccgcggcggcgcggaagcccaggcaggggagcacgtgcggggagctgagcgaggccatgatcccgccctcgcgccgcagctgcgccgccgccgccgcgccgccggccgacttgacggccacgagctcgccctcgcccgccgcgaacagcgacacgacggcgcccgacgcgccgcggccgagcgtgcggagccgcgtcaggtggcggccgctgatcccggcgtccgccatcatctctgggcgtggattcgtgatcccactgggtatctttccgtttcttggggctaggtctcgcacaattcgagtccgcgtggctgcgatgccgccgatttgcc

SEQ ID NO: 136239 - DNA, 978 bp, Zea Mays
aacgcctttttactattttttttctattcccatttccaccctcgcaccgcatccacctccaccgcgccgccgcgagagggggaggagggtttccgatggagaacggcgaggagacgttcgcctcccccactgccgccgccgccgcggacttcgagatctccatcaacggcggggacagcacgcccaagctccacaatttggcggacgagatggaggccctccgcgcggcgaagcgcgacctggaggagaagctcgatgccgtgggacacgagaaccggttcctgtcctctgagtcccggcgcctcgaggtcctggtgtcccaggcccgcgaggaggtcgccgctgccgagcaagtcgccgccaccaaagagagcgaggccgccacgctccgcgccgaggtcgagcgtctccagggcctcctagccgcagagaaggccagccatgaggaggagatgcgcaggggcgcaaggctcggggaccagctgcagaccgcgtaccaggagaaggccgcccttgaggaggagatcgagaccctgaagggttccgccactgccgagggcaagggcgggaaggaggaagaggagggacgtgattccgtttctgccagggccgggacgcctaaggatgagggcgtggtgtctcccgctcttgtggctgccgcggctgctggagcagctgtcacggctgccatcgcggtggtcttgctcaacctcaagagatgatgtggtggtccgatgctcgggaagttttgatctgctgctatggcctatatgagaatgggttatccgttttgtcgtggtactagtgttgctggactcagtgtggtatctttactatcagctggataatatattagaggttagaacaacctatattgcaagtactttttattttctgcagttttccatgctaataagagttgtgaacacaaacgtgagaggtaattgaggtcaggtgtgttgttttgaagttgcacct

SEQ ID NO: 136240 - DNA, 177 bp, Zea Mays
atggaggtggagcagcagcagcagcagcagccatgggaagcgcaggggaggaagaggaggaggagggctcagcggggtgctgagggagcagaaggccaggctctacatcatccgacgatgcgtcgtcatgctcctctgctaccacgactgatcccccctgctgctccgctcctctag

SEQ ID NO: 136241 - DNA, 144 bp, Zea Mays
atggacaagccgaggagtgggagtggccaggggaagaaacgcaggggaggaggaggcggactcggcggggcgctgaggaagcagatggccaggctctgcatcatccgggagtgcgtcatcatgctcctcttctaccatgactga

SEQ ID NO: 136242 - DNA, 1088 bp, Zea Mays
tcaccacaaacacgcttgggcctggccaccctactaggcccatgcccatgggttatcggtccgccgctccgccctgtactcttttggtcaatagcgaccttttgcttgttcaactcggactcggacccctggatggaaccgcgtgctttttagctaccgaacggcggcgatgcgtcttttctccggcgtcctcgattcttcgtccgcgcttgcctccgccgtcctgggctccgtgtccgaccgcctcggattctcgcgcatagttttcggtcgagcgagcccttcgaacatgccggctctcgcttgttctgccgcttcctcgtcttctgccgctaccggcgcccagaaaccgtggctcttcgtcggtctggggaaccccgggcggatgtacaaaggcactcggcataacgttgggtttgagatgattgatgctattgcggaagctgagggcatatcagtcagcagtaagcaatttaaggcaattgtcggaaaaggcctcattggtgatgtccctgtaatgcttgccaagccacagacttttatgaatgcaagtggtcggacagctggtttcatacttcaagataccactcaatcaattagttgtgatctacgatgatcttgatctaccctttgcgaaattgcgtctgctaccaaaggggggacatggtggccacaatgggatgaggagtattgttgaccatttgaatcagagccgtgattttggacgcctaaggattggcattggacggccacctgaggagctgggtgctatcaattttgttctgcggtcattcaccaagcaggaaaaggaagagcttgaagtcacgttccaaaggagcttgcaagctgtaagaattatggtacgggaaggattcaacaaaagtgcacagtttgtgaatactccacagccaccagaaatgctgaatagatgagagcccaacgacacatatacaatattaggttccataatcaaaaaatataatattaggttcgtctagttgctggccgccaacatgtatgtgccctaattgattagtagaggttttcatttgatcacacatcaagtcatgtaaattggattcacatat

SEQ ID NO: 136243 - DNA, 1131 bp, Zea Mays
tcaccacaaacacgcttgggcctggccaccctactaggcccatgcccatgggttatcggtccgccgctccgccctgtactcttttggtcaatagcgaccttttgcttgttcaactcggactcggacccctggatggaaccgcgtgctttttagctaccgaacggcggcgatgcgtcttttctccggcgtcctcgattcttcgtccgcgcttgcctccgccgtcctgggctccgtgtccgaccgcctcggattctcgcgcatagttttcggtcgagcgagcccttcgaacatgccggctctcgcttgttctgccgcttcctcgtcttctgccgctaccggcgcccagaaaccgtggctcttcgtcggtctggggaaccccgggcggatgtacaaaggcactcggcataacgttgggtttgagatgattgatgctattgcggaagctgagggcatatcagtcagcagtaagcaatttaaggcaattgtcggaaaaggcctcattggtgatgtccctgtaatgcttgccaagccacagacttttatgaatgcaagtggtgagtctgtcggacagctggtttcatacttcaagataccactcaatcaattagttgtgatctacgatgatcttgatctaccctttgcgaaattgcgtctgctaccaaaggggggacatggtggccacaatgggatgaggagtattgttgaccatttgaatcagagccgtgattttggacgcctaaggattggcattggacggccacctgaggagctgggtgctatcaattttgttctgcggtcattcaccaagcaggaaaaggaagagcttgaagtcacgttccaaaggagcttgcaagctgtaagaattatggtacgggaaggattcaacaaaagtgcacagtttgtgaatactccacagccaccagaaatgctgaatagatgagagcccaacgacacatatacaatattaggttccataatcaaaaaatataatattaggttcgtctagttgctggccgccaacatgtatgtgccctaattgattagtagaggttttcatttgatcacacatcaagtcatgtaaattggattcacatattgttttcagattattatggggattatttggattta

SEQ ID NO: 136244 - DNA, 751 bp, Zea Mays
gcttcaatagaaataatgtataacaccataattataaattgatatttactcacaagccttccctccactatgagacggctgttacatttctttttcttcgaatggaacttgaacagaaatacttgtgaaccctctgttttcttcaatagttcacacgccatggtaatgtagttctatcataactatcatgttttgttttgcttaaccatttgtacaaattgcaggatgaggagtattgttgaccatttgaatcagagccgtgattttggacgcctaaggattggtattggtactacaattatttacttatttttaattcaggtgtcaaatatgaaatatgcccccctccccaaaaatgttttgtaggcattggacggccacctgaggagctgggtgctatcaattttgttctgcggtcattcaccaagcaggaaaaggaagagcttgaagtcacgttccaaaggagcttgcaagctgtaagaattatggtacgggaaggattcaacaaaagtgcacagtttgtgaatactccacagccaccagaaatgctgaatagatgagagcccaacgacacatatacaatattaggttccataatcaaaaaatataatattaggttcgtctagttgctggccgccaacatgtatgtgccctaattgattagtagaggttttcatttgatcacacatcaagtcatgtaaattggattcacatattgttttcagattattatggggattatttggattta

SEQ ID NO: 136245 - DNA, 2061 bp, Zea Mays
gtagggtttccactaaccccagcactcaaaaaaagaaagaaaagaaaaacacgattccgctgatccacctccatccgcgtcactcaccagtctcctcccctaatcccactccgccgccgccagcttgcccatggcggcgacaacccacgccgcctccatgtcgttcctcctctctcacccccagtcgcgctctgccaccccaagccgccacctcccgctccgtccggcagcccgccgcgtccagtgcgccaccgacgccgccgccctttccccggcggtcaccaccaagcaccggcgcgcggcggatgagaacatccgcgaggaggcggcgcggcacccggccccgaagcagggcctgtcggcgtggtacgagcccttcccgccggccccgaacggcgaccccaacgagcgctactccctggacgagatcgtgtaccggtccagctcggggggcctcctcgacgtgcggcacgacatggaggcgctgtcccgcttctcgggcgcctactggcgcgacctcttcgactcccgcatcgggcgcaccacctggccgtacgggtccggcgtgtggtccaagaaggagttcgtgctccccgagatcgagcccgaccacatcgtctccctgttcgagggcaactcgaacctgttctgggccgagcggctggggcgcgaccacctcggcgggatgaacgacctgtgggtgaagcactgcggcatctcccacacggggtcgttcaaggacctcggcatgaccgtgctggtgagccaggtgaaccggctccgccgcgcgccgctgtcgcgccccatcgccggcgtcgggtgcgcgtccacgggggacacctcggccgcgctctccgcctactgcgccgccgcggggatcccggccatcgtcttcctccccgccaaccgcatctcgctggagcagctcatccagcccatcgccaacggcgccaccgtgctctcgctcgacaccgacttcgacgggtgcatgaggctcatcagggaggtgaccgccgagctgcctatctacctcgccaactcgctcaactccctccgcctcgaggggcagaagacggcggccatcgagatactgcagcagttcgactgggaggtgcccgactgggtgatcgtgccgggaggcaatctggggaacatatacgccttctacaaggggttcgagatgtgccgtgtcctcgggctcgtcgaccgcgtgccgcgcctcgtctgcgcgcaggcggccaacgcgaacccgctctacggctactacaagtcaggctggaccgaattccagccgcaggtggccaggccgacgttcgcgtcagcgatccagatcggcgacccggtgtccgtcgaccgggccgtggtggcgctcaaggcgacggacggcattgtcgaggaggcgacggaggaagagctcatgaacgcgatgtcgctcgccgaccgcaccgggatgttcgcctgcccgcacaccggggtcgcgctcgccgccctgttcaagctcagggagcagcgcgtcatcgggacgaacgaccgcaccgtggtcgtcagcacggctcacggcctcaagttctcgcagtcgaagatcgactaccatgacagcaagatcgaggacatggcttgcaagtactccaacccgcctgtgagcgtgaaggccgactttggcgccgtcatggatgtgctgaagaagaggctcaagggcaagctctgagcgcctgtgcctggctaatgcaatcaactgattggaatgcagtggtttcgtcggtatcggggggtcttttaggcttcagaaattctgtctgggttaggctatctgtttgtggagtttagcaggagaatggatctctctcctgcaagactggcgctctctcttgtgctgctacgatgtgttaccatggataataagtgacctagttgctgttggattgaataatcatcactcgctcctttgtcctctgtgctggcaatgcttgtcgagttctcatgtattgttgttttgatcattttggtgttgcaatgctggctgaaagctactggtgacagtggatgtcaaccttgctggtc

SEQ ID NO: 136246 - DNA, 1426 bp, Zea Mays
cgcgtcactcaccagtctcctcccctaatcccactccgccgccgccagcttgcccatggcggcgacaacccacgccgcctccatgtcgttcctcctctctcacccccagtcgcgctctgccaccccaagccgccacctcccgctccgtccggcagcccgccgcgtccagtgcgccaccgacgccgccgccctttccccggcggtcaccaccaagcaccggcgcgcggcggatgagaacatccgcgaggaggcggcgcggcacccggccccgaagcagggcctgtcggcgtggtacgagcccttcccgccggcgtcgggtgcgcgtccacgggggacacctcggccgcgctctccgcctactgcgccgccgcggggatcccggccatcgtcttcctccccgccaaccgcatctcgctggagcagctcatccagcccatcgccaacggcgccaccgtgctctcgctcgacaccgacttcgacgggtgcatgaggctcatcagggaggtgaccgccgagctgcctatctacctcgccaactcgctcaactccctccgcctcgaggggcagaagacggcggccatcgagatactgcagcagttcgactgggaggtgcccgactgggtgatcgtgccgggaggcaatctggggaacatatacgccttctacaaggggttcgagatgtgccgtgtcctcgggctcgtcgaccgcgtgccgcgcctcgtctgcgcgcaggcggccaacgcgaacccgctctacggctactacaagtcaggctggaccgaattccagccgcaggtggccaggccgacgttcgcgtcagcgatccagatcggcgacccggtgtccgtcgaccgggccgtggtggcgctcaaggcgacggacggcattgtcgaggaggcgacggaggaagagctcatgaacgcgatgtcgctcgccgaccgcaccgggatgttcgcctgcccgcacaccggggtcgcgctcgccgccctgttcaagctcagggagcagcgcgtcatcgggacgaacgaccgcaccgtggtcgtcagcacggctcacggcctcaagttctcgcagtcgaagatcgactaccatgacagcaagatcgaggacatggcttgcaagtactccaacccgcctgtgagcgtgaaggccgactttggcgccgtcatggatgtgctgaagaagaggctcaagggcaagctctgagcgcctgtgcctggctaatgcaatcaactgattggaatgcagtggtttcgtcggtatcggggggtcttttaggcttcagaaattctgtctgggttaggctatctgtttgtggagtttagcaggagaatggatctctctcctgcaagactggcgctctctcttgtgctgctacgatgtgttaccatggataataagtgacctagttgctgttggattgaat

SEQ ID NO: 136247 - DNA, 1440 bp, Zea Mays
cgcgtcactcaccagtctcctcccctaatcccactccgccgccgccagcttgcccatggcggcgacaacccacgccgcctccatgtcgttcctcctctctcacccccagtcgcgctctgccaccccaagccgccacctcccgctccgtccggcagcccgccgcgtccagtgcgccaccgacgccgccgccctttccccggcggtcaccaccaagcaccggcgcgcggcggatgagaacatccgcgaggaggcggcgcggcacccggccccgaagcagggcctgtcggcgtggtacgagcccttcccgccggccccgaacggcgaccccaacgtgcgcgtccacgggggacacctcggccgcgctctccgcctactgcgccgccgcggggatcccggccatcgtcttcctccccgccaaccgcatctcgctggagcagctcatccagcccatcgccaacggcgccaccgtgctctcgctcgacaccgacttcgacgggtgcatgaggctcatcagggaggtgaccgccgagctgcctatctacctcgccaactcgctcaactccctccgcctcgaggggcagaagacggcggccatcgagatactgcagcagttcgactgggaggtgcccgactgggtgatcgtgccgggaggcaatctggggaacatatacgccttctacaaggggttcgagatgtgccgtgtcctcgggctcgtcgaccgcgtgccgcgcctcgtctgcgcgcaggcggccaacgcgaacccgctctacggctactacaagtcaggctggaccgaattccagccgcaggtggccaggccgacgttcgcgtcagcgatccagatcggcgacccggtgtccgtcgaccgggccgtggtggcgctcaaggcgacggacggcattgtcgaggaggcgacggaggaagagctcatgaacgcgatgtcgctcgccgaccgcaccgggatgttcgcctgcccgcacaccggggtcgcgctcgccgccctgttcaagctcagggagcagcgcgtcatcgggacgaacgaccgcaccgtggtcgtcagcacggctcacggcctcaagttctcgcagtcgaagatcgactaccatgacagcaagatcgaggacatggcttgcaagtactccaacccgcctgtgagcgtgaaggccgactttggcgccgtcatggatgtgctgaagaagaggctcaagggcaagctctgagcgcctgtgcctggctaatgcaatcaactgattggaatgcagtggtttcgtcggtatcggggggtcttttaggcttcagaaattctgtctgggttaggctatctgtttgtggagtttagcaggagaatggatctctctcctgcaagactggcgctctctcttgtgctgctacgatgtgttaccatggataataagtgacctagttgctgttggattgaat

SEQ ID NO: 136248 - DNA, 1852 bp, Zea Mays
caccttctctttctctgtagcctctgccaccaaacagctttggagtgggatctcctcttccttccccgccctcttccgccgacagcgggagagtacgcggcgcagcggctacaccaccgtctccaggctcccaaacacgtccctgccatccttttttgactccggagtccctcccctccttgcctacctggcgaggatcccatacccaatcccatccaactagcttcctactacttcccccccgtcctctcgatccctctccccgttcccctgaccagccgggcgtcaagtggcagggaggagaggcggcaccgcgtgtgaggctcaatggggaaggggagcgcgcgggcgctggccctggcgctcgccgtgattctcgcctgctccgacgtcgccgtcgtcacggctcaggaaaccgagcggatcgaaggaagcgctggtgatgtgttagaagatgaccctgttgggaggctcaaggtctatgtctatgatctccccagcaaatacaacaagaagctgctcaagaaggatcctaggtgcctgaaccatatgtttgccgctgagatcttcatgcaccggttcctgttgtcaagcgctgtccgaacttttaatcctgaggaagcagattggttctacacacccgtatacacgacgtgtgatctgacccctaagggtcttcccttgcctttcaagtctcctcggatgatgcgtagcgcaatccagctgattgctacgaactggccttactggaatagatcagagggcgcagatcatttctttgtcacaccccatgactttggtgcttgctttcattatcaggaagagaaagccattggacggggaatccttcccttgcttcagcgtgctacgttggttcagacctttggacagaagaaccatgtctgcctgaaggatgggtccatcacgatcccgccatatgcgcctcctcagaaaatgcagactcaccttatccccccggacacccctcgatccatctttgtgtacttccgaggtctgttctatgacaccggcaatgaccccgagggcggatactacgcaagaggtgctcgtgcatcggtctgggagaacttcaagaacaacccgctgtttgacatctcgaccgatcacccaccaacatactacgaagacatgcagcgctcggtgttctgcctctgcccgttgggctgggcaccgtggagtcccaggctagtcgaagccgtggtctttggctgcatcccggtgatcatcgcagacgacatcgtcctccccttcgcggacgccatcccgtgggaggagatcggcgtcttcgttgcagaggatgatgtcccgcagctggacagcatcctgacatccatccccacagacgtcgtgctgaggaagcagcggctccttgcgaacccgtcgatgaagcaggccatgctgttcccccagcctgctcagccaggagatgcgttccaccagatcctgaacggcctagcgcgcaagctcccgcacggcagcaatgtcttcctgaagcctggtgagagggccctgaactggaccgctggaccaccaggcgacctgaaaccttggtagcgtcctgtggatctgagatggatacgacttgttctgaaaggaaatatggagaacatgattatatatatacccgtgcctttgagttaccatgggtgcatagtgctgacaagaagccaaatgtacatcgttctatgttctttttctataactgttatatacatataaatatcttcgtttcttcttcttctttcttccatttcttcactagatgataagagtgccaagccttgtcggtcatatgtggatatatcataaatgaaattcacaagattgtact

SEQ ID NO: 136249 - DNA, 2088 bp, Zea Mays
cgaaaataaaaataaaaaataaagatgacatgaagtgtgaccaaagcaaagcgaaacgcgttgcagaaaaagggaggcggcagtaccagcaatagcctagtactaccactttccaggaatttaagaattttatttatttattgtttccaggacgcaaccactgccggagtgctggtatgtttctggtaggagtccgtgggaacgaaaaaaagtcatcttgaaaacaaacgcagggaacgggaacctggcatggcagatggcacccaccaggccaccacctccgccgacagcgagcacggccaccagcatcacccctgccctgccatactcactttgaccccggccccgggcgcctagtctattctctgatttctctctgcctgccaagaatcccgccagttgccttccacttccgccagactccgcgttcctcctgactcctgagcagctgccgcctgcccgagagtggagggggaggcaggcgcccaggccaatgggtgggacggggagcgcgacggcggcgcaggccctggcgctcgccgccttgctcctcgcctgctccggcgtcgccgtcgtcacggcgcaggacatcgagcggatccaaggaagtgccggcgacgtgctggaggacgaccccgtcgggcggctcaaggtgtacgtgtacgagctgccccccaagtacaacaagaacgtggtggcgaaggactcgcggtgcctgagccacatgttcgccacggagatcttcatgcaccgcttcctgctggcgagcgcggtccggaccctgaacccggacgaggcggactggttctacaccccggtctacaccacgtgcgacctcacgccgtggggccatcccctcaccgtcaagtccccgcggatgatgaggagcgccatccagtacgtctccaagcgctggccctactggaacaggacggagggggccgaccatttcttcgtcactccacatgactttggagcgtgcttctacttccaggaagagaaggccatccagcgaggtgtcctcccggtgctgcgccgcgctacgctggtccagacgtttgggcagaagaaccatgtctgcctcagggaaggctccatcaccatcccgccatacgctccgcctcacaagataagagctcatatcgtcccgccagagacgcctcggtcgatcttcgtctacttccgcggcctgttctacgacaccgcgaacgaccccgagggtggttactatgcaaggggcgcccgtgcgtcggtgtgggagaacttcaagaacaacgcgctgttcgacatctcgacggagcacccgccgacgtactacgaggacatgcagcgcgccatcttctgcctgtgcccgctgggctgggcgccgtggagcccgcgcctggtggaggccgtggtgttcggctgcatccccgtcatcatcgccgacgacatcgtgctgcccttcgcggacgccatcccgtgggaggagatcgccgtgttcgtgcccgaggacgacgtcctgaggctggacaccatcctcacgtccatccccatggacgagatcctccgcaagcagaggctgctggccaacccgtccatgaagcaggcgatgctgttcccgcagcccgcggagccgagggacgccttccaccaggtcctcaacgggctggcgcgcaagctgccccaccccaaggacgtcttcctcaagcccggccagaaggtgctcaactggacagagggcgcccaggatgacctcaagccgtggtaggccgtggctgctgctcttttgtaaacgacacaaccagatcgatgatggtgatgctgatgagtgaaccacacaaccattggttaaatgtaaagctcttaatcctcttgctcctccaacctttcttctttttgattttgaggcaatgtgcatgtcttgcctgtatatatacactagtacatgacaatcagggtggccggccggggcaagacaaattgaggtgccaacacattacacactaatagtattagtattatattctagcatgttttgacggcaattcctttctttagaactcggtatagcagagggacaaacccaacgtttttttttgtttttta

SEQ ID NO: 136250 - DNA, 1601 bp, Zea Mays
cacccttcacttgtccgcccccacaatttccgctccttgaaccgagtcttcccccaaagcatttcctccctttcgcgtggttgtgccgttgtggtagtgatcggatggacagcacgagctgcctggtggacgacgcgagcagcggcgcgtccacgggcaagaaaccggcgccggctccggctgcggcgaccggcaagccgctacagcgcgtgggcagcggcaccagcgcggtgatggacgcggcggagccgggcgccgaggcagactcgggcggcgcggggcgggcccccggcggggtcagcgggaagctgccgtcgtccaagtacaagggcgtggtgccacagcccaacgggcggtggggcgcgcagatctacgagcggcaccagcgcgtgtggctcggcacgttcacgggcgaggccgaggccgcgcgcgcctacgacgtggccgcgcagcggttccggggccgcgacgccgtcaccaacttccgcccgctggcggagtcggagccggaggccgccgtcgagctccggttcctcgcgtcccggtccaaggccgaggtcgtcgacatgctccgcaagcacacctacggcgaggagctcgcgcacaacaggcgcgccttcgccgcggcgtccccggccgcctcgccgccgcccgagaataaccgccgtccgcccgccgcctcgtcgtcgtcgtcgcccgcggcggcgcgcgagcacctcttcgacaagacggtgacgccgagcgacgtggggaagctgaaccggctggtgataccgaagcagcacgcggagaagcacttcccgctgcggcgagtgcaagggcgtgctcctcaacttcgaggacgccgccgggaaggcgtggaggttccggtactcgtactggaacagcagccagagctacgtgctgaccaaggggtggagccgcttcgtcaaggagaaggggctccacgccggcgacgccgtcgggttctaccgttccgccggcggcaagcagcagctcttcatcgactgcaagctccggcctaacaagacgacgaccacggcagcagccttcgtcaacgtcaacgcgatgaccaccacggccgcaccacccctcgccgcggtgaaggcggtgaggcttttcggcgtggacttgctcacgacaccgaggcccgcagcggtggcgccggagcaggaggaggtgaccgtggcaaacaagagagctagggacgccatggccaccgcggcttctactccagctccagtacacatggttttcaagaagcaatgcatagacttcgcgcgctgacctagctatagctaacgtttttgctctccaacccccctctcatgcttgcttcgcttcgcacggatgataagatgcatggtgatgtggtagctagccagctagtagctttggcgctagctcttgcacgcttagaccttcattcatcaacctcatccttggattgttcattctgtttcttcttattatctttctgtacctgtcctaatcgttctatcgcatatctctgccgtaaattagctaggcagcatgtgtgtgtgtttttttggagtggcaagtgtatactaatgaaaaaaaaagaagccatggagattatt

SEQ ID NO: 136251 - DNA, 1645 bp, Zea Mays
cccacaatttccgctccttgaaccgagtcttcccccaaagcatttcctccctttcgcgtggttgtgccgttgtggtagtgatcggatggacagcacgagctgcctggtggacgacgcgagcagcggcgcgtccacgggcaagaaaccggcgccggctccggctgcggcgaccggcaagccgctacagcgcgtgggcagcggcaccagcgcggtgatggacgcggcggagccgggcgccgaggcagactcgggcggcgcggggcgggcccccggcggggtcagcgggaagctgccgtcgtccaagtacaagggcgtggtgccacagcccaacgggcggtggggcgcgcagatctacgagcggcaccagcgcgtgtggctcggcacgttcacgggcgaggccgaggccgcgcgcgcctacgacgtggccgcgcagcggttccggggccgcgacgccgtcaccaacttccgcccgctggcggagtcggagccggaggccgccgtcgagctccggttcctcgcgtcccggtccaaggccgaggtcgtcgacatgctccgcaagcacacctacggcgaggagctcgcgcacaacaggcgcgccttcgccgcggcgtccccggccgcctcgccgccgcccgagaataaccgccgtccgcccgccgcctcgtcgtcgtcgtcgcccgcggcggcgcgcgagcacctcttcgacaagacggtgacgccgagcgacgtggggaagctgaaccggctggtgataccgaagcagcacgcggagaagcacttcccgctgcagctcccggcggcggcggcggcgggcgtcggtagtggcggcgagtgcaagggcgtgctcctcaacttcgaggacgccgccgggaaggcgtggaggttccggtactcgtactggaacagcagccagagctacgtgctgaccaaggggtggagccgcttcgtcaaggagaaggggctccacgccggcgacgccgtcgggttctaccgttccgccggcggcaagcagcagctcttcatcgactgcaagctccggcctaacaagacgacgaccacggcagcagccttcgtcaacgtcaacgcgatgaccaccacggccgcaccacccctcgccgcggtgaaggcggtgaggcttttcggcgtggacttgctcacgacaccgaggcccgcagcggtggcgccggagcaggaggaggtgaccgtggcaaacaagagagctagggacgccatggccaccgcggcttctactccagctccagtacacatggttttcaagaagcaatgcatagacttcgcgcgctgacctagctatagctaacgtttttgctctccaacccccctctcatgcttgcttcgcttcgcacggatgataagatgcatggtgatgtggtagctagccagctagtagctttggcgctagctcttgcacgcttagaccttcattcatcaacctcatccttggattgttcattctgtttcttcttattatctttctgtacctgtcctaatcgttctatcgcatatctctgccgtaaattagctaggcagcatgtgtgtgtgtttttttggagtggcaagtgtatactaatgaaaaaaaaagaagccatggagattattacatgcatgccataagaagcaatgt

SEQ ID NO: 136252 - DNA, 1571 bp, Zea Mays
actttctcttcagttcaacttccgactttccgagtcgtcacctcacctaccggctaccgaggaagcagaagcgcacgagcgagacgcagccaccgcccgggaggaggaggaagccaagagcaatcggactttgaatggctcgcgacggcggcagcagagggtcaccgggggcggagcggcggcgggtggcgctgcgtgccctcctcgcgtcgggtggcgcggaggcggaggccgcgaggacgtcgagcaagggcctgctacgcggccttcggtgcacgtccgcggccgcatcgcaggctatcgcgccggagatcccgcggcctccggcggactggcgcggactcggttgcgccgcggcggcccaggcgcacgcgccggctgccgcggtggaagcggcccggcccacggcggactggcgcaggcttgggtgcgcggctggagcggcaccggcggtccaggctcaagcgccccggcgttccgaggagtggcgcgtgaggcggcggaggaacgagagggagaggcggaaggcgagggctggcggcgtcagtggtggtggtggggccagtgccgggatgggcgtcggcggggacgtctggtgcacgccgggcataccgttcgccgccgaggcctcttcggtggactgcgtggtggcgccgcaccatacggtggccgcgcgccgccgcgccgaggccgacaggccgcggagagagaggcctggcgcacctccggccaggagggtcaccatgcgggagcacatgtcctcgtcccctctgagttcaccgccgcaccatgtcatgccgttcgttgatgtcgaccgtgcaccttccggacgcatccgacatgtgagtggccgccggcactcccacgcacgggttgaggaagagatgatgttccagacaaggatgttattgggaagaatgggtatttatgatcagtatcaggattggcgcctcgatgtcgacaacatgacatatgaggagttgctcgatcttgaggaccggattggatatgtaagtacagggcttcgtgaggacgagatcattcaaagccttaggatggtaaagtactccgcgttcaaccccagacatttttctacggaaatggacaggagatgtagcatctgtcaagtatgtcccttctctttctccttcccactcacaggcctcacttcatgcacttctgctcggcacctgatacacatgtgacatgtatcggttccatttcctttttccaggaagagttcgaagtacacgaggaaactgggaagctgagctgtggccacagctatcacgtgcactgcataaagcagtggctttctcggaagaacgcttgtccggtttgcaagaccactgtctcgaagacctgaagtccctattctttctagtgtctgaaccacactttcattaagtataatccaattgaaatgcaaaagattagttctattgttgctgtacagtccagcagccgtctgcacgcacgcttgttgagtacagtatctagtacacgcacgcttgctgtacacacatgatcctagtatttatttgcatatggaacttacaatttttttcacc

SEQ ID NO: 136253 - DNA, 1556 bp, Zea Mays
actttctcttcagttcaacttccgactttccgagtcgtcacctcacctaccggctaccgaggaagcagaagcgcacgagcgagacgcagccaccgcccgggaggaggaggaagccaagagcaatcggactttgaatggctcgcgacggcggcagcagagggtcaccgggggcggagcggcggcgggtggcgctgcgtgccctcctcgcgtcgggtggcgcggaggcggaggccgcgaggacgtcgagcaagggcctgctacgcggccttcggtgcacgtccgcggccgcatcgcaggctatcgcgccggagatcccgcggcctccggcggactggcgcggactcggttgcgccgcggcggcccaggcgcacgcgccggctgccgcggtggaagcggcccggcccacggcggactggcgcaggcttgggtgcgcggctggagcggcaccggcggtccaggctcaagcgccccggcgttccgaggagtggcgcgtgaggcggcggaggaacgagagggagaggcggaaggcgagggctggcggcgtcagtggtggtggtggggccagtgccgggatgggcgtcggcggggacgtctggtgcacgccgggcataccgttcgccgccgaggcctcttcggtggactgcgtggtggcgccgcaccatacggtggccgcgcgccgccgcgccgaggccgacaggccgcggagagagaggcctggcgcacctccggccaggagggtcaccatgcgggagcacatgtcctcgtcccctctgagttcaccgccgcaccatgtcatgccgttcgttgatgtcgaccgtgcaccttccggacgcatccgacatgtgagtggccgccggcactcccacgcacgggttgaggaagagatgatgttccagacaaggatgttattgggaagaatgggtatttatgatcagtatcaggattggcgcctcgatgtcgacaacatgacatatgaggagttgctcgatcttgaggaccggattggatatgtaagtacagggcttcgtgaggacgagatcattcaaagccttaggatggtaaagtactccgcgttcaaccccagacatttttctacggaaatggacaggagatgtagcatctgtcaagaagagttcgaagtacacgaggaaactgggaagctgagctgtggccacagctatcacgtgcactgcataaagcagtggctttctcggaagaacgcttgtccggtttgcaagaccactgtctcgaagacctgaagtccctattctttctagtgtctgaaccacactttcattaagtataatccaattgaaatgcaaaagattagttctattgttgctgtacagtccagcagccgtctgcacgcacgcttgttgagtacagtatctagtacacgcacgcttgctgtacacacatgatcctagtatttatttgcatatggaacttacaatttttttcaccatggcctactgagtacagtatctagtactggctgccttactcaacgcatgacagtcggacttactgcatgagttcttccatgtgtttgttgt

SEQ ID NO: 136254 - DNA, 1382 bp, Zea Mays
actttctcttcagttcaacttccgactttccgagtcgtcacctcacctaccggctaccgaggaagcagaagcgcacgagcgagacgcagccaccgcccgggaggaggaggaagccaagagcaatcggactttgaatggctcgcgacggcggcagcagagggtcaccgggggcggagcggcggcgggtggcgctgcgtgccctcctcgcgtcgggtggcgcggaggcggaggccgcgaggacgtcgagcaagggcctgctacgcggccttcggtgcacgtccgcggccgcatcgcaggctatcgcgccggagatcccgcggcctccggcggactggcgcggactcggttgcgccgcggcggcccaggcgcacgcgccggctgccgcggtggaagcggcccggcccacggcggactggcgcaggcttgggtgcgcggctggagcggcaccggcggtccaggctcaagcgccccggcgttccgaggagtggcgcgtgaggcggcggaggaacgagagggagaggcggaaggcgagggctggcggcgtcagtggtggtggtggggccagtgccgggatgggcgtcggcggggacgtctggtgcacgccgggcataccgttcgccgccgaggcctcttcggtggactgcgtggtggcgccgcaccatacggtggccgcgcgccgccgcgccgaggccgacaggccgcggagagagatgatgttccagacaaggatgttattgggaagaatgggtatttatgatcagtatcaggattggcgcctcgatgtcgacaacatgacatatgaggagttgctcgatcttgaggaccggattggatatgtaagtacagggcttcgtgaggacgagatcattcaaagccttaggatggtaaagtactccgcgttcaaccccagacatttttctacggaaatggacaggagatgtagcatctgtcaagaagagttcgaagtacacgaggaaactgggaagctgagctgtggccacagctatcacgtgcactgcataaagcagtggctttctcggaagaacgcttgtccggtttgcaagaccactgtctcgaagacctgaagtccctattctttctagtgtctgaaccacactttcattaagtataatccaattgaaatgcaaaagattagttctattgttgctgtacagtccagcagccgtctgcacgcacgcttgttgagtacagtatctagtacacgcacgcttgctgtacacacatgatcctagtatttatttgcatatggaacttacaatttttttcaccatggcctactgagtacagtatctagtactggctgccttactcaacgcatgacagtcggacttactgcatgagttcttccatgtgtttgttgt

SEQ ID NO: 136255 - DNA, 741 bp, Zea Mays
accacaccacacaccaccatccacgcactgctagtaagcgagcttagctactgatcgtcgtcaagcactctcgagctcgatctctcgaagcggctagctgctagcagccaattaatggcgaagccttcgcaggtgctggtgtcggcgctcgccgcctgggcggtggtcctgctgctgctgtgcgccgccgcgccgcggggcgccgacgcggccacggcgtgcgacgccgcgcagctgaccccgtgcgcgggcgccatcatcgggagctcgccgcccaccgcggcgtgctgcagcaggctcagggagcagcagccgtgcctgtgcacgtacgcgcgcgaccccaagctgcagcgctacgtcagctcgcccaacggcaagaacgccatggccgcgtgcaaggtgcccgtgccgtcgtgctaatttaaacttctgttagcgccgccgccgccgcgcgcgtacgtacgtgtcgtgactcgtgaggcgtacctgtgtcggtagcagcatggcccactggacagggacagagtgtggcgtcgctttttttctgtttcagtacgtacgtacttggatcgcggaagcccgtgtatgcgtgttccgttgtggtgttgctgtactcgatctgctgcatgtgtgtatctaccgagctcttcggacagatacgcgtgcgtatgaataaatgatgtaataacgacgtgtgcatccgctatatatatgcatatctatacatatgcttttactatt

SEQ ID NO: 136256 - DNA, 1767 bp, Zea Mays
ccgtggtgtgttccccctctgtcgtggtcgtagtgtgtcccctggtggtctgtcagttcagtcatgagtccgggttgtaaaaactgtgttgtgctctcgtggaacgtccgtggtttaggcgatccggataaatgcactatcgtccgtgatgttatctcccttgcctccccgtccgttgcttgcctacaagaatccaaactctgcgacctaagctgccttaaagcgcgctcgtttttgcctaaaaatctagccagctttctctgcctcaacgccgacggttccagggggggcgtcgtgaccgcctgggacagcgctgtgcttgaactcatgtccagcatctctcgctctttctccctcaccaccaccttcagctcgcactttgccaatgcgcccctcaccatcaccaacgtctatgccccatccaaccaccaggactccccaaccttccttgatgaactctcagacctcctccccagcatctctggtccttggcttctgatcggtgactttaatatgttgcgcggtgctgctgacaaaaaccagggtcacctggataaccacctgtgcaccatgttcaacagcaccatcgactcccttgccgttgccgaactccagctacaggactgcctcttcacctggtccaacatgcgttctgttcccacactcgctcgtctggatcgagcctttgtgaacaactcccacacctcctcattcccctccacctccctcaccaccctgcccaggcaaacatccgaccataaaccactgctggtctccatgtctacctccatccccaaatcccaaattttcagattcgaaaacgtctggttgcatcaccctctcttcctccctgaggtcctccctgcatggcaccaggagtttccctgttctgacgcggctgcccggctcgcaggtaagctcaagcacgttcgcgctgctgctaaacagtgggcaaaacggcatagaaaccccccctccctaatctctaactgcaggtttctgattctcctcctcgactgcctggaggaacacaggtgcctgtcctcagctgagcagcaagtcaaacagatttgccatgaacgtctggctgtggcgattaaggcaaaggctgcattctggaagcaacggagtaagcatcgtgcaataattgaaggggacgcgaacacagctttccatcatgcgatggcgacacagcagatgcgccgaaaccagattaaatccatcactgttggcagccgtgaactctccagccaagctgataaaagtgccgctgtcacagaatttttcaaagaactcatgagctgcagtgaccctgcgaggtgggacttcagcttggacacactctacagcggctgcccccgtgccagttcgtcgctggacgcccctttcctggagtctgaagcaacttgtgctgtgcgatcgatgaatcaaagcagcgcgccgggcccagatggttttggtcccagcttctacctcgcgacctgggagacggtccgccctcagatattacagatgctggctgcattttactctagtgatattcagctcagcaggatcaaccgtgcttttgtggtgctattgccgaaaaaaactgcacctgtgttcatcagcgatttccgccctatctgcctccagaattgcagcgtgaagattatttctaaaatccttaccacacggctgcaacgcgaaattcacagtctcatttcattggatcaaactggctttcttaagggcaggtcgatctctgaaaattttgtctacgccctg

SEQ ID NO: 136257 - DNA, 828 bp, Zea Mays
ataaatatacgccacacagatggctctccattctccacagcacgcaggcagcacccagcaccacaccacagaccaaaacgaccaccgcacccgcagcagcgaagtgtccaagcggcggcatggcggagagcaaggcgcgtgtcgcgctgttcctggcggcgctcgcggcggcgagcctgctggcgctggccccggccggcgccgcgacgacgtgcgcgccgacgcagctgaccccgtgcgcgcccgccatcgtcgggaacgcggcgcccaccgcggcgtgctgcgccaggctcaaggcgcacccggcgacctgcttctgccagtacaagaggaaccccagcatgcagcgctacgtcaactcccccaacggcaagaaggtcttcgccgcctgtaaggtgtccctgcccaggtgctgatgctgagtgagtcgtctgccgccccatcaggtcgatgtcgatccatcctgctcgatcgatcgatcatgctactacttgagcacctttgggcagagtttagtattgctcgagaataataaacggagacgtaccactcccagtacttggtacagtgtgagttcgatctgctctctgcagaaagacttggtatatatgccgtcatgtatgtatacgtgtcacgtgtactactatgaactatgatgttacaaagacgaatacaggtgttgccacttgtgacttgactttggataaagctccccaatgccataacatttaagggacgtttgaatacactaagggggtgtttgaatgcactagaactaatagttggttggctaaaaaatggtagtggaattagctagataacaaataa

SEQ ID NO: 136258 - DNA, 1104 bp, Zea Mays
gaccgggaccaggcacaccacgcacgcagagccctagaggcattcccaagttcgagcaatcgagccccagaggaacgactcctgccggacgccgccacaccatctgaaactgacggcggcgggcggccgctgcttcctctcccttctccgttcagatccggctactggcgtccctcctccgccatcttccctacccccgacgtggcgacgagctgtgagccgtgagctgttccaacattcctgtcctagttcaagctgaaaggagaacataaaagaggagaggctagggttttggcgtccgagaccaaaccaagctctctccggcgacggtgagggctcgatatcggagtccagtaggcggctcctgctgcttcggcggtccctaatccctctctcggcagtgtacagatggcgtccggcggtccggcgctcgagccgctcgtcgaccaggtcatctccgtcatcaccaacgatggccgcaacatcgtgggtacgctcaggggattcgatcaggccaccaacattatactcgacgagtcccatgagagggtctattctagaaaggagggagtccaacaacttgttcttggtctgtacattatcaggggtgacaacataagcgttgtgggcgaggttgatgaagagctggattcaagattggatatgtcgaagctaagggcgcacccactgaagcctgttattcactgaggtccgagtatgtctttgggtaatatgtggactggatggatgggtcactgttgaatgcaggatgtagcatcatcatggtgaggggactgagtaatatggacatgtatcttgcgtattgtgcaatgaatgtgttggctgttgggtcgcttgcctacgcattctgtaagattgcagttaccattaggaactgaactcaactcgactgaattaatatcatttggctctactcgtagatacagtatgcttgatttgactcgaaatttgaagaatgaaagaaataggactcggaaacagtgaaagtagcatagtaaattatttggatccacgcaaattaattccttggtagtaagttggctactttgttctaagaatatattataaggatatacttctctg

SEQ ID NO: 136259 - DNA, 2164 bp, Zea Mays
ggatccgcgcgtctttgctcggccggcggcatccccagctccccctttgcattgcaaatttgcaatggctcattcagagcgaacgcagtacctgaatctagctctaccaccactcctcgtcgccctactcctcgcatcactgccccaataccagccacagccacagcccgacgacgacggcgcctacttccggtacagcaactgcgccccgacgccgtaccgctgcgggccagtcaagttcgacgtcgggtacccgctgtcggtgacgggcgtggcccggccggactactgctcgttcccggggtaccgcctggcctgcacgaacggcagcaggctcgcgatcaccatgaacgctcccgccggcgcctgggcgttccaggtgaccggcgtcgactacgagaaccgcctcctcaccctcgtcgaccagggcctggcgcagcaggcctgcctgcagccgtaccggaacaccaccatcgacggcaccaggttcgcgtacaccgaccgcgaccagttcctgacggtgtacgtcaactgcagcgccgcgtccccgtcgctgccgttggtggtcgacgtcctctcgtgcctgtccgggggcccgtcctactatagcctggacaacgggacggtggcgccggacgtgctggggtcgtgcagctccactctggttgtgccttacaactcctccatggctgctgcggctgggagctctggccttggccttggggatgccatcaacggcgggttcgccgcgcggtggacggccggtgcggcgtggtgtggagactgtgtggattccggaggccgctgtgggtataactccagcagccctactgatcatacctgttactgccctgatggcacatcctttggaacatgttcgtcaggaactaagaagaacaaaaaggcgattgcaatagggagctccatagctgccggcgttttgctcttgcttcttgtggtcatgacgtgcttgtacatccgcaagagaaggcagtacaagatgacctcgtcctccaggttcctcgagcccactgcatccggcgggacgccgcgttccagaggtagcactgccatggagtccggcagcgtccgcagcctgcaaacgcaccacttcacataccaggaactggaggaggcaactgacagcttcagtggcgcaatggagatcggcgatggcggattcggcaccgtgtacaaagggcatctccgagatgggcgcgtggtggccgtgaaacgcctgtacaacaacagctgccggcacgtggagcagttcctgaacgaggcggccatcctctcccgcctgcgccacccgaacctggtcctgttctacggctgcacctccagccgcagccgcgagctccttctggtgtacgagtacgtgcccaacggcacggtggcggaccacctgcacggccaccgcgcggcggagcgcgcgctcacgtggccgctccgcctcggcgtcgccgtcgaggcggccgccgcgctggcgtacctgcaagctgtcgagccgcccgtcgtgcaccgcgacgtcaagaccagcaacatcctcctcgacgccgacttccacgtcaaggtcgccgacttcgggctgtcccgcctcttcccgctcgacgtcacgcacgtctccaccgccccacagggcaccccggggtacgtggatccagagtaccaccagtgctaccagctgacggacaggagcgacgtgtacagcttcggcgtcgtgctcgtggagctcatctcgtccaagcccgccgtggacctgacccgcggccgcagcgacatcaacctggccggcatggccatcaacaagatccagcagtgccggctggagcagctggtggacctcggcctcgggtacggctccgacgaggcgacgacgaagcagatgacgttggtcgccgagctggcgttccggtgcctgcagcagaacggcgagacgcggccgccgatcaaggaggtgttggacgccctcacgagcatccagggtgacgggctcgggaagaagactgacgcgctcatcgcgccgcgctcgcccgacaccgtgcacgctccgtgggatagcatgggtacagtacaaccccccgtactagccaatgagcaccttgacgagtgcacggtaccacagtataggataagatccgtgactgaaatatgtcatgactga

SEQ ID NO: 136260 - DNA, 3923 bp, Zea Mays
atggcgacgccgctggccgggaagggcccgatcgcggcggcgatcccgcggtccccacccccactggccgagggcggcgcgggagggtcggcggccgaggcgcccgtgctcatcttcgtctacttccacaaggcgatccgcgcggagctggagcggatgcacgccgcggcggtgcgcctcgccatggggcgcgcgggcggggacgtggccacgctcgaggcgcgctgccggttcctcttcaccgtctacaggcaccactgcgacgccgaggacgcggttatttttccagcacttgacattcgagtgaaaaatgtcgcagggacatattctcttgaacataaaggagaaaatgatcttttcgcacatctattcactctgctacagttggatgtgcagaatgataatgctattaggagggaacttgcatcctgtactggagcaattcggacgtttgtatcccaacacatgtccaaggaagaagaacaggtcttcccgttactcatcaagaagttttcacacgaagagcaagcagatttagtatggcagttcttatgtagcatccctgtaaacatgatggcaaaatttcttccatggatttctgcttctgtttctacagatgagaatcaagatattcttgactgcctaagtaaaatagttcctgaagaaaaactcctccaagaggtcctcatgattatggcatcacacatcttaacttcccatttgtaaaattattggcgtatttcacttcagttttttactttgtgaaggttgttttcacgtggtttggagggaaatcagaaagcagttctacatgtgagtctagctctggccaaacagataaacatgcacattcacttgaacacaccaaaattggaaagaggaagtctatagaatcaagtcagcttgtcactcatccaattgatgagattctgtattggcacaatgctgttctgagagaactgagtgatatagcagaggagactaaaaggatacatcagtctggagatttttctgacatagcaggatttaatatgaggctgcaatttattgcagatgtgtgcattttccacagtattgccgaggatcaagttatattccctgcagtggatggtgaattgtcctttgtgcaggagcatgctgaagaagaacggcgattgaataaatttaggagtttaattgaacaaattcaactagcaggagccaagtcaactgtagttgattttcattcagagttatgctcacaagctgatcaaataatgcagaaaattgagagtcacttcaatgatgaggaaataaaggtacttcctaaagctaggataaagttctcaccggagaaacagagggaacttttatatcagagtctatgtgtcatgccactaaagctgttggagcgtgttctaccatggtttatagtgaaactgaatgatgcagaggcagtgtcttttcttcagaatatgcggttggcagcaccttcctctgaaactgcattggttactcttctctctggctgggcgtgcaaaggtcgtctggaggacacatccaaccctggaaagttcgtatgcatggcatcaggagcggtcacttgtgcgtcagatgggaatggtttcaaaacatgccagtcactctgtccatgttatgtaagtagcaatggagctttttcaaaaccagttaagagagcaagtcaaggagaatctagcacaaatactgacagaaatcatagctcacacaatgctgctactgaagcatcgcaatgtaacaacagagcctgttacattcccaggttaagagtagaaagtagctaccttggtgttcattcatctacccctacaaaatcctttcgccctctgtctttcaattatgttgcaccttcattatattcaagccttttctcatgggacacagatacactagtatccggcccagataacatttctaagccaattgataccatattcaaattccacaaggcaattcgcaaggatttagagtttttggatttggaatctggaaagcttattgacgggaacgagtcttgccttagccaattcattggaaggtttcgtttactgtggggtctatatagagcacacagcaatgctgaagatgagattgtatttcctgctcttgaatcgaaggaggcattgcacaatgttagtcattcatacactcttgatcacaagcaggaagaaaaattgttccaagatatatccactgtactatctgaactttctcaactacatgatggtttgagctatcctcttgatgttgaagctggaacaaatgatatttcaagtaatgagattgattgggctagaaagcgtaatgaacttttgacaaagcttcaaggattatgcaaatctatccgggtcacgttgtcaaatcatgttcatagagaagaacttgagttgtggccattgttcgataaacatttttctgtagacgagcaggataagattatcggtcatataattggaactactggtgctgaggttctgcagtcaatgttaccttgggttacatcagcacttagtttagaggaacagaacatgatgctggatacatggaagcaagcaaccaaaaacaccatgtttgatgaatggctaaatgaatggtggaagggaccttcaacttcatctgacccatcagacaaggcttctactccttcagaagaaagtcattttcaggagaatcttgaacaaaatgaccagatgtttaggcctggttggaaggacattttccgaatgaatcagagtgagctcgaggctgagattcgaaaggtctctcgagattctactcttgatccaaggaggaaggcctatctgatccaaaatctcatgaccagccgttggatagctgctcagcagaaatcaccacaaccaagcgtcgaaggacataatggatgtacacgacgacctggatgtgttgcttcgtaccgagacccagggaaacaaatatttggctgtgagcattacaaaagaaactgcaagcttgttgctgcatgctgcgataagttattcacttgcagattctgtcacgataaagttagtgaccatacaatggacaggaaatcagtgatggagatgatgtgcatgcaatgtctgaatgttcaacctgttggtccaaattgtcaatccccttcttgcaatggactgtccatggccaagtattattgtagcatatgcaagttcttcgatgatgaaaggagtgtctaccattgtcctttttgcaacttgtgtcgccttgggagcggattgggcactgatttttttcattgcatgaagtgcaattgttgccttggcataaagatgatagaacataaatgccgggaaaagatgctagagatgaactgtccaatctgctgcgactttttgtttacatcgagtgcaccagttaaaggccttccttgtggccacttcatgcattcggcttgttttcaggcatatacttgtacccactacacttgtccaatctgctgcaaatccttgggagatatgacggtgtattttggcatgcttgatggtttgctggctgcagaacagcttcctgaggaataccaggaccggtgccaggatatactgtgtaacgactgcgagagaaaaggcaggtcacggtttcattggctctaccacaagtgtggtttctgtggttcttacaacaccagagttatcaagactgatacggcagagtgttctcgccctctataatttcttttatgcaatccatttgtatatatatatcgacggggtagaaaccttgtgaccgtaggtgtgatagtttttttatagagtgaactgggggaggaaccccacctggatgtattatgaggaaaaagtgactgtgcacatgaggagtctgagaattactcgctcccgtcccaaactaactgtatttctacgatttgaaatatattcgctcatatattt

SEQ ID NO: 136261 - DNA, 1768 bp, Zea Mays
gtcgtggtttgggcctgcgcgcctttaaactgtattgggcttggcccatgtacaggaaccaaacacatggtacaaaatctaggtattgtgaaatacttctgccactgccactactgccagcctgccagggatctatttgtaaaaagacaatgacaaaattgacatcaaagcgaaaaagaaagaaaaaacaccctgtcctcaccagttcaacgcctcttctccgttcacccggcgtgtgctctgcctctctctctctctcgtgcagcgaccgccgacgcgcttcgccagaccttcgccggcgacgagcactcaccagggcgtgaaaatgtcaacaagctctttgaaagaacccaatgtttctcaatcaaaagacgtggagaatggaaatgacaattctgtgaaatcctgcattagcaagcctgtgttgaatggcaacaaatgtgccaacaaggaacaaaatgttccgtcttgttgccctggcgctgtgacaaatggaaacgaggctggaaatgcagacgtggagtacattgattctgagaatctagtggatctaccagatgttgatgcagctctatgtaccttagttaaaaggttggattcaaaggactgggttatgacatgtgaagctctcaacaatgttcgtcagttggcgatgtatcacaaggaaagattgcaggagctgctggagcctctagttcctcttatcgtgaaatctgtgaagaacccaagaagtgctgtatgcaaaacagcactgatgacttgtgctgacatctttaaggtctatggtgacctactggttgagtctattgatccactgctagtgcagctgtttctaaaggcttcacaagataagcgttttgtctgtgaagctgctgaggcagctcttacatcgatgacaagttggatctccccattactactgttaccaagaatgcagccctacctcaagaacaggaatccgcgggttcgagcaaaagcatcagtgtgtttgagcaagagtgtaccttgcttagatgtgcagggaatcagagaatatggaatggataagctcgtccagattgcagcaacccaactcagtgaccagcttcctgaatcaagagaggctgctcgcaacctggcactggaactacaggtattatatgagaagtctcaggcctccacctctgacgaaaatgagggtgaaccttctgtctcacaagatgctgagtcatgggaggctttctgtcagtccaagctttctgccttaagcgcccaagccatccttcgcgtgacctctactactccaaaagagggtgtcgcctctacttcaaatgctacaaaagagggtgtcacggcggccccaaaagaaggtttggatgtggattgctagcatgaggcacacaagcccacaatgagtttgtagatgcgatcagagcgcgattgtccacccccttcggtttttttgatgtacatgcttatggctggtccttggttacatccagttgggaatcggttgattattggttcgggaattcaggtgtgaccgcggtgttaatattggttgggacatatatctgctatagttgattgtataatcattttgttccactacttggtatttgtttcgccaggtgaacgtagaatttgacccacggtcagtgttatatacagtcctctttctgccacatcgggtgcaggttatgttatttttgaaggagatgtcattggcattcgtgcgccacccttatgttgtactctctctccgttttaaatcataagtcgttttgac

SEQ ID NO: 136262 - DNA, 1072 bp, Zea Mays
cctcttctcctcctcctccccctccctgtctcgctcgcgtcgcccctccactgcacccgcctctctccctcctctcatggtcatcatggccggtgcctccgaccgccgccgccaccaccaccacgaccaccacacagccacggccaagcccgctccccccgccgcggcgtctccgtccccgacgccggctcccgccaaccgcacccgcctccacgacttcgccttcccgacgcaaagctggggcgcgcaccgcctcctccgctgctccaaggacgtcggcggccctgcgtccccgccgccgcacccgcagacgccgtcgccggacaaggagaagcaccagcaggcctcctcccccggcgccgcggccgcgtcgcagcccccgcgcccctggaacctccgcacccgccgctctcccaccgccgcgccgctcgcgtcgagatcggacgccgcggcgccggcgggcggagcgcagccgccgcagctccagtcgccgcccccgccggccgcgcccacgaagagggccttctccgccgcgctcagcagggacgagatcgccgaggacttcgccaccatccgcggaacccgcccgccgcgccggcccaagaagcgcccgcgcgccgtgcagcgccagctcgacatgctgtacccggggctgtctctcgccgacgtcaatctggactcgtacaagatcgaggagcagaggtgatcggcgccctgctgctgctgctgctgcaaatcggaggagcttttcagatgtttccagctgtccctttcttggtgcgatggctaacatcgccatcccatggttcttctagttcctgtggattaggatgccgaacgcttgatttccagtgctaatctgtacagggagtcctgctattaagtatatgataaattagttatggggccgcttggtcatgctcgtgcttccttatctgatgttgagtctggggtattatggttctggtaggattggccgattgggtaatgtcctttggccatgagaagctgtcatgggattgtacatggttctaatctatgaaatgttcctgtttctctcattcaaaattcc

SEQ ID NO: 136263 - DNA, 312 bp, Zea Mays
ttctggcttgttgtctcgtttggaagatgtatcttcaggcttgatcctgtctcggttggtcatatccttcaagctgcttttggtggttctgccaggggattcatggtcctcccgcttgccgatcgggttttccgtttctcggtttcctccagggatgttgggttccacatttacaactccagatgcatcgctcgttctgaattcaaagctttcttcaacttgtggaactcgggtggaccaaattggaactatgagctcaaactattccttcaggaggagaatgccaactggtggtttgtctcgggcaggaaa

SEQ ID NO: 136264 - DNA, 1398 bp, Zea Mays
tcccaatttctcccgactataaatgagtccacctcccgtttccgccccttaaccgcatcatcctttccctcgcgccgccgccaacgcaacccttgcagccccaatccctcacagcaaccatggctggcgcgcaggagtccctctctctggtgggcacgatgcgcggccacaacggcgaggtgacggcgatcgcgaccccgatcgacaactcgccgttcatcgtctcctcctcccgcgacaagtccctgctggtgtgggacctgaccaacccggtccactccaccccggaatccggcgccaccgccgactacggcgtccccttccgccgcctcaccggccactcccacttcgtccaggacgtcgtcctcagttccgacggccagttcgccctttccggctcctgggatggagagctccgcctctgggacctctccaccggcctcaccacccgccgcttcgtcggccacgagaaggatgtcctctccgttgccttctccgttgacaaccgccagatcgtctccgcgtcccgcgacaagaccattaagctctggaacaccctcggtgagtgcaagtacaccatcggaggtgacctcggtggcggcgagggccacaacgggtgggtctcctgcgtcaggttctccccaaacacatttcagcccaccattgtctccggttcctgggaccgcaccgtcaaggtctggaaccttacgaactgcaagctgcgctgcactctcgatggtcatggcggatatgttaacgccgtcgccgtgagccccgatggatcgctctgcgcctccggcgggaaggacggtgttactctgctgtgggatttggctgaggggaagaggctgtactcgctggatgcgggctccatcatccactccctctgcttctcgcccaaccgctactggctctgcgctgcgacccaggactctgttaagatctgggaccttgagtcgaagcacgtcgtgcaggacctcaagcctgacatccagatctccaagaaccagatcctgtactgcacaagcttgagctggagcgccgatggaagcaccctctacactggctacaccgatgggtctatcagggtctggaagatctctggatatggctacgcaggctagatgtcgaaatccagtcgagggtctaggaggtcttgttctgcgaaacattgcaatgcggaacatagttttttttatgtgagttacatcgtctgcttggtactttatggtcgcccaactatctaagcttagctttgttaatgaagtttattaaatttgcttgtttggttttaccttgtgaaagggggtgtttgtctgagtttataatctgtttaccttatagtgtttttttttggcgaagttaactgcggaaatggttacttcctcagctggcaaa

SEQ ID NO: 136265 - DNA, 1343 bp, Zea Mays
tcaccttcgttttgtagcaaccgtgacactctgatttgtcctctaagctcgcgccatatcagttcaccagctacttgttccggttgctatcggccatcgccatgtcgtcgtccctgtacaagcagctgggcctttcgggagccggctccccgctctccggccgccacctcgcccttctcgtcctcggcgccggcttcctcgcgctcaccgtcttcgtcgtccaccctaacgagttccggatccaatctttcttctcaggcagcagctgtggcggccgtaccgtcacggacgcagccgccgccgcagtcgccagtcctcacggtgacaccaccacggagaaggaggacgacgcacgggcggacgacgtgcgcgtcctcatcggcatccagacgctgccgagcaagcgcgcgcggcggcacctgctgcgggacgtgtactcgctgcaggcgcgggagcacccgccggtcgccggcagcgtggacgtccgtttcgtgttctgtaacgtgacgtccccggacgacgcggtgctggtggcggtggaggccctccgctacggcgacatcatcgtgctggactgcgcggagaacatggacaacggcaagacgtacaccttcttctccaccgtggcgcgcgcgttcaacggcagcggccggcgaccgaggtacgactacgtgatgaaggccgacgacgacacgtacctgcggctgccggcgctggtagagtcgctgcgcggcgcggcgagggaggacgcctactacgggctgcagatgccgtgcgacacggagaacttctacccgttcccgcccttcatgtccgggatggggtacgcgctgtcgtgggacctggtgcagtgggtggcgtcctcggacttggcccgccgcgagcagaacgggcccgaggacatgtggacggggcggtggctcaacctcgccggcaagggcaagaaccggtacgacaacgcgccgaggatgtacaactacaagggcgcgtcgccggacagctgcttccgccacggcttcgtcccggacaccatcgccgtgcacatgctcaaggacgacgcgcggtgggccgagacgctcgcctacttcaacgccacctcgggcctctaccgccagccgctgccggcggccagctctccctgacgatgagctcaagtgttgaaacgttcgtcggcccggatgcgtgcgttgaatattgtgatcaagggttggtggcggtagttaggccacaggataggctgtatacgtattacgtgttcgttttgtcttgccgccctgttgattgataggaatttaattgttttccatatttaatttaatcaaaaaataatataatacattcgt

SEQ ID NO: 136266 - DNA, 2567 bp, Zea Mays
agaagcatctgcaaccgtcattccaggctcacgaggaaactcatttactcgaatcatgtcggactttgtcaggagtagatatgataagcaagaagatttccaagttttgttgagcaagaaagatcctggagaacaacctcagcacaaggattacctgtggatggctcactggaccaaagcaagcagcgctgcagaaccccgaaacaatgacagcaatcctttggaggataccaacaatggcactactacgaaagatagcgagaccttgccttatgaattcatgaaatctacagttgctgaaaggctcatggtaggagtacgccatggaagtgcctccatgcagcatgtccgacaattcaagtctagtatgcggggtatgccacgactttccaatgaattgggaccaaagaatagtgaacaggttgatgagtcttttgaaaaatctttgaaaaacgatgctatgaacttgagaactaggcaagttgtgtcagaaacatattctattcacaagctttcagagttaccgttggattttcagaaccttgggagctcagatgatccaagtccagattggagccactttccaatgttcgaaattaatcaaaagattgacagtattgtcaaccgtaaacgaaggtctccacctctggatctaaatgtgtctgcatcccatgtgatggccctatcgtcacaagaatacatgatgcactcacatcaaacagctgatgagaacatggatacgtgcaaacctgcagaaggctttgcatctcgtgtagaagatcatgctggcttcaattcagatcctccagggccaaagttaaaagggcaattgttggataccatgtcatgttcttgcagcaaggatgacaacaactcagcagattgtccaatagatgagcagcacacaagccactattttgcaaactcaaagcatgaactaccctctgtatctaacaaaaagaagttcaagtttgcaggaaacaaccacaatcgaattgttgcaagtgcgtcccacgatctgaagacaaaaagatctgctgtccataaacaacaaagtgctgcagaggcagtgttctgtgcaccagtacttgatagtgagtttcagaatgaacctataactatttccaacatcgacaagaaggatggtgaaaattttcatgatatgtataaatgtcttggcaaggctgtttcatgtcctttgttaccttatgagcatcgtcatctgaatacacagagaacggaatctgcagaaaatttgaaagtctgcacgcttcctgatcatcaaactgcaaataaattgacagaaaagagtcatggtgagctgctgacatatggaccaaagtcaaaggaaatgtatacaggttcttgtaaccaaagaaggtcttatttctttgaaaagttaacgattccttccaaatcacaaagtacatatcctaaaaattctgcgtcttcaggaaaatctagcgactttggagtttgtatgtatggcaccaatattggcagtcagttattcagagcacagaatcaatcttcagctaagactgaaacattgcacagcgatactctcattgggtccaaatccccagcaggcatcgcttcattgtcggcacaaaaggactatggttgcacggacgaagcaaaaagtgagcagctcgtagctccgtccaggagaggagattcaggatacggtaaagaagatggatttcataatgtcaatgaaggtcatgatgtttggtccaaagcaactattggtagtaagcaatcatgcatgcccggaacgggaatcacgaacctagatctgatactttcccagatgagcagaatgagaaatcaaatttccattggtagaattcaaccaccaataggtgccgagccaagtgacagatggctcaagcgcctacagcctgacataccagatcctgacatccctggttccaggaggccaaacgttggaggcagccctccactcaggcaaagaaatcgttcgtttgacatggcacttccttgcaacaggactgacactggaacaactgactgtgttatggaggaccagagcttggataaagtggaaaaaacgcaagaaaagcaagaaagtaccccaattccagcgaagagcgtgaatagctggataggaagatggtgccagggaggcactcctgttttccatgaaggcccaggccagggaaggcaagcaacaaagcctggccggccatctgaagaactcgaaggtcggttcccaagcattgcagcgatggcgatgatggggcgagcgatgaacaagcttcggccgtgcgagcatcagaagatggggccacttgtggtgtggaagacagattgacctcatatatatatgtttttgggtgtaatatagtggtttctttccaaaaaaagaaaaaaaaatgaaaagcaacagtgaattttgcctggtttattgtttatggtgtaataaaccatatgatggctcatggtttattgttttctgaagtgaaagtagctaggtgtagtggatactggtgatgtaatggtctggtctcatataccaacaatataataatattttactgttt

SEQ ID NO: 136267 - DNA, 1463 bp, Zea Mays
ctcagcagtgccaaagaggcgcctagccgcctactccatctcttgcttccctgcggcattctctcggcgcttcagatatccaaatccctcgccgcaagccttccccttcagcctgcccgccgctggcgctgcccttcttccccgcccccttccattccgtctgcatccgtcttcattaccattcttacgctcgggcggttcgtcgtctcgagcttccttcccgggatcgacgacggcaggccgctccgcggtgatggcgggccggtcgctcgcggagcccagtcttcggtccgccactgacgacgacgtctctgccgtgccctctaccaccacgtcggctgcgcgcggtgtgtctgcccaagacgaggggccggcgagcggtgtgctggtagagtgcaggatctgtcaggaggacggcgacgaggcctgcatggaggctccttgctcctgcaagggaagcttgaagtacgcccatcgcagatgcattcagcggtggtgtgacgagaagggagacaccgtgtgtgagatatgcttgcagcaatttgtgccaaactacactgcctcttcaaagctgtttcagcgcggaagaaacacgtttttcttcagtgctcctggctacatccaagcacggccgatgcagaacgcggatcactccgctacgtcgacaggctacggacacgaccaaacgccggatcctaccggcgtactatgctgtcgcataatcgccatcgctctgatggtcctcctcgtcttccgcgacgccgtctccgtcttcctgggtgaccaagacgcctacaccgttgcagtggtcacgctgctgatgcttagaaccgcggccatcgtcattccggtctacatcatactggtggcggttaccgagctgctgcaccgacgccggcatcggcaggttgtgcacggccaggcttcagatcatgcggcagaggagcggacgcagccgcagcagcatgtcatcagcattcagtagcaggctggccatggccatccatcctggtgttcttgctgtgctgtcgtccagaattgtgttgatccttcgacgaacgactgagcttcaggtgtgacgtgacgtgccagcgaatatgatatggaagatgacttggctgtaatcgtagcttcagaacagctttgactgcacctgtacatagtagtagtagcagtaccttatttaactgctcccagcagcattctatagagagttagagaccactgtacgtgaccaccactttcttcggatgaagttgaatcagaggtaaggcaaattcagagctccacaggtttgtgcactgggcgtagtcatgggctcatggcctcatggggcgggtctgagctatgaaacttccaagaaacatatgttggtcactcaaccgagatactcagttttagcggccaaggtatatttcatatttgtaaatcctgtgaaatttcgcaaaacatcgttcaatgtg

SEQ ID NO: 136268 - DNA, 519 bp, Zea Mays
aaaaaaaaccctttcaaagttcttagttgtttagatcaaagaaattgaaaacaaaaaatcactattcactggagctactatacctttgatgcacaatcaactcgtgccatcacaacagtccctggatgtgcagcatctgggccattgaaaagttttgcaaccctctcataacgaggggtcgaccagtgggcgaagaactcgacgaccgcgaacgactccggcgaagtctggaggaaggcggtgaagttggacgcgtcgaggtccacggccgcgtccccgtcggccgccttggcgcccccgacgccgagcgagcggagcgcgacggccccgtgcggcgccgagccgaggcaggcggcgaggacggcgagggcgaggaggagacgccgcgccgccgccgtcgaggcggccatggatcgcggcgacgtcggatctctcggctgcgccggcggggtttggtgatccgtttcggacacctgcctaccccgctcggacctcggagagtcctcctactactcctag

SEQ ID NO: 136269 - DNA, 1278 bp, Zea Mays
cgtcttctacttgcgcggttgcgccctgcccctgcgtctgtacgcccccgcccccgtacggctatctaggctaccactcactggtcactggtcagactcagaaccccagcagcactgcgcagtgcagcgcatagttgatcagctgcagctcgtgcacgtagccgtgtgccgcgcgcggcggacatgggccgcgcgccgtgctgcgacaaggcgagcgtgaagcgggggccctggtcgcccgaggaggacgagcagctgcggagctacgtccagctgaacggcatcggcggcaactggatcgccctgccgcagaaagcagggctgaaccggtgtggcaagagttgccggctgcggtggctcaactacctgcggccgaacatcaagcacggcggctacaccgacgaggaggaccggatcatttggtcgctctacagctccatcggcagcaggtggtcgatcatcgcgtccaagctccccggccggaccgataacgacgtcaagaactactggaacaccaagctcaagaagaaggccatggcggccagtagcagcggagcagccttcgcggcgcccgccacgccggcgctctcgcccgcctcctcgtgcgtcaccagctcctccagcggcgacgtgcgcctcggcgcagcgtacacggagccgccgccgcctcggcagcacgcggggctcgtacgctctgacgctccgcggacggagctcgcgcccgtgccggcagtcgcgcacctggacggcgcctgctggccggccgcggcggcgctggacgtgctcctgcccgagctcggcggcgagcagctgttcccgtacgggtacggcgacttcttcggcgggctgcaggacagggccctggagcagcagctctcgtcgtgctacttccccaacgtggccgagatatggggcgccgctgccgtcgcccccgacggcaagccgccgggtctctgcaacaggctgacgtagtggggaactggggatacggcggtcgagcccgaacgtacgaagaccccggtagagttcacgggatcgatgcgcggaaacatcgatttggtgtacgctttgtgcgtgcagtgctccattggttcatcatcattcatggacgacgacgagtgcaagctagctagtagaatagctcttgctcttctccccttgcctgttcttgtttttctccctgcgcttcgcttcccttcccttcccttcgcgtggacatacagatacaggacgacgatgtattttgctgtgcattattacatgtaaattactcactac

SEQ ID NO: 136270 - DNA, 1424 bp, Zea Mays
cgtcttctacttgcgcggttgcgccctgcccctgcgtctgtacgcccccgcccccgtacggctatctaggctaccactcactggtcactggtcagactcagaaccccagcagcactgcgcagtgcagcgcatagttgatcagctgcagctcgtgcacgtagccgtgtgccgcgcgcggcggacatgggccgcgcgccgtgctgcgacaaggcgagcgtgaagcgggggccctggtcgcccgaggaggacgagcagctgcggagctacgtccagctgaacggcatcggcggcaactggatcgccctgccgcagaaagcaggtcagggtagtacagtacagcctcatcccatcgtcgtcgtcagatactcagattgttcagaatccttgtttgctgccgccaacgccaatcagggtagcattacagtacacggtattcattttaccttccttgtgctttgtccacagggctgaaccggtgtggcaagagttgccggctgcggtggctcaactacctgcggccgaacatcaagcacggcggctacaccgacgaggaggaccggatcatttggtcgctctacagctccatcggcagcaggtggtcgatcatcgcgtccaagctccccggccggaccgataacgacgtcaagaactactggaacaccaagctcaagaagaaggccatggcggccagtagcagcggagcagccttcgcggcgcccgccacgccggcgctctcgcccgcctcctcgtgcgtcaccagctcctccagcggcgacgtgcgcctcggcgcagcgtacacggagccgccgccgcctcggcagcacgcggggctcgtacgctctgacgctccgcggacggagctcgcgcccgtgccggcagtcgcgcacctggacggcgcctgctggccggccgcggcggcgctggacgtgctcctgcccgagctcggcggcgagcagctgttcccgtacgggtacggcgacttcttcggcgggctgcaggacagggccctggagcagcagctctcgtcgtgctacttccccaacgtggccgagatatggggcgccgctgccgtcgcccccgacggcaagccgccgggtctctgcaacaggctgacgtagtggggaactggggatacggcggtcgagcccgaacgtacgaagaccccggtagagttcacgggatcgatgcgcggaaacatcgatttggtgtacgctttgtgcgtgcagtgctccattggttcatcatcattcatggacgacgacgagtgcaagctagctagtagaatagctcttgctcttctccccttgcctgttcttgtttttctccctgcgcttcgcttcccttcccttcccttcgcgtggacatacagatacaggacgacgatgtattttgctgtgcattattacatgtaaattactcactac

SEQ ID NO: 136271 - DNA, 1280 bp, Zea Mays
cgtcttctacttgcgcggttgcgccctgcccctgcgtctgtacgcccccgcccccgtacggctatctaggctaccactcactggtcactggtcagactcagaaccccagcagcactgcgcagtgcagcgcatagttgatcagctgcagctcgtgcacgtagccgtgtgccgcgcgcggcggacatgggccgcgcgccgtgctgcgacaaggcgagcgtgaagcgggggccctggtcgcccgaggaggacgagcagctgcggagctacgtccagctgaacggcatcggcggcaactggatcgccctgccgcagaaaggctgaaccggtgtggcaagagttgccggctgcggtggctcaactacctgcggccgaacatcaagcacggcggctacaccgacgaggaggaccggatcatttggtcgctctacagctccatcggcagcaggtggtcgatcatcgcgtccaagctccccggccggaccgataacgacgtcaagaactactggaacaccaagctcaagaagaaggccatggcggccagtagcagcggagcagccttcgcggcgcccgccacgccggcgctctcgcccgcctcctcgtgcgtcaccagctcctccagcggcgacgtgcgcctcggcgcagcgtacacggagccgccgccgcctcggcagcacgcggggctcgtacgctctgacgctccgcggacggagctcgcgcccgtgccggcagtcgcgcacctggacggcgcctgctggccggccgcggcggcgctggacgtgctcctgcccgagctcggcggcgagcagctgttcccgtacgggtacggcgacttcttcggcgggctgcaggacagggccctggagcagcagctctcgtcgtgctacttccccaacgtggccgagatatggggcgccgctgccgtcgcccccgacggcaagccgccgggtctctgcaacaggctgacgtagtggggaactggggatacggcggtcgagcccgaacgtacgaagaccccggtagagttcacgggatcgatgcgcggaaacatcgatttggtgtacgctttgtgcgtgcagtgctccattggttcatcatcattcatggacgacgacgagtgcaagctagctagtagaatagctcttgctcttctccccttgcctgttcttgtttttctccctgcgcttcgcttcccttcccttcccttcgcgtggacatacagatacaggacgacgatgtattttgctgtgcattattacatgtaaattactcactacagtggt

SEQ ID NO: 136272 - DNA, 1429 bp, Zea Mays
gctgtgttcccccaccctccaggctgcctgactcggggtctcgggcaggttccgccgcatcgtgtcgtttcttccctttcccgtttcccccgttcagttcagcttcggttggctcgccgtactcgggttgttcctcgcctcgcttcgcttccttcctccgcagtcctcgtctcgaattcgctcgcggtgggagaaatcggggcgcgaggatgaccgtgatcgacatcctcacccgggtggacgcgatctgccagaagtacgacaagtacgacgtcgacaagctcaacggcgccaacgtcgccggcgacgacccgttcgcccgcctctacgcgtccgtcgacgcggacatcaaccaatgcgtcgataaagcggaaacggcgaagcaagagaagaaccgggccgcggtggtggcgcttaacgccgagatccggcgcaccaaggccaagctcctcgaggaggaccttcccaagctgcagcgcctcgccgttaagaaggtgaaagggctgacaagagaagaaattgcgacccgtagtgatctggttgccgctttacctgacagaatacaatcaatcccagatggtagttctactgccacaaagaaaaatggaagttggggagcctcaggatctcgcactggaggagccataaagttcgactctactgctgatggaaactttgatgatgagtactttaaggggacagaagaatctaatcagttccgtcgggaatatgagatgcgcagaatgaaacaggatgaaggtttggacgttattggtgaaggactggaaactttgaaaaacatggcatctgatatgaatgaggaattggacagacaagtccctctgatggacgaaatggatgataaggtggatagagccaatgcagatttgaagaataccaacgtgagactgaaggagactgttcttcaacttagatcaagtcgcaacttttgcatcgacatcatccttctgtgtgtcattcttggtattgcggcctacctttacaatgttctaaaaaagtgaggtggagtcttcttgccttggaaccgctcatgtcgtggtccctttgtcaccatggttctacccagttctttgagcgatttgtgtgcaccaagccatttgttttgtcttatatctgtattattatggtgtccaagttgaaccttgactaggcttgttgaagagaacgctggtaacatgtttgctatatatctggggagtcgatttcgtagcgaggaatgattacacggcaccattcttatcgtcttatcgaaccacgggctcatgtatattcattccgtcagggctttgtctccattgtttctgttgaatcagtcttggtaccaagagcggcgctagtgagcaatcaacgatgactgctacttctttagcctaatgcctaacgaatgtgatcgcagctgcttatcagg

SEQ ID NO: 136273 - DNA, 1264 bp, Zea Mays
agagttcgcttttgtagttcagtttcgacagtcgtcgtcccctctactctctcggcttccgcagaccccagcttctctggccctctcactccaaacatcgggctccaggccgtctcccgccaacccaaattcgcttcccgccgctccccattaaacccgcttgaaaggtcgcgccctcgagcagagcaacccctgaccacaaatccgatccgcagccgccgtgcctcgctttcgtcttttcccctctgctcgagtacgagcggctactcccggcggctgcggcggcggcgatgagcgcggtgaacatcaccaacgtggcggtgctggataaccccaccgccttcctcaatcccttccaatttgagatctcctacgagtgcctcgtgcccctcgacgacgatctggagtggaagcttatatatgttggatcagctgaagatgaaaactacgatcaacagcttgagagcgtgcttgttggccctgtcaatgttgggacctaccgttttgtccttcaggctgacccaccggatccctcaaagatacgtgaggaagacataattggtgtgactgtgctgctattgacatgctcttacatgggccaggagttcatgagagtaggctactacgtgaacaatgattatgatgatgaacaattgagagaagagcctccagcaaaggtgctaattgacagggtgcaaagaaatatcttggccgacaagccccgagtcaccaagttccctatcaacttccatcctgaacccagtacaggcccggggcagcagcagcaggaaccccagacgacctcgccagaaaaccacacaggcaatggcgaggccaatggtagcaagcctgaggctgaccaatgaacacagttggcttcagatattttgatgcgtgccccttacaggttgtgctgtaatattacaaacgggattagtggttgtgcattgccctgggatcctgaactctgttctgtaacttgagatgcaaatgctgggtacctggatgttttcttaagcacgagtatttcagcctcgagatgtgatcaattgcatcgaaagcatgtgctccaagaacgcaagcatgaggaaatacagcaaaaaacagcagattaactgaatcctttctctgaatctttttgagaaacaactttgcacgacgattcactgctgtaccaggacgcgctacgtgaatttttctagacctttttggtgcttgcagtcacgatcatttcatttgtcatcttttcacgtctcttttgtgt

SEQ ID NO: 136274 - DNA, 1924 bp, Zea Mays
gagcccagtccgcccgggacgcgtcgcgtctacgtgggcacgcggtcagacgtgcagtgcagagaccacgaaacggatcccctcgagtcgagcgaaccgaagccgaacatacccacccatcgtctcgtctcgtcgctcgtgggcgtggcgctctctccccccacctcctcttttaagacgacgccatcgccagccggccctccctcgccgtccggcgccgtcctccttccctctcatcacagtttccacctcgcgaggggctcgcgcgcgtgcccatcccggccgatcgactcacgaattcgcgcgcgatcatattcgtgcaagggcatccccgcacgggcacggccggaagcacggaatcacttccccggccgcccccaattcccgggctcctcggcgccgatccctcgccggtgttcgctttccggcggtttccgctgcgtgtcgcgggcaggcgcaagcggcttggctcggctcggctcggttgtttcctcctcgtgccatccatggaggcgaagcagcgcccgcggcacggcggggagaggaggccgccgccggcgacggacggcggcgaggagtacgacccgtggacggcgtggctctacaagccgcgcaccatctcggtgctcctcgtcggcgcctgccttctcatctgggcaagtggagcacttgatcctgaaggtactgccgctcacagtagcgtgacatcaatcaagaggggtgtctgggctatgattgcagtcttccttgcctactgcacgcttcaggcaccttcaacgatacttattaggccccatcctgctgtctggcgcctggtacatggactggctgtcgtttacctcgttgctcttacctttcttcttttccagaaccgtgacgatgctcgccagttcatgaaacaccttcacccagatcttggagttgaattgccggagagatcttatggagcagattgccgcttgagacattgtttgatgaatttgttgttgcccatatccttgggtggtggggcaaagctgtaatgatacgaaatcaacttctactttgggtcttgtcgattggctttgagctaatggagctaacgttcagacatatgctgccaaactttaatgagtgctggtgggatagcattatcttggacatattgatctgcaattggtttggtatttgggcaggaatgcacacagtccgtcactttgatggcaaaacttatgaatgggttggactgagccgccaacgaagtatcatgggtaaggtgaaaagatcgttgagccagttcactcctgctcaatgggacaaggatcagtggcatcctttcatggggccactgcggttcatccaagtgctgttcctctgcgttgtcttcatgaccgtggagcttaacacattcttccttaagttttgcctttggatccctccaaggaaccccttggtcgtgtacagattgatcctctggtggctgatcgccatcccaaccatccgcgagtacaactcctacctgcaagacaggaaaccggtgaagaaggttggagccttctgttggctctctctagctatatgcatagtggagctgcttatctgcatgaagtttgggcatgggctgtttcatgacccgatgcctacctggctgatcatcttttggagctcggtcgggactgcactcgtgattttcttgctttcgtggtcatggaggagtcaccaaaggttcaggagaaagcagctctgattgtttcagtttgctacttttctttttcgaattttatataggcgttgtacatatttgatatggtttgtgatgtaacttacgttttaggggtggccatttttctgctgcccctggcaggaacttggtttgtcacgatagatcatgcattgttgacaacatgagattgattaataaattgaaataaccgcgacatcataa

SEQ ID NO: 136275 - DNA, 2064 bp, Zea Mays
gagcccagtccgcccgggacgcgtcgcgtctacgtgggcacgcggtcagacgtgcagtgcagagaccacgaaacggatcccctcgagtcgagcgaaccgaagccgaacatacccacccatcgtctcgtctcgtcgctcgtgggcgtggcgctctctccccccacctcctcttttaagacgacgccatcgccagccggccctccctcgccgtccggcgccgtcctccttccctctcatcacagtttccacctcgcgaggggctcgcgcgcgtgcccatcccggccgatcgactcacgaattcgcgcgcgatcatattcgtgcaagggcatccccgcacgggcacggccggaagcacggaatcacttccccggccgcccccaattcccgggctcctcggcgccgatccctcgccggtgttcgctttccggcggtttccgctgcgtgtcgcgggcaggcgcaagcggcttggctcggctcggctcggttgtttcctcctcgtgccatccatggaggcgaagcagcgcccgcggcacggcggggagaggaggccgccgccggcgacggacggcggcgaggagtacgacccgtggacggcgtggctctacaagccgcgcaccatctcggtgctcctcgtcggcgcctgccttctcatctgggcaagtggagcacttgatcctgaaggtactgccgctcacagtagcgtgacatcaatcaagaggggtgtctgggctatgattgcagtcttccttgcctactgcacgcttcaggcaccttcaacgatacttattaggccccatcctgctgtctggcgcctggtacatggactggctgtcgtttacctcgttgctcttacctttcttcttttccagaaccgtgacgatgctcgccagttcatgaaacaccttcacccagatcttggagttgaattgccggagagatcttatggagcagattgccgcttgtatgttccagaaaaccctaaaaacaagttcataaatatttatgagacattgtttgatgaatttgttgttgcccatatccttgggtggtggggcaaagctgtaatgatacgaaatcaacttctactttgggtcttgtcgattggctttgagctaatggagctaacgttcagacatatgctgccaaactttaatgagtgctggtgggatagcattatcttggacatattgatctgcaattggtttggtatttgggcaggaatgcacacagtccgtcactttgatggcaaaacttatgaatgggttggactgagccgccaacgaagtatcatgggtaaggtgaaaagatcgttgagccagttcactcctgctcaatgggacaaggatcagtggcatcctttcatggggccactgcggttcatccaagtgctgttcctctgcgttgtcttcatgaccgtggagcttaacacattcttccttaagttttgcctttggatccctccaaggaaccccttggtcgtgtacagattgatcctctggtggctgatcgccatcccaaccatccgcgagtacaactcctacctgcaagacaggaaaccggtgaagaaggttggagccttctgttggctctctctagctatatgcatagtggagctgcttatctgcatgaagtttgggcatgggctgtttcatgacccgatgcctacctggctgatcatcttttggagctcggtcgggactgcactcgtgattttcttgctttcgtggtcatggaggagtcaccaaaggttcaggagaaagcagctctgattgtttcagtttgctacttttctttttcgaattttatataggcgttgtacatatttgatatggtttgtgatgtaacttacgttttaggggtggccatttttctgctgcccctggcaggaacttggtttgtcacgatagatcatgcattgttgacaacatgagattgattaataaattgaaataaccgcgacatcataaccagttgtaattaattattaaagcaaggtcactgcatattttggttccaaactaattctgggccaacaatgcacagttctgtaatacgaatgaccaa

SEQ ID NO: 136276 - DNA, 2683 bp, Zea Mays
atggaggcgaagcagcgcccgcggcacggcggggagaggaggccgccgccggcgacggacggcggcgaggagtacgacccgtggacggcgtggctctacaagccgcgcaccatctcggtgctcctcgtcggcgcctgccttctcatctgggcaagtggagcacttgatcctgaaggtactgccgctcacagtagcgtgacatcaatcaagaggggtgtctgggctatgattgcagtcttccttgcctactgcacgcttcaggcaccttcaacttcaaatgttggttcttatctgttgctcatttatcagaaccgtgacgatgctcgccagttcatgaaacaccttcacccagatcttggagttggtaaaatttctgtgttgcatattttcactagaaatgagacattgtttgatgaatttgttgttgcccatatccttgggtggtggggcaaagctgtaatgatacgaaatcaacttctactttgggtcttgtcgattggctttgagctaatggagctaacgttcagacatatgctgccaaactttaatgagtgctggtgggatagcattatcttggacatattgatctgcaattggtttggtatttgggcaggaatgcacacagtccgtcactttgatggcaaaacttatgaatgggttggactgagccgccaacgaagtatcatgggtaaggtgaaaagatcgttgagccagttcactcctgctcaatgggacaaggatcagtggcatcctttcatggggccactgcggttcatccaagtgctgttcctctgcgttgtcttcatgaccgtggagcttaacacattcttccttaagttttgcctttggatccctccaaggaaccccttggtcgtgtacagattgatcctctggtggctgatcgccatcccaaccatccgcgagtacaactcctacctgcaagacaggaaaccggtgaagaaggttggagccttctgttggctctctctagctatatgcatagtggagctgcttatctgcatgaagtttgggcatgatgctccagccctaaccgcgcataaaccccgcgccgccgctgccgcctcctgtcccggtcggatcctccgcgccgctcgcgccgccctcatcttcccagccccaacgcgacgcaccacaagggccctcgccatgtcgaagaaagtaggacgagcgaagaaagcagcgggcggcggcgagctgtcccgcttcctggagtcgcatctccagaccattagcgacaccttccagatgatggcggagtcggctccgggggccttggagcggacggagtggtctgaggtcgttaagctcggcgaccaggtctccaggcaggccaccgtcgctggaatgctctggagcggtgacttgcctgatgtagagaccctcaaagagaacatcgttgcttatttcaacatcctacagggatttcttttggtttgccacggaagcatggtcggtgctgggcctactctacacaagtccatctttgggtctgcaaaagacgtggttgactctagcttctcattgttcaagcatgctgtctctgcttatgaatctcgcagctctgaccgcaacacaactataccccaggtcacaggaactgtatgggaagcttgtgctgctctcaagaaggtgcctgcatcaaactgcattgccataggacgagccatgaccaggataggtgtgtgtctgaaagatgttctccgagaaatgaatgagctccctattggtggttctggtgatagtactgctgagaagtcttccaatggtgttgtcgacacaacgagttgttctgatagagatgagaggtctgatcttgatttagatgatgacgacgacgatgagttcactgaagaagaggttgctgttgccaagttggttattaacgtggtatctgattccttggttgtagtgaaagaggcaattcgtttcattactggtttgctcaggagctctggtaacaaagacaaagatggtgctaatgaggacagagttgagccaatggagaaattgctgagccactgcaaggagatcgcagaccaggtcaacgatcttggggcttctgtatacccaccacaagactcgtctgagatggagctcgctataaaaagactgtacaatggcatcaacgggatgcgcaaggaaatagggaacctcggtggcgcacctgagagcacctttgcagcccttgaaggattcgaaaattgccttggatctctgcgggccaggttagctgatgatgtggtgaacgagatggaaggtcttaatattagccattagcacgtactgttcagattttccatagcagtgttgtgccagtatatcttctggttttgcacgatggaaggagcttctgtggtttcagtaaatgaggcgtccggtctctgtactgatggcgttgttgcgggtcatcgattgtaaaggaagtgggcctggatttctgtaacttctctggttagtgatgccactgtttacgggtcattcattgcgcgaataagattgtttgcattatatcgttcgtgccattgcatatatatacctgtttctctcactacaatagagtttagtttatccggtcgtgagataactaaaaggatgtgaaatgactggattgacaagctagatagttgtaattttaagaggagcaaatgtgcttggtttcaca

SEQ ID NO: 136277 - DNA, 1440 bp, Zea Mays
ttatatttctcataagaattacgtggaatggatactcctctgagtaaggacagcaactttccaaagatagtccaagacaagtgactccaaagcaatgcagtttactgagcaaaagtaaatagctttgcttcttgcatgtgagatgccacacaacatgtgatgttttcccagtggtcctgttcacatttctgttgtgctgtctaaatctgatctttgtcattattgaaccccgagtttcttcacagttcatttttctgcatacagttatgcatgcactgttatcttgtaaaagtgcacccacatgtgaatagtcgcatctgtttcagacatccaaactcgtaatcaggcttgcccggtgccccgtccatatgttgtcctaggacaaaaacaattgtatctatcattgagattggctggaggtttttctgccatatcataagtaacagaatagttaagagcttgaaattgtttcagaaggaagatttctagttaagctatgacaaaaacgaactgaaatagttgtgttgttagttcttcaggaacacatggagcacctgaacattagcaacttgagaattcagtgtggattgatattaaaatttgaatttgaacgtaacttgtgcagaccaacagcctagttttactctcttcgtttggcttgcaggtgaaaagatcgttgagccagttcactcctgctcaatgggacaaggatcagtggcatcctttcatggggccactgcggttcatccaagtgctgttcctctgcgttgtcttcatgaccgtggagcttaacacattcttccttaagttttgcctttggatccctccaaggaaccccttggtcgtgtacagattgatcctctggtggctgatcgccatcccaaccatccgcgagtacaactcctacctgcaagacaggaaaccggtgaagaaggttggagccttctgttggctctctctagctatatgcatagtggagctgcttatctgcatgaagtttgggcatgggctgtttcatgacccgatgcctacctggctgatcatcttttggagctcggtcgggactgcactcgtgattttcttgctttcgtggtcatggaggagtcaccaaaggttcaggagaaagcagctctgattgtttcagtttgctacttttctttttcgaattttatataggcgttgtacatatttgatatggtttgtgatgtaacttacgttttaggggtggccatttttctgctgcccctggcaggaacttggtttgtcacgatagatcatgcattgttgacaacatgagattgattaataaattgaaataaccgcgacatcataaccagttgtaattaattattaaagcaaggtcactgcatattttggttccaaactaattctgggccaacaatgcacagttctgtaatacgaatgaccaatcattatctt

SEQ ID NO: 136278 - DNA, 237 bp, Zea Mays
atggctgccagtcaccgcacggccggtccgggccccagcgacggctccagcgcaggcgcgaggaagaagctccaactcaccaatgagcagtcgacgctgctcgaggacaccttccgcgcccacaacatactctccaacgcgcagaagcaggagctcgcacggcaggtggatctcagcgccaggcaggtggaagtgtggttccagaacacacatgttcagataacatgttttgcatga

SEQ ID NO: 136279 - DNA, 144 bp, Zea Mays
ggaccaaagtcaaaggaaatgtatacaggttcttgtaaccaaagaaggtcttatttctttgaaaagttaatgattccttccaaatcacaaagtgtacatcctaaaaattctgtgtcttcagtaaaatctagcgactttggagtt

SEQ ID NO: 136280 - DNA, 2298 bp, Zea Mays
aaacaggcacagccctcccctcctccactcctcgccctctctctctctctctctctcatcccgtcccgagaagcggacaaagcgcggcgctgcagatttcgatccggttcccaatgcctcccatgctcgccgtcgccccgtgctagctcctctcccgtctccgcttcctccacctgccgcgccagcgccacgccgcctggatccggcgagcgcgtggccgggagcctcagatccgagcgaaacccagccttcccgtggtgacggccttcgctctagctccagattggctggcggctgccattcctcctcctcctcttctcgctcgaggtttcaaggcgggtccgttcagctctgaaatctacggaggagtcttgccgccgctttaaacgtagaggtagagctgtagtatatattttggcgagtaatcctgcttcttgctccgttcccgtgctagtgctggcgtgacagtggaaaggcttactgttgccatggtattggtgtgacgaacccgtcaaggttttgcgcaagatgtggaagcagctcctcagcaagctgccccggaagtcgccggcctgcggggattcgggccagtgcagcaatggcaccggtatacagcgcacgagcagctgcgggagcatcccgcccggccgcccggcctccgccatccggcgcatgtcatccgccgtcttcccctcgagtgtcgtggccggtatcgagccgctggtctcgttcaaggatgtccccaactcggagaagcagaacctgttcgtcagcaagctgagcctgtgctgcgtcgtcttcgatttctcggacccgaacaagagctcagtggagaaggatatcaagaggcaggcattgctggatcttatagagtttgtcgagtcgaccaacgctcgcttctcggaggcagccatcgcggcctgctctaggatgtgtgccatcaacctgttccgggcgttccctccgagttgcagatctggctcatcaggtggtggtgagggcgacgaggaagagccaatgttcgaccccgcgtggtgccacctgcagcttgtttatgagctgctgctgaaatttatcggatcctcgtccttggacgcgaaggtagggaagaagcactttgatcactcattcatcgtgaagctccttaatcttcttgactccgaggatccaagagagagggattgcttgaaaactattctgcacagggtatatgggaagttcatggtacaccgtcctttcatccgcaaagcagtgagcaacatattttaccagtttgtctttgagactgatcggcacaatgggatcgcggagctgctggaggtctttggcagtgtcattagtgggtttgcattgcctctgaaagaagaacacaagatctttctttggagagttctgattcctttacacaaaccaaaatctgttggtgtgtatcttcagcagttgacctactgtgtaacacagtttctggaaaaggacccaaagcttgcaagctcagtgataattggtttgttaagatattggccgataacaaactgtcagaaggaagtgatgtttctcagtgagattgaagagatcttggagtctaccagccaagcagaatttcagaaatgtatggtaccgttgtttcggcgaattgctcattgtattaccagttcccacttccaggttgctgaaagagcgctcttcgtatggaacaatgatcacattatcagcttgattgcacaaaaccgccaagtgatcatgcctcttgtcattccagcgctagagcaaaacattcagaatcactggaaccaggcggtcctgaatctgaccgtgaatgtcaagaaaatgttatctgagatggacgacgatctcttctcgtcatgcctggcgaagtacaaggacgaagaagaaaaacgcgtgtcgctagaagcgaagcgtagacttacgtgggagaagctcgagtcagctgcagctttccagccagtgactggccatacagccgtcctagtaggccaccggccgtcagcaaatctgatcgccaccatgatctagctcatgcatgtatgccgaacaagcgaatgtggtgctctcccccccttttggtgaggcgcagcaagtgtagtgttctctattttgctcctgcttattattattttccttttgctggtatgggtaatcagtgtagtagtaagttgtaactatttccggatgtttatgttcttaaggcaaggatacctgtaacttaagactgccgagtgctgacactctacatgtatctttgcctgtttatggatgaacaggtgtcctacagtttaa

SEQ ID NO: 136281 - DNA, 2198 bp, Zea Mays
aaacaggcacagccctcccctcctccactcctcgccctctctctctctctctctctcatcccgtcccgagaagcggacaaagcgcggcgctgcagatttcgatccggttcccaatgcctcccatgctcgccgtcgccccgtgctagctcctctcccgtctccgcttcctccacctgccgcgccagcgccacgccgcctggatccggcgagcgcgtggccgggagcctcagatccgagcgaaacccagccttcccgtggtgacggccttcgctctagctccagattggctggcggctgccattcctcctcctcctcttctcgctcgaggtttcaaggcgggtccgttcagctctgtgctggcgtgacagtggaaaggcttactgttgccatggtattggtgtgacgaacccgtcaaggttttgcgcaagatgtggaagcagctcctcagcaagctgccccggaagtcgccggcctgcggggattcgggccagtgcagcaatggcaccggtatacagcgcacgagcagctgcgggagcatcccgcccggccgcccggcctccgccatccggcgcatgtcatccgccgtcttcccctcgagtgtcgtggccggtatcgagccgctggtctcgttcaaggatgtccccaactcggagaagcagaacctgttcgtcagcaagctgagcctgtgctgcgtcgtcttcgatttctcggacccgaacaagagctcagtggagaaggatatcaagaggcaggcattgctggatcttatagagtttgtcgagtcgaccaacgctcgcttctcggaggcagccatcgcggcctgctctaggatgtgtgccatcaacctgttccgggcgttccctccgagttgcagatctggctcatcaggtggtggtgagggcgacgaggaagagccaatgttcgaccccgcgtggtgccacctgcagcttgtttatgagctgctgctgaaatttatcggatcctcgtccttggacgcgaaggtagggaagaagcactttgatcactcattcatcgtgaagctccttaatcttcttgactccgaggatccaagagagagggattgcttgaaaactattctgcacagggtatatgggaagttcatggtacaccgtcctttcatccgcaaagcagtgagcaacatattttaccagtttgtctttgagactgatcggcacaatgggatcgcggagctgctggaggtctttggcagtgtcattagtgggtttgcattgcctctgaaagaagaacacaagatctttctttggagagttctgattcctttacacaaaccaaaatctgttggtgtgtatcttcagcagttgacctactgtgtaacacagtttctggaaaaggacccaaagcttgcaagctcagtgataattggtttgttaagatattggccgataacaaactgtcagaaggaagtgatgtttctcagtgagattgaagagatcttggagtctaccagccaagcagaatttcagaaatgtatggtaccgttgtttcggcgaattgctcattgtattaccagttcccacttccaggttgctgaaagagcgctcttcgtatggaacaatgatcacattatcagcttgattgcacaaaaccgccaagtgatcatgcctcttgtcattccagcgctagagcaaaacattcagaatcactggaaccaggcggtcctgaatctgaccgtgaatgtcaagaaaatgttatctgagatggacgacgatctcttctcgtcatgcctggcgaagtacaaggacgaagaagaaaaacgcgtgtcgctagaagcgaagcgtagacttacgtgggagaagctcgagtcagctgcagctttccagccagtgactggccatacagccgtcctagtaggccaccggccgtcagcaaatctgatcgccaccatgatctagctcatgcatgtatgccgaacaagcgaatgtggtgctctcccccccttttggtgaggcgcagcaagtgtagtgttctctattttgctcctgcttattattattttccttttgctggtatgggtaatcagtgtagtagtaagttgtaactatttccggatgtttatgttcttaaggcaaggatacctgtaacttaagactgccgagtgctgacactctacatgtatctttgcctgtttatggatgaacaggtgtcctacagtttaa

SEQ ID NO: 136282 - DNA, 2417 bp, Zea Mays
aaacaggcacagccctcccctcctccactcctcgccctctctctctctctctctctcatcccgtcccgagaagcggacaaagcgcggcgctgcagatttcgatccggttcccaatgcctcccatgctcgccgtcgccccgtgctagctcctctcccgtctccgcttcctccacctgccgcgccagcgccacgccgcctggatccggcgagcgcgtggccgggagcctcagatccgagcgaaacccagccttcccgtggtgacggccttcgctctagctccagattggctggcggctgccattcctcctcctcctcttctcgctcgaggtttcaaggcgggtccgttcagctctggtgggttttcgggtttgctcatactttttcttcggttggtttgcttcagcgtggtccagatttagctgcattttctcgggctgtgttttttctgtgccagaaatctacggaggagtcttgccgccgctttaaacgtagaggtagagctgtagtatatattttggcgagtaatcctgcttcttgctccgttcccgtgctagtgctggcgtgacagtggaaaggcttactgttgccatggtattggtgtgacgaacccgtcaaggttttgcgcaagatgtggaagcagctcctcagcaagctgccccggaagtcgccggcctgcggggattcgggccagtgcagcaatggcaccggtatacagcgcacgagcagctgcgggagcatcccgcccggccgcccggcctccgccatccggcgcatgtcatccgccgtcttcccctcgagtgtcgtggccggtatcgagccgctggtctcgttcaaggatgtccccaactcggagaagcagaacctgttcgtcagcaagctgagcctgtgctgcgtcgtcttcgatttctcggacccgaacaagagctcagtggagaaggatatcaagaggcaggcattgctggatcttatagagtttgtcgagtcgaccaacgctcgcttctcggaggcagccatcgcggcctgctctaggatgtgtgccatcaacctgttccgggcgttccctccgagttgcagatctggctcatcaggtggtggtgagggcgacgaggaagagccaatgttcgaccccgcgtggtgccacctgcagcttgtttatgagctgctgctgaaatttatcggatcctcgtccttggacgcgaaggtagggaagaagcactttgatcactcattcatcgtgaagctccttaatcttcttgactccgaggatccaagagagagggattgcttgaaaactattctgcacagggtatatgggaagttcatggtacaccgtcctttcatccgcaaagcagtgagcaacatattttaccagtttgtctttgagactgatcggcacaatgggatcgcggagctgctggaggtctttggcagtgtcattagtgggtttgcattgcctctgaaagaagaacacaagatctttctttggagagttctgattcctttacacaaaccaaaatctgttggtgtgtatcttcagcagttgacctactgtgtaacacagtttctggaaaaggacccaaagcttgcaagctcagtgataattggtttgttaagatattggccgataacaaactgtcagaaggaagtgatgtttctcagtgagattgaagagatcttggagtctaccagccaagcagaatttcagaaatgtatggtaccgttgtttcggcgaattgctcattgtattaccagttcccacttccaggttgctgaaagagcgctcttcgtatggaacaatgatcacattatcagcttgattgcacaaaaccgccaagtgatcatgcctcttgtcattccagcgctagagcaaaacattcagaatcactggaaccaggcggtcctgaatctgaccgtgaatgtcaagaaaatgttatctgagatggacgacgatctcttctcgtcatgcctggcgaagtacaaggacgaagaagaaaaacgcgtgtcgctagaagcgaagcgtagacttacgtgggagaagctcgagtcagctgcagctttccagccagtgactggccatacagccgtcctagtaggccaccggccgtcagcaaatctgatcgccaccatgatctagctcatgcatgtatgccgaacaagcgaatgtggtgctctcccccccttttggtgaggcgcagcaagtgtagtgttctctattttgctcctgcttattattattttccttttgctggtatgggtaatcagtgtagtagtaagttgtaactatttccggatgtttatgttcttaaggcaaggatacctgtaacttaagactgccgagtgctgacactctacatgtatctttgcctgtttatggatgaacaggtgtcctacagtttaatttcactttccatcttgcc

SEQ ID NO: 136283 - DNA, 2315 bp, Zea Mays
aaacaggcacagccctcccctcctccactcctcgccctctctctctctctctctctcatcccgtcccgagaagcggacaaagcgcggcgctgcagatttcgatccggttcccaatgcctcccatgctcgccgtcgccccgtgctagctcctctcccgtctccgcttcctccacctgccgcgccagcgccacgccgcctggatccggcgagcgcgtggccgggagcctcagatccgagcgaaacccagccttcccgtggtgacggccttcgctctagctccagattggctggcggctgccattcctcctcctcctcttctcgctcgaggtttcaaggcgggtccgttcagctctggtgggttttcgggtttgctcatactttttcttcggttggtttgcttcagcgtggtccagatttagctgcattttctcgggctgtgttttttctgtgccagaaatctacggaggagtcttgccgccgctttaaacgtagaggttttgcgcaagatgtggaagcagctcctcagcaagctgccccggaagtcgccggcctgcggggattcgggccagtgcagcaatggcaccggtatacagcgcacgagcagctgcgggagcatcccgcccggccgcccggcctccgccatccggcgcatgtcatccgccgtcttcccctcgagtgtcgtggccggtatcgagccgctggtctcgttcaaggatgtccccaactcggagaagcagaacctgttcgtcagcaagctgagcctgtgctgcgtcgtcttcgatttctcggacccgaacaagagctcagtggagaaggatatcaagaggcaggcattgctggatcttatagagtttgtcgagtcgaccaacgctcgcttctcggaggcagccatcgcggcctgctctaggatgtgtgccatcaacctgttccgggcgttccctccgagttgcagatctggctcatcaggtggtggtgagggcgacgaggaagagccaatgttcgaccccgcgtggtgccacctgcagcttgtttatgagctgctgctgaaatttatcggatcctcgtccttggacgcgaaggtagggaagaagcactttgatcactcattcatcgtgaagctccttaatcttcttgactccgaggatccaagagagagggattgcttgaaaactattctgcacagggtatatgggaagttcatggtacaccgtcctttcatccgcaaagcagtgagcaacatattttaccagtttgtctttgagactgatcggcacaatgggatcgcggagctgctggaggtctttggcagtgtcattagtgggtttgcattgcctctgaaagaagaacacaagatctttctttggagagttctgattcctttacacaaaccaaaatctgttggtgtgtatcttcagcagttgacctactgtgtaacacagtttctggaaaaggacccaaagcttgcaagctcagtgataattggtttgttaagatattggccgataacaaactgtcagaaggaagtgatgtttctcagtgagattgaagagatcttggagtctaccagccaagcagaatttcagaaatgtatggtaccgttgtttcggcgaattgctcattgtattaccagttcccacttccaggttgctgaaagagcgctcttcgtatggaacaatgatcacattatcagcttgattgcacaaaaccgccaagtgatcatgcctcttgtcattccagcgctagagcaaaacattcagaatcactggaaccaggcggtcctgaatctgaccgtgaatgtcaagaaaatgttatctgagatggacgacgatctcttctcgtcatgcctggcgaagtacaaggacgaagaagaaaaacgcgtgtcgctagaagcgaagcgtagacttacgtgggagaagctcgagtcagctgcagctttccagccagtgactggccatacagccgtcctagtaggccaccggccgtcagcaaatctgatcgccaccatgatctagctcatgcatgtatgccgaacaagcgaatgtggtgctctcccccccttttggtgaggcgcagcaagtgtagtgttctctattttgctcctgcttattattattttccttttgctggtatgggtaatcagtgtagtagtaagttgtaactatttccggatgtttatgttcttaaggcaaggatacctgtaacttaagactgccgagtgctgacactctacatgtatctttgcctgtttatggatgaacaggtgtcctacagtttaatttcaaaaaagatgagtatatctaaaaaaacataaaaaa

SEQ ID NO: 136284 - DNA, 377 bp, Zea Mays
gtacctgctgccgtcttcttcttctgcggcctcacggcctgctgctggtacccgtagctggcggcctgcggtggcgggtagccgtacccgtacccggcctgctgcggcggcgggggcagtagccgtaccccggcggcgggtaaccgtagccgccgtactgcggcggaggagcagcgtagggcgccaccgtgctgggaccggccgaaccccttggctggcttgcctgccgcgggtgggtagccagatgagggcgggtgctacggactgcgactgcgaactgacctaaaccctaaatgctgcgaaccaccgggccgttttcgtgccgggctgacccgggcacggcccattatcccgtgccgtgtcttttgggccatcgg

SEQ ID NO: 136285 - DNA, 909 bp, Zea Mays
atgggcaacagccttctgctgccatgcgtttgccactgctgcgacggcgtggtcaacgaggtcggagcaggcgccaagatcaggaagaggatcaggaagcagcggaggcctgctgacagcagcagcggcaggagcgtcgtcgtcagagctgcacggcccagacacgtggtgccggtcgtggacgcgccggaggacggcgacggcgacagcggctgggagcgggagcgggaggcgtggcccgagtgccgcgtggaggcgccggccgccgccggccacggcgaggacggcggggtgctggtgaggatcgtgatgaagaggaaggacatcgcgcagctggtggcgaggctggagcggcagcgcggcgccggggtggaggcggaggtcggcagcagcatcgaactcgacggcggcggcgtcacgatgagcccgtgccgaggcgcgtggagcccgcggctctccatcataccggagaactactagccagcccagggcccagggagatccatgcgtgctgtgccaccgtacctccgcgccgcgcatgcatgcatggtttgttctgttctgttcgcgcggtagtttactatacttcgccaagctagcagttgtacatatattgtaaacgaacaaggtattttgctttcgatttttttttttggttttacctccgttggatttctctctccttttcatcttggatcgggaaggtgatggccgccctgccaggaaggcagagcatgcacgtagactgtgtaaatttgctctttggacatatgcatatatcatatatatatatatatatatatatatatatatatatatatatatatatatatatatatatatatatatatatatatgcacgtagactgtgcatctgtatatatctatcaaatcgagagctgctaaact

SEQ ID NO: 136286 - DNA, 393 bp, Zea Mays
atggggatggacaaatgcagcgcgaatggacaagtgtagcgcgaacagtgtgtacaacgacaacgtatacaaggcgggcatggtgatgaatgggttgcccatcagtgtgtacgcattggagacgttggggtttgcggcgaccatgtccacagacggttgatgagcaagatgctcggacgcattggggattcaccgctgatcaggttcggcacatacacatgcgacgtgtgcgccgtgtcgggcacgctcaagtgggacatgaccattgtcaaggaatacaagggactacccctgcagcaggccgtcgactactatgtcaggggcacgatgcagaatatccgaagacaactattatcaataattagccattataaactatttacaaatctttac

SEQ ID NO: 136287 - DNA, 672 bp, Zea Mays
caaaggggccagataagtggcgatctttgcattgaaggttggcgacaacaaaaatgcagttctccgtgccgctcagattttcatctgttctgtgatggcctcgaacaagctgctacatcatctcttacctgtgataacctactccctatgtgcttgaataaatcaatccatagagctgtcataagtcaatatttttttgtttgattgatctcccctgttttgtgttaatgtttgagttaaatggtaactacaaaactgacatgagcgatttaagcagatgcatcctcccttgttaatgtggtccaaaccaacacttgcaagaactcccttgtttaagccaatggtagttgaaatgggccattgagggaggccagcattggtacacctgcaagaatggggatccaacagacatagctgcaatggcggtcactgttttcaagtcatctgattaatcacgattagtcgcgattaatcgtccaagtcggtttgaatcaatcatgattaatcgcccaaattgtccaactaaatgtgattaatcacgattaatcgtccaagtcggtcagttagaacgaccagcaagttgtccgacttgaaaacaatgatggaggctgacaggggtcccccaaagtagatgcagaagaaagcagctaaagaggcagttgttaatgttgt

SEQ ID NO: 136288 - DNA, 1229 bp, Zea Mays
atgcaacagcacgaggaggagcaggagcggccgccgaccgtccgcgcggtcaccatccccttcgccgacctcagggtgccggacagggaccttggcgacaagatcgaggaaggtctgggtccccatgggctcggcatcgtcaccattgccgatgtacctgagtttccagagctaagaaaaaggctgctgcgcttggcacccaggattgcaaaccttcctgaagaggtgaagaaacagcttgaagatccagatagcagatataactttgggtggagtcatgggaaggagaaactcgagtccgggaaacttgacacatttaaaggttccttttatgcgaaccctgttttggatgtccctactactgatgatgtgcttgtaagtatccatcatattgccgaccaaatatatggccaaacgataatcttcctgagcttgagatagcatttaaagatcttgggaagctgatgatggaagttggtttgatgttggctcatcattgtgatcgctatgtaatgaggcaaggagtagggtcatatgatggtgacagtcttgagcagacaattgctcgttcaaggtgtcacaagggtcgtctgttgtactatttcccacgacagtttagcaagcagacagacttcgactcggtttcatcatggtgtggatggcacactgatcatggatctctaacagggcttacatgtggcttgtttacgaagaattctatggaggtaccatgtccagacagtgcagctggactatacattcggactcgtgataaccaagttgttaaggttgtgttcgacgaggatcagctagcttaccaaatcggggaaactactgaaatactgtcaagaggttatctatgtgcaaccccacactgtgtgcaggcacccagcagcgaaaatgcttcaaatgttgaccgctctacttttgccttgttcatgcaaccagattggaatgagaagctgaagtttccaagcgaaatcccctatcaccaagagttgattccaccaaacggaacgctgactttcggggagtactcagaaaggctggtagacaagtattaccagacaacaacgtagagcatacctcaagaaaagctaccgtccatacgttcgtaccatcaagtgtgttcttgtgtattcatttttagctttgatcataactctgtacaaaatatagtcgatcatcgaatcgaatacagcgcacagtaatgtatcacgcctattgct

SEQ ID NO: 136289 - DNA, 1233 bp, Zea Mays
atgcaacagcacgaggaggagcaggagcggccgccgaccgtccgcgcggtcaccatccccttcgccgacctcagggtgccggacagggaccttggcgacaagatcgaggaaggtctgggtccccatgggctcggcatcgtcaccattgccgatgtacctgagtttccagagctaagaaaaaggctgctgcgcttggcacccaggattgcaaaccttcctgaagaggtgaagaaacagcttgaagatccagatagcagatataactttgggtggagtcatgggaaggagaaactcgagtccgggaaacttgacacatttaaaggttccttttatgcgaaccctgttttggatgtccctactactgatgatgtgcttgtaagtaggtatccatcatattgccgaccaaatatatggccaaacgataatcttcctgagcttgagatagcatttaaagatcttgggaagctgatgatggaagttggtttgatgttggctcatcattgtgatcgctatgtaatgaggcaaggagtagggtcatatgatggtgacagtcttgagcagacaattgctcgttcaaggtgtcacaagggtcgtctgttgtactatttcccacgacagtttagcaagcagacagacttcgactcggtttcatcatggtgtggatggcacactgatcatggatctctaacagggcttacatgtggcttgtttacgaagaattctatggaggtaccatgtccagacagtgcagctggactatacattcggactcgtgataaccaagttgttaaggttgtgttcgacgaggatcagctagcttaccaaatcggggaaactactgaaatactgtcaagaggttatctatgtgcaaccccacactgtgtgcaggcacccagcagcgaaaatgcttcaaatgttgaccgctctacttttgccttgttcatgcaaccagattggaatgagaagctgaagtttccaagcgaaatcccctatcaccaagagttgattccaccaaacggaacgctgactttcggggagtactcagaaaggctggtagacaagtattaccagacaacaacgtagagcatacctcaagaaaagctaccgtccatacgttcgtaccatcaagtgtgttcttgtgtattcatttttagctttgatcataactctgtacaaaatatagtcgatcatcgaatcgaatacagcgcacagtaatgtatcacgcctattgct

SEQ ID NO: 136290 - DNA, 982 bp, Zea Mays
gcgtgacagaaaaacatggttttcatgcagctgcacatagatggaacgaaagcgcgatgtacgaacttgttcgagatacaagtgcccccctagatcctcaagcacaaggaacatgacaccgtacagctccggtgatatataaaatgacctgacctacaacacaaaaaatcagctatatatgccccagaataggagagagaatcgccagacaaggggtaagaacagatatcttggccatcaggactatttggaccatgcaacggcatcaatttcggattgggcactccggtacagctcgagcctctttgcaagcattgaaatatttacatattggagatgtggtaaaggctatcatcagcccacaaacaacgaccaacaaggaagctacagtatatcgaatgatcgaacaaacaaggcaagcgctacaatataatgaaattaaagtgaagaagtgatcgagcagcgagcgcttggcctctcgcacttgacaataaacaatagattttgggatggagttcctcaaggtcgaacacaccatattaacatatgacagaacagtttgtcctgttgatcgtttagtacagtgagatgttaagcagtaaataatcaactatcaagcaaaaatgcagagatcatataggccttaccaattcgtctaagataagagtcattatatctatcaaaaatagagtggcttggatttccacccttctcaacatcctgaggaagcttcctgaagaaatctactgtcaagtagctgcattccatgtcaactagctttaatgtatttttcttgctttcatccctcattctatccaatgactcaaaagctgcattgcctacttccacacgaagggtgggaaactgcttcagttcctgcagaaaggtaatcaaacagtttaaataagcatcctatagacattattttgtcgggggtttgcatggtataatagtagaaaagaggaaaacttacatgtgtttc

SEQ ID NO: 136291 - DNA, 113 bp, Zea Mays
ccccggtccatgtcgcctcgaactgctcctgtctcgcctcccaggcggagctaggattcttctcgacgacgacgatgagactccaagttcttctcgacgattcgtaaactggt

SEQ ID NO: 136292 - DNA, 1051 bp, Zea Mays
ggtcgctcctgcgctgtgtgtttctggataataaaagccccgccagcccccgcagcggagaaccgcgcaagtgggtcaactcgcaactgaagaccaaaggcgagccggctgcccggattccggaagcgcccaagccccccaacgcgaccgtcgctgtcgccaccgcgctcggctcgcccgcgtccacagaagccgccagggccatacgccgatgaatcctgccgcgacggcggatcccagcagctccagcacctcggcggccacgctgcggaagcggatgatctctatagacacggctcgacgaggagccgacggcgcgtcgcctgagaccgcgcccaggccagatcgggcgggtagtgataaggcgccgcaggagcgggaggaggagggctcgatggcggcctccgcgcctgcggcggcagcagcgagggagagtgacctggaggcggtgggcgagccgatgagccccgcggggcggctgttccgcgagacgcacttcaactgctacatcgtggccgtgatcgggctgggcgcggcggtggacgtcgcggcggcgcgcgcggggctggaagtcacgctcgtccgccacccacgcttctccagcgtccagcttttcgagcaagcgaaagtgatggggtgggggtgggctggcaccgctacgctgagtcctgcctgtacggcggcgttatgtgcggcacctgccggcggaaggaccgatgaacaggctagccgagcccgtcagcccgctaggcggtaccgtaccgcggtatcccctgacctttgtccgctcgacaagctcttcttgatatccactccaaccgttctgtgcgaaaagaatatgatgatgtttagtgttcctgaactgaaactgaaaggtcggtctttgactgtagcgttactgtactcgaaccacctgttccctgttctctcttggaggctccagaaggtgccaaactcttgcaggatagcagccgtttggaagaaacgcacaaacgtggacgcggcacgccactgcacagtgcagaccagtacgccagacagagacccatga

SEQ ID NO: 136293 - DNA, 2067 bp, Zea Mays
gggacgcaattcaaaaggggacgagggcaggtcaggcgctcggcgctcctcacgagcaacggctaccacacgaaacaatttcctcttcctcctcagcggcaccgtctcgtcgtcacctccctcctcttcccttcccgcggcccccgacgccctccgtccctcgtcgtcatccagtcatcccctacacccgataaaaggggtccgatcatcaaccgggcttgctcactatggccatggagcgaatatttgactatgccaaacctattagggcaactgtcagtgtttcctcttatcatgtgcttcaagacagccatgtctttgatcttttggatcctaagaacaacgaggtccttgtgcgagaggatgctgatggaaggactcatctgaagggcctctctatggttgaaatcaattcaattcaggagtttcagaatttgtgttatgatagtgacaaacaccaaaatcgcaccaaagtttccaaagctaaaggacacaatggttttattatttttatttctaaatctgatcagaatggcaaagaatcctctgtatcaaaaatgcattttcttgagttggcagaccatatcaatgataagcaaaagagccatggtgaaagatttgttcaacaaaattccaagaagtccttatatgccgtgatggatgttgtgcaagctctaaacagccaccagagcttcataccctatagaaaaagcaaaataacccatattttgcaagactctttatccaagacaggtggtgctttattaatagcatgtttggatgaagtctcatgccaagatgcaatctctactctaagcttggcttcacgctcaagccaagtggtcaatgaacaacggtacaacttatccttaatcacaaaaggttgttcaaagtcaaatgtaaagctttcagtgaacaataagaatttgtcaagatcgttattgtcttctatccaacaacaaagtcccgtgctggagaagccatacaaaacccaagttaataacattgcagtaaaagcaacaagatctctcaatgccaataagagatctgaaacaagcacacattcagcaaaaaagactgtaaacttagtctctgcttcgattaatttgaaacactctggtgctaagtctattctaagggaaaggaacttctttattccaactactaattcatcaaaggaagataagaaaacttttgtgacaactgcggtaaggaaacatgagagcgatatgcaggagaatcacaatggcacaaaaaatattgtagtatcatctgaaatgcaagtagtaccttgcagcatgaaagagatagtatcaagtgacatgaaagaagaggatcattcctctccaggttttcttgcagagaacttatttgctgacttgggctttacatgttcatctaatgcagctgataaaacaactgaggaaaatccagccaccgttctccaatcttctccgaagataagcgaccaattgagaaagatatcaaattcactgaagcttcttaattctatggcacctagtatagtaaaacagaaaacagatatagttcgtccacaatcctttgacttagttgaagcagaaccaaaaactcctgaggtcaacttaaaactttggcatgctcaagatgcacaagaatcacttaaggctcgtagcacagggattaagaaatctctagctaaggagtgtttgttgtttctaaacagcgctaataaggagcagttaaaaagtttaaagggtattggagagaaaagggcaaactatatacttgagcttcgagaggagtcaccattgaaagagattgatgatcttaaaagcataattgggatgagcaaaagagagatcgacaagatgatgtcaaagttgatttcggactcggagatgaacgagtaagggttgtattgatctcttcccacttaggaaaggaggagaaggtcatagttctaaatttaaatatcgatgcttgttgttatcagatcgctgtggaatccagatgattttgggtgttgcttgtgagaatattctgatgttttgtttttttaaaaaaaattacaggaatgtcttctct

SEQ ID NO: 136294 - DNA, 2046 bp, Zea Mays
gggacgcaattcaaaaggggacgagggcaggtcaggcgctcggcgctcctcacgagcaacggctaccacacgaaacaatttcctcttcctcctcagcggcaccgtctcgtcgtcacctccctcctcttcccttcccgcggcccccgacgccctccgtccctcgtcgtcatccagtcatcccctacacccgataaaaggggtccgatcatcaaccgggcttgctcactatggccatggagcgaatatttgactatgccaaacctattagggcaactgtcagtgtttcctcttatcatgtgcttcaagacagccatgtctttgatcttttggatcctaagaacaacgaggtccttgtgcgagaggatgctgatggaaggactcatctgaagggcctctctatggttgaaatcaattcaattcaggagtttcagaatttgtgttatgatagtgacaaacaccaaaatcgcaccaaagtttccaaagctaaaggacacaatggttttattatttttatttctaaatctgatcagaatggcaaagaatcctctgtatcaaaaatgcattttcttgagttggcagaccatatcaatgataagcaaaagagccatggtgaaagatttgttcaacaaaattccaagaagtccttatatgccgtgatggatgttgtgcaagctctaaacagccaccagagcttcataccctatagaaaaagcaaaataacccatattttgcaagactctttatccaagacaggtggtgctttattaatagcatgtttggatgaagtctcatgccaagatgcaatctctactctaagcttggcttcacgctcaagccaagtggtcaatgaacaacggtacaacttatccttaatcacaaaaggttgttcaaagtcaaatgtaaagctttcagtgaacaataagaatttgtcaagatcgttattgtcttctatccaacaacaaagtcccgtgctggagaagccatacaaaacccaagttaataacattgcagtaaaagcaacaagatctctcaatgccaataagagatctgaaacaagcacacattcagcaaaaaagactgtaaacttagtctctgcttcgattaatttgaaacactctggtgctaagtctattctaagggaaaggaacttctttattccaactactaattcatcaaaggaagataagaaaacttttgtgacaactgcgagcgatatgcaggagaatcacaatggcacaaaaaatattgtagtatcatctgaaatgcaagtagtaccttgcagcatgaaagagatagtatcaagtgacatgaaagaagaggatcattcctctccaggttttcttgcagagaacttatttgctgacttgggctttacatgttcatctaatgcagctgataaaacaactgaggaaaatccagccaccgttctccaatcttctccgaagataagcgaccaattgagaaagatatcaaattcactgaagcttcttaattctatggcacctagtatagtaaaacagaaaacagatatagttcgtccacaatcctttgacttagttgaagcagaaccaaaaactcctgaggtcaacttaaaactttggcatgctcaagatgcacaagaatcacttaaggctcgtagcacagggattaagaaatctctagctaaggagtgtttgttgtttctaaacagcgctaataaggagcagttaaaaagtttaaagggtattggagagaaaagggcaaactatatacttgagcttcgagaggagtcaccattgaaagagattgatgatcttaaaagcataattgggatgagcaaaagagagatcgacaagatgatgtcaaagttgatttcggactcggagatgaacgagtaagggttgtattgatctcttcccacttaggaaaggaggagaaggaatgtcttctctacgtataggttttatacaggaatgtcttgtctacgtaacgtataagttttgtttttaaaaaaagaatataatcgggtggaaggctttcaggtttgctgtattagacaaaaaccta

SEQ ID NO: 136295 - DNA, 105 bp, Zea Mays
gtatttatcatgaaactatattaaaattcggtgtgatcttgcgtaccaaaataagagcatctccaagagctctctataaaacgactcctcaaaatcagttttaag

SEQ ID NO: 136296 - DNA, 2050 bp, Zea Mays
ttggtctcattccattcggaggcacgcactcggctaggcgcagaggctttctcctcccccaagccgaaacaccagagggcgagactcgagagagaagagcggcgcggcggaggacagcactggatggagccctcgccggcggcgggagagcttggcgcgatgcttcgtgcggccgctgacttcgcgtcctacccagggttgcatagtgatgatactgtgaggcagttcctggaacgatgtccgctgcctaagctcttaggtgcattgcagagtgaagaagatgtacctgggatggttgaaactgtcacagagtgtttagacaaaatattttcctcaagatatggagcgtcacttctgccaaactacggtgcatttattcaagctggattgctcacagactcgaagcaaatcagaaaattagcctgcaaagctgtactccatcttcttgacaaggctgaagatggtggtgctgctgtggaaacagttgtgcagcataatctgtatcctcttctgatcaaatgtttgattgagggagatgaagaaatttcagcaatcattttggacactgtaaagcgtttagcccaaattcctaaaggagctgaagtcatattcccaccagatggtcaaggatctgtgcaacttggtaaagtggcagctcagtcatcttcattggcacggattcgtattctatctttgatagccaagctcttcactgtttcaagttatactgctactgctattcgtgattcaaaccttctgagcatatttgaagaggaaataaaagatagaagagatatgcttaaaaccctcagtgcgctagaggtcctatatgagcttgttgaacaccctcacagcaacattttcctgctgaagaccaacttgcttcaactcataattgatatcatcaatgattcctcagctgattctgttatacggtcaagggcagcattagttagtgggaggcttctttcttcagctgatgctttcacagcaatagataaatcctgcgttaccaatctgctcatagccataggcagaattttgaagatggaagaaagcaagaatactgatgaaattgagagtgcattggagaccttgggtctaattggtacaacaagtcaaggagcacatttcttgctgacatcatcaaatgttgccagacatgttgtcgagtcatcctttgatcgtcaaggcaggggtagacagctggctgctttacatgcctttgggaacatctgtggtgttggtagacaagaagatcagatgaaactggatagcgaagccgaggaaaacttgaagcgcttggtctatacgactgcagcaaacagtccaaaattaaccccttcagctcttctactatcagttctgcaacaagacccagacgttaggatagctggctacagagtaataacaggactggtcatccgggaatggtgcttaagggaggtttgcttaaattcagagataatcagatttgttacggatccaacaatggagacaacaaaacttggcatggaaacccggtatggctgctgtgtggcaatcaacaaggccctatcatcatcccatcttctgcatgaagcaagtctttctgaactcgttgggaagttgaatgatgcggtgaaacggggcccttacctttctgataggaagcgtgtggaggcacggccggtggttgatactgcagagaggttttaaggtgccctcgagtattcacccaaagtaaacgatcactctcacagcgtagctaggaggtaactgagcgtgccctgcgtctcatacggttggcttatgggtaacagacatatatatgatgtacctggacgatggggaggacaatgtgtagttgaattcactgagactggcacaatacctaaacttacaaagcaaagatgttgtttcttctattttgctttgtggatgtcttatgcagcccctacctgcgaaagaaaatcatctgttgcaggaccgtgccaaattttgatgaaattgcagatgcagccggcactaatttttcatgtattgaatgctcaatcgaatcaggtaattt

SEQ ID NO: 136297 - DNA, 427 bp, Zea Mays
atggtgtccctaaacgcccaatatgtctcgcttatgtctttaccagaagatctagacagggatatatacatagactacctacagaaagcagttagacgatcggcagctcaggcatcaaacttgctgtgttgtgttgcatcggtgtggcccaactccccatcgaccgaggatagcttgaatggcaggtttatttccaacagcaagcccgactccgccttacagcctcaacgtggtgtccgctgccgatgtggaagctccggaccttgccttctcgctgaggaacttgccacagtccgcgcccttcgcggtgaactccgccagaagttcctcgtgaagcctcttcagtgactgcttgaacctcaccgagcagctcttgtcgccttcgtcgacgtcttgcactccgtcaccagaaaggcatccaacctgg

SEQ ID NO: 136298 - DNA, 102 bp, Zea Mays
ataatatttttatgtggagggtctattaagactctcaagtgtcgcttagagcatctccaacaatgcctcaaactagtgcctcaaatttaaatatagggctct

SEQ ID NO: 136299 - DNA, 366 bp, Zea Mays
tgtgtgtctcaaataaccatacatccagggctactattatctaacagaaagtagtcaagcatcagactaattgttcatataaataaagaaaagaaaacgtgaatcctgtaattaggaacttgcaactcagaatcagcaaaagaaacaagatggctaggagctctaaaatatcagcatacccaaattccaagcagttctatgctctaagagatgcaagctcaagttactggtcctggtacctattaattctgtcaaagtattgtcttagctgccaaccaaggtttaggaagcgtgaaaagtagtcctccatctatgtcccacgcagatgataccggagaccatccatcatccgtgatggtacatttt

SEQ ID NO: 136300 - DNA, 1516 bp, Zea Mays
tgagagaaaatgcacagcgccagtttcataatgcaaataatgcagcctaaaataccagatagaaccatcgttatttaggagacagatcatgaggggtacttcagtgagggcaggacaacataagcatattcttagaagatcaacaattgatcgttgagagtcgagcaaagcacatagtcttaacaagaaacagatttgccatactaacaagaaacagttttgccatacttctataacccatacatttgagctactaagctaacaaaacctgaagaaaaacctgaggggccaagttctgcagtataattgattggtggccatctcaagtgaagcctacatcatataaaccttggtcctcaacttcttgacatgtcatctgatttctcccccttgatcttcttaccgacgatcaccctttatgctcttcttcctcttctttccctcctcggtagcacgcttgcccttcactctacccttcttgccaacctcctggctatcatcaaccatgatgctcttcgtcttcttctttttctctgtatccacctgaacttcttcctgcatcacaacaccctcctcaatctgctccttcttattcctcttcctcttggaactcacattggcaaatacctctcttccatcggcaccagcattcgccttcttttcgatgacctccccagatccaacaatgtcaggctcaggcacctcgattttcatacccaactccggcacaacctggtaaattggtagggcaactgaatccacagccttcagatgcagcgccctgacattgccccacttctttggcaccttctcgacagcctcctccaccgcggccatcacattgtccacgatatcctcctcctccatgtccagcctacccaccttaatccccgagcaggtccctgaccgcaggtacagaaaagcagagccaagaaccctgcggacctgctccggccatccgatgcgggtgaaatcgactccaatcggagccttcttggtggagtagaacgccttcccgaggacgcgcggcagcagggggaggatggcgcggtcggcgacgaagaggtcgtgggaggctgcgagacggcgccgagactcgtacgggcggtaatccgtgcggagcgtagagagcgggatgacctcggagacggggaaacggtggagcgacatggacgcgtggaggtcggaggcggaaggggaccgcgacttggtgcggtcgtccgagatgacgcagacggaggcgccgtcgtgcccaacaacgggatgtggcatcgggaggaggcgcggcttggtgctgcgcgaggcggggatgcggcgtagcgagagctggaggaccacgatgtcgtcgcgctcgtcggcgaggaggttcgggcgcgcctccgcagcgcgcttcttcatccacgttgtcagggaagcgacagcgctggccaccgtctctcggggcaccgggtgtggtggctgcggcggcgacatggtggcggcggcgcgagagggagatcagaggggtttagggttt

SEQ ID NO: 136301 - DNA, 100 bp, Zea Mays
gccctaggaatcagaaatgctttttagctttcccaccaattacgccactgcattcttgcacccacagccacactaatagttttttagatccatagctggc

SEQ ID NO: 136302 - DNA, 315 bp, Zea Mays
atgagtgccggtggtgcttttggcggaaataggggggtgaggcctgtacctcctgaaaaaggtgtgttcccattggatcacttacatgagtgcgacttggagaagaaagattatcttggctgcctgaaatctacaggattccagtctgaaaaatgtcggcagttctcaaagaagtatttggagtgtcggatggagagaaacttgatggccaagcaagacatgtcagagcttgggttcagaattgtggatgaagcgggtacatctcctgacaagaacagcaaaccggagagccctcctaatcagccaaaggattaa

SEQ ID NO: 136303 - DNA, 970 bp, Zea Mays
tttttccttttttcatgtcatgaaatggaatttacagaaccgtggatgtattaatggataacccttctcccacaaaaaaatatactcacttagttcttttttatttatcgttgtttagtttaaatatgaactagcggacgacaaatattcgagactccagatagtatctacaataaagttgcccatactatacgtacttgagtcttcaggttatgtgaaggttaattatatgagagccacgcaacgccattttaattattgtatgtatgccaaagagtacacaatagcggaatggcaaatataccaaattatgaacagcgtaacaacaagatagagagatgatccatgacgattgcgacggatcgaccggcgctagcagtacaaagcaagctactagaccatgcaaatggagaagctgagcttagatcttgccgcgcgggcccggctgcggcggctcctgaggtcccttcttgatcggcaggaggtccggtgacgccgacgcgctgacgtaggccagaagtgagccgccgcccagcagcaggaacttgagcagcagacctctcttggtgaacggagccgcgaacgtctcgaagaacttgctctggtgaccgggttgtagggcgagggcgcgtcagagccgtagaggtcccactgtccggtggtgttgccgatgtcgtcgaggtcaaagtagacgctcttgtcgccgtacttggccaccacggcggctgcgcggggcctgcggatggagcgggccgacggcctggcgacggcgagcttccttccggagatggagctgccggcgagacccttgatggccacgggcttcacggagacggcggcgagggaggccatggcggctagctaagcaagcttgacgcgcgcactggacagtggcgctgttgggggttgctggtgtcccggtgcgtgcgtacgtgcacgaacttaattcggcggatcgtatcgtgctgag

SEQ ID NO: 136304 - DNA, 145 bp, Zea Mays
atggcgtggtggtccgggaaggtgtcgctcagcggcctgcaggacatcgccggagccgtcaacaagatcagcgagagcgtgaagaacatcgagaagaacttcgacagcgcgctcggcctagaggagaagcgcgacgatgaagaag

SEQ ID NO: 136305 - DNA, 1795 bp, Zea Mays
aagctgcccaagaagctacaatacgaaaactgagagcacagattcgtgagtttgaagaagagaaacaacgtctgaactcaaagatccaggttgaggaggctaaggtcgaaagcattaagagagacaagatggcaaccgagaagttgcttcaagaaacaatagaaagaaatcagactgaacttgcagctcagaaggagttctacaccaatgctcttaatgcagctaaagaggctgaggcattggctgaagcaagagtcaacagcgaagccaaagttgaactggagaaccttttaagagaagctggcgaaaaagaaaatatgctgattaagacaatcgaggagttgaggctttctctcacccgacaagaacaagaggctgctttcagggaagaaagactaaaaagggactatgacgatcttcaaaagcggtatcaagctagtgaacttcgttataatgaactggtgacacaagttcccgagtctaccagacccctcctaaggcaaattgaagccatgcaggagacatctgctcaaagggaagaagcttgggctggcgtggagagaaccttaaactctcgccttcaggaagcagaagctaaagctgctgcttcagaagaaaaggagcggtctgtaaatgaacgactgtcgcaaagtttatcccgcataactgttcttgagacccagattacaattcttaggacagagcaaacacagctgagccgatctcttgaaaaggagaggcagagagcatctgaaagtagacaggagtacctagcaattaaagaggaggcagcaatgcaagaagggcgggctaagcagctcgaagaagagataaaggatcttagagttaagcacaaggaggagctgcaagaagcagcagaacacagggaacttcttgagaaggaccttgaaagggaaaaggctgccagggcagaaattgagaaaacatcttcccgtgaagcgcctaaagtcccacttcccgatcagacaagaaatgcccctctcagaaagctgcctagttctggcagtataaatagtctagaagaaagccatttccttcaggcttcgttggatttatctgacaatgcttcattagagaggcgaatgtcttcagaaagtaatatgtcatattatctgaggaccatgactccaagtgcttttgagtcagcacttcgtcaaaaggatggagagcttgcttcttacatgtctcgcttggcctcattggaatctattcggaattcactggcagaggagttggtgaaactgacagaacaatgtgaaaagttacggactgaagccgctgctgtgcctggcttaagggctgaattggaagctctgaaacaaaggcacttccaagctctagagttaatgggggaacgtgatgaagagttggaggagctaagaaatgatattgttgacctaaaagagatgtacagggagcaggtggatcttcttgttagccagctccaggcattgggtgctcgtgtatagtgccggtatggatttgtcgtgccatcgggcaaggcaagacaggtctgagacttgagcatgttttcctttttattttgtaaccgtacaacggcactgaaaatattcgtctgtacacatcaaaaacaccttcggcgttgggtttaggaggatacgttgttgtatactagatcaagtagtttcacagttttacgtgcattcttttttatctgtgttcattgaaatgtatcaaatttgaatccatttgcatgtgtacctcagaggaatgcaatcaatcaataatatcgagagctctttttatgtcctaa

SEQ ID NO: 136306 - DNA, 2063 bp, Zea Mays
cactctcactcacactctgtttctctctctctcgtggagacgactgggcgaccgccggcgccgacctacgccaggtgcccaagccttcgacgggaccatcgccgacgacgagcactcacgagctggatctgatctaattacagtcagaaatgtcttcagtcgggagcggcagtggcaccagggctgcgaatggtgcagctgccatcagtgctgccgcgacggcagcaggctcggccgacgccagattccacccccaactactacagcagcaggacaggcaaagtagatgggctggctgcttttcaggcttatcatgtttcggatcgcagaagggcgggaaaagaattgttcctgcagcacgtacttctgatgggaatggatcaaatgctcgcggaaatggtctccagtctggtgccaattcaaaccaaaatatgcctatgaatttatctcttctggctccaccatcatcaccggcatccttctcaaactctgcacttccttcgactgctcaatcgccaaattgctttctgtctgtatccgcaaactctcctggtggcccaacgtctaatatgttcgccgttgggccatatgctaatgaacctcaacttgtctcaccacctgtcttctcaacttacacaactgagccatccacagcaccgttgaccccaccacctgaactagcccatgcaactacaccttcttctccagatgttccatatgctagatttctttcttcttctatggatatcaaaactgctagcaaggagcataacatgcctttcttatcaacaacctattctggtggttcaggactccaagcatcctacccactttaccctgaaagcccttgtagcagcctcatctcaccggcttcagtaactccgaggactggtctatcctcacctatacctgagcaagaggttcctcctgcccattggaagacctctaggtccgcgtgcgacacaccatatttcagggcttcgcccattcctgagcaagaaaccactgcacaatggaagacctctagatctgcttgtgacacaccgtatgccaggacctcaccaaccaatatttttggtctggattcaaataccccgagaaactatatgctagatagcaatttctttcggccagcggcatctgctcagttctacctggaccaggctcagcaggcatttccacataatggcgggagggttagcgtatccagggagaagcaagatgccgatgaaatcgaagcttaccgagcttcatttgggtttagtgccgatgaaattgtccaatctcaatcttatgttgggataccagatgcggttgacgagtcattcagtatatcaccatttggaaacaatgctcctgctactgagatctgcccattcagtgatctgcctagtgaggttcagaaggcggataaatcatgcacctacgttaaagatggcacgagcccaaagaaatcagcaaaccaactctcgattgattctccaaataaagttctgcgcttggacgtgttcaaagtaacaaaagggggtcatctgtctgaggacgagggtattgcgagagatggtcatcctttcagaaggacaacggatgaaatatctctaaaaccgatagaggtaaggaagaaatctcctcctggccattcttgctcagacgcagagattgagtacagaaggacaaggagtctgagggatgccaacggtgttttatcgcggcgtagcgcattggcaagacaactgcactaataagtcactagtatgcatggcaatttcatagttcatgtagagcagtgtgtgcattgaatttgagctgtcattagagtgatctgtaggcgaagagtagcctttatcgtatatgaggattatattatcagattgtgtgttctgggtatgtgatgatgagctttgtactctgtttgaactccaagatcctctttgtagacacctgcagtctttcccaggagcagtgaaatgaaatatcgttggcaaattacaggaactgtgttctggtcttcctgaatcctgatgatgtaggctgcgtttgaattctgcagcatgttgattggg

SEQ ID NO: 136307 - DNA, 2347 bp, Zea Mays
gaacggacgctgtgcatgccttcccgcgcagatcgcgcacccggcagagcaaaggcgccaggtatgcgcatcgaatggagctaggaaccgccggcggcgagcgcgcgctcgcgcgacgaagacgacccaaatttaggcgccagaacaactagaggagcggtcacaggaggaggccggagggaagggggagaccggctcttggacctctccgccgccgcaatggggtccctaccccgcgccgcggtcttcgccgtggccctcctcctcctcgcctcctccggtgaggcgttcttcgagatcttcaacatcttccgcgcgcgtcccgagaccgactacttccagaacgccttcgagggcacgcacgagcagacggcgcccacccagacggagcaggaggagaagggcgccgcgccgggcgccgccacgggcctcaccagggtgccgcccgggggaccggccagcaaggctgcgcaggacacgatcgtgctcgccgccgacaaagacggcgggccagtcggttcgtggaccatcgtcagcgagaactctggcgtgtcggccatgcacatggccgtcatgcgccacggcaaggccgtcatgtttgacaccagcaccaccgggcggtcactcatgcggctgccccaggacaactgccgcatcgacccgcgcgccaaggaggagggcaccatggactgctgggcgcactccgtggagttcgactacaacaccggcggcctccgccctctcaagatcttgacagacacctggtgctcgtcgggcgcgttggacgcggacggcaacctggtgcagaccggcggctacttcgacggcgagaaggttgtgaggaccctcgggccgtgcgacacctgcgactggctggagcaacccaacagcttcgccgaggggagatggtacgcgacgcaggtagtgctcccggacgggcggttcatcgtgttcggcgggcgccgcgccttcagctacgagtacgtgccgtggccggggaagtcgaacgataaggccgtccggctgccgctccttcgcgagaccaccgacgacgcggagaacaacctgtacccgttcgtgaacctcctccccagcggcaacctcttcctcttcgccaacgaccggtccgtgatcttcgaccacaagtccagcaggatcgtgcgcgagctccccaagctcgacggcgggagccgtaactacccggggtcggccatgtcgacgctgctcccgctcgacctccgcaacgccagcgttggcgacccggagccagaggtggtcatctgcggcggggcgcccaagaagtcgttcaggaagggcgagaacaacacgttcctgccggcgctccgcgactgcgcccgcatcaacctgggcaggcccgacgcgcggtgggagaaagaggacatgcccgtgggccgcgtcatgggcgacatgctgatcctccccaccggcgacctgctgctgctgagcggcgccgccaagggctgctccggctggggcttcgggcggcagccggtgctgaccccggtcctgtactcgccgcggaaggcgcagggcccgcggttccgggcgctggcgtcgtcgaccatcgcgcgcatgtaccactccaccagcgccgtgctgcccgacgccacggtgctggtggccggcggcaacacgaacgcggcgtacaacttcagcggcgtggacttccccaccgaggtgcgcgtggagcggttctccccgccgtacctcggcgagggggccgccggcaaccgcccggtgttggacgcggcgtcgttgcccgcggaggggatgcagtacggctccccgctcacgttccgattctctgtgcccgccgagcccgtggcagaggccgacgtgaagaccaccatgtacgcgccgccgttcaccacgcacggctgctccatgaaccagcggctgctgatcctgcgtgtcaccgcgttcgtcgaggagggccggagctacagggtgaccgtggacgcgccgaggaagccggagctggcgccgcgagggtactacctgttgttcgtggtggcgaagggcgtgccgagcatgggtgcgtgggtgaaggtccggtgagatcgatcagctcacatccacccgtgtgggtcgctgcgggatcgtgtacacaagcggagagccagcctaactctctctctctctctctctctctctctctctctgtctctctgtctgtgtgtgtgtgtgtgtctttgcgttctttggttttgttttcctgctagggatggatgaatgtaaataggatcgatcagattggccagttcaccgctggatcactctatgtgacgtgctgttcgtctcgttttgcttcccaaaacgctgcgtc

SEQ ID NO: 136308 - DNA, 1816 bp, Zea Mays
caagccgaccgacggcgaccacctcagcagtcacccgcgatcccacgctctgcccccacctgacacaccctcgcccgcgcgcctcccgtgccccgaggccacgtgaattccccgccctgcccctaccgcccagcatccccagggggcatgccagtaatttccttccgccaccgtgtgccgtccggtctccggaccccggtgggctgtatcctcgcctgacctgcccgcctgcgctacgacgctgcaggccgggctctcgctcgtcgcgtttttatctccacccacctctctctctccgaaaccaaaaccgaccggcctcgctttcgccggttacccggtcaaacgcatcaaccgccggcacgtctccgatcggatcacgatggctgccccgtgcccccgccggtcaggccaggtcgcgtggtcacgtgcgacgcgcatgccgtcctcggccggcgccccagccccctcgccgtgtccttttattctcccccgcctcaccgcccgcatccccaattcacgcccccaccacgacttccgtgctcgccgccttctcggactaggggggttcggctcgagatctgatttcgggcgccggaggactacatggaggttagggagatggcgatggccgcggcggctgcggctgcggcgtccggcgggggaggcgtcaagctgccgccgcccaatcccaacctgccctacagggaggactgctggagcgacggcgagacggcagctctcgtctccgcctggggcagccgctacgtcgagctcaaccgcggtaacctgcgccagaagcagtggcaggaggtggcggacgccgtcaactcgcgccggggagcctccgcgcggcgccgcccgccgcgcaccgacatccagtgcaagaaccgcgtcgataccctcaagaagaagtacaaggccgagctcgcccgcaacgcgccgtccgcctggtcctacttccccgagctcgaccgcctcgtcggcccaaccctcagcgcctccgcctccaagagacccttggcgtctctgcctcctcaattcgctttgcccatgcatccaccagccgtgcggaggcccccgtcgccttcgccgtcatcgtcctccccgccgcagccgcctatggctttgcctctacccaattaccgccgtgggtccccgctccctgctgctgccctcatccagaaggaagccgcggctgctgcggctgctgcgtctgattcagaggactccgatgatgcggctggcggcaataatcacaaattgccccggtcgccttcgcgctcggtgtcgtcactctctgccagtaacaagaagcgctgcagagatgaggctggcagcagtgctgacaaaggtttcagagagttagcaagggcgatcgaagcttttgcggagatgtatgagcgtgtggagagtgctaagcaaaagcatgtggtggagatggagcgccagcgaattgaattcctgaagcaactggaggtgaaacgcatggagaatttcgttgatgcccatgtgaagctggctagagcaaagcgcacgaagaagactacagggggtgctgccgacggtgctggtggtatggagttggttgccaccgttgctgcgctgcctttcgtctccacctccaccttcctctgatattgaggaagagtttaggtaaagtctgtcttttatagtagcattgccctatgctactgttcctttttttttgttcaatggctatgttaaaacattgtaattccattgtggataatgctatgtttcagatatggacaatcacaagattgttatgctttatcagagatgtttttaatgcttt

SEQ ID NO: 136309 - DNA, 1789 bp, Zea Mays
ggcctcgctttcgccggttacccggtcaaacgcatcaaccgccggcacgtctccgatcggatcacgatggctgccccgtgcccccgccggtcaggccaggtcgcgtggtcacgtgcgacgcgcatgccgtcctcggccggcgccccagccccctcgccgtgtccttttattctcccccgcctcaccgcccgcatccccaattcacgcccccaccacgacttccgtgctcgccgccttctcggactaggggggttcggctcgagatctgatttcgggcgccggaggactacatggaggttagggagatggcgatggccgcggcggctgcggctgcggcgtccggcgggggaggcgtcaagctgccgccgcccaatcccaacctgccctacagggaggactgctggagcgacggcgagacggcagctctcgtctccgcctggggcagccgctacgtcgagctcaaccgcggtaacctgcgccagaagcagtggcaggaggtggcggacgccgtcaactcgcgccggggagcctccgcgcggcgccgcccgccgcgcaccgacatccagtgcaagaaccgcgtcgataccctcaagaagaagtacaaggccgagctcgcccgcaacgcgccgtccgcctggtcctacttccccgagctcgaccgcctcgtcggcccaaccctcagcgcctccgcctccaagagacccttggcgtctctgcctcctcaattcgctttgcccatgcatccaccagccgtgcggaggcccccgtcgccttcgccgtcatcgtcctccccgccgcagccgcctatggctttgcctctacccaattaccgccgtgggtccccgctccctgctgctgccctcatccagaaggaagccgcggctgctgcggctgctgcgtctgattcagaggactccgatgatgcggctggcggcaataatcacaaattgccccggtcgccttcgcgctcggtgtcgtcactctctgccagtaacaagaagcgctgcagagatgaggctggcagcagtgctgacaaaggtttcagagagttagcaagggcgatcgaagcttttgcggagatgtatgagcgtgtggagagtgctaagcaaaagcatgtggtggagatggagcgccagcgaattgaattcctgaagcaactggaggtgaaacgcatggagaatttcgttgatgcccatgtgaagctggctagagcaaagcgcacgaagaagactacagggggtgctgccgacggtgctggtggtatggagttggttgccaccgttgctgcgctgcctttcgtctccacctccaccttcctctgatattgaggaagagtttagatcatcagtgtcgatctcagtgtgatggcatcctgtccagtgaaaggactgcttggcagtaaacactactgcccttggttactctaaagacggacatgttcttaggttcatcgcagtttgtaatccagtacatgattaattgaagactagaaattcctagcgtaaagctctgctgagagcgtttgtcctggctgttcgcctgattgttttattgactgtagctcagagtgtctgaccttatctggaaaaatatggtgacggaaaatggtcttggagtcatttgctactagtcttgtctggaatcatgcaattccgagatcatgtctttttctcatccctcagttttatgattggtttgcgaaataaaacgagttgatccatcatcatttagttttttagagtgtggattcactacactaaatttgcttaatgggttcaatggtgttgcc

SEQ ID NO: 136310 - DNA, 973 bp, Zea Mays
atcggcccattcgtgtccatgtccatccatgcccagcggcccattcgacctccctcgacccaccccctcgtctcgtctcgtctcgtctcgtccacctccccagcggcgcgtgcgcgtgaagcttgaggcaatccccgctccgtctagcggccctgcgcaatcagtcagggttccatggccaacagcaacctcccgcgccgaatcatcaaggagacgcagcggctcctcagcgaaccagcgccggggattagcgcgtcgccgtcggaagagaacatgcggtacttcaatgtcatgatccttggccccgcacagtcaccctatgaaggtggagttttcaagcttgagctattcttgcctgaggaatatccaatggctgccccgaaagttaggtttctcaccaaaatttaccatccgaacattgacaagcttggtaggatatgcctcgacattcttaaggacaaatggagtcccgctcttcagatacgtacagttctgctcagcattcaggcacttctgagtgccccaaatccagatgatcctctctcagacaacattgcgaaacactggaaatcaaatgaagctgaagcttttgagacagcgaaggagtggactcgcctgtatgcaagtggggcattgtaaccaagtgttgtttcagatgtgatgttataacatttccatagtttggggccgactgaatacccctcttgcttgatgagagcaaatttgtgaaatgttgcaatggggtcaaaaaaaattgtctaatcgtgctttgtacttgtggctgtacctcctcgctgcagtgcccgtgagcatcaaagcaggtgttcctttgtatacccctatctgaccatcagttgcatgtgtttcttgtgctgtgctctgaggattcagatttatgctgccggaacgttgccggattgttcttagtttgcttctttactcgagagcgctgaaactgcctaggctacctcgg

SEQ ID NO: 136311 - DNA, 853 bp, Zea Mays
taaatctagctacattcaatttactgatattcgtataatgcaaagaatccttcactgtcttctctgttcaataagaggtgtctggataattattaggatgcaaaatagcgacaagttcccatataatgatttcgtgtggccttcttttgtttattcgttcatacccggttgcctgatatagtttcttctgttgtttgtcgaacaggtggagttttcaagcttgagctattcttgcctgaggaatatccaatggctgccccgaaagttaggtttctcaccaaaatttaccatccgaacattgacaagcttggtaggatatgcctcgacattcttaaggacaaatggagtcccgctcttcagatacgtacagttctgctcagcattcaggcacttctgagtgccccaaatccagatgatcctctctcagacaacattgcgaaacactggaaatcaaatgaagctgaagcttttgagacagcgaaggagtggactcgcctgtatgcaagtggggcattgtaaccaagtgttgtttcagatgtgatgttataacatttccatagtttggggccgactgaatacccctcttgcttgatgagagcaaatttgtgaaatgttgcaatggggtcaaaaaaaattgtctaatcgtgctttgtacttgtggctgtacctcctcgctgcagtgcccgtgagcatcaaagcaggtgttcctttgtatacccctatctgaccatcagttgcatgtgtttcttgtgctgtgctctgaggattcagatttatgctgccggaacgttgccggattgttcttagtttgcttctttactcgagagcgctgaaactgcctaggctacctcgg

SEQ ID NO: 136312 - DNA, 87 bp, Zea Mays
aaagcaacaaaattggctttgacggcggcaggcataatatgcacaaacaaacaacattactagaacaagtcaacagctagcactact

SEQ ID NO: 136313 - DNA, 1175 bp, Zea Mays
gcaggcgctgccgccgctgcagtgcgccgggtccgcgctgcccgccgcgggctcgccgggcctgttgccgccgttggtgctggcgcgcagctcgaagggcccgaggcggtggtcggcgaggcgggtcttgtacatggcgcgcttgtactcggcccacgtgaactcccggtacaggctctgctccccgtcccgcatcacctgcggcagcggcgcgatccgctgcgacggcgccggcccgccgaagtagatcacggacagccgggaccgcgcgccatccggcgccggcgccggcgccaccacccggtgcttcacgctccttaaccgcccgttcgtcagaacctcgagtctccgacgttgacgaagagggattccggtgtggggggcacggggacccacctgccgtcccggagcttgatctgcaggcccgcagtgcggttggaccagagcacggagatgatctgcgggtccgtgtgctccccgaaccccgtcacgccgcagtccaccggcggcagcagcgggcagggcgggtagtggttcacccgcaccacctcgtcgctgccttcccgccccaccaccatcgcgcgcagcagggaccgctccacgcccagcccctccgctatcagctccagcaccccgcccgcacacctccctcaacgccgccgtgtactcctccaatgccgccctgcatcattcatatcattcatacccgccgacgccgagtgagccacggcgaagacgaggcaacaacaacaactcacgtaccggagcgagggcggcagcgacgagatcttcacggtgttggcgctgacggacaggaggaggtactccagccacccgacgtcgccgttggcgccgatgctcttgctgccgtaccccaggggccgggcggcgccggacatgtccagcttctcctgcgcgggcagcgcgaagaaggccatcgcgcgggcctccagcgcgtcggccacgcgcgccggcacgccgtggttcgtcgccctgaagaagcccacgctgcggcacgcgtcggccaccgccgcgcccgcgcccggcgccgacaggtccacgcacgggacggccgcgcccgcctgctgcaccgcattggccctggggcaccgcatcagcgggatctgctcgatcgagctcggcgccgtgatcgccaccatggctggcctgtggtg

SEQ ID NO: 136314 - DNA, 282 bp, Zea Mays
atggcgaaggctagcaccacggccggcgtggtcgtcacgctcctgtgcgtcgtcctcctcctgtcgtccgccgtgacgacgaccgaggccggcaggcatctggggacggggaggagggacgacggcgcggccgtgatggcgggggcggggcggccgctcggtaacaaggtaatacgggaggaggagatggaggcgtcgacgacggacggcgccaccggcgccgccggtgtcggcgagtccaagaggcggagccctggcggcccggatcctcagcaccactga

SEQ ID NO: 136315 - DNA, 184 bp, Zea Mays
cgaagagctctagcttatgtgctcgtatacaaataagaagaagatgatgttgtttttacttttatggttgcagctatattgtagaaccgcttgctacctagcaggctagcacggccaataaagactcaaaagcttaattttccatattatatcatctgaaacatgacgttagtttatgcaatgg

SEQ ID NO: 136316 - DNA, 2656 bp, Zea Mays
tcggttagcttttactcatcttttctcttgccttctactcctcgcccacgcctcctcctccctccctcccgtcgtcgcttcgcttcgcttcccttcccttcttcccttgcgaatcctctgaccaccgcagagccacccccggaggaaacgaaccgtagcgcagccgccgatcaccatggcgtccccggcacggcccgccgccgcatccgtctccgccgccttcggcctctcgcccgaccccaaacgctgctccttcgaccaggcgctccggcacaaggagaacagactgttgatgtcatttgttaattaccacgatcaagaaaaggtctctaaagaaatcgtaacagacgctatagaaagctgcatgaagaaacaggcagataacttgttgaattcgctggaagttatcagtggtaggctgtcgcaattggagctgtattgctataagctggaaaggtccattggagaattacgaagtgacgtgatggattatcataacgaagcaaatctcaacttccagtgccttgataagcaattgaaagaggttcagaaatctgtgcaggtcgttcaggaaaggcaggagcttgctgaaactcagaaagaaatgaccaaacttcagatagtacatgaggattccgcacaaaagagtgaacgtagtgctccatcagttttcataaatagggaaaatgagattgcccttgtgccattgcaccaagtaaattctgtccagtctcctgctgtgcaattccaaagttgcagtggccttattctacagcaactggtgccagtccaagaccagcagcgctcaaaccaaactgccatgtactgcatgcgaggccaaagtcatctggagcacagacaggcccaaatgttccaagctgctgctcaacctgtgcagacacacactactaggaaaactcaggcacatacagtacttgaggtacctcaggtaaccaccagacagacaccagagttctacgctcaaccgcagcatcaatggcaacatcaaacaggtcagcagcttcagtcccaggtaaggcaaccacaaccacaggtggttcaacaacagcagcagtacaacaatatccagcaaggtccagcacagatggtccagccgcaaacatcctctccacatgctcatagcacgccacagatcacactagtatatcctccatacggagctcatcagtctgcatgtggtaacgctgaggcacgcactgggagcattgtcgtgccaccttcgcactctacaatttcctcatcccagcggaagcatcatgaagctgctcctatttatgtacaaagcaacacagtttctgttccattgacggagcagcaccagcaacttcattcacttggcaatggctcatttgtacctcagccaagtaaagttagtccatgcggtgtagcatcatatacggtacaagggaatgcacaggcctacagccctgcttacggaagcccttccagcaatcctgctactattgttgctgtccttaatcaacaagcacattgcagtgctcccatggtgcttcatcacctgggaccatctcagtcagtgcagaaccatccgataggcattgctgataaggttgctcgaatgggttacccaaaggatcaagtagttgatggccttgcgctccgtatggtggatgcaggccagcctgcagaatgtaacaccctgcacgataggttgagctctgtcacccatgcggtggctcctcaggcatggtctggatagttaagaatgaattagtcatgagatgctcgtgtgataatgtacctcattatcgttggaaatcttcaggtatttcctctggcgtcttcttatctgccaggactacatatccaccagcttattttttgcagctggatggtcaagatgaaataagactgattagattagttgaaatgatgctggcatatgtcctgccttttaatggacatatgtgattgtaacctgtttgtgacttgcacacgcatgcttgcaatataaaaagatacgatgatttgttggttgctgctactttgctgtggtgaagtgttgagctcgttccatctgctccggcgccagttgaagtgtgggagaaagatggatgcgaagttaagttgacttgtttttgaaataaattcaattggattgcgagtttgagcggatgatattatattttttatgagagggatacccccaactctattacttgcataatagaaatacaacatgtttacagaaaggttttcagcgcataacagcatggtggccaagttcagaacccattattacatcatggtggagtacctgattgaggcatcacaaccatcagaccacaacaagtgcgacaacacatcaatcaagcatccacctagactgggcgatgaagtctacatactacagtcacaaaggggctgaaacccagagagataacaccagaaagcagtagcacacaaaacagagagacgacgttgtcgcagctggaagccaggattactccgcatcatcaactttatcattggtgcccgtgatctgccttccacttgcagcccggacaagaagtttagcaccctcctaaagatcctgcaaatctttttgctgagtcctgcccaacacaaaatcaaagcaccagcatggcaaataatcacattaggtgatttgatt

SEQ ID NO: 136317 - DNA, 1432 bp, Zea Mays
gttccccctctccggccgatccctgtcgatcgagccgggcgctacctcttgtcagcccttctttaatcgcgcgcctgctgtcctctcctcgctcatggagacgtcgtcgttctagctagatcagttactgcccagccttagctagctagtcgtcgtcgtcgcccgcccgcgcgcgcgcttcgctcgttcttcgttatctatcgatcgacaaggaagcagctaaaattagggggttcgatcaattcgttgttatgacgtggtgcaatggcttcaacgacgtgcgcgccgccgtggagagcagcctgtctccggccgcagccgccgtgggcaagacggcggcggcgtcgctcgccgtcctggtcaagatgtgcccgtcgtgcggccaccgcgcgcaatatgagcagaagagcacgacgatccaggacttgccggggctgccggccggcgtgaagttcgacccgacggaccaggagctgctggagcacttggaggggaaggcgaggccggacacgcggaagctccaccccctcgtcgacgagttcatccccaccatcgacggcgagaacggcatctgctacacgcacccggagaggctccccggtgtgagcaaggacgggcttgttcggcacttcttccaccggccgtccagggcgtacacgacggggacgaggaagcggcggaaggtgcacagcggcgacgacggcggcgagacgcggtggcacaagacgggcaagaccaggccggtgctgtccaacggcaggccccgcgggtacaagaagatcctggtgctctacacaaactacggcaagcagcgcaagcccgagaagaccaactgggtgatgcaccagtaccacctcggctccgacgaggaggagcgcgacggcgagctcgtcgtctccaaggtcttcttccagacgcatcctaggcagtgcggctacaccatggccagggagtccgccgtcgtcgtccctgccgccgccgcagtcaccggcagcagcaacgcgtttattgccggccatcaccagagtggtggtggtggtagcgtcctcagagaagcaaacggcggagctgatcagctctacagcccaggagcaatgatggggtatgaccaggaggggcctggaaacagggcacctcctgcccctgctgtggctccccacttcatgcctaactttgttgtccatgcagcaagagctagctttggcccttgaaccgagaattcaggacaagatacaaacctatcaaatttgccagatataaataggcatttaggaattaggagcatgtgcaaactcccaggacctgaacacaattcactacttgtgcagttgtgctggattgtataaaaaatgtcatgttctcaccctctaacttcacgttcatttacaagctcctcccttttagtcatgcaacaatgtgatataagattaaa

SEQ ID NO: 136318 - DNA, 2907 bp, Zea Mays
tataggcctcggcccccattcatggccattaccacgatgtgtcaccccaccacaccgccctctccgatgctgcctccctcatgataaccctctccctggtggttgttctttgccttgttgccgtgcagcctccacccccaccctcctcattaatcacttgctagctccctgcctccctcccggctcccgctcccccttctcgtgcttcgcgcccccgcagcagccatggcggggatcgacctcaacgacaccgtggaggaggacgaggaggaggcggagcccggcaacgcctgctcccagcagagccggaccagctccgcggccacgttcccgccgccgccgccgaaccagccgaggccgagcgccgcggtgtgcctcgagctgtggcacgcctgcgccggccccgtcgcgccgctgccgaggaaagggagcgtcgtggtgtacctcccgcagggacacatcgagcacctcggcgacgccgcggccgccggcggaggcgcgccgccgcccgtcgccctgccgccccacgtcttctgccgcgtcgtcgacgtcactctccatgcggacgcgtccacggacgaggtgtacgcccagctcgccctcgtcgccgagaacgaggatgtcgcgaggcggctgcgcggacggtcggaggacggcagcgccgaggacggcgacgaaggggaaaccgtgaagcagcggttctcgcggatgccgcacatgttctgcaagacgctcacggcctccgacaccagcacgcacggcggcttctccgtgccacgccgcgccgccgaggactgcttcccgcctctggactacagccagcagcgaccgtcgcaggagcttgtggccaaggatttgcacggaaccgagtggaggttccgccacatttatcgagggcagccccgcagacaccttttaaccactggatggagtgcctttgtcaacaagaagaagcttgtctcaggggacgccgtactatttttgaggggtgataatggggagctaagacttggagtgcgccgtgcagctcagcttaaaaatggatctgcttttccagctctttataaccagtgcttaaatcttggttcactacctaatgttgcacatgctgtggccaccaaaagtgtgttccacatctactacaaccccagattaagccaatctgaattcattataccattttcgaagtttatcaagagcttcagtcaaccattttctgctggttcgaggttcaaagtgaaatatgagagtgatgatgcttctgaaagaagatgcacagggatcatagcaggaattggtgatgctgaccccatgtggcgtggttcgaaatggaaatgtttgatggttcgatgggatgacgatgtagattttcgtcaaccaaacaggatttctccttgggagattgagctgactagttcagtttcaggatctcacatgtctgcaccaaatgcaaagagactgaaaccatgtcttccccatgttaatccagactacctagttccaaatggaagcggtcgtcctgattttgcggaatctgcccaattccacaaggtcttgcaaggtcaagaattactgggttatagaactcatgacaatgctgctgttgcaacttctcagccatgcgaagcaacgaacatgcagtacattgatgaacgaagttgctccaacgatgcgagtaacattatcccgggggttccaagaattggtgtcagaacaccactcggaagccctaggttttcctaccgttgctcaggctttggggagtctccaagattccaaaaggtcttgcaaggtcaagaagtatttcatccctacagaggaactctggtcgatgcaagcttgagtaatagtggcttccatcagcaagatggttctcatgtgcctactcaggccagcaagtggcacgcacagctacatggatgtgcttttcgtggccaacaagcaccagctgttccatctcaatcctcatccccaccatctgtcctgatgtttcaacgaggtgatccaaagatgtccccatttgaatttgggcatttccacgtgaataagaaagaggatagacgcgcaatgtttgtccatgctggaggcatcggaggaactgagcaaacgacgatgctccaggctcatcatgtttctggaggaacgggaaacagagatgtgaccgttgagaaatctcatcccgctgttgccgctgcttcagacaacagggaagttagcaaaaacagttgcaaaatatttggcatatctttgaccgagaaggttccagcaatgaaagaaaagggctgtggtgacatcaacaccaactatccatcccccttcctgtctttgaagcaacaagtgccgaaatcgctgggcaacagctgtgccaccgttcatgagcagaggcctgttgttgctagggtgattgacgtttcaacagtggatatgatgatctgatgtattggaaaactgtcctggaggctgtgttgcgtagtgtggacagtgtcggtttgatggttcggtatcgtgaagacgggatttgattgaggatctggccagatttgtatcctagttgtagctgttagagcactttgtatgacaaccgtgagtgctccgtgttatcagcactagttgctgctcacaacttgcctctatgttcataatctgtatgccatgtcagacccatttatagagggtttgtttgcttggcatagttctagacttaaagcattattatgagaacaaatttgctctgcaccgtatctttcttactttcaagttggcaacggattaacggtggaggagatgatctgagaggttagttgtgcgacgtattaatggtgttacatatattatgcttaggagcattctgccagctcatttatcatatacatgtcagcacttgatttgttaagtgtagttagtagc

SEQ ID NO: 136319 - DNA, 593 bp, Zea Mays
atcatccgccattccatccaaagtacgtagtacgtagtcttagttgagctcgtcatggactcattgcgaagcctagtgttatcttcgtcatccgatgattcggacgatgagatcgataacttgttgctttggcaacatgttgagcaccttgtactcggagacacgaggacgcgtcgtaggcgctcctcattgcctcgccgtgttatccatagggaccacgctgctggagaaaatctcatcaagcaccactacttcggaccaaatccagtgtatccatcccatgtatttcgtcgaaggtttcggatgcaacgtcctttgtttctacgtatccttcgtgccgttcaacgagaagacgattacttcacattaagatgtgatgcaactggtttagcaggtcttggtccattgcaaaaagtttgtgctgctttgcgtatccttgcgtacgggttaccaagcgatgcggtcgatgagtacatacagattggacagactacggctagggactgccttatccgtttctgtcgcgcaatcatatcttcctttagcgaacaatacctccgtatcccaaaccacgacgacattgctcgcatact

SEQ ID NO: 136320 - DNA, 283 bp, Zea Mays
gtgctggcccggctctgacacgattattttttttattttacaaaaaaaacgtatatacctatatacaatttatattcaatattaaaaacatcttaccatgatgttctactggttagacagtttcacccagtgtctcccgcccttcttccatcagggcatgggtttgaatcccacctcatgcaccgttttttaacattttacgctgatttaattaaatggatcgacggactaacaggctgacccgatacagttagcaggccggcatgacgtgtctgtgccatag

SEQ ID NO: 136321 - DNA, 1228 bp, Zea Mays
caagggccaggcccgtccagctcaaacgtgccggagcgccaacacgcacgcacactctggacgcgcgctggctgactgggcgtcggcgtcgccaccaaccgccgctataataaacacacgcacggcaggcaggcaggcaggctccatcagtacagatccaccgccaccaccaccaccaagcactccagtcccgcagcagcatggccggcagcgcgtcccgcctcgccatcctcttggtgctcctggcggcgtcaccgctgcttggcgcgacgcagaaggccgcgccagggccggcgtcgtcgtcgggctcgggcgcgggcgcggcggacgcggcgccgccgacggacgtgaacaaggcgctgaaggacgagcagttcagcgagttccggcagctgctgcacgacacgcgcgtggacacgcagatcaacgcgcagctgacggacagctacaacgggctgaccatcatggcgcccaccaacgccgccttcgacaagatgaaggcgggcgtgctgaacgggctgtcgccgcaggagcagatccagatggtgctctactgcgtgctgccccggttctacagcctgtccatgctcggcaccctcagcggcaaggtcaacacgcaggggtccggccacgacgggccctacaggtacgacatcaagcggtcggggaacaacgtcaacgtgtccacgggggtgaactggatgctgctgggcagccccgtcagcaaggacttcccgctcgccatctaccccgtcgacaaggtgccgctcccctacgagctgttcgggcccaagccgcccacgccggcgcccgcgccggcacccgcgcccgggccggccaaggccaagaccaagaagaagaagaagtccgccgccatcgccgagccgcccacggccgacgacgacgacaccggctccacctccgacgaccagaaggctgccgccgcgccgccacgcgccagcagggcggccgccgcgctctccgtgctcggcgccgctgttctcgtcggcggcctcttctgatgggaagaggatcggatcggaggaggatagaatgaatgcaccgtcattcagaccaagatcacacggcgtgtgtgcgtttggccatcggctttattctttcttctctcttctcttgggggattttctctctctctctctctctcggtgatttgtatttgtaacttaatgtgatatacattagcagtggttgttcttctttcatttga

SEQ ID NO: 136322 - DNA, 605 bp, Zea Mays
atgcccatccatcatcacacgacgacgcacacaagtcgcagctagctagctcccaaccgagccaggaaaacggacgccgtgcagctcgctcgcgcgcgccccacggaaagagagggcaggtaggaataatgtaccaggccatcccgtacagcgccggccagccgtggccgcggccggccccgacgatcggtcctgacgtggcggaggaggaggggttgctggcggcttcgcagcagcaggcgtcgacgccagcggaggcggcggcgagggtggaggaggaggaggtgcggcgcgcggtggcggagtgccccgtgctcgtggtgggcgtgcgcgggtgctgcctcagccacgtggtgaagcggctgctgcaggggctcggggtgaaccccgccgtgcacgaggtggccggcgccgaggcggacctcgcggccgccggggtcgccgccctcccggcggtgttcgtcgggggcaggctgctcgggggcctcgaccggctcatggccgcgcacatctccggcgacctcgtccccatactcaaggacgccggcgcgctgtggctctgacacgagcagccaccaagctagccgccctctgattgcctctcc

SEQ ID NO: 136323 - DNA, 1224 bp, Zea Mays
aatataaaatttgacaagggtctcacgcctaagattctcttcactgtctcctccaccgccgctcacggaatcgcatccgtccaaaacccttagcttcgcttcagtgtcttcacgggccgccggcggagatgcggttcacggcgtctccggtggtggagcttccggtcagcggcgcggtgttgactttcgaacaggacaacgactccttcgaggtgggcacctctgtgtggccctcgtccctggtcctcgtcaagttcgtcgagcgctgcatccgcgacccggccctcccctttgccgacgtgctccgcttcccgggaacccgggccgtggagctcgggtccgggtgcggaccggcaggacttggcctctcccgcctcggcctcaccgatctcgtcctcaccgacatcgccgccgtgctcccggcgctccgccgcaacctgcggcgcaaccgagttcacctcgcgcgcgcgccccgcctcgcccagctccactggaactgccccgcgcatctcgcgacgctagccaccccgcgccgcttcgatctcgtcgtcgccgcagacgtggtctacgtgcaggagtccgtgccgcacctcatcgcggccatggatgcgctcgccgacgccgagcgcggcgtggtgctgctcggctaccagatccggtcgcccgaggcgcaccaggtgttctgggagaccgttccggctgtcttcccggtcatcgagaaggtggcacgggagcacctcgaccctgagtacgcctacgaggaatccgatgtattcatactccgaagaagcccgcgtcagtgaggtcaggtggtgaacttttgccagcagtttactccccgatgttgtgtttattcagctcagaagttatgagcttctagtcatggtgactagtgaggatatgtaatagaaactccatggttgtttcttgatgagtcggtgcattgtgtgggttagtaaacaactctaataaaatgagatgatcagatcaagtcgtcttgcttttttgtgtagggttgcagtatcagcataccactattaatatcataggcaaaggttcatgctttattgtttgttttgtgcagataagagttaagtggttataaggattttttttttagaagccgggagtttactaccgatcttatctatgcactgatgtgcatagaaggtttaacttttaaggatgtttatttgttagcattcttaacttctcatatttgtg

SEQ ID NO: 136324 - DNA, 2077 bp, Zea Mays
gttgtttatcttgcgtccggcgtcctctctctctcgtggcgacgactgggcgacctccccgcccccgccgctctacgccaggtgcccagatcttcgtcgggcccttcgccgaagagcagccaacagcttaggttaaaatcaaaaaaatttgtcgggcggataatacaaggcctacaccagaaggaacaccctttgtgcgacaggcgaacagctgtctctatctctctctgcagtgttatttggtttattatatgcagttgcaggggagaaaactaaggcatgttcactgcagctagaagcacagccgcagcagatgcagcaggcttcttatagtatttgcagcttagaagttggagtggcaactgcagctagctgcagcaaacactcctaacaataatagtggagagagactttcacgctgtttaaatttaggtgatttttgggaattaacttgcagatttattaattattatataggtaaaaagtgtagtatcagttactaggagcaagaacttgccctgatgacacagttattttggtttttctgttcacttctcctaatatttaaccttttgagtaagtgtgcagattaggtcttaaaaagggattgcgattaagattttattgccagagcctgagctgtagaattttccatttacacacgtggctgtacagggggtaaacttgcaggattattacttggtgatcctataagatacacatgctgtgaaccctgatttgttttagctgcttttgttcgtttttgtctacttagccttgcacactgaggacctttattgaggttgccggtctgcgggttgaatcatggcggagcacttggcttcgatcttcggcactgagaaggacagggtcaactgccctttttacttcaagattggggcctgtcgtcatggggatcgctgctctcgtctgcacaacaggccaactatatcaccaactcttgtgcttgctaacatgtatcagcgccctgatatgataacccctggagttgatgctcaaggccaacctattgaccctgagaagatgcaggagcattttgaggacttctatgaggacatctatgaggagttggggaagtttggtgagattgagaatctgaatgtttgtgataaccttgctgaccacatgattgggaatgtctatgtccagttcagggaggaagagcaagcagccgcagcatacaatgctcttcaggggcgcttttactctggccgccctataattgttgagtattctcctgtgaccgacttccgtgaagcaacctgtaggcagtttgaggagaacagctgcaaccgtggtggctactgtaatttcatgcatgtgaagcaaattggcagggatctcaggaggaagctgtatgggcgttctgcttccaggaggtaccatgggagaagccgaagccgaagcccgccaccacaaaggaggggccaccgtgaccgtgatgactaccaccaccgtgaccgtgatgactaccgtggtggcggcggtggtggaaggggaagaggtagcaggtatgacaggtacgatgacggagcaggcagaggtggcaggcatggcaggtatgatgatggagcaggcagaggcggcagacatgacaggtatgatgatggaggaaggcgcaggcatggtagcccctcaaggcgtgcaaggagcccagtcagggaaagcagcgaggagcgaagggccaagattgagcagtggaaccgtgaacgggagggaaaacagtgagctctccgtggctactgtttgccggacttgttgcttagctccggctctcatcgctatattctaagtatgcttgtgtggattgcattctgcatggctaagtaaaaccttttaagatcaggattcctcggttcattttatggttaaaccagacatcatttgtttccatctgtgttgtgtcggatcctttgctattatgttattttgacaattggtgtcaaatcttttgtggtgtgctattagcttatgatgatgtcagttgtggtttgtcactagatttgccatctggctttcagtcgtgtgttatgctgttccatggcggatttcttgt

SEQ ID NO: 136325 - DNA, 1488 bp, Zea Mays
gttgtttatcttgcgtccggcgtcctctctctctcgtggcgacgactgggcgacctccccgcccccgccgctctacgccaggtgcccagatcttcgtcgggcccttcgccgaagagcagccaacagcttaggttaaaatcaaaaaaatttgtcgggcggataatacaaggcctacaccagaaggaacaccctttgtgcgacaggcgaacagctgttgccggtctgcgggttgaatcatggcggagcacttggcttcgatcttcggcactgagaaggacagggtcaactgccctttttacttcaagattggggcctgtcgtcatggggatcgctgctctcgtctgcacaacaggccaactatatcaccaactcttgtgcttgctaacatgtatcagcgccctgatatgataacccctggagttgatgctcaaggccaacctattgaccctgagaagatgcaggagcattttgaggacttctatgaggacatctatgaggagttggggaagtttggtgagattgagaatctgaatgtttgtgataaccttgctgaccacatgattgggaatgtctatgtccagttcagggaggaagagcaagcagccgcagcatacaatgctcttcaggggcgcttttactctggccgccctataattgttgagtattctcctgtgaccgacttccgtgaagcaacctgtaggcagtttgaggagaacagctgcaaccgtggtggctactgtaatttcatgcatgtgaagcaaattggcagggatctcaggaggaagctgtatgggcgttctgcttccaggaggtaccatgggagaagccgaagccgaagcccgccaccacaaaggaggggccaccgtgaccgtgatgactaccaccaccgtgaccgtgatgactaccgtggtggcggcggtggtggaaggggaagaggtagcaggtatgacaggtacgatgacggagcaggcagaggtggcaggcatggcaggtatgatgatggagcaggcagaggcggcagacatgacaggtatgatgatggaggaaggcgcaggcatggtagcccctcaaggcgtgcaaggagcccagtcagggaaagcagcgaggagcgaagggccaagattgagcagtggaaccgtgaacgggagggaaaacagtgagctctccgtggctactgtttgccggacttgttgcttagctccggctctcatcgctatattctaagtatgcttgtgtggattgcattctgcatggctaagtaaaaccttttaagatcaggattcctcggttcattttatggttaaaccagacatcatttgtttccatctgtgttgtgtcggatcctttgctattatgttattttgacaattggtgtcaaatcttttgtggtgtgctattagcttatgatgatgtcagttgtggtttgtcactagatttgccatctggctttcagtcgtgtgttatgctgttccatggcggatttcttgt

SEQ ID NO: 136326 - DNA, 1710 bp, Zea Mays
gtatcagttactaggagcaagaacttgccctgatgacacagttattttggtttttctgttcacttctcctaatatttaaccttttgagtaagtgtgcagattaggtcttaaaaagggattgcgattaagattttattgccagagcctgagctgtagaattttccatttacacacgtggctgtacagggggtaaacttgcaggattattacttggtgatcctataagatacacatgctgtgaaccctgatttgttttagctgcttttgttcgtttttgtctacttagccttgcacactgaggacctttattgaggtattccttgatccccatggttctagataacaaaccatgagtttatatcattatcccctctatctcaccttgtattgaacatggtttttgatactattcttctttgtgcttgaaggttgccggtctgcgggttgaatcatggcggagcacttggcttcgatcttcggcactgagaaggacagggtcaactgccctttttacttcaagattggggcctgtcgtcatggggatcgctgctctcgtctgcacaacaggccaactatatcaccaactcttgtgcttgctaacatgtatcagcgccctgatatgataacccctggagttgatgctcaaggccaacctattgaccctgagaagatgcaggagcattttgaggacttctatgaggacatctatgaggagttggggaagtttggtgagattgagaatctgaatgtttgtgataaccttgctgaccacatgattgggaatgtctatgtccagttcagggaggaagagcaagcagccgcagcatacaatgctcttcaggggcgcttttactctggccgccctataattgttgagtattctcctgtgaccgacttccgtgaagcaacctgtaggcagtttgaggagaacagctgcaaccgtggtggctactgtaatttcatgcatgtgaagcaaattggcagggatctcaggaggaagctgtatgggcgttctgcttccaggaggtaccatgggagaagccgaagccgaagcccgccaccacaaaggaggggccaccgtgaccgtgatgactaccaccaccgtgaccgtgatgactaccgtggtggcggcggtggtggaaggggaagaggtagcaggtatgacaggtacgatgacggagcaggcagaggtggcaggcatggcaggtatgatgatggagcaggcagaggcggcagacatgacaggtatgatgatggaggaaggcgcaggcatggtagcccctcaaggcgtgcaaggagcccagtcagggaaagcagcgaggagcgaagggccaagattgagcagtggaaccgtgaacgggagggaaaacagtgagctctccgtggctactgtttgccggacttgttgcttagctccggctctcatcgctatattctaagtatgcttgtgtggattgcattctgcatggctaagtaaaaccttttaagatcaggattcctcggttcattttatggttaaaccagacatcatttgtttccatctgtgttgtgtcggatcctttgctattatgttattttgacaattggtgtcaaatcttttgtggtgtgctattagcttatgatgatgtcagttgtggtttgtcactagatttgccatctggctttcagtcgtgtgttatgctgttccatggcggatttcttgttttccct

SEQ ID NO: 136327 - DNA, 2050 bp, Zea Mays
ttccgccggtcgaccgatcccccccacccccaccggataccaccgcctccaccaaccgattccgttccatcccccctcccccctcgctcgagcgcgaggcttctctcccctcccctcccttctcctccccccccggcgcggattcctacagccagctccctcgccgatcgcggtcccgtcccgagggagaggtgatgataaaggatatttgctgaccaaacttgcagtagttcttctttaaggaaatagaacttggcgtcatgacacatagaaatatgctctggacacatcagtctgttaatcctgaatgggagcaaagacatgcccaagttcaaccaggaagttcctattatgcaggcactgcaagtgattcatccaacctgggtgtgcaagttgctgtgggagttccaggaaatactgctaatgttggtatatgtgatttgcggaatcatgagtgcccgcatgttcataattcatacccacatgccggtgttacatcaagatttgtcttcccaactactatgtacaaccctagcatgtcagcagcagctgtcaacatatatattcctcagactcaaagctttggactaggcagtgtgctaccaccatctttacataatcaagttcccacaggaactattgatgagagtagcagcagtgtcaattttggtgatagtgctattggattcatgaaaaggaaaaatgcagtagttgctggaagccatcattttcttcatggatttgctgggtcaagttcatctgttcatgtgcctcagaatcctgtgcatgggccatggaatccttcatctcaatcaaattgtttacccagttctgcagcttcaaacctaccagaataccacaatagtaatgggtggccatacttagaagaatcttctgcagatgcttcaaacagtttcagttctgtggctgcttgccaggagctggcacctcatggtaactatttatatccagcttgtcacataagccagtccaatacatgggttccacagcctgcaggttatggagtaccacagtggggatatagtaatgcagtggtcaatcctccaggaactgcagacatgtcaaatgggccactgcctcatttctgccagaatagtatgcaggcacctcaaatacaagtgtcccatcaacagttcatcggtaacaatgcggtgcatggtttaaatccttctgccacaggccttcctttacatccaagaatgctggctctcccattcaatgctgagcacacttttgggcatccaatgcacccacctctgataaaccaagttaacaatggggctttaagaattctgccataccagaatgctacagtgatggaccattcaaggatttatgaagcaggacatgttatcgatgaacatagcgatatgcgtttagatgtggataacatgacttatgaggaacttgtagcattgcaagagcagataggcgatgtcaatactggtttgacagaaagctatatccaggaaaacttgaggtccagttttcatgttccaggagcagctagcatgtctgatcagttttctgagctttctttggagaatgatgcttgcataatatgccaggaggagtataaagctaaagaacttataggaacccttgaatgcggtcacaagtaccatgtgaattgcataaagcaatggttgatgatgaaaaacctgtgccccatatgcaagacgacagctttgtcatcagatagaaggaacggatgaccgtcgccaataatgttgttggttgtttaccgcgtggcaaattagcgtggattttgtatatagacatggttgcctttatttgcccgtcccctttgctgtggacataaactgagcttcgaaacactgtacagatattttgtaggatgttttagacgttaaatggcacaatggtgtgtaaagctcccatgactgccttggtagatgccctcttcctttacattgtacattgtatttatctttactcttcaaaaaaagaagcttgaaaaccgtaagttctgtacattctggaattgaaagaaccggaaattttcttc

SEQ ID NO: 136328 - DNA, 1673 bp, Zea Mays
ttgcaattgcaatttgcaacatggcagcagtctagcaaaagcaaataaatagactgttgaagtaatgcagctagtttgataagagaagcgacagtatgcaggtacaagaaataaaaggaacaaggtatccctacactacaccagaaaggcccaagtcctgaatgaatcaaatggcaaaatcaacgagacacctggaaacgaatgaatacagatcgaggaccatgactgcaataacgtcatgtgccctctagtgctgaagtatcaacaaccaaacccaagtacacgctctatcctctcaagctaagacgagcagcaggcagacttcttgaccgcggacacgtcgtccttgccgccgacgttgatggtatggcccctgggaggcgcggcggggtcgtcgccgatgtcgagcgccttcttgctgacgacgcggtagatctgcgcgagcacctcggtgaaggcgtcctccacgttcatcgcctccagggccgacgtctccatgaagaaggcgttctggcgctcggcgaaggccttggcgtcctcggtcgggacggccctgaggtggcgcaggtccgccttgttccctaccagcatcatgacgatgttggcgtccgtgtggtccctcagctccctcatccaccgctccacgttctcgaaggtgacgtgccgcgtgacgtcgtacacgaccagcgcccctaccgctccgcggtagtacgcgctcgtgatagcgcggtatctggggtgggggaagcagaagcatcatcgacaccaagtggtaagttagctgcggtgcgggaactagttggaacggcacaaaaccacatgaataataatgctactcctatacagtagtacgagacgcacaggaatccttagccccacatgagtaatggcactcctgtatcacacaggaaccaacagctagcagtgcgttgtcgatcgaacagctgagcacggggctatggttatgatttctatccacgatttcaacgtccataatttcacacctggcataaacggcctgtgtcatccgctcctggcataactgaatatactctgatagctcgaaatgtgatagatcgaaaaatggtaagtgcaagagcagtccatgtgtaaaaaaaataaaaaaaagcagctaggggtcaccgaccagactattactaagatccgtacggcgcacgcatggcaatcgctaacgaatggaccccgatcggataccatcatacacgaggaaaggggaagatgcggatctgggggtgggtcgtaactcgcacgcacctttcctggccggcggtgtcccagatctgggccttgacgaccttgtcctcgacgtggatgctgcgggtggcgaactcgacgccgatggtggacttggactcgaggctgaactcgttgcgcgtgaagcgcgagagcaggttcgacttgccgacgccggagtcgccgatgagcaccaccttgaagaggtagtcgtagtcgtcgtccgcccggtacgccatcgccaccagacggccgggcggcggcgggacgggcggtggaggaggaggggcgcgcggatggggcagagcgggtgtgggtgtgggtgtttttttttccttctcagttcccaattccaccccgggcgggtgcgggtgcgggtgctcggtttccgttggcttggtgcggggtcggtgccgtgc

SEQ ID NO: 136329 - DNA, 1805 bp, Zea Mays
atggcgtcctcgaacaggcactggccgagcatgtacaggtccagtctcgcctgcaacttccagcagccgcagccgcagcctgacatgaacaacggcggcaagtcctcactcatgtcctcaaggtgcgaggagaacggcggaaggaacccggagccgaggccgcggtggaacccgcggccggagcagatcaggatcctggaagggatcttcaactccggcatggtgaacccgccgcgcgacgagatccgccgcatccgcctccaactgcaggagtacgggcccgtcggcgacgccaacgtcttctactggttccagaaccgcaagtcccgcaccaagcacaagctgcgcgccgcggggcagctgcagccgtcgggctcgggccgctccgccctgcaggcgcgcgcgtgcgccccggcgcccgtgacgcctcccaggaacctgcagctcgcggccgctgctcccgtggcgccgcccacgtcctcgtcctcgtcgtcctccgaccggtcctcggggtcatcatcgagcaagtcggtgaccgtgaccccgacgaccgccgtcgcgcttgcttctcccgcaggcgccgcgccggctgctgtcttccgccagcagggcgtgatgccgacgacggccatggacctgcttacgccgctgccgtcgtcgtcggccgctctggccgcgcgccagctctactatcagtaccacagccagatcatggcgcctgccgcgccgccgatgcccgatacggtgatcgcctctccggagcagttccttccgcagtggcagcagggcggacagcagcattattacctgccggccaccgagctcggtggcgtcctcgacggccactcccaccacacacacgagcccccggcggccatacaccggcccgtctcgctctcacccagcgtgctctttggcctgtgcaacgaagctctaaggcaagactactgcgccgacatcagcgtcgtccccaccaagggactcggccatggccaccagttctggaacagcaccacctgcggctctgatatgggcaatagcaatagcaagatcgacgccgtgagcgccgtgatcagggacgacgagaagtccaggctggggttactccactactacggcttggcgggcgcgacgacgaccgctgctgcggctgtcgctccggcccctctcgctgcagatgccgccgccggtacggccacgctgcttccaagctctgcggcgagcgaccagttgcaagggctgttggatgctgctgggctgctgatgggggagacgccgccgacgccgacggcgacggtggtggccgtggcccgggacgccgtgacgtgcgcggccaccgccaccgcgcagttcagcgtgccggcgtcgatgcgcctggacgtgaggctggcgttcggcgaggccgcccttctggcgcgccacaccggcgaggcggtccccgtcgacgagtccggcgtcacggtggagccgctccagcaggacactctctactacgtgctcatgcaggcgactaataactgaatgacgatatggagctgcacgtctgcgtcaactagtatcgatcgatcgatcgaaggcgtgccgcggatgacgaagagctagcgacagcgctaattggtccacgcatttgatctgcatcattttccttaccttaagcacgtacgtacctaggtatattttgccctgcatgcatatgtatttggagtcaggagtcatggaccaaactgtgtttttttgctttgttatcgtctggtgagaaatgaaataagccatgcatgcatcccgatgcaagttctgcatgcagt

SEQ ID NO: 136330 - DNA, 1802 bp, Zea Mays
atggcgtcctcgaacaggcactggccgagcatgtacaggtccagtctcgcctgcaacttccagcagccgcagccgcagcctgacatgaacaacggcggcaagtcctcactcatgtcctcaaggtgcgaggagaacggcggaaggaacccggagccgaggccgcggtggaacccgcggccggagcagatcaggatcctggaagggatcttcaactccggcatggtgaacccgccgcgcgacgagatccgccgcatccgcctccaactgcaggagtacgggcccgtcggcgacgccaacgtcttctactggttccagaaccgcaagtcccgcaccaagcacaagctgcgcgccgcggggcagctgcagccgtcgggctcgggccgctccgccctgcaggcgcgcgcgtgcgccccggcgcccgtgacgcctcccaggaacctgcagctcgcggccgctgctcccgtggcgccgcccacgtcctcgtcctcgtcgtcctccgaccggtcctcggggtcatcatcgagcaagtcggtgaccgtgaccccgacgaccgccgtcgcgcttgcttctcccgcaggcgccgcgccggctgctgtcttccgccagcagggcgtgatgccgacgacggccatggacctgcttacgccgctgccgtcgtcgtcggccgctctggccgcgcgccagctctactatcagtaccacagccagatcatggcgcctgccgcgccgccgatgcccgatacggtgatcgcctctccggagcagttccttccgcagtggcagcagggcggacagcagcattattacctgccggccaccgagctcggtggcgtcctcgacggccactcccaccacacacacgagcccccggcggccatacaccggcccgtctcgctctcacccagcgtgctctttggcctgtgcaacgaagctctaaggcaagactactgcgccgacatcagcgtcgtccccaccaagggactcggccatggccaccagttctggaacagcaccacctgcggctctgatatgggcaatagcaatagcaagatcgacgccgtgagcgccgtgatcagggacgacgagaagtccaggctggggttactccactactacggcttggcgggcgcgacgacgaccgctgctgcggctgtcgctccggcccctctcgctgcagatgccgccgccggtacggccacgctgcttccaagctctgcggcgagcgaccagttgcaagggctgttggatgctgctgggctgctgatgggggagacgccgccgacgccgacggcgacggtggtggccgtggcccgggacgccgtgacgtgcgcggccaccgccaccgcgcagttcagcgtgccggcgtcgatgcgcctggacgtgaggctggcgttcggcgaggccgcccttctggcgcgccacaccggcgaggcggtccccgtcgacgagtccggcgtcacggtggagccgctccagcaggacactctctactacgtgctcatggcgactaataactgaatgacgatatggagctgcacgtctgcgtcaactagtatcgatcgatcgatcgaaggcgtgccgcggatgacgaagagctagcgacagcgctaattggtccacgcatttgatctgcatcattttccttaccttaagcacgtacgtacctaggtatattttgccctgcatgcatatgtatttggagtcaggagtcatggaccaaactgtgtttttttgctttgttatcgtctggtgagaaatgaaataagccatgcatgcatcccgatgcaagttctgcatgcagt

SEQ ID NO: 136331 - DNA, 463 bp, Zea Mays
ccggtctgcttcttggttcgccggcgaggcggcgggcagctcacggccggaagcggcggcgtccgacgcgcgcgccgcgccaccgagcaggagctcgtcccactcctcggctcccatggaaatccacctccccaggctgggaagcctctccaagatcgcctcgtccggcggcctctcttcgccaacctccgacgacgacgcggccgtcgacgacgacgctggggtggcggagcctgtcatgatggtagcccacacattctcgaggatgtttgcggcgtggtcagcaggccgccgctgacgggaatcatccggtgctccaatcgccatttctgcctgcccgtggatcggaatcaataaaaattggatcgaattccctcttctgaagattgtagctgtggactggactggggtttatatatctgcctgccatcaactggctctggctgtgtgtgtcatggctgac

SEQ ID NO: 136332 - DNA, 866 bp, Zea Mays
ctcttcgcagatgcaccagtgtccttccagatcccgccgcgcgtctccttccgcgacacgctctcagtctcacgccacagctcgtcgcgttcgtcaacggtcgacccatcgcctatggaaggaaggcgcgagccggaggcggacggcggaaaggccgggggcctcccgccgtcggagccgccgcacctgcagggccagccgccgcaggagtacgggtacggcacgttccagggtcctcgacatcctcccgtcgggttcccgcagcctgccccgcctcccgggctcggcagcggcggctatcacaaccagcagcagccgtacgcgcctgcggagacgtactacgcccaggggtaccaggccgtaccaggctatggtcctgttgctgaaggaagacctgtgagaatgaggcgtctcccatgttgtggcctcggcttaggctggtgtctgttcataactgggtttttcttggctgccattccatggttcattggagctttcgttcttatatgtgtgcgggtacatgaccaacgagagaaaccaggatacgttgcttgcacaattgctgccgttgttgctgccgttgccatcctcttgggggtaactaaaggaacgcacgtgtggtgaattgcctccagagaaggcaatcaatgtgtatttgcgttgtatatctgtgtgtgctaaaaagtgtggagcaacatccatgtgatcttatgtccatatatattctactttgcaatgaagtttgaaatgtagtaatgtaccatctgcttcttgtaagcagcactgcatcatatataataagataccttttatttaaattgcggaatttctgttttcgaatgaagatgcagcactggacgtctcag

SEQ ID NO: 136333 - DNA, 183 bp, Zea Mays
tcgagcgccgcctcgtgcggaacctcacgttcgcgtttgattggctcgatggcgacgccgagcccgccgtggctacggaccccatcgtgttcgacgcgttcggaaggacggcttccacaccagctgaggccaccggtgggaagcgacgctggacgtactacaagctgctcggcgtctacctca

SEQ ID NO: 136334 - DNA, 1928 bp, Zea Mays
aaactaaatcaagcattcaggcccacgacacacggcctgctagggtttcttgcccgatcacttaaatactcctccgcctccctctcctcccaagacggccgccatctcccctgttcggttttaggagacctgcgccgcccctccggccacgcgagctcgccgaaatggtcgcccacaggttccatcagtaccaggtggtgggtcgcgcgctgccgaccccgaccgatgagcaccccaagatctaccgcatgaagctctgggccactaacgaggttcgcgccaagtcgaagttctggtacttcctgagaaagctgaagaaggtgaagaagagcaatggccagatgctcgccatcaacgaggtacaaccaatccttcaccctcgtaccgtgaacgttgctccgctttatgaattagtgtcggtcgaatgatttagcaatgccagcattccatagataggtgtcgttgatatgttgccattgctgatgttatgccgtgaagttcatgcccttcctggcggattagtcataatgtctcacttcacttcatcattgattagttaagttctatagatgaaatatatatgtgttcggtagtccttcaataagagctaaaaaacgtagagattacccttgtttcaatgtagagagatcttagattttatttcggggtctgtacacctttggatttgtcactcgtgtatggactaggtttgctctctgattatttgagcaatgagtagggtggtgttctacatgaaactgtggtgttgaatactatcattttagagaagtgagggctgtttaccatattaaagaattgagggagtagtgtttctgtttcagctgaagtgatatcacacttcttcagtttgcatttgcttgtcagttttgaattttaccattacatgatcattcggggtcaaaactgacaagcactcataatgtaaacatgggaagtgcatgtgttccgctgtgtgtagagctccaaactttcaattcatgtaaaaatcctgttgcagctatggcttcctaacaaccttgatgacctgattttgtaacattttctggtggcaaatttaaaatgagctgattcagtaacgtctgttgcatggtgttcggctacctaacaattttcttagttgttgaggggtttcattgatgttttttttgcagcccgccttagatagatatagccaaagctgactctgtaatgtatgctgattgctgaatggtgttagttgtcgacggttttttgttggtgtctttttaactatcgtgccttagcccttaggtagatatatagccagagctggtcgaggatggctttgcaatcccaaagtcacttgttctcctaagttctatttgtccacctctgctccttaactggcttgatgtttctcagatcttcgagcgcaacccaaccaccatcaagaactacggcatctggctgcggtaccagagcaggacggggtaccacaacatgtacaaggagtaccgcgacacgaccctgaacggcgccgtggagcagatgtacaacgagatggcctcgcgccaccgcgtgaggtccccctgcatccagatcatcaagacggcgacggtccacttcaagctgtgcaagagggacaacacgaagcagttccacaactcggcgatcaagttcccactcgtgtaccgcaaggtgaggccgcccaccaggaagctcaggaccaccttcaagtcgtccaggcccaacctgttcatgtgatgggcctcggcgggctggctgtagccacctgtgttttgtgtcttagtgtccagagagataaaggtttttgcctctgcaagctttgctgccccgtggactgatgattttttttttggatgatggtattgtattgcaaacccttgactttggtcctactagttatgagaaggctgctgtgttacgtg

SEQ ID NO: 136335 - DNA, 993 bp, Zea Mays
aaactaaatcaagcattcaggcccacgacacacggcctgctagggtttcttgcccgatcacttaaatactcctccgcctccctctcctcccaagacggccgccatctcccctgttcggttttaggagacctgcgccgcccctccggccacgcgagctcgccgaaatggtcgcccacaggttccatcagtaccaggtggtgggtcgcgcgctgccgaccccgaccgatgagcaccccaagatctaccgcatgaagctctgggccactaacgaggttcgcgccaagtcgaagttctggtacttcctgagaaagctgaagaaggtgaagaagagcaatggccagatgctcgccatcaacgagatcttcgagcgcaacccaaccaccatcaagaactacggcatctggctgcggtaccagagcaggacggggtaccacaacatgtacaaggagtaccgcgacacgaccctgaacggcgccgtggagcagatgtacaacgagatggcctcgcgccaccgcgtgaggtccccctgcatccagatcatcaagacggcgacggtccacttcaagctgtgcaagagggacaacacgaagcagttccacaactcggcgatcaagttcccactcgtgtaccgcaaggtgaggccgcccaccaggaagctcaggaccaccttcaagtcgtccaggcccaacctgttcatgtgatgggcctcggcgggctggctgtagccacctgtgttttgtgtcttagtgtccagagagataaaggtttttgcctctgcaagctttgctgccccgtggactgatgattttttttttggatgatggtattgtattgcaaacccttgactttggtcctactagttatgagaaggctgctgtgttacgtgccctgtatcgcgcattgtttgatgcttgtgaatcttttttttggttttgtattgcgacacctcagttggagccctgtttggctgcgaatatttcgttttgaactgct

SEQ ID NO: 136336 - DNA, 1563 bp, Zea Mays
caaagccgtcccctctcacaccaatcataccatacggtaccccaaagctcaaagcagctagctaaagaagcgccccccacatccatctacctccgattccatccccggcccccctcccaaacagcacaaaaagtccaccgcactatactatcctatcgcgaggcgggcaaaaaagccgcagtgctgctgctcatatccaaatcactcagtactggactcccatcccaagttattcgcctaaggacgggccggccgatcgcgttctggattcgttggaggattctttcattcgtctgcaagtcatctctcgggagaccgggacgacctcggcgtcgccgcattgctcattctgttccttttagtcctgctgatcgttcattctttagtgcatatatataggttttctccttgagttcgttcgttcttggaagaaaggaatgacttgaggtgatagtgtgtgtgtgtgtgtgtgagagagagagagagacgcattgtgtgagagctctgcctgttcttcctctgccattgtttctcttccctttcagaagggtgttcaggagctcttctttcagttgtcggtcgctcgccatctttgggagagagcctgcattggcagaggcagcaatgctacagttcaagagaaaaagactgctgctcgcatctgcaggctgcgtggctctcatgcttctcatcacaccaacacatggtgactccgattcggagcagaggagctacaagatggctcggccattggagctcacgcccaagctctcgctgcagctcaagctccacgccatccttctctggtcctcggtcgccttcctgatgcccgtcggggtcctgctcatcagagtctccgccaacgtcaagagcgccagcaccgtcaggctcctcttctactgccacgtcgcttcccaggtcgtcgccgtcgtgctagccaccgccggcgcggtgctgtcgataagcaacttcgagaacgccttcgacaacacgcaccagagggtcgggctggcgctgtacgccttcatctggctccagccgctcgtcggcttcctccggccggacaggggggccagggcgcggggcgcgtggtacctggcgcactggctgctgggcgtcggcgtctgcgtcgtcggcgtcgccaacgtctacgtcggcctgcacacgtaccaggagcggactggccgcagcgcgcggccctggacgctgctcctcaccgtcgaggtggcggccttggcgttcgtgtacctcgtccaggatcgctggagctacgtgctgcggcagcgggaggaggcggccgccgccgccgccctcggcgacgggcggagccaagggtccaccatgtacccggcgaacgatcacaaggaggtcgtcgtggtgccatagccgccttgctgactcgtgactggtatcccggctcagattccactagtttaggcgacgatccgtggaccgtcgagcagatggattggaagatgccgcgtctttgggagcttgcatgcatttgtacaggtgaataggaaggaggtgatatgtgcttgaaagaagctgagttgggttctt

SEQ ID NO: 136337 - DNA, 1482 bp, Zea Mays
atgtcgggagccaggcatgaccaccacatgctgtccggggacttcgtgtcccacgacgagctggcggcgatgttcgagcaccagcgggccgacgcggcaccaccagcgacgcagcagccgtggttcatggactacctgcacgcggtggcgtcgcctctggactgcgacgccttcgtttcgggcttcgacgacgtgccgccgaccgttgacgagatagtcaagagggagcttcttgtggacaccgcggccaccggcggcgccggagcgacgacgacggcgccgctgacgcccaacagcatgtcgatgtcgtccacgtccagcgaggcctgtggcgccggggcgggcgaggagttggcgaccgccggcaagtccaagaaggaggaaggcgacggggaggggttcgagagcaaggacggagacgcggcggcggccaagggagacgcgcaagggcaggagaagagcaagaaaggggcggccaacaaggggaaggtgaagggcgagaagcggccgcggcagccacggttcgcgttcatgaccaagagcgaggtcgatcacctcgaggacggctaccggtggcgcaagtacggccagaaagccgtcaagaacagcccgtttccgaggagctactaccggtgcacgacgcagaagtgcccggtgaagaagcgggtggagcggtcgtaccaggacgcggcggtggtgatcaccacgtacgagggcaagcatacgcaccccatccccgccacgctgcgcgggagcacgcacctcctcgccgcctccgcgcaccacccgatgagcggcctccaccaccaccaccacctccgggtgccggcggcgctcggcggcgccaatgacgccttcgacgcgctcgggctcctgcagcagcaggcccaccaccacggcgccgtcatgcagcagctgatggcggccgtcggcggcgacggcggcgccgggctgcagcaggtgaacgctgccgccatgtcgggccacgtggcgctggcggcggacgaccagcacggctgggctgccgccatcgcaggtgtgggagcggcggccggcggtagtaccactgctactgccaccgctgcggcggcaactcctgctgctgctgctagcgctccgctccggatgcagcacttcatggcgcaggactacgctgggctcctgcaggacatgttcccacccttcgttcacagcagcgacggtggccaccatcatcaccaccactgaatgatgacgacacggagagtttttctgccttgaacgatcgatcgatcgatcgggagctagccatcgatgatgatagccagagcgatttggtacgttgctgttaacttttgctgtcacctgtacgatgatgcgatctgaggtcgtagctagtagcgtagtagcatcgtcgatcagtagtagtacgtaccaggatcgagtttgttgtacatgtacctgattactaattaatgagctcatcatcaaagctttgcgctt

SEQ ID NO: 136338 - DNA, 620 bp, Zea Mays
caaaataaccgtcgtcgtgtcagtgacatggccgctcaacttcttcctcttactgcattgtatctgaactacatcgacctaccaactacatcactgcaccgactgctatactgcatcaaccaaccgaacggctatatgaaacgacacaatgttagccgtcagatatgaatattaacttcataaaaacctgcaagttgtttgctaacagtgatcctttagagaaatggggacatgggaacaaacagaacgagaatgactaaagaaacaatggttgcttgaggaggaatcgatcgaaaatgaaccacctcccgagttccagttacttactcttaccgggatgggactggacaccaatggagaattcctaatggctatgcaacaacagcttgtccatgaaattcgtgaagtatggacaaattcagttgagaatctactttatatgaaggaagaccttatcatccctcatggatgtgttcattctcttgtaatctatgaagttctgttaaagttagtcgaaccattttctgattctatgttctctctactgtttgacaacaacacatattttatgaattaattattaaacaaaacgaggcgcaagactggattggtaattcata

SEQ ID NO: 136339 - DNA, 2171 bp, Zea Mays
gtctggatcctcctatccaattccgtctcgcgttcctctcgtcggctcgtcgctctccgagccgcgaaatggcgcctcctacctctgcatcggcgcggccgctatccctccccctcaccgtccctctctcctgtcaccgctcccacttgctccccgcgcccaacgctcgcctcctcacccggcgccgcgtcgcgctcgcgccgacccggcctggcgccacgctcctatccagcctcagtgacgcccgggaggaggaggaggatgaaagtggtttctatgaggaggatgagcaacaggaattcgaggatgaggaggaacaggggtacgacggggagaacgaggagctggtcgaggtgggatacgtgtcaggcgcgcacggggtgcgcggcgacgtcctcgtcacgccacgcaccgactttccggagctccgccttgccacgccggggacgagatggctgagggctcgagctgctggcaagcagcaggtcagggaattcgagcttgttcggggaagggcgcacacggggaagaagagttggatcgtcagctttgatggcgtcaacaacctggacgaggctaggcaaatagttggttcagctgtacttgtgaaagctcgagatagaccagaaattgaggatgatgaattctattcacttgaccttgttggaatgagagttattgtcaaggatacaggcaagctcgtaggaacagttggtcaggttttcaatttcggaggtggagatcttctacaggtgataatgggctcttctgagggtactgctgttgatccagattcagaaaatcaagattcaatttcatcacgtgagcatgtgtggattccatttgctgaagatattgtacctgatgttgatatggcaagcagagaaatgcggattacacctccgaaggggttacttgagctcaattctcgttctgacaagagatcgaagaaagaaaggcgtgcgatggagtggaaggacaggaaaaggtttcaacgtcgtgtaattgcaggaaagaaggtactctccgaaatggaccaagtccatgttctggaaggtttggtatcaggggacaaggtccaaaaggcatcacttgcagagcagattgggagcattgactttcaattgttccgacatgcagtacattgtgttagcaagcagattgagagctcttcaatgaatttgctcgctaactcttcactgtcaaggaaaaaagtgatcaaaataccatacaagactctcatcaaccttggggacaaagctgaacatgcattcagtactgaatttaaaaatggacttgacattcttttgaagtccaaagcagctattgtgcttgttagaaacggctctgactctgatactgagtttctgagtttgctcaattcttttagtgaattaatgaaggttgtagaaaataaagtttctccccctttaattgtcattgccccagctggtcatgtggagtcagttcggaaatgcctggtagagaatgactattttggttttgacactcaaaaggtgtgggtgctggaagaggtggagcttccagttgtcagtatatgctcggagggaaacagaaaaaaagttctgatgaagtctccctgggagataataaaaaagccaacaggttctggagcaatcttcagcttactgttatcaaacaaaattttggaaaccctcaatgaaatgggtgtacagtatacacagatctgcagctcatccaacaaaccaatcatcgggcatcctttgctctttggggctgtcgcttcccgcggggctgatgttggcatccaggtctccaagaccggtgaaacattagacgatttcgacgtgatcctttccatcgaccagctgaacaagatgtgccgagatgtcacccagatcaggttctccgctcgctccgaacagaacgtgcacgtcgagcatgtcgacgggcagtgggtcgccgtccagccggaggtggcaaattcccatcgcctgcatgccgaggttacgagtgtcttagactcttgcgctcctgataagctgtgtgtcatggagattgttgagcaataaaagtttcttgcctgtgtactgtacataatcacaagtacttgatagatgcgtgaggtttttcttctgctattgttttgctatgaatttttaggggagcatctacgaaggggaatacca

SEQ ID NO: 136340 - DNA, 99 bp, Zea Mays
gaaatcagtggtgatgttaagatgcgcgccacagacttactactggtcagtatgtattttttttttaaagatagaggtggatataaagaacgcagaaag

SEQ ID NO: 136341 - DNA, 1326 bp, Zea Mays
accacagccaccgcaagatcccgggcgcccaatcacccttctccacggagattcctagcctcagccacagcccacatctgcctcatcgtctccctgaggctcccgtcgcgccaagtgttccagcatcccggacgcaccaatggcatccaagcatcagatttattttttatttttctggcaacattcaagatagaacttgctcgcggcggtgtttccctccgtcgctttaaataccttcgtcgcctccacaagtccacagcatctcaagccaccatcgatctgcaagtctcgctacgtagcagtgcaataaaaaaagcagccgcaatggcgagcagcaccatggccctctcctccacggccttcgccggcaaggccgtgaacgtgccgtcgtcgtccgccttcggcgaggcccgcgtgacgatgcgcaagacggcggcgaaggccaagccagcggcggcgtccgggagcccgtggtacggccccgaccgcgtgctgtacctgggcccactgtccggcgagccgccgagctacctgacgggcgagttcccgggcgactacggctgggacaccgcggggctgtcggcggacccggagacgttcgccaagaaccgggagctggaggtgatccactccccgctgggccatgctgggcgcgctcggctgcgtcttcccggagcttctcgcccgcaacggcgtcaagttcggcgaggccgtgtggttcaaggccggctcccagatcttcagcgagggcgggctggactacctcgggaacccgagcctcatccacgcgcagagcatccttgccatctgggcctgccaggtcgtgctcatgggcgccgtcgagggctaccgcatcgccggcggcccgctcggcgaggtcgtcgacccgctctaccccggcggcagcttcgacccgctcggcctcgccgacgaccccgaggccttcgccgagctcaaggtcaaggagctcaagaacggccgcctcgccatgttctccatgttcggattcttcgtccaggccatcgtcaccgggaagggcccgctcgagaacctcgctgaccacattgccgaccccgtcaacaacaacgcttgggcctacgccaccaacttcgtccccggcaagtgagggaggcgccgccggtgacctttaggtgtccggatgcatgtgagcgcacgctggttttcggtttgtaccatgatgtaaactattgttcaatcgacaaggaataattgtgttcattgtcattatttttcccctctctttttcgttcctgccgattttatctaaatcaggtgtttgataaacggcatgattggtttcctgct

SEQ ID NO: 136342 - DNA, 499 bp, Zea Mays
aaacttggccgcagtgaagggaggggaggagaaagggttttggaattaggcatcggccgccgttgcgttggtgtgagcaagtgaaccaggccgaaaccgaagctaccgccaccaccaccccgccctcgtctccctgtccccgagtcccagtaggggatcccggcggtgaggatgagcggcggcggagctggagggaagggggcggcggcgcctgttccgcccgggtcgaggaagctggtgcagggccttaaggagatcgtgaaccgccccgaggcggagatctacgccgcactgcgcgagtgcggcatggaccccgacgagacggtcagccgcctcctctcccaaggtccgggcacggcttgcgctgtcctctccccactcccacgattccgtgcctgttttgctgttcgttgcagggcgcgttgctaggatttagtcgggtctgctctcgtcgatccgggcgattcgtcgacgtgaaggttgtagtctgagcgctcgg

SEQ ID NO: 136343 - DNA, 3080 bp, Zea Mays
aaacttggccgcagtgaagggaggggaggagaaagggttttggaattaggcatcggccgccgttgcgttggtgtgagcaagtgaaccaggccgaaaccgaagctaccgccaccaccaccccgccctcgtctccctgtccccgagtcccagtaggggatcccggcggtgaggatgagcggcggcggagctggagggaagggggcggcggcgcctgttccgcccgggtcgaggaagctggtgcagggccttaaggagatcgtgaaccgccccgaggcggagatctacgccgcactgcgcgagtgcggcatggaccccgacgagacggtcagccgcctcctctcccaagatactttccaagaggtaaagagcaagcgcgacaagaagaaagagattaaagaggttcctgagacaagatatcgatcagcaaatagttctactaatcgaggccttagaagtggtgtagatcgtggtggacggaacaattctatgcactccagctctactgataacatgacctcaaggccaccagggtctggtactgcatcaggtacttccagtcagaggcaaacagttgcaagtccttctgcaaacaaacatatggttgctgatggaccagctgcatcattgcaatcatcgtctgggtttcagcatggtggttggtctgggacacctggtcagttgtcgatggctgacattgtgaaaatgggccggcctcagggaaagacttctatcaaacctgtggtcacagctgacagaggttatgctggacagtacccatctttgccaagcacaaaccagaatctgaaacaatctggaagcatggttcccccaacagagcttgacaaggggttacaacctgcccaagattcggttcaggttaaggatcatgatcattctactgctgacagcaagctcccatatggtactgactggtctccacaagatggcccgacatttgcgaaccaatcttcccttcctgagccatctggtgatccgtccttgtatgaggcatcgtttcagtcatctacattggttactgatgtagttaattcacatgaaaattcacacttggatgaaaacgacacctttgcaatgggaccagcacctgcctctgagagacacctggatcctagtgacggtatttctgagtacaatgatgtaatattgaacaactcaagttcctatcagcctcataattactcttacacagaacaacaagaagttgaggattccagtgctgatgtatcagcagcagcagcaaacttccagagtttaagcctacataatgatgagttagctgcaaaaaagtctgcagaagataaccctgcagtgataattcctgaccacttgcaagttacaaatacagaatgtgtcaagttgagctttggcagttttggatctggtgcattttctgggttactcccacaaaataccactgatagcaatgtggaattccctgctcgagaggaatctgcaccagtagatcaaatagatgccaggaatcaagattactatgaaagtggtgctgtaacttcaccagcagacgaaaatcttgaggccatgcttggagctaacatggagaatgtagatgcgccttctgtttcacaggctaatgagctcaggcaggacgtacttgatccttctgaacttcaatatgacgtcccatcagttccaagtcatgcttattcaaacacggacactttacagcctagcacaattgaggagccacaaggaaacaaccaagcacatactctttcccatttgtcaaacttaatgcaagcaaatcctttgagcaccagcagcctattggggtcaaatcaaaatcatgcaactcttcatggcttagagtttgatttaccgccttatctgggagcaaaatataacgcaggctcaactacaaatcctagaccacccatatccatgcagcaggaggcactgaaagcaggggttttctccaacgcccagtctacacagagtcttccaagtactagcattcagacggggcttcctctgccacagcaattagcacatcacccttactctcagccaactttaccaatcacacattttccaaatatggttgggtatccgtatttgccacaaaactatgctacttacctatcttcaggcaccttccagcaagcatacccgagtagcggaccattccatcagtctgctgctgctgctttgctggcatctggtatgaagtactcgactccagagtataagaacaacctgtctgccacaggcttacaacagcaacatcagccacaaccacaaccactttcatcagtcatctctggttatggaggctttggaagctcaagtaatatacaaggaaattttacccttagtcagagtaccggctctgcatcagctcttgggtttgatgaagcattgagcagacagtacaaaaacaccagtcaatacatggctctccagcagggcgacaactctggaatgtgggttcatggctctggttcaagagcggcctcgacgcttccgcctaaccacttctatggttaccagggacagagtcagctgggtggctttgctcgggcgcagcagccacagccttcccaatttggaggccatgggtacccaactgtctaccagtctcagggacaggagcacccccagaaccttgctgagggcagcctgaacggcttccaggtcacaccgtctcagccatctcatccgagctggcagcatcagcacacgtactgagccctcctgtactccctggttagggtggctcttgtgctgtcacaagccaagtttcgcgtgcttgtgccctcactcgatgcagagtatgctgctcggattcagtgagcgctgagagggtcccaggcatacaacagttagagcgttttaacatgttgcgtgtgttgccagactgatgcattgcggtttgttttcgatagtgagttatatgtgcggaggcgcagtcctgtataactgagacatgataacctaacaagcagtcgtttctgtttcccaagagttggctgctcttagcttgagctgatgattgactgtttgcttgcagttttggtcatgattttactgcttcaaaaaca

SEQ ID NO: 136344 - DNA, 2134 bp, Zea Mays
cctgggtacttgtacagatttccacccgggacacctatcctcacccaaacggtcggtcgacctcacacgtcccccggatccgacggccaacagagcgcgtggcccctctccgccgccacctctgtacaaaatgcccgccccaccaccacgccgaatccgccctctagtgactagttcacgtcagttgctgctccccccaccttctcctcctgctcctgccctcggtttctggtgagttcgacgcttctcttctcgtggacttaccgccgccttgaccgcgacttgaattgctgatcagcgaacatgggaacccgcggcgtcgccctgctgctcctcgcggcggtgctgctcctccaggcgctcctcctcgcgtcgtcggagggcctggtgcgggtcgcgctgaagaagctgcccgtcgaccagaacggccgcgtcgccgcgcgcctctccgccgaggagaggcagcgcctcctcctccgcggcgccaacgccctgggctcaggcggcgacgacgactccgacgtcatcgcgctcaagaactacatgaacgcgcagtactttggggagatcggcgtcggctcgccgcagcagaagttcaccgtcatcttcgacaccggcagttccaacctctgggtgccgtcctccaagtgctacttctcgatcgcttgctacttccactcgcgctacaagtcagggcagtcaagcacttacaagaagaacggaaaacctgctgccatacgctatggaactggttccattgctggttttttcagtgaggatagcgttacattaggtgatctggttgtgaaggatcaggaatttattgaagctacaaaggagccagggcttaccttcatggttgcaaaatttgatggcattcttgggctaggctttcaagaaatctctgttgggaatgcaacaccagtgtggtataacatggtgaaacaaggtctcatcagcgaccctgttttctctttctggtttaaccgacatgctgatgaaggagaaggtggtgaaattgtgtttggtggaatggattctagccactacaagggtgatcacacgtttgtcccagtcactcggaagggatactggcagttcaacatgggtgatgtcctggttgatggaaagtccactgggttttgtgccggtggctgtgcagccatcgcagattctggaacttccttgcttgctggccccacagccataattactgaaatcaatgaaaagattggtgctgctggtgtagtcagccaagagtgcaagactgttgtttctcaatatggacagcagatcctagatcttttgctagctgagacacaaccagcgaagatctgttctcaggttggtctgtgcacttttgatggcacccatggtgtcagcgctggaattcggagcgtagtggatgatgaagctgggaaatcaaatggtggtctcaagagtgatccaatgtgcaatgcttgtgagatggctgtggtatggatgcagaaccaacttgcccagaacaagacacaggagctcatcctgaactacattaatcagctttgcgagcgtcttccgagtccgatgggagaatcagccgtggactgtggcagtcttgcgtccatgcctgacattgcgttcaccattggaggcaagaagttcaagctgaaaccagagcagtacattctgaaggttggtgaaggacaggctgcccagtgcatcagcggattcacagctatggatatcccaccaccccgtggccctctctggatcttgggtgatgttttcatgggagtctaccacaccgtcttcgactatggcaagctgagggttggcttcgcagagtcggcctagggatatggtttggcagcaacccgtccagaggcaaacgcgtaatttgtgtgtttatgcgaccggcgatgtgtgtatatatgctactacatgtttagtgatgctttccgagacctgagacaacgcccgtctgttttaacgtggcgcaagaataattctggttctggatgtattctccgtacacaaaggcgtgtctgatgcaatggtgaccatcttgcggttgcgtgtttgaaatagccttttcgcattcgtgggcatttgcgggtgcgggttccgaaaagatttttttttgtatttgtgg

SEQ ID NO: 136345 - DNA, 2150 bp, Zea Mays
cctgggtacttgtacagatttccacccgggacacctatcctcacccaaacggtcggtcgacctcacacgtcccccggatccgacggccaacagagcgcgtggcccctctccgccgccacctctgtacaaaatgcccgccccaccaccacgccgaatccgccctctagtgactagttcacgtcagttgctgctccccccaccttctcctcctgctcctgccctcggtttctgatcagcgaacatgggaacccgcggcgtcgccctgctgctcctcgcggcggtgctgctcctccaggcgctcctcctcgcgtcgtcggagggcctggtgcgggtcgcgctgaagaagctgcccgtcgaccagaacggccgcgtcgccgcgcgcctctccgccgaggagaggcagcgcctcctcctccgcggcgccaacgccctgggctcaggcggcgacgacgactccgacgtcatcgcgctcaagaactacatgaacgcgcagtactttggggagatcggcgtcggctcgccgcagcagaagttcaccgtcatcttcgacaccggcagttccaacctctgggtgccgtcctccaagtgctacttctcgatcgcttgctacttccactcgcgctacaagtcagggcagtcaagcacttacaagaagaacggaaaacgcacacacagaccatatatgctgaaaaggtgtatataaatgtgggggaaaaaaaccaaaacttatatgtcaggaaaacctgctgccatacgctatggaactggttccattgctggttttttcagtgaggatagcgttacattaggtgatctggttgtgaaggatcaggaatttattgaagctacaaaggagccagggcttaccttcatggttgcaaaatttgatggcattcttgggctaggctttcaagaaatctctgttgggaatgcaacaccagtgtggtataacatggtgaaacaaggtctcatcagcgaccctgttttctctttctggtttaaccgacatgctgatgaaggagaaggtggtgaaattgtgtttggtggaatggattctagccactacaagggtgatcacacgtttgtcccagtcactcggaagggatactggcagttcaacatgggtgatgtcctggttgatggaaagtccactgggttttgtgccggtggctgtgcagccatcgcagattctggaacttccttgcttgctggccccacagccataattactgaaatcaatgaaaagattggtgctgctggtgtagtcagccaagagtgcaagactgttgtttctcaatatggacagcagatcctagatcttttgctagctgagacacaaccagcgaagatctgttctcaggttggtctgtgcacttttgatggcacccatggtgtcagcgctggaattcggagcgtagtggatgatgaagctgggaaatcaaatggtggtctcaagagtgatccaatgtgcaatgcttgtgagatggctgtggtatggatgcagaaccaacttgcccagaacaagacacaggagctcatcctgaactacattaatcagctttgcgagcgtcttccgagtccgatgggagaatcagccgtggactgtggcagtcttgcgtccatgcctgacattgcgttcaccattggaggcaagaagttcaagctgaaaccagagcagtacattctgaaggttggtgaaggacaggctgcccagtgcatcagcggattcacagctatggatatcccaccaccccgtggccctctctggatcttgggtgatgttttcatgggagtctaccacaccgtcttcgactatggcaagctgagggttggcttcgcagagtcggcctagggatatggtttggcagcaacccgtccagaggcaaacgcgtaatttgtgtgtttatgcgaccggcgatgtgtgtatatatgctactacatgtttagtgatgctttccgagacctgagacaacgcccgtctgttttaacgtggcgcaagaataattctggttctggatgtattctccgtacacaaaggcgtgtctgatgcaatggtgaccatcttgcggttgcgtgtttgaaatagccttttcgcattcgtgggcatttgcgggtgcgggttccgaaaagatttttttttgtatttgtgg

SEQ ID NO: 136346 - DNA, 2521 bp, Zea Mays
cctgggtacttgtacagatttccacccgggacacctatcctcacccaaacggtcggtcgacctcacacgtcccccggatccgacggccaacagagcgcgtggcccctctccgccgccacctctgtacaaaatgcccgccccaccaccacgccgaatccgccctctagtgactagttcacgtcagttgctgctccccccaccttctcctcctgctcctgccctcggtttctgatcagcgaacatgggaacccgcggcgtcgccctgctgctcctcgcggcggtgctgctcctccaggcgctcctcctcgcgtcgtcggagggcctggtgcgggtcgcgctgaagaagctgcccgtcgaccagaacggccgcgtcgccgcgcgcctctccgccgaggagaggcagcgcctcctcctccgcggcgccaacgccctgggctcaggcggcgacgacgactccgacgtcatcgcgctcaagaactacatgaacgcgcagtactttggggagatcggcgtcggctcgccgcagcagaagttcaccgtcatcttcgacaccggcagttccaacctctgggtgccgtcctccaagtgctacttctcgatcgcttgctacttccactcgcgctacaagtcagggcagtcaagcacttacaagaagaacggaaaacctgctgccatacgctatggaactggttccattgctggttttttcagtgaggatagcgttacattaggtgatctggttgtgaaggatcaggaatttattgaagctacaaaggagccagggcttaccttcatggttgcaaaatttgatggcattcttgggctaggctttcaagaaatctctgttgggaatgcaacaccagtgtggtataacatggtgaaacaaggtctcatcagcgaccctgttttctctttctggtttaaccgacatgctgatgaaggagaaggtggtgaaattgtgtttggtggaatggattctagccactacaagggtgatcacacgtttgtcccagtcactcggaagggatactggcagttcaacatgggtgatgtcctggttgatggaaagtccactgggttttgtgccggtggctgtgcagccatcgcagattctggaacttccttgcttgctggccccacagccataattactgaaatcaatgaaaagattggtgctgctggtgtagtcagccaagagtgcaagactgttgtttctcaatatggacagcagatcctagatcttttgctagctgagacacaaccagcgaagatctgttctcaggttggtctgtgcacttttgatggcacccatggtgtcagcgctggaattcggagcgtagtggatgatgaagctgggaaatcaaatggtggtctcaagagtgatccaatgtgcaatgcttgtgagatggctgtggtatggatgcagaaccaacttgcccagaacaagacacaggagctcatcctgaactacattaatcagctttgcgagcgtcttccgagtccgatgggagaatcagccgtggactgtggcagtcttgcgtccatgcctgacattgcgttcaccattggaggcaagaagttcaagctgaaaccagagcagtacattctgaaggttggtgaaggacaggctgcccagtgcatcagcggattcacagctatggatatcccaccaccccgtggccctctctggatcttgggtgatgttttcatgggagtctaccacaccgtcttcgactatggcaagctgagggttggcttcgcagagtcggcctagggatatggtttggcagcaacccgtccagaggcaaacgcgtaatttgtgtgtttatgcgaccggcgatgtgtgtatatatgctactacatgtttagtgatgctttccgagacctgagacaacgcccgtctgttttaacgtggcgcaagaataattctggttctggatgtattctccgtacacaaaggcgtgtctgatgcaatggtgaccatcttgcggttgcgtgtttgaaatagccttttcgcattcgtgggcatttgcgggtgcgggttccgaaaagatttttttttgtatttgtggggtatgcgggaggctttatcttggttttatcttttgtttagtttaagctacgtaggatttgtttagtttttaaactcaggcaaccttgtctcgtactccgcgtgctcccagcgtcagattttgggcatttagttgggctgggctagcctttgaagcagacaacgtatccgtagaccatgctgcgcgtggctctagagatgtcaacgagtggttgtagtacgggtgaataaatacctgtctatgtttatattaagttattctgtatttataaagatggtatcttatgtacatgtacatgtgtgtatatatagaatactatcttttcaaatcagatctaacggtgcacgatatcaggggttctattaaacgaaccaaccaaggatgtagggttttttaaatatatatatatatatatatatatatatattacatatggttttaaaggtcaa

SEQ ID NO: 136347 - DNA, 1921 bp, Zea Mays
atggagtcctcctgcctgggaaagcgcaggctgaacggcgccgagagggcgccgcccgcgttcctcccgctggggtacgagtacggcgacgcggacgcggtggaccacatgccccatcgcttggagacgggcgagatggacttcttcaagagagagaagagggagaggaaagctgacgccgccgccccggacgacctcggcatcaaggaagaagacatcaccatcaacatgggtctgcaccacgtcggcagatggaagaacaggagcgaagagtccgtcgacgagggcgtctcctccaacgacggggatacgagggagatgaaaactgagctggcactgacaaaatccgagcttggacgcctgaacgaagagaacaagcagctcaagaacattctcaccaggctgaccagcagcaactccaaccccctccagatgcagatgcaggccctcacaacgatgcaacagctaaggaacaatatcatccatcgaggtcttcgcggagctccaagccatgagctgaacgtcgatccggagaagaagaaggaccaggaggggagccgcggcggcggccacctgctcccgcagcagttcatcgggctcagcacccccgcgttgtcgttcgacgacccgctgcgcttcgtggcctcagacgtgcaaggcggcgagagctcagcgtccaccagcaacgtggagccgccgccgacgacgacgaccatggaaatgatgccgctgcccgcgttcgagcacggccaccaccagcacctcgcccatgagaggggtagcagtagcagcccggacgagccaccgtcacaccacctggcggtgaatcagggttggctctcgaacaaggtggccaagttccttcccgtcaagggccccgagcccgccaccatgcggaaggcccgcgtctccgtccgagcccgctccgagatcagtgatgggtgtcaatggaggaaatacgggcagaagatggccaagggcaatccgtgcccccgctcgtactaccgctgcaccatggccgccggctgcccggtccgcaagcaggtccagagatgcgcggaggacacgacggtggtggtcacgacgtacgaggggaaccacaaccacccgctgccgccggcggcgatgccgatggcttcgacgacgacgacggcgtcgtccatgctgctgtccgggtcgatgccgagcgcggagggcagcagcctgatggcggggtccaacttcctggcgcgcgccgtgctgccgtgctcctccagcgtcgccaccatctcggcgtcggcgccgttccccaccgtggcgctggacctcacgcagccgctgccgccgcaggcgcaggcgcggagcacgacggagccttcccagctccaggccgcgctcgccgacgccgcgggccgaccgacgccgcagctgttcgggcagaagctgtacgacccttcctcctccaaggcccccgccgcctcgcagggagcggacgcggcgggcgacaccgtcagcgcggcggccgtgatcgcgtccgaccccaacttccctgcagtgctcgcggcggcgatcaagtcgtacataagcgggaacggcagcggcggtgggaacagtggcacgaccgtgctgccgccgccgccggcggcgagcagcgccgacgatagcagcagagatgacaaggccggggagcaggggggctgaggtgatcgtccgtttgcttgattgctcggtttcaatttccttccgtctgcgtagttgagttcccacaagactccagtctcctcagtttcgaagtaggagacggaaattttgctcttttcattattttactctaacgattttgttttggctagaatttgtagttacagaatcacgcagttccggtcggtgtgcaaccagttttattgaattcttggtagttgtcgagaaaactgaaattgct

SEQ ID NO: 136348 - DNA, 1909 bp, Zea Mays
ctccacccgcagcccccgcaatccaccgcctttccatccgcggccgcaatccaccgcgccaaatccgccgccacacccctgcgcgctcgcccctgcgccaaatcctccttggacgcgccccgacggctggcgcaacccctgctcgtgccacggcttgcgtagaatggaaggtccatggcgcaactcctccttgattgagcggagaatggaaggtcaccgtacgacattggtcgagaggaggaggttgaggatggatgcccgtaatgccacgcccgcccctacgccaatggaaggtccgttgccaaatcccacggatggaaggtggcggatggaggtggcgcgcaccttccatccccgcggcgcgcaccttcatcctccgcgaccgcccgcggatctccaaaacagcatggcgcgtggatggggaggaggtgcgcggatggaaaggacgctctcctacccatctggtccgcgatcctcgctcaccttccatcgacgacgccgcatcgacctcggcaacctctggccacctacaagaacaaccgattcaaccactgctccctacatccgcgccctcaatagacgacagtgacctcctggtggcggtggtgctagattgctggggctgaagaggcgccctgttgtcacaacaagtcttagacgtggtctgcaggatgcaagttacccttcagaacaactcttaatttctggagaaaaggaaacacaggaccaggtttactttataaaacagatcgaatcattgggaaatgcttgtggaactattgctctactccatgctgttggaaatgcatcttccaaagtcaatttagtggagaattcatgcttggacttgttcttcaaatcaactgctaccatggatgaccctcatgagcgtgctgtgtgtctggagaaggatgatacaacggcaagggctcatttacttgctgccaattatggtgccactaagggtatgagcccagatgttgcgacagccccaaagagcaaaggatgcctgatgattggagaatataacaaggtcgccaaaaagtgaccttggcgttaccgaggacgacgctcgtcgtggacctgcaaagcggcatcgacgaccaccgacaccggggacgggaccacgggcacaccggtgacatgagctgggtggcatgaattcattgctccaaattgaaacatccccaacatttcctcttgtatccaaggtctcaactataatcttgggaatggatgtgtcccatggttctcttggacattgtgaggtaccatctattgttgttagcttctgtccgcacccaatcacctaaaatggaaatgattgactcattgtttaagccacgagaagctaaagatgatggtctgatcaggtaagatattttagcctgcattacatttgttaagttatgtactaatgacatgctttctcccattgcttgttggattttaatgttgctgcagggagtgtctgattgacttctacaccagttctgggaagagaaagcctgaccaagtcatcatcttcagaaattccttctgtctcaaatggagacaatgacgagtggtcagaagtacagattttaaaactatgacttacgttcatcatcttaagtctatgctcctctctgtgcttgacctctcaagtacagattttaaagcctcatctgcttcagtttattgttcttgttctcagattttgatatgagaatatagctcagagttcaagtactgatcataatgttgaagaactgttggcgtaatgaagctcatttttaagagcagtaattttggatcacgtgttctgacgaatctgttagctgattgttgatgcttttattctgtaacctatggccataactcaagaacttatgcatgaatttatccatcccaattatgatttccgagc

SEQ ID NO: 136349 - DNA, 1818 bp, Zea Mays
ctccacccgcagcccccgcaatccaccgcctttccatccgcggccgcaatccaccgcgccaaatccgccgccacacccctgcgcgctcgcccctgcgccaaatcctccttggacgcgccccgacggctggcgcaacccctgctcgtgccacggcttgcgtagaatggaaggtccatggcgcaactcctccttgattgagcggagaatggaaggtcaccgtacgacattggtcgagaggaggaggttgaggatggatgcccgtaatgccacgcccgcccctacgccaatggaaggtccgttgccaaatcccacggatggaaggtggcggatggaggtggcgcgcaccttccatccccgcggcgcgcaccttcatcctccgcgaccgcccgcggatctccaaaacagcatggcgcgtggatggggaggaggtgcgcggatggaaaggacgctctcctacccatctggtccgcgatcctcgctcaccttccatcgacgacgccgcatcgacctcggcaacctctggccacctacaagaacaaccgattcaaccactgctccctacatccgcgccctcaatagacgacagtgacctcctggtggcggtggtgctagattgctggggctgaagaggcgccctgttgtcacaacaagtcttagacgtggtctgcaggatgcaagttacccttcagaacaactcttaatttctggagaaaaggaaacacaggaccaggtttactttataaaacagatcgaatcattgggaaatgcttgtggaactattgctctactccatgctgttggaaatgcatcttccaaagtcaatttagtggagaattcatgcttggacttgttcttcaaatcaactgctaccatggatgaccctcatgagcgtgctgtgtgtctggagaaggatgatacaacggcaagggctcatttacttgctgccaattatggtgccactaagggtatgagcccagatgttgcgacagccccaaagagcaaaggatgcctgatgattggagaatataacaaggtcgccaaaaagtgaccttggcgttaccgaggacgacgctcgtcgtggacctgcaaagcggcatcgacgaccaccgacaccggggacgggaccacgggcacaccggtgacatgagctgggtggcatgaattcattgctccaaattgaaacatccccaacatttcctcttgtatccaaggtctcaactataatcttgggaatggatgtgtcccatggttctcttggacattgtgaggtaccatctattgttgttagcttctgtccgcacccaatcacctaaaatggaaatgattgactcattgtttaagccacgagaagctaaagatgatggtctgatcagggagtgtctgattgacttctacaccagttctgggaagagaaagcctgaccaagtcatcatcttcagaaattccttctgtctcaaatggagacaatgacgagtggtcagaagtacagattttaaaactatgacttacgttcatcatcttaagtctatgctcctctctgtgcttgacctctcaagtacagattttaaagcctcatctgcttcagtttattgttcttgttctcagattttgatatgagaatatagctcagagttcaagtactgatcataatgttgaagaactgttggcgtaatgaagctcatttttaagagcagtaattttggatcacgtgttctgacgaatctgttagctgattgttgatgcttttattctgtaacctatggccataactcaagaacttatgcatgaatttatccatcccaattatgatttccgagc

SEQ ID NO: 136350 - DNA, 796 bp, Zea Mays
ccgcaatccaccgcgccaaatccgccgccacacccctgcgcgctcgcccctgcgccaaatcctccttggacgcgccccgacggctggcgcaacccctgctcgtgccacggcttgcgtagaatggaaggtccatggcgcaactcctccttgattgagcggagaatggaaggtcaccgtacgacattggtcgagaggaggaggttgaggatggatgcccgtaatgccacgcccgcccctacgccaatggaaggtccgttgccaaatcccacggatggaaggtggcggatggaggtggcgcgcaccttccatccccgcggcgcgcaccttcatcctccgcgaccgcccgcggatctccaaaacagcatggcgcgtggatggggaggaggtgcgcggatggaaaggacgctctcctacccatctggtccgcgatcctcgctcaccttccatcgacgacgccgcatcgacctcggcaacctctggccacctacaagaacaaccgattcaaccactgctccctacatccgcgccctcaatagacgacagtgacctcctggtggcggtggtgctagattgctggggctgaagaggcgccctgttgtcacaacaagtcttagacgtggtctgcagattagatgatagtgacctcccttccttgcgactcatggtttgctggagctgtaggattctcccggcacaatggaggtgctatcgtctgatttggagcaacaaggaaatataaagtagtaaaacaatttctttacgaaagataaacttttcggggtcattgaaaattatg

SEQ ID NO: 136351 - DNA, 845 bp, Zea Mays
cgcgccccgacggctggcgcaacccctgctcgtgccacggcttgcgtagaatggaaggtccatggcgcaactcctccttgattgagcggagaatggaaggtcaccgtacgacattggtcgagaggaggaggttgaggatggatgcccgtaatgccacgcccgcccctacgccaatggaaggtccgttgccaaatcccacggatggaaggtggcggatggaggtggcgcgcaccttccatccccgcggcgcgcaccttcatcctccgcgaccgcccgcggatctccaaaacagcatggcgcgtggatggggaggaggtgcgcggatggaaaggacgctctcctacccatctggtccgcgatcctcgctcaccttccatcgacgacgccgcatcgacctcggcaacctctggccacctacaagaacaaccgattcaaccactgctccctacatccgcgccctcaatagacgacagtgacctcctggtggcggtggtgctagattgctggggctgaagaggcgccctgttgtcacaacaagtcttagacgtggtctgcaggatgcaagttacccttcagaacaactcttaatttctggagaaaaggtgaacaattacgttccttgtagatgcctcccccctcctcatgtatgatttgcagttgatttctccatcatccaaatctctgatggttttatatcaagttgcccatatccctttactgtgcatggtgtttcatgctgccttgtgtaacacaggaaacacaggaccaggtttactttataaaacagatcgaatcattgggaaatgcttgtggaactattgctctactccatgctgttggaaatg

SEQ ID NO: 136352 - DNA, 2195 bp, Zea Mays
cactgagtcctcccgagtcccgacaaaacgtccagagcagcaagcagccgagcacccaacgtcccaaccgccgccggaggcccggagcgcggagcaaaaccatctccaaaaccctagttattccctagcgccgccggagcccggagcttcgacccacctcatcgcgcctcctctctttctctctctccgccggcttccttgactgcgccgcacccgactctcatttttctccctcgacggtgctcgacccccaccggctcagcggagtcagcgctctatctgtccctctgccgcgccgagagtaatttctccttgggaccgcagaccgaggacggagcgaggagaagccaaaatttgagtttcgtctcttgccgacgccttcatttctttctgtgaaagctgctgtattttgagggaagctagagggtcttcgtcgacccagccaagctctgccttgtttggacggctcgggtacgcgtcggtgtcgcggcccccccggaatagtgaaccctaaacccctctccgttgctcatggcgccgccaccacaaccaaagcagctggtgctcgctgcgtcatccgcggacgcgggcgtggctgcctgggacctccgcaccggcgcggaggacatccgcctccgcccctgcgcctcccgccctcggtcgctcgcctcggttgccgaccgcttcctcgcctccgctcaggctcttcccgcgggcggcaactccgggaccatccacttctactactgggacaagccgcaagtggccgtcaagagctttcctgctgagccgatccgcgcactcatcgccgatcaggagggaagctacctcattggcggtggcagcaatggcaacattttcctttgggaggtgtctagtggagagcttctccatacatggcatgcacactatcgtgctgttaggtgcctcgggctgtatgactatttgcttgtctcagggtcagaggatgggactatcaaagtttgggatctcatcacggtgcttgatgagcaatcaaggctggaggtccagacaccatatttgtatagtttcagtcagcatgcactgcctgtaactgatattgcttgttttcttggagcaatcgctatatcttcttctgaggatcgaacctgcaaaatttggagtttatctgagggtaggatgctgagaagcatttcatttcctactagcattgattctatagcactagacccaagaagtcatattttctatgctggtggtagagatggaaaaatatatgttactgctatgggtgttgatctcagttttcatggtagggatgagtcatctattctgggtgcattggatgaccacagcaaggcagtaacaagcttagcatcaagcagagatggacttctacttgtctctggatctgaggatggtaatgttcgggtgtgggataccagatgtcagcaagttacccgaaaattcaaacactcccaaggtccagtaaccaatgttcttattgtaacgccacaacgagtaaatctgccaccgctacaaccattacgcaaagttcggtctgcaaatggggaggctgaacggcaggcagtacttcttcatcggcctgaaaatgatgtcccaattcctggaaataagaccttcatttttatggagcgctacttggatgagcttcagaagcatggtggttcatccaggttatttgattttgggccgaatgctcagaatggcactccaaaccaacagggaacagaatggagagatagatacttggagttgcaggatctctttgtacatgaggtcctccatcagatgccatcctcgaggaacccatgatgcacatgctttggatatcgtaggatcatttgtggtgtcgaaacagtgatggttgccattcgggctacaaacgatgtagatgagttctttggagtaattcaactgatggtgctttcggctgcgaggaacttatcagattctgaactaaaaccactagaatcggtgccagcagtcacttggaactggttctcgtttgtgtactagtctagagaaacgctaaaaatcaggtttctcttgattctagttctaattttaaggatacagtgagcttgctacataaagttattttgatttcatagagaaaatgttttgttctcaggggaatctgaattttgaaagttttctactagaatctaagatttgatacgttcagggtt

SEQ ID NO: 136353 - DNA, 2191 bp, Zea Mays
cactgagtcctcccgagtcccgacaaaacgtccagagcagcaagcagccgagcacccaacgtcccaaccgccgccggaggcccggagcgcggagcaaaaccatctccaaaaccctagttattccctagcgccgccggagcccggagcttcgacccacctcatcgcgcctcctctctttctctctctccgccggcttccttgactgcgccgcacccgactctcatttttctccctcgacggtgctcgacccccaccggctcagcggagtcagcgctctatctgtccctctgccgcgccgagagtaatttctccttgggaccgcagaccgaggacggagcgaggagaagccaaaatttgagtttcgtctcttgccgacgccttcatttctttctgtgaaagctgctgtattttgagggaagctagagggtcttcgtcgacccagccaagctctgccttgtttggacggctcgggtacgcgtcggtgtcgcggcccccccggaatagtgaaccctaaacccctctccgttgctcatggcgccgccaccacaaccaaagcagctggtgctcgctgcgtcatccgcggacgcgggcgtggctgcctgggacctccgcaccggcgcggaggacatccgcctccgcccctgcgcctcccgccctcggtcgctcgcctcggttgccgaccgcttcctcgcctccgctcaggctcttcccgcgggcggcaactccgggaccatccacttctactactgggacaagccgcaagtggccgtcaagagctttcctgctgagccgatccgcgcactcatcgccgatcaggagggaagctacctcattggcggtggcagcaatggcaacattttcctttgggaggtgtctagtggagagcttctccatacatggcatgcacactatcgtgctgttaggtgcctcgggctgtatgactatttgcttgtctcagggtcagaggatgggactatcaaagtttgggatctcatcacggtgcttgatgagcaatcaaggctggaggtccagacaccatatttgtatagtttcagtcagcatgcactgcctgtaactgatattgcttgttttcttggagcaatcgctatatcttcttctgaggatcgaacctgcaaaatttggagtttatctgagggtaggatgctgagaagcatttcatttcctactagcattgattctatagcactagacccaagaagtcatattttctatgctggtggtagagatggaaaaatatatgttactgctatgggtgttgatctcagttttcatggtagggatgagtcatctattctgggtgcattggatgaccacagcaaggcagtaacaagcttagcatcaagcagagatggacttctacttgtctctggatctgaggatggtaatgttcgggtgtgggataccagatgtcagcaagttacccgaaaattcaaacactcccaaggtccagtaaccaatgttcttattgtaacgccacaacgagtaaatctgccaccgctacaaccattacgcaaagttcggtctgcaaatggggaggctgaacggcaggcagtacttcttcatcggcctgaaaatgatgtcccaattcctggaaataagaccttcatttttatggagcgctacttggatgagcttcagaagcatggtggttcatccaggttatttgattttgggccgaatgctcagaatggcactccaaaccaacagggaacagaatggagagatagatacttggagttgcaggatctctttgtacatgaggtcctccatcagatgccatcctcgaggaacccatgatgcacatgctttggatatcgatcatttgtggtgtcgaaacagtgatggttgccattcgggctacaaacgatgtagatgagttctttggagtaattcaactgatggtgctttcggctgcgaggaacttatcagattctgaactaaaaccactagaatcggtgccagcagtcacttggaactggttctcgtttgtgtactagtctagagaaacgctaaaaatcaggtttctcttgattctagttctaattttaaggatacagtgagcttgctacataaagttattttgatttcatagagaaaatgttttgttctcaggggaatctgaattttgaaagttttctactagaatctaagatttgatacgttcagggtt

SEQ ID NO: 136354 - DNA, 3339 bp, Zea Mays
cacccaacagctcaacagccaccggagagcacggagcaaaagcatctccaaaaaccctagctcccatcccctcgctgggaagtctcgtcgtcgtcggcggcggagatgggcaaggcgaaggggaagcagcgtcaggacaagttctaccacctcgccaaggagcaagggtaccggagtcgcgcggcgttcaagctgctccagctcgacgcgcggttccacttcctcccgacggcgcgctcggtgcttgacctctgcgccgcgccgggagggtgggtccaggtggccgtcaaccatgctcccgtgggtgccttcgttgtcggcgtcgacctcgttcctatacgccccatccgcggggcccactcgctcaccgaggacatcaccgccaccaagtgccgcgccgcggtgcggaggctcatggactccaacggcgtctccgcttttgacgtcgtgctccacgacgggtcgcccaacgtcggtggtgcctgggcgcaggaggctacgtcgcaatcggcgctcgtcatagacgcactgcgcctcgctaccatgttcctcgctcccaagggcgccttcatcacgaaggtttttaggtctcaagattacaacgctattatgtactgtcttaaacagttgtttgagaaggtcgaggcgactaaacctacggcaagtcggtctacatctgctgaaatttatatcatttgcctgaaatacaaggctcctgcaaagattcaaccagaacttctcgatataaagcacttattcagtgtggttccagaacagaccaaatctagggatgttttggatggtaggaaaaaaagacaccgtgatgggtatgaagaagggaatacaacattacggaaagttggtttggcatcagactttatatggtctgacacccaggcgccactagagtttttgggctcttacaatgcaatttcattcgataatccagaatccctgcccataaagaatcatgagcttacaacagatgatataaaaaatttctgtgaggacttgcttctgttggataaacatagtttcaagcatattttaaaatggcgaattcgtttacgaaaatcactgtcagcatcatcacaagtcaccccaaaggtcaatgatgctgtggagagcacaaaggtcatggatgatgatgtacttctacaggaaatggaagaattgactagtgtcattgatagaaagaaaaaaagagaaaaaaagcgactatcaaagcgtcgagcaaaggataaagcacgcaaagccacaggaatgcaggttgatgctacaggagatgattatggcgatcctgacctgttttctattagtgttattaagggtggaaaagaacttgaagctgttgaatcagcagagattgatgtggaagatgaaattggagacggtgataatgaggatactcaagctcttgaagactctgatgaggaaatggattctgatgacgaacagcagaggtatgatgcccagcttgaagagatgcttgatgaagcttatgagcgctttgtaactaaaaagggtggtgaaataaagcaagaacgcaagcgtgcaaaacgaataaatcctgatgctgatgcagaactgttagagggaggtgaagatgatggtgatgttgaaatggatcaagattttgatgaagatcaagatcaagaggccaacccccttctgtttgctctagatgagcagaagccaactaaagagcagattgtaaagcaatggtatagtcaggatgtgttcacggaagcagcgaccggtgttactgagcggagcgacactgaagatgaaagggagattttgcagaggaataagaagatggatactggcaaaagggaaaaggtggctaaagcacaggatttgcaacatgatggttttgagattgtaccagcagaacctgtccaaaacgaagaggattcatcttcatcttctgatgaatcagaggatgatatcgatgattacagaaaggctgaagtactagcctatgctaagaagatgctgaggaagaaacagagagagcagatacttgatgatgcttacaacaagcatatgtttgatgacgaagggttacccaactggtttgttgaggatgaaaagaggcataggcagcccatgaagcctgtttcacgtgaggaagtagctgcaatgagggctcagtttaaggagattgatgcccgcccatccaagaaggtcgcagaggccaaggctcggaagaagcgtgtcgccatgaagaaacttgacaaggcacgccaaaaggcagatgctatagcggaccagaatgacataaacgagctatcaaagaggaagatgattgaccggatttacaggaaggcgatgccgaagaagcctcagaaggagtatgttgttgcaaagaagggtgttcaggtgagggctggcaaagggaaggtgttggtggatccacggatgaagaaggacaagcgggccagtgggactgggaagaagggtggcaaaggcgcaaaggggaagggtggccagaaaggcatgagagggaaagctgggaagaaggcagggaaagccccacggtaaggaagccgaggagctaagcatggctggaatgctggatgcccgcctccctgcggaatttttgcctcaggctacagctactcagtaggcagatgttttgaaatcgtgtgatggtagaagtttgtgtcgaaaagttttgtagcgtgagtagtggctataatgtttcaaaactagtggtcactttagtgtcactaagcataatttacacacttcacaatcaattatcaaaacttttaccccccttggggactctagagcacatacatctcttactaatatttgtgtgatgaagtgaggaaatgaagagttctcctttgtgtgtccaggtgacagtggctttggttgctttggaccaaattggcgactttggctctggaatcggcttgcatttccttatcagatgaaaagaatgcagcactttgaatctcaagcaatgagatgcagagaccgcctggatgcgcaccgctcaacttgttgatcagagtagaatctgatccaagctcttttgcgttcaagatttggaatcaggctgatgcataggcggccactgactccgagctacttggtgatagcatcaagcagctggccagataccaacttgatgatggctcagctctaagagaatataataagcagtgaggcgatggctcacagtcactgcaaaagccgttactgttgtagtgcttaaacaattgtttcaagtggcttgaagaacgtcagtagaatcgcaggaaccaatcgagacatctctgtacacggaaaggtacagaataatatattcttttaaaacccacc

SEQ ID NO: 136355 - DNA, 3020 bp, Zea Mays
aacagctcaacagccaccggagagcacggagcaaaagcatctccaaaaaccctagctcccatcccctcgctgggaagtctcgtcgtcgtcggcggcggagatgggcaaggcgaaggggaagcagcgtcaggacaagttctaccacctcgccaaggagcaagggtaccggagtcgcgcggcgttcaagctgctccagctcgacgcgcggttccacttcctcccgacggcgcgctcggtgcttgacctctgcgccgcgccgggagggtgggtccaggtggccgtcaaccatgctcccgtgggtgccttcgttgtcggcgtcgacctcgttcctatacgccccatccgcggggcccactcgctcaccgaggacatcaccgccaccaagtgccgcgccgcggtgcggaggctcatggactccaacggcgtctccgcttttgacgtcgtgctccacgacgggtcgcccaacgtcggtggtgcctgggcgcaggaggctacgtcgcaatcggcgctcgtcatagacgcactgcgcctcgctaccatgttcctcgctcccaagggcgccttcatcacgaaggtttttaggtctcaagattacaacgctattatgtactgtcttaaacagttgtttgagaaggtcgaggcgactaaacctacggcaagtcggtctacatctgctgaaatttatatcatttgcctgaaatacaaggctcctgcaaagattcaaccagaacttctcgatataaagcacttattcagtgtggttccagaacagaccaaatctagggatgttttggatggtaggaaaaaaagacaccgtgatgggtatgaagaagggaatacaacattacggaaagttggtttggcatcagactttatatggtctgacacccaggcgccactagagtttttgggctcttacaatgcaatttcattcgataatccagaatccctgcccataaagaatcatgagcttacaacagatgatgtaaggaactgatcagtgtttcaaaggcatcgcctaggcgtccaggccagctcgccttgggaagcagtggtgccttgtcgcctaggcgtccaggtggacccaatacttgcctggatgcctagtcgtcttttaaacactggaactgatgcctttactaagcatactgcacagcttatctttccatctattctagtataggtacttacgactgattatttggtttgtgccagataaaaaatttctgtgaggacttgcttctgttggataaacatagtttcaagcatattttaaaatggcgaattcgtttacgaaaatcactgtcagcatcatcacaagtcaccccaaaggtcaatgatgctgtggagagcacaaaggtcatggatgatgatgtacttctacaggaaatggaagaattgactagtgtcattgatagaaagaaaaaaagagaaaaaaagcgactatcaaagcgtcgagcaaaggataaagcacgcaaagccacaggaatgcaggttgatgctacaggagatgattatggcgatcctgacctgttttctattagtgttattaagggtggaaaagaacttgaagctgttgaatcagcagagattgatgtggaagatgaaattggagacggtgataatgaggatactcaagctcttgaagactctgatgaggaaatggattctgatgacgaacagcagaggtatgatgcccagcttgaagagatgcttgatgaagcttatgagcgctttgtaactaaaaagggtggtgaaataaagcaagaacgcaagcgtgcaaaacgaataaatcctgatgctgatgcagaactgttagagggaggtgaagatgatggtgatgttgaaatggatcaagattttgatgaagatcaagatcaagaggccaacccccttctgtttgctctagatgagcagaagccaactaaagagcagattgtaaagcaatggtatagtcaggatgtgttcacggaagcagcgaccggtgttactgagcggagcgacactgaagatgaaagggagattttgcagaggaataagaagatggatactggcaaaagggaaaaggtggctaaagcacaggatttgcaacatgatggttttgagattgtaccagcagaacctgtccaaaacgaagaggattcatcttcatcttctgatgaatcagaggatgatatcgatgattacagaaaggctgaagtactagcctatgctaagaagatgctgaggaagaaacagagagagcagatacttgatgatgcttacaacaagcatatgtttgatgacgaagggttacccaactggtttgttgaggatgaaaagaggcataggcagcccatgaagcctgtttcacgtgaggaagtagctgcaatgagggctcagtttaaggagattgatgcccgcccatccaagaaggtcgcagaggccaaggctcggaagaagcgtgtcgccatgaagaaacttgacaaggcacgccaaaaggcagatgctatagcggaccagaatgacataaacgagctatcaaagaggaagatgattgaccggatttacaggaaggcgatgccgaagaagcctcagaaggagtatgttgttgcaaagaagggtgttcaggtgagggctggcaaagggaaggtgttggtggatccacggatgaagaaggacaagcgggccagtgggactgggaagaagggtggcaaaggcgcaaaggggaagggtggccagaaaggcatgagagggaaagctgggaagaaggcagggaaagccccacggtaaggaagccgaggagctaagcatggctggaatgctggatgcccgcctccctgcggaatttttgcctcaggctacagctactcagtaggcagatgttttgaaatcgtgtgatggtagaagtttgtgtcgaaaagttttgtagcgtgagtagtggctataatgtttcaaaactagtggtcactttagtgtcactaagcataatttacacacttcacaatcaattatcaaaacttttaccccccttggggact

SEQ ID NO: 136356 - DNA, 270 bp, Zea Mays
atggtaaacaatgggctatcagatagagacaagaatctagggactatgagccatggaagcattcaatcagaggtttggtttgcgcacctttgcagttctgacttttcaagaagcgcgtccttcagggcatcttgcaggcacagccacagcctattggttgatacgcacatcttccgagctctgtgctcagacatcgacctgcatgccagtctcgtatttcagacactagagacaatggtcctccatgctacaacactatcatcttgctag

SEQ ID NO: 136357 - DNA, 790 bp, Zea Mays
gatcacagtctccatgtcccttggctctgaaaccagccaaccttattctcctcagccacctttaacctacaatcgtgattccatgcaacttacagctcacacacaaagcaggcaaccccagggcttataaatagcagaccttgtgacaagagataccaaaccataagagcttctgagtctagacactagatacagtaagccttagcaccaacagaggttagtatctcaacaaggatacttcaaatatgtccgcctcacgcagctcctctcccaactccatctcacagtggagccagaaagagaacaagatgtttgaagaggcactcgcatactacggcgagggcacatccaaccggtgggacaaggtgtccagagccatgggaggcatcaagtctgctgaggaggtgcgctgccactatgaagatcttgactatgacgtcaagatgattgaatcaggccacgtgccgtaccccaagtacaagacacatggattctggacctgaggttgaaatgttggagggctcaaggaggcagaaaacaaagctctatgaatctaagatggacctaggttctagaaggaagcaaagaaatccagccatggttggaaaataaaatgatgaaacagtgtgcatatgtatagtataggttatgagcaagtttatgtttacctgtggttgtaggatctagtgtaccttcacaaactgcatgatttcattattcccttgaactaagttatggaggatgtaaactcatgtatttatgaaaactaaaaaaatattgccttgtagca

SEQ ID NO: 136358 - DNA, 1731 bp, Zea Mays
atttcaacgggacgacagttcgtctccgcccgcatcgattgttgtccgctgttctccttcctcctcgtcctccttcaggccagcgggcaagaagaagaagaagaaaaatcaaggcttgcggcgagaggctgtgcccggccgaccggcgagcgagcttcgtacgcgcgtcatgggtggcggcagcaacagaggcggcgccggcgccggcgaggagagcggcagcgaccacgacggtgtgctgcggaggccgctgctcaacacggggagctggtaccggatgagctcgcggcagtccagctttgccccggggacctcctccatggccgtcctgcgcgagtcccacgtctccgccttcctctgcacgctcatcgtcgcgctcggccccatccagttcggcttcaccagcggcttctcctccccgacccaggacgccatggttcgggacctcaacctctctatctccgagttctcggcgttcggatcgctgtccaacgtcggcggcatggtcggggcgatcgccagcgggcagatggccgagtacattggccgtaaagggtcgttgatgattgctgcaatcccaaatatcatcggttggcttgcgatctcctttgcaaaagtattcaacaagatgcctcatttctatatatgggacgattgcttgaagggtttggtgtcggcatcatatcctacacggtaccggtatacatagcagagatatctcctcagaacatgaggggagctcttggttctgtgaaccagttgtctgtgacctttggcatattcttggcctatttgctcggcatgtttattccttggagacttcttgctgtgattggagccttgccctgcacaatgttgattcctggactattcttcattccagaatctcccagatggctggcaaagatgaatttgacggaagattgtgagacgtccctacaagtgctgagggggtttgagactgacatcacaacagaagtgaatgatataaagagggcagtggcatcatcaagtaagaggaccacaatcagttttcaagaattaaaccaaaagaaataccgcacgccactacttctagggattggcctacttgtactgcaaaatcttagtggaatcaacggtgtactgttttatgcaagtagcatcttcaaagctgcaggggttacaaacagcgacttggccacctgttcacttggtgctattcaggtccttgctactggagttacaacatggctgttagaccgagctggacgacgcatccttctcattatttctacctctggcatgactctatgccttcttgccgtttctgttgtattttttctcaaggataacatttcacaggattctaactcatactacatcttaacaatgatctcccttgttggtattgtgtcttttgtcattaccttctcgtttggtatgggtgccattccatggctcatgatgtctgagatcctcccggttagcatcaagagccttggcggaagcatcgcaacactggccaactggctgacatccttcgccataacaatgacgacgaacttgatgctcacgtggagtgttggaggcacttttctctcgtacatggttgtgagcgccttcaccatcgtttttgttgtcctttgggtgccggagacgaaggggagaactctagaggagatacaattttcgtttcgctgagcattcagcgtcagctgcaatggttgcccgagtgtttatcttagggcc

SEQ ID NO: 136359 - DNA, 2246 bp, Zea Mays
atttcaacgggacgacagttcgtctccgcccgcatcgattgttgtccgctgttctccttcctcctcgtcctccttcaggccagcgggcaagaagaagaagaagaaaaatcaaggcttgcggcgagaggctgtgcccggccgaccggcgagcgagcttcgtacgcgcgtcatgggtggcggcagcaacagaggcggcgccggcgccggcgaggagagcggcagcgaccacgacggtgtgctgcggaggccgctgctcaacacggggagctggtaccggatgagctcgcggcagtccagctttgccccggggacctcctccatggccgtcctgcgcgagtcccacgtctccgccttcctctgcacgctcatcgtcgcgctcggccccatccagttcggcttcaccagcggcttctcctccccgacccaggacgccatggttcgggacctcaacctctctatctccgagttctcggcgttcggatcgctgtccaacgtcggcggcatggtcggggcgatcgccagcgggcagatggccgagtacattggccgtaaagggtcgttgatgattgctgcaatcccaaatatcatcggttggcttgcgatctcctttgcaaaagatgcctcatttctatatatgggacgattgcttgaagggtttggtgtcggcatcatatcctacacggtaccggtatacatagcagagatatctcctcagaacatgaggggagctcttggttctgtgaaccagttgtctgtgacctttggcatattcttggcctatttgctcggcatgtttattccttggagacttcttgctgtgattggagccttgccctgcacaatgttgattcctggactattcttcattccagaatctcccagatggctggcaaagatgaatttgacggaagattgtgagacgtccctacaagtgctgagggggtttgagactgacatcacaacagaagtgaatgatataaagagggcagtggcatcatcaagtaagaggaccacaatcagttttcaagaattaaaccaaaagaaataccgcacgccactacttctagggattggcctacttgtactgcaaaatcttagtggaatcaacggtgtactgttttatgcaagtagcatcttcaaagctgcaggggttacaaacagcgacttggccacctgttcacttggtgctattcaggtccttgctactggagttacaacatggctgttagaccgagctggacgacgcatccttctcattatttctacctctggcatgactctatgccttcttgccgtttctgttgtattttttctcaaggataacatttcacaggattctaactcatactacatcttaacaatgatctcccttgttggtattgtgtcttttgtcattaccttctcgtttggtatgggtgccattccatggctcatgatgtctgagatcctcccggttagcatcaagagccttggcggaagcatcgcaacactggccaactggctgacatccttcgccataacaatgacgacgaacttgatgctcacgtggagtgttggaggcacttttctctcgtacatggttgtgagcgccttcaccatcgtttttgttgtcctttgggtgccggagacgaaggggagaactctagaggagatacaattttcgtttcgctgagcattcagcgtcagctgcaatggttgcccgagtgtttatcttagggcctgtttcgatcccatgagctaaagcaaaaagaagctaaaatttagtcactttataaactaaagttccaatcaggaggagctaaaagtgaataaaatagcaaaagaatatcttttagtcacttttagcttctaaagaggagctagaatttagtcccttgttttagcttatactccttccatcctaaaaaaatataggtctttctaacttttcttttttctgttcatattcattcgaataatgataaatatagacatacgtataaactattcattaataaatgtatcaaataaattataggcctgtttggtttgctgtctaatttatcatattttaccacacttttgtgactaatattatggcccgtttggcacagctccagctcctgattctaagcgaggatctggaggagccgtgccaaacggatattttttaaactgattctcgtgtggagccgaaagatcgggagtcgtttttgtgaagaaaggtgggatctaaaaaaacctgctccaccctccattaaaacagc

SEQ ID NO: 136360 - DNA, 812 bp, Zea Mays
ctccagtcctccctcccggctccctcccagtacccacggtcccaccccacccggagaaaacgaaacaaaccaaatctcgctgcgagctgggcggcgagggcgcgcggcgccatggcgaggagcaggacgtcgggcggcggcgagtacgagagcggcagcgaccacgacggcgcgctgcagaagccgctgctgcccaacagcgggagctggtaccggatggggatggggtcgcgccagtccagcctcaacgccgccggcacctcctccatggccgtcctgcgcgagtcccacgtctccgccttcctctgcacgctcatcgtcgcgctcggccccatccagttcggcttcaccggcggctactcctccccgacgcaggccagcatcatccgggacctcaacctctccatctccgagttctcggtgttcggctcgctgtccaacgtgggcgccatggtcggggcgatcgccagcggccagatggccgagtacgttggccgcaaagggtcgttgatgattgcagcaattccaaacgtcattggttggcttgcgatctcctttgcaaaagactcttcatttctgtatatgggacgcttgcttgaaggattcggtgtcggtatcatttcctatgtggtaccggtatacatagcagagatatctccacaaaacatgagaggggctcttggctctgtgaaccaggtttgcctatacttgcaagcatctcatctatttgtgaggttgaggtaaacacttggcttgtttatgcggatctcattgtacatttgaaaatttgttaattctgcagttatctgtaa

SEQ ID NO: 136361 - DNA, 1905 bp, Zea Mays
ctccagtcctccctcccggctccctcccagtacccacggtcccaccccacccggagaaaacgaaacaaaccaaatctcgctgcgagctgggcggcgagggcgcgcggcgccatggcgaggagcaggacgtcgggcggcggcgagtacgagagcggcagcgaccacgacggcgcgctgcagaagccgctgctgcccaacagcgggagctggtaccggatggggatggggtcgcgccagtccagcctcaacgccgccggcacctcctccatggccgtcctgcgcgagtcccacgtctccgccttcctctgcacgctcatcgtcgcgctcggccccatccagttcggcttcaccggcggctactcctccccgacgcaggccagcatcatccgggacctcaacctctccatctccgagttctcggtgttcggctcgctgtccaacgtgggcgccatggtcggggcgatcgccagcggccagatggccgagtacgttggccgcaaagggtcgttgatgattgcagcaattccaaacgtcattggttggcttgcgatctcctttgcaaaagactcttcatttctgtatatgggacgcttgcttgaaggattcggtgtcggtatcatttcctatgtggtaccggtatacatagcagagatatctccacaaaacatgagaggggctcttggctctgtgaaccagttatctgtaacccttggtatcatgtttgcctatttgctcggcttgtttgttccttggaggcttcttgcagtaataggaaccttgccctgcatagtgttgatacctggccttttcttcattccggaatctccaagatggctggcaaagatgaatatgatggatgattgcgagacttctctacaagttctgagaggattcgatgctgacatcactgcagaattgaatgatataaagagagcagtaatgtcagcaaacaaaagggctacaattcgtttccaagagttgaaccaaaagaaataccgaacgcccctaattataggaattggtctacttgtgctgcaacagctaagtggaataaatggtatactattttatgcaagtagcatcttcaaagctgccggtctgaaggacagtgacttggacacctttgcacttggagctattcaggttcttgccacttttgttacaaccatgttcttggacagagctgggcggcgaatcctccttattatttcttctgctgggatgactctaagtcttcttgtagttgctattgtattttacatcaaggataatatttcacatgactctgacttgtatgacatcttaagtatggtgtccttggttggtgtcgtggcttatgtcattgccttctccttcggtatgggtgccattccttggatcataatgtctgagatcctcccagttagcatcaagagtcttgcaggaagcttcgcgacccttgccaactggttgacatcctttggaataacaatgacggcaaatttgctgatcagctggagtgctggaggtacgtttacctcctacatgattgtgagtgccttcactctcgtgttcgtaatcgtttgggtgccagagacaaagggaagaaccctcgaagagatacaatggtcgttccgctgagcaccaacatcgtcaaaatgcgaaatggttcttcgagttttgtcgctttagatagtaagaatatgctcaaatcactcgacgaaggccacacattctttctgttcataaaaggtcttgtacatgagattgcatacaccgttgttataactttacccccaatagacttgtaaatgcttgtgcagtaactcttatattacttttgcttcaacattgtaagatagaagacttgccaaaataaaatctgaaccttgggtccaatattccatgtaaacacgagcatgtttc

SEQ ID NO: 136362 - DNA, 1928 bp, Zea Mays
ctccagtcctccctcccggctccctcccagtacccacggtcccaccccacccggagaaaacgaaacaaaccaaatctcgctgcgagctgggcggcgagggcgcgcggcgccatggcgaggagcaggacgtcgggcggcggcgagtacgagagcggcagcgaccacgacggcgcgctgcagaagccgctgctgcccaacagcgggagctggtaccggatggggatggggtcgcgccagtccagcctcaacgccgccggcacctcctccatggccgtcctgcgcgagtcccacgtctccgccttcctctgcacgctcatcgtcgcgctcggccccatccagttcggcttcaccggcggctactcctccccgacgcaggccagcatcatccgggacctcaacctctccatctccgagttctcggtgttcggctcgctgtccaacgtgggcgccatggtcggggcgatcgccagcggccagatggccgagtacgttggccgcaaagggtcgttgatgattgcagcaattccaaacgtcattggttggcttgcgatctcctttgcaaaagactcttcatttctgtatatgggacgcttgcttgaaggattcggtgtcggtatcatttcctatgtggtaccggtatacatagcagagatatctccacaaaacatgagaggggctcttggctctgtgaaccagttatctgtaacccttggtatcatgtttgcctatttgctcggcttgtttgttccttggaggcttcttgcagtaataggaaccttgccctgcatagtgttgatacctggccttttcttcattccggaatctccaagatggctggcaaagatgaatatgatggatgattgcgagacttctctacaagttctgagaggattcgatgctgacatcactgcagaattgaatgatataaagagagcagtaatgtcagcaaacaaaagggctacaattcgtttccaagagttgaaccaaaagaaataccgaacgcccctaattataggaattggtctacttgtgctgcaacagctaagtggaataaatggtatactattttatgcaagtagcatcttcaaagctgccggtctgaaggacagtgacttggacacctttgcacttggagctattcaggttcttgccacttttgttacaaccatgttcttggacagagctgggcggcgaatcctccttattatttcttctgctgggatgactctaagtcttcttgtagttgctattgtattttacatcaaggataatatttcacatgactctgacttgtatgacatcttaagtatggtgtccttggttggtgtcgtggcttatgtcattgccttctccttcggtatgggtgccattccttggatcataatgtctgagatcctcccagttagcatcaagagtcttgcaggaagcttcgcgacccttgccaactggttgacatcctttggaataacaatgacggcaaatttgctgatcagctggagtgctggaggtacgtttacctcctacatgattgtgagtgccttcactctcgtgttcgtaatcgtttgggtgccagagacaaagggaagaaccctcgaagagatacaatggtcgttccgctgagcaccaacatcgtcaaaatgcgaaatggttcttcgagttttgtcgctttagatactcaaatcactcgacgaaggccacacattctttctgttcataaaaggtcttgtacatgagattgcatacaccgttgttataactttacccccaatagacttgtaaatgcttgtgcagtaactcttatattacttttgcttcaacattgtaagatagaagacttgccaaaataaaatctgaaccttgggtccaatattccatgtaaacacgagcatgtttcttgatcaatcaaaatctcaagcatttttgttgaa

SEQ ID NO: 136363 - DNA, 1896 bp, Zea Mays
ctcccactcccactcggccagccccacccaccgccggccccccacgcaacggggagcacaggagcagatcgatccagcctcgcggccgcgccacgcgaccgaccgagctgcttgcctgcctgcgtgcctgcgtggtgatcacgtcgcgcctggcggtggtgtgggtccggcgggcaacaaaggcgccagcatggcgagcaacaacggcggcgcgatgcaggagccgctgctgccgaaggcgcccaagagcggggggtggctctggaaggggacgcgcccgtccgcgtccggcgacctcccgtcgtccaaggccgtgctgcggccgccccgccacgtgcccgcgctgctctgcacgctcatcgtcgcgctcggccccgtccagttcggcttcaccagcgggtactcgtccccgacgcaggacgccgtcatccgggacctcaacctctccatctcagagttctcggcgttcggctcgctgtccaacgtgggcgctatggtcggggcgatcgccagcgggcagatggccaagtacgttgggcgcagagggtcgctgatgattgccgcggtcccgaacatcatgggctggcttgcaatctctttcgcaaaggacactacgtttctgtacgtggggagattactggaaggatttggtgttggcgtcatttcctatgtggtgccagtatacattgcagagatatctcctcataacatgagaggagcccttggcgctgtgaacccgttgtctgcaacctttggtgtcctgctttcctatgtgcttggcttgtttttcccttggaggcttcttgcattaataggaaccctgccctgcttactgttggtggctggtctattcttcattccggaatctccaagatggctggcgaggatgaatatgatggatgattgcgagacttctctacaagttctgaggggatttgatgctgacatcactgaagaagtgaatgatataaagatagctgtagcatcagcaaacaaaagtggtacaataagctttcgagagttgaaccaaaagaaataccgcacgcctctaattgtagcatcttcaaagctgcaggttcttgccactggtgtcacaaccacgatcttggacagagctggccggagaatcctcctcattatttcttcttctgggatgaccctaagccttctggcagttgctgttgtattttgcatcaaggataacattgcacaagactctgacttgtacaacatcttaagaatagtgtccttggttggtgtcgtggcttatgtcactgccttctccttcggtatgggttccattccatggatcataatgtctgagatccttccggttagcatcaagtgtgtggcaggaagcttcgcgacccttgccaactggttgacgtcctttggaataacaatgacagcaaatttgcttctgaactggagcgctgcaggtacatttgcctcctacatgatggtgagtgctttcactctcgtcttcgtcatcctttgggtaccagagacgaagggaagaacccttgaagagatacagtggtccttccagtgagctccggcattcatatgtacatgcaaatagcgtggcaaatcctccaggatcccaataaaagatatagtgaaatatagcagaagctatttcatttagcattttttatagtttaaatggaatttcgctgccgattctgcatgagaacatgtaaataaggagatttcacgaacatgaacactcaaatacatgtacaggcctgtaaaagaagatgtctctagatccattactttaatattcgtggaatcatagccagaagtataagctagtgaggggaattgtagatcaacgggaagatggtgatattctgatacaatgatttttatgctgagttttggtggtttgtc

SEQ ID NO: 136364 - DNA, 2114 bp, Zea Mays
ctcccactcccactcggccagccccacccaccgccggccccccacgcaacggggagcacaggagcagatcgatccagcctcgcggccgcgccacgcgaccgaccgagctgcttgcctgcctgcgtgcctgcgtggtgatcacgtcgcgcctggcggtggtgtgggtccggcgggcaacaaaggcgccagcatggcgagcaacaacggcggcgcgatgcaggagccgctgctgccgaaggcgcccaagagcggggggtggctctggaaggggacgcgcccgtccgcgtccggcgacctcccgtcgtccaaggccgtgctgcggccgccccgccacgtgcccgcgctgctctgcacgctcatcgtcgcgctcggccccgtccagttcggcttcaccagcgggtactcgtccccgacgcaggacgccgtcatccgggacctcaacctctccatctcagagttctcggcgttcggctcgctgtccaacgtgggcgctatggtcggggcgatcgccagcgggcagatggccaagtacgttgggcgcagagggtcgctgatgattgccgcggtcccgaacatcatgggctggcttgcaatctctttcgcaaaggacactacgtttctgtacgtggggagattactggaaggatttggtgttggcgtcatttcctatgtggtgccagtatacattgcagagatatctcctcataacatgagaggagcccttggcgctgtgaacccgttgtctgcaacctttggtgtcctgctttcctatgtgcttggcttgtttttcccttggaggcttcttgcattaataggaaccctgccctgcttactgttggtggctggtctattcttcattccggaatctccaagatggctggcgaggatgaatatgatggatgattgcgagacttctctacaagttctgaggggatttgatgctgacatcactgaagaagtgaatgatataaagatagctgtagcatcagcaaacaaaagtggtacaataagctttcgagagttgaaccaaaagaaataccgcacgcctctaattctaggaattggcctacttgtgttgcaacagctaagtggaataaattgtataatcttttattcaggtagcatcttcaaagctgcagggctcaacaacagtaacctggacacgtgtctcattggagctatctcggttcttgccactggtgtcacaaccacgatcttggacagagctggccggagaatcctcctcattatttcttcttctgggatgaccctaagccttctggcagttgctgttgtattttgcatcaaggataacattgcacaagactctgacttgtacaacatcttaagaatagtgtccttggttggtgtcgtggcttatgtcactgccttctccttcggtatgggttccattccatggatcataatgtctgagatccttccggttagcatcaagtgtgtggcaggaagcttcgcgacccttgccaactggttgacgtcctttggaataacaatgacagcaaatttgcttctgaactggagcgctgcaggtacatttgcctcctacatgatggtgagtgctttcactctcgtcttcgtcatcctttgggtaccagagacgaagggaagaacccttgaagagatacagtggtccttccagtgagctccggcattcatatgtacatgcaaatagcgtggcaaatcctccaggatcccaataaaagatatagtgaaatatagcagaagctatttcatttagcattttttatagtttaaatggaatttcgctgccgattctgcatgagaacatgtaaataaggagatttcacgaacatgaacactcaaatacatgtacaggcctgtaaaagaagatgtctctagatccattactttaatattcgtggaatcatagccagaagtataagctagtgaggggaattgtagatcaacgggaagatggtgatattctgatacaatgatttttatgctgagttttggtggtttgtcaaccactttattctcgttgaggcaagcaggacagtgaagttagaaatcctttaagtccctcttgaatttaagtaaactccggccctcaaaagtaaaaaaaaattaaa

SEQ ID NO: 136365 - DNA, 1019 bp, Zea Mays
atcagcctggcttttgggatgtgagtggtgggctctcttggctgggccggcccacgagcgcatgaacgcccgaagctgtcgagtgtgggctaggccgggggttggacgctgacacatttcgtccgaacactggattttagatgtggaatctgtaagttttttgcccaactactttgttcaggcttatgtcactgccttctccttcggtatgggttccattccatggatcataatgtctgaggtataatacccttatcacatatataagctaatataactcataagatgctgaaagcattctgaatgaaaggctgattctgggaactttgcctattgacagatccttccggttagcatcaagtgtgtggcaggaagcttcgcgacccttgccaactggttgacgtcctttggaataacaatgacagcaaatttgcttctgaactggagcgctgcaggtacatttgcctcctacatgatggtgagtgctttcactctcgtcttcgtcatcctttgggtaccagagacgaagggaagaacccttgaagagatacagtggtccttccagtgagctccggcattcatatgtacatgcaaatagcgtggcaaatcctccaggatcccaataaaagatatagtgaaatatagcagaagctatttcatttagcattttttatagtttaaatggaatttcgctgccgattctgcatgagaacatgtaaataaggagatttcacgaacatgaacactcaaatacatgtacaggcctgtaaaagaagatgtctctagatccattactttaatattcgtggaatcatagccagaagtataagctagtgaggggaattgtagatcaacgggaagatggtgatattctgatacaatgatttttatgctgagttttggtggtttgtcaaccactttattctcgttgaggcaagcaggacagtgaagttagaaatcctttaagtccctcttgaatttaagtaaactccggccctcaaaagtaaaaaaaaattaaa

SEQ ID NO: 136366 - DNA, 803 bp, Zea Mays
ttcgtccgaacactggattttagatgtggaatctgtaagttttttgcccaactactttgttcaggcttatgtcactgccttctccttcggtatgggttccattccatggatcataatgtctgagatccttccggttagcatcaagtgtgtggcaggaagcttcgcgacccttgccaactggttgacgtcctttggaataacaatgacagcaaatttgcttctgaactggagcgctgcaggtacatttgcctcctacatgatggtgagtgctttcactctcgtcttcgtcatcctttgggtaccagagacgaagggaagaacccttgaagagatacagtggtccttccagtgagctccggcattcatatgtacatgcaaatagcgtggcaaatcctccaggatcccaataaaagatatagtgaaatatagcagaagctatttcatttagcattttttatagtttaaatggaatttcgctgccgattctgcatgagaacatgtaaataaggagatttcacgaacatgaacactcaaatacatgtacaggcctgtaaaagaagatgtctctagatccattactttaatattcgtggaatcatagccagaagtataagctagtgaggggaattgtagatcaacgggaagatggtgatattctgatacaatgatttttatgctgagttttggtggtttgtcaaccactttattctcgttgaggcaagcaggacagtgaagttagaaatcctttaagtccctcttgaatttaagtaaactccggccctcaaaagtaaaaaaaaattaaa

SEQ ID NO: 136367 - DNA, 539 bp, Zea Mays
cagcaggggtgacagatgtttcagaactttggatccgttttgaaccaaaccttttcatacgcttccgaatgggtcaagggcaagcaagtggaggaagtggtagccatcaagaacaccgagattgcgaagcacctgtctcttccaccagtgaagctgcactgcagcatgctcgctgaggacgcaatcaaggccgccgtgaaggattacgaggcaaagaaagggaagaagatggccaaggcagaggagcaggacaccccatgcccgtaagagcgacagctagtaaactgaagcgagcagagagtagtgtatgtagtatgtaacggctaacgagcgaggtactcgtgtcgtgtgtgccaaaagaagcatgtatgtaatgtaaagctaggtaacaacgatgtttgggtttcatagaataagcgaacttgccgcagtgtttttttatctgctctgcacatgaataaggtctgcccgttgctctttatctgcttagtcggagcatgcatgcttagtttgatcaagcaatgctgttgagattaata

SEQ ID NO: 136368 - DNA, 580 bp, Zea Mays
aagctagctaccactagcacaggtacgcacgttgtagcgacggacgatgtcgtcctcgacggcggcgccactcctccccgccggcggcacgacgcgcccgctgcagcaggcgccatcgctggccgccggcgccggcgccggcgggtcgtacacgccggtgttcgtggtgctcggggtgatcgcggcgctgctggtgatctcctgcctcgtggggcaggtctgcaccaggaaacacctgcggccccgcccgcgcagggaccgcgtcgcctactacgacgacgacgacgacggcatggagggcgggttcggggggccgctgcacccgcaccacggcggcattgccaagatggaggcgccggcgccggccgcgtccgtggagacgcggccgtccggtgccgcctccgccgccgccgccgtgcaacagactgcggcgtgaaggttggcatttggcagtggcaggtaatatgatgccgccgctgtacgtacgtacgatggttgtaaacttgtaattatggcttcttctcatcagcgctgtgcagcagttgtgcaaaactgcatatacgtatgtagtcttgaaatc

SEQ ID NO: 136369 - DNA, 606 bp, Zea Mays
tttcgccccaggcgcagccgcgcgcaggcaggagtttcggttcaattcccgagccgagccgagctcaccctgcgtgcgatgggccgcagggggagtggtggggaagaccatcggccgcagcaggagcaggaggagcagcgcgcggcggtgccgaggcgcggccgctggttggacgaggagcggccgcacccgcaccagcccgcggcggcggggtggaggtgccggtcctgcgcggcggcggcgatcgcggactgcgtcgcgctggggtgctgcccgtgcgcggtcgtcgcgctgctggccctggcgctcgtcagggcgccgctcgcagtgggccgccggctccggatgcggaggcggtccgcgctgcgcaggaagcgggtgcgcgacgtcgcggccaaggttgcgccgagggccgcgcccggcgcgggcagcgggacgacgccgctggacccggcggccgccgccacgccggtgcggcagcagcagcagcagacacagacgcaggccgaggtggaggagctggcgtggctggacgagatgtaccgggtcggccactggggcttcggccgcgtctccttctcggggtctgcggggaaaaccccgtga

SEQ ID NO: 136370 - DNA, 1074 bp, Zea Mays
gatgagtcgcattccggctgctgctctccagcttgcctgcatttccagtccatcgccggcctccaccacgtgtcaccgccacccgcctggcccgctcaccgaccggccaatccagcttcctccgctcactgccaagtggacccacctgccgattggaaacattcttgacgcgcatagcaaccgcccatgatctggcctggccttggcccgctcgcgcgcgcacctgccgcttcccccttccccgccaggcgccatcccgacctttattcccgcgcgccccggccagctcgcgacgcaccgcaggacgagctccacccaccagaccacgaaaacccaaccagctgccccgccatgcccgacaccgaaggcggccaccaccgcggcgacgctgccgttgcccgccagctggatctcgtggcacctcccgctgcaccggccaccaccagcagcagccgtgccactaccactgccactgccactgccaccgcccgtcacgacgatgaggaggaggacggattcaccttcgccgccgtcgccgtgccgtgccccgtgtacgccgtctttggccgcccacggtggtcgccgcagaagcagcgtcaacaggaggaggaggaggaggaggaggggcccgctggcacgggcgcggccaccgcgcggcgggtgccgctcgggcggctcctcctggaggagcggtggtgcgacgacggcgcaccgtcggtgtcggggaaacagcccgcggacgccgccgaggccgagctcgacggcgtgccggcggagacctactgcctgtggtctcccgcgtcgccagcagcaggatcttctcggcgggcgtcccccgcgcgctgccggacgagaggatcagccggtttgtcggtcctccggtggcagcggcagcggcgggtcgccgccggcaaggacaagttcgtgttcctggccggcgccggcgaaggacacgggagcgccgccaggggtggcggcaaatcgacgacgacgacgttcctcccgtggaagcaagatcttgtcgggctggttgcgagcgccatcaccttccgcccgagctgccagccgttctga

SEQ ID NO: 136371 - DNA, 714 bp, Zea Mays
cacggggaccgaacgcgagcagtagcagcatcccggagcatgacgatggacgacggcggcgacgacttcaccttcgccgccgcccagccgcctcctagtctagtatctgcaggaggcggcggtttcataggccagccgctgctgtacccagtcttcggccggccgagatcccctccgcgggctgctccggagacggccaccgcgcgggtgccgctaggacggttcctgctggtggacagggatccgtcgccgccgcctgctcccgcggacgacgacgacggcgacctcgactcggtgccggcggagatgttctgcccgtggtctcccgggtggtcggccgcagccgcagcggcgtcctcccagtcccaggcgcggtgcaagaagagcggctccacggggtccgtgctccggtggcggccccggctcgccgtcgggcgcagccagagcgacggcaaggagaagttcgtcttcctgagcgcctcctccggcgggtccgggcgccggagccagaaggggcgaggcagcgccgtggacgtggagggtggtgcccaccacgccgcccaccacgcctggaggcattacgccaacaacactagtgagggcggtggcgcgcggcgccggaggtcgttcctgccgtacaagcaggacctcgtcgggctgttcgccaacgccgccgtgttccgccggagctacctcccgttctgatgcaatcca

SEQ ID NO: 136372 - DNA, 1274 bp, Zea Mays
cgatccccaccacttttttgtggtcacacgcgccggcttctccttcagtccttctcccgcttccgcttccgcgatggtatcctaccatccctcccttctccgtccatccgtcctcatcgcccaggccagcggcatcggccggtgcccaacactcaacgccttcctttccacccccgtcgtctccgcggtgccacttcgcctgcggcctctgcgcgccgccgccggtggagcagcctcgccggtcagtggcgatggaggcaaacgcgctgttccgccgcctgccgcgctgcttgtcttcgcgcgtagcaacttcctcccgcttgctctcgttagtggggtgatatttggtctcctagatcctactcttggatgccttgctcacaaatactctctgtcgaagttcagcacttttgggatattcattatgtcaggactgaccctgcgaacgaaggagcttggtacagcattagaagcttggcctgctggattatatggattaggatctgttttgctctttacgcccttcctttctcaatttatcatgcaagttcagttctcccctcgtgaatttatcactggattagctatattttgctgtatgccaacaacattatcaagtggagtcatactaacacagcttgttggtggtaattctgcacttgctcttgcgatgacagttgcatccaatttacttggcattataatcgtacctctttctcttgcaagatacatcggcactggagctggggtgtctttgcctactgagaagttatttagaagtctggtcaccagacttctaatccctcttattatagggaaggttgctcgagaagcctcaaaaggtattgctgattttgttgatggaaaccaacaaggattttcagttggaaacgcggtgcttcttagcctagtcccatggattcaagtaagtaaatcaagatcactgatcttatctgttcaagtggaagcttttgctgctgctattactgttggagtgcttctacatattgcactgttggctttcaacattgcaacgttgcatatcttgtcacatcttgaaaagaaaggggattcagtctttgcaaagaaagagtacacacgagctgtcattttggtgactagtcagaaaacattgccagttatgataacagtggttgagcagcttggaggagccctcggggagtccggacttctagttatcccttgtgtttttgcacacattaaccagatcattatcgattctatcatagtaaattggtggcgccggagggatc

SEQ ID NO: 136373 - DNA, 873 bp, Zea Mays
aaaggagaggaagtaaggagcagcagcaatcgtctatgtccatggccctctcaagctcgctccgtggcctggtggccctgaccccgctggccctcccttccgctcgcccgagcggggccgcggcggcggccccggcaccacgcgcgcggggtcggacggggagaggggcgggggtcgtggcgctggcggcggctctgccgtcggacgcgcagtggctggagcggctgccggagaagaagaagccgctgtacacgcacagcctgccgtgcatcgaggcgtggctgcgcagcctcgggttcacgcagtcccgcgaggaccccgccgtctgggtcgccgagaagccgctctggcacgcgcgtctcagcctcgatgtcaccgacctccacatcaggtacttgaaaagcggccctggaaatcttgacaaggatatggagagaaggtttagctacgccctaagcagagaagacatcgagaacgccatactcggaggaccttaagctgaacacatggccaaggggctcagagctaggaattgcttagtcgaggttggcactgaagaaataatcgctccagtgatctgcgtgctaccattacgccattgtaagagcaaatggatcatgtgtcgagaaataatattcatgagcaataatctcgaactaggctggaaatgttggatgcctcctggtgacatgcgcctggtttgttggcctcgttgtgtcaaatctgcctttgagccgaaacttgctcatttgtgtacggcagaatagtgagcttttctactctccggtgatgtgatcggtggcactagaacccatgtaccaaacttggatcagtctaacaagaacacgtgcagaagtagcacgtttttaccta

SEQ ID NO: 136374 - DNA, 1867 bp, Zea Mays
cctctgtcctcccccactcgctcccgttctcccctgcctcgccgcctctctccctgtcgtacccacctgccccctcgcggtctctctctccttcctgattggatcaatctggcctcgcggctccgactgatccgtggcgcctcgctcccgagcggaaccaccacctgatttgacgagagagctaggtgggccgtagaaaaggcttcagttcagatctcatttcagatagcacaggaccaatctggtctgcagtgttcaactggaatataagatttcgctgcataggtcaaaggtttgtacgagtgaaaaagactagcagatactgtcatggctcaggatgaagctgtggctacccaaaagactggaaatacaacatctccttctaaggattacccaactccttctccatatcctgattggtcaaccatgcaggcatattatggccctggtgtcttgccaccaacatattttactcctgcaatagctccaggtcatccaccgccatatatgtggggtcctcagcctataatgccaccccctttcgggacaccatatgctgcagtatacccacatggtggagcttacccacacccccttgtgcccatgatgtcaactccaatgagcgtggagccagccaaatctacaaatagcaaggagaaaaattccaataagaaacttaaggaaatagatcggactgcagtgtctgctggcagtggtaacagtaaaagaacagtgtcatccattgaagattacagtgcagaaggctcaagcgatgtaaacgatcagaatgtgaacgaaacgtccaggaagcggagctcagatggtggacctggcgcagaaaccaccacaggtggaaacacggaatgtgttttagctcctaaccatacgctggggaatgctaccattttgccacaacactgcttttcagctccagtaattaagcccagtgctacaaatgtcgcgaactcgagggcgataggcacagcattatctccaccacctggtgtgatggttccagttcataatgcagtaccatctgacttatcagttaaggatgagagggaattgaagcgcgaaaagaggaagcagtcaaatagggagtctgctagacgatcaaggctgagaaaacaggctgagacagaggagttggctacacaagtggagtctcttgcagcagagaacacgtcccttagatctgaaatcggccagctaacagagagctcagagaagctcagactagagaattcagctctaatggtgaagctgaaggacaccgcagaaccgtctccgattaaagcatccgcatccccgtcctctccccgtgcctccgcggagaacttcctttccatgatcgacagcgccaacgcgccgagcgtcagcaggcacacggagcacggcggtcccaggctccggcagctcctggactccagtccggcgacagacgtcgccgccgtaagctgatgatgaagccggtccggcaaatacgccacagcacatgcatgtgtcctggggattccgcaggctcatgctgctcgagtgctcgtcagcgttacggactcggactctgtactccagtttaggcactgattccagtgaagtaaccgagggtaccggtaattttatctgctctcgcgccagagtgccgggctgccttgcctgcgaccactcctgtcctgtgtacccagagttgtaacgtagtagggtgttgtgctgcatgccgaccttttgaaactttcgagaccgtcatttggaccatttttttcgtcgcagtaacacaatacagatcggagtttgtacaggacggatgctgcctggtgtgcgcaattctctactgcaaaataccgacaaaaattctgtttgttttttg

SEQ ID NO: 136375 - DNA, 1703 bp, Zea Mays
cccctgcctcgccgcctctctccctgtcgtacccacctgccccctcgcggtctctctctccttcctgattggatcaatctggcctcgcggctccgactgatccgtggcgcctcgctcccgagcggaaccaccacctgatttgacgagactagcagatactgtcatggctcaggatgaagctgtggctacccaaaagactggaaatacaacatctccttctaaggattacccaactccttctccatatcctgattggtcaaccatgcaggcatattatggccctggtgtcttgccaccaacatattttactcctgcaatagctccaggtcatccaccgccatatatgtggggtcctcagcctataatgccaccccctttcgggacaccatatgctgcagtatacccacatggtggagcttacccacacccccttgtgcccatgatgtcaactccaatgagcgtggagccagccaaatctacaaatagcaaggagaaaaattccaataagaaacttaaggaaatagatcggactgcagtgtctgctggcagtggtaacagtaaaagaacagtgtcatccattgaagattacagtgcagaaggctcaagcgatgtaaacgatcagaatgtgaacgaaacgtccaggaagcggagctcagatggtggacctggcgcagaaaccaccacaggtggaaacacggaatgtgttttagctcctaaccatacgctggggaatgctaccattttgccacaacactgcttttcagctccagtaattaagcccagtgctacaaatgtcgcgaactcgagggcgataggcacagcattatctccaccacctggtgtgatggttccagttcataatgcagtaccatctgacttatcagttaaggatgagagggaattgaagcgcgaaaagaggaagcagtcaaatagggagtctgctagacgatcaaggctgagaaaacaggctgagacagaggagttggctacacaagtggagtctcttgcagcagagaacacgtcccttagatctgaaatcggccagctaacagagagctcagagaagctcagactagagaattcagctctaatggtgaagctgaaggacaccgcagaaccgtctccgattaaagcatccgcatccccgtcctctccccgtgcctccgcggagaacttcctttccatgatcgacagcgccaacgcgccgagcgtcagcaggcacacggagcacggcggtcccaggctccggcagctcctggactccagtccggcgacagacgtcgccgccgtaagctgatgatgaagccggtccggcaaatacgccacagcacatgcatgtgtcctggggattccgcaggctcatgctgctcgagtgctcgtcagcgttacggactcggactctgtactccagtttaggcactgattccagtgaagtaaccgagggtaccggtaattttatctgctctcgcgccagagtgccgggctgccttgcctgcgaccactcctgtcctgtgtacccagagttgtaacgtagtagggtgttgtgctgcatgccgaccttttgaaactttcgagaccgtcatttggaccatttttttcgtcgcagtaacacaatacagatcggagtttgtacaggacggatgctgcctggtgtgcgcaattctctactgcaaaataccgacaaaaattctgtttgttttttg

SEQ ID NO: 136376 - DNA, 805 bp, Zea Mays
cccacctgccccctcgcggtctctctctccttcctgattggatcaatctggcctcgcggctccgactgatccgtggcgcctcgctcccgagcggaaccaccacctgatttgacgagactagcagatactgtcatggctcaggatgaagctgtggctacccaaaagactggaaatacaacatctccttctaaggattacccaactccttctccatatcctgattggtcaaccatgcaggcatattatggccctggtgtcttgccaccaacatattttactcctgcaatagctccaggtcatccaccgccatatatgtggggtcctcagcctataatgccaccccctttcgggacaccatatgctgcagtatacccacatggtggagcttacccacacccccttgtgcccatggtaatgatgcctatggacattttttgtttaattaagcacactatatatgtccaaacttggctgatcaagtgaccaagccattcaatgtaggaaatggaaagtaaaacttgattatagttggacaacatttctactcttttggtctgtagttcaccattgatgcacagcatgtagaatgttgtccataacctgtaattttgtagcctcatcagaacaaaggatctgcactgtgcatctagctctattttatattagctgcccgaggcttgccctaccagcagaagatgctgcgcacttattaatcatccattgccgctactccattcggatctgggacaagatatatgcctggcttgcggctgttttggagcctcgtggggtatgtgaaaatttt

SEQ ID NO: 136377 - DNA, 1695 bp, Zea Mays
cgcggctccgactgatccgtggcgcctcgctcccgagcggaaccaccacctgatttgacgagactagcagatactgtcatggctcaggatgaagctgtggctacccaaaagactggaaatacaacatctccttctaaggattacccaactccttctccatatcctgattggtcaaccatgcaggtagaatttgagtactttgctgcactcccacctcgttggaacagggtggtctaagcaataagcacgatatttcacaggcatattatggccctggtgtcttgccaccaacatattttactcctgcaatagctccaggtcatccaccgccatatatgtggggtcctcagcctataatgccaccccctttcgggacaccatatgctgcagtatacccacatggtggagcttacccacacccccttgtgcccatgatgtcaactccaatgagcgtggagccagccaaatctacaaatagcaaggagaaaaattccaataagaaacttaaggaaatagatcggactgcagtgtctgctggcagtggtaacagtaaaagaacagtgtcatccattgaagattacagtgcagaaggctcaagcgatgtaaacgatcagaatgtgaacgaaacgtccaggaagcggagctcagatggtggacctggcgcagaaaccaccacaggtggaaacacggaatgtgttttagctcctaaccatacgctggggaatgctaccattttgccacaacactgcttttcagctccagtaattaagcccagtgctacaaatgtcgcgaactcgagggcgataggcacagcattatctccaccacctggtgtgatggttccagttcataatgcagtaccatctgacttatcagttaaggatgagagggaattgaagcgcgaaaagaggaagcagtcaaatagggagtctgctagacgatcaaggctgagaaaacaggctgagacagaggagttggctacacaagtggagtctcttgcagcagagaacacgtcccttagatctgaaatcggccagctaacagagagctcagagaagctcagactagagaattcagctctaatggtgaagctgaaggacaccgcagaaccgtctccgattaaagcatccgcatccccgtcctctccccgtgcctccgcggagaacttcctttccatgatcgacagcgccaacgcgccgagcgtcagcaggcacacggagcacggcggtcccaggctccggcagctcctggactccagtccggcgacagacgtcgccgccgtaagctgatgatgaagccggtccggcaaatacgccacagcacatgcatgtgtcctggggattccgcaggctcatgctgctcgagtgctcgtcagcgttacggactcggactctgtactccagtttaggcactgattccagtgaagtaaccgagggtaccggtaattttatctgctctcgcgccagagtgccgggctgccttgcctgcgaccactcctgtcctgtgtacccagagttgtaacgtagtagggtgttgtgctgcatgccgaccttttgaaactttcgagaccgtcatttggaccatttttttcgtcgcagtaacacaatacagatcggagtttgtacaggacggatgctgcctggtgtgcgcaattctctactgcaaaataccgacaaaaattctgtttgttttttg

SEQ ID NO: 136378 - DNA, 1701 bp, Zea Mays
gcggccgcaggtccgcacccccccactcccacgcacactcgtgcgtctctcctcctcctcccccgcgtcgcgtgcgcgctctgcttcccttgccgccgtgcgctgcgagggtcgactgtcgagcgcgcgctgcttgctgctcgcctggccgtcgatgagcatggggcgcttcgtcaactccatggatccgacgtcggggctggaggtgatcagggactggaacggcgtcgcccaggtcgtgctccgctcgcccaagggagcctccgcgcgggtgagcctgtgcggtgggcaggtcgtctcatggaggaacgaccgcggcgaggagctcctcttcaccagcagcaaagtgaatccccctcccctctttttcttatttcccacactactcctaccgtcgtccagtaatctgtaatgcttacaggttttcagattttccttcctttttgcttcagtgttcttctagcatttctgtatgtgttcctgaaaccggcacctgtgaaaaggcgtctgttcaaccggggctgcaaagaacaacactgtgaatcgtattcatgtataattgccgttgtttctgtagtccatcctgacggctggagaagcgaatgacaaattaagctttgctatgtgcctacgttacctgtgagctgggactattttgtggtcctaaaatttcagtagccagttgttcattctttgttacggtttttatatatcatatagatatgtattaagatatttatttaaatataattattgtttattaaataataataaggtacatgtggtttggtggttagctccaaatttatagagtagggggtgaggtttgattgctcgctctgcactattttatggcgctagagtccataatttatagagtaggtggtggggtttgattgttcgcttatactattttttggcgctggggtccacagggcagtagctgagagagcgctgtgcgggcactgaacgtgggtccacagggcacggtgctgagacggggtgcatggggtgggtttagagtgtcagtatagagggtaaaaccgtaatagtaccaagcattaggttcttaataaaataatatagatatagataatggtttccctcggcttcatgtgctgacacctcctttttctcgtcttccttaatagggccagtagtgggactgtgtagccttactaaagcactttcatgtctgttgtttttgacgtgcaggcaaccttcaagccgccaaatgccatgcgaggtggaattcagatgtgtttccctcaggtgctgcagcaccatcccatcatccattcttgtcacagtttctattggatcgtatacttttctgctgtaattttgattttgtctgtggtgtacaaattttacggataagttgtgaggttcttgctgtaaaaattcaatggggcttctggtaactgtaaaatttcatgcagtttggatactctgggacattggagcgacatggatttgcaagaaacaggatatggtccctggatgatgagcagccaccactgaatcataatgataacggaagcaaagtttctgttgaccttattctaaagccatctgaagatgacctcaagtgctggccacattggtatgcatttctttgaggttttctgtgtccgtattcctatgccatgtgcctactttatgttacaactaaatgagggttaatgtcaaatctctgtt

SEQ ID NO: 136379 - DNA, 1324 bp, Zea Mays
gcggccgcaggtccgcacccccccactcccacgcacactcgtgcgtctctcctcctcctcccccgcgtcgcgtgcgcgctctgcttcccttgccgccgtgcgctgcgagggtcgactgtcgagcgcgcgctgcttgctgctcgcctggccgtcgatgagcatggggcgcttcgtcaactccatggatccgacgtcggggctggaggtgatcagggactggaacggcgtcgcccaggtcgtgctccgctcgcccaagggagcctccgcgcgggtgagcctgtgcggtgggcaggtcgtctcatggaggaacgaccgcggcgaggagctcctcttcaccagcagcaaagcaaccttcaagccgccaaatgccatgcgaggtggaattcagatgtgtttccctcagtttggatactctgggacattggagcgacatggatttgcaagaaacaggatatggtccctggatgatgagcagccaccactgaatcataatgataacggaagcaaagtttctgttgaccttattctaaagccatctgaagatgacctcaagtgctggccacattgttttgagttccgtctgagggcctctctttcaaaggatggggacttgtcattgatatcacgcatcaggaatgtcaatggcaagccattcagtttctcatttgcttatcacacatatctttctgtttctgacatcagtgaggtcaggattgaaggtctggagacacttgattatcttgacaaccttagccacaaagaacggtttacggaacaaggagatgccataacatttgagtcagaggtcgaccgagtctacgttagctccccaaatgtagtagcagttattgaccatgagaagaaacactcgtttgtcataagaaaggaaggacttcctgacgttgttgtgtggaatccatgggaaaagaaatcgaagaccatggtagacctcggcgacgaggagtacaagcagatgctttgcgttgatgcggctgctgtggagagagcaatctcgctgagaccaggggaggagtggactgggaagctggagctttctgcggttttatccactaactgcagcgaccatcttgatcatcctgtcagcatctagcgtttattcccattgtagtgctatatatttgcctcacaagagaagtatgggccccttttgtaaatgagatcaataggtagctctgttatcagttagcagctcgacttgatcctggaaccggcacaatttgtgacctgtttttttaatgtgagtattgaatgatagcagcgccttgcttcatgcataatgcacacaaaatggcaagatttatca

SEQ ID NO: 136380 - DNA, 798 bp, Zea Mays
atggctgaactgaaagcaaagaggggtagtcgtacttacctcacatggacagatgcgatggatctagctcttttggaagttcttgtggagcatcacaataatggagaccgtggtcaaaatggttggaagccacatgtctacaatgctgccataagaaatgtgaaggataagtgcaatgtggatatcacaaaggataatatttccgcaaggtgcaagacctttgataagcactatgaaatcattagcaagatactatcgcagagtggctttgggtgggattgggagaacaatagactttctatggacagcgaagatgtttggtttagatatgtggaggctaacaaaggagcagcatgctacaagacaaaagtggtgaagaactgggatgcaatctacactatatactccaaagaccatgccaatggtgaaggtgccaagacagggactgaaagtggtcaagatgtggtgaatgacagtcctacaaatgccaatgaaaactctctggtgttagctccaaagaagcagcgaactggtgatgcaattatgggtgtacttactgatatgaaagcttcatttcaagaggctatgcagtccaatgcacctttagaattgccaaagaagacggctccgtctaagatccttgcagcgcttcaagaaattcctgatttacctcgtgaagacatgctacgatcttatggtatgctgctaagccgtgatgatcgcatatttgaagctcttatggagctccctatggaaatgaggaaagattggctgctgtttgagaatgagaggaagtga

SEQ ID NO: 136381 - DNA, 872 bp, Zea Mays
atggctgaactgaaagcaaagaggggtagtcgtacttacctcacatggacagatgcgatggatctagctcttttggaagttcttgtggagcatcacaataatggagaccgtggtcaaaatggttggaagccacatgtctacaatgctgccataagaaatgtgaaggataagtgcaatgtggatatcacaaaggataatatttccgcaaggtgcaagacctttgataagcactatgaaatcattagcaagatactatcgcagagtggctttgggtgggattgggagaacaatagactttctatggacagcgaagatgtttggtttagatatgtggagttgtgtgattatttgtccattgtacaggctaacaaaggagcagcatgctacaagacaaaagtggtgaagaactgggatgcaatctacactatatactccaaagaccatgccaatggtgaaggtgccaagacagggactgaaagtggtcaagatgtggtgaatgacagtcctacaaatgccaatgaaaactctccggtgttagctccaaagaagcagcgaactggtgatgcaattatgggtgtacttactgatatgaaagcttcatttcaagaggctatgcagtccaatgcacctttagaattgccaaagaagacggctccgtctaagatccttgcagcgcttcaagaaattcctgatttacctcgtgaagacatgctacgatcttatggtatgctgctaagccgtgatgatcgcatatttgaagctcttatggagctcccaatggaaatgaggaaagattggctgctgtttgagaatgagaggaagtgaagtatgtggagacaacatagtcttttgctacttcaggatgctagtta

SEQ ID NO: 136382 - DNA, 654 bp, Zea Mays
aactcaaactggatgttggcccagccagcccatctcattccgcccacatgcagcctcaaaaggcccagagcccaatcttatcctctccatcgtcgtccaacgaacggcggcgcgagtgggcgtgcagaagccgagagaaggcactcggcagggcagatggaggggctgacgtccagtgagatcgccggattcgtggtgggtgccctgctgctcggcgccaccatcgctgcccccaaggtcgacggcttcatcgcctcctcccagagaaggtcactagggatgtgtaagaggtgcggtgaccttcggattgtagcatgctcgcagtgcaaaggaacaggatcagctcggagcggagggatgctcagtttgggaatgctggatgacctctacgagtctcttggagccgaagccaagactgagaatctggttccctgcacaaagtgcaggtcgagaggccgtctcctgtgtccagaatgctccaaggtcgcatgaccctggaaccaaggccgtctcctgtgtccagaatactctcaatgcagttgttctcagtgcttttggttgggctggttgggtgttttgtatcttgttcttttttattctctcgtctaataaaaattatggtaaatatattgtcatccttccccaaaaagtaaa

SEQ ID NO: 136383 - DNA, 635 bp, Zea Mays
ctgtcgttcggtttgtgtacaagtgcacagtgccaatgcaaaaaattagcattgctttggatggtatgcggtagagctgcaagttccgtatccagtccagtccagtgaggggaattgctttggatggtgcagggcagatggaggggctgacgtccagtgagatcgccggattcgtggtgggtgccctgctgctcggcgccaccatcgctgcccccaaggtcgacggcttcatcgcctcctcccagagaaggtcactagggatgtgtaagaggtgcggtgaccttcggattgtagcatgctcgcagtgcaaaggaacaggatcagctcggagcggagggatgctcagtttgggaatgctggatgacctctacgagtctcttggagccgaagccaagactgagaatctggttccctgcacaaagtgcaggtcgagaggccgtctcctgtgtccagaatgctccaaggtcgcatgaccctggaaccaaggccgtctcctgtgtccagaatactctcaatgcagttgttctcagtgcttttggttgggctggttgggtgttttgtatcttgttcttttttattctctcgtctaataaaaattatggtaaatatattgtcatccttccccaaaaagtaaa

SEQ ID NO: 136384 - DNA, 1423 bp, Zea Mays
cgatcccgccgcgacccccgcccgccgccaatcgcccgccgcgaaccccgtccgccgccaaccgcaaggcgcgaacgcccgcccgccgcgaccgctcggcaaacgccgtgaacagcccgccaccaaccgcgatacgcccgtcgcgaccttccgcgaaccctgcccgccgccacgaatgcccgcctctgcgaaccctgcaagccacgatacgcccgccgcgacccgccgcgaattccctcccgcaacgcccgcacgaccgcccgcacaacccgcatgcccgccgcgagcccgccgcaaaccccgcccgcacgcccgccagccatgccgcgacagacctaccacaatttcacaaagatgttttctgctatttacagatgaatagttattgtcagggacaacaaggttccatcatttccagggaggaaaatgttcgtgtaatgattattggtagtccacccgctcttgttcgttgcagtcggcagcacaccacaaggaagtgaagttaggttgaaacagactcttgacttgtgaaaataattgatgaagatttcttctctttctccagatacttttgaagaggtgaagagcaagcgtgataggaaaaaaactcggtggcaaggcaatctttatcaaggtggctggctgggcaacagatggaggatttggctccaaaccttttcttgatggtctcgaagtgtataataaacaaaagaacaattctggaagccttgacagattcaagatggattcaagaccttcggggtgttttatcttgggaggtgttcatggaaatcacacttctttggaagctttcgaaggggttaacctgcagcccggcattgccggatagacacttttagaggttgtccagttccagaaaatatttagcaacctcggcttatgcagccatcttctaaggatccttgcagtaggaggcttttgatcgtgtctagaagatttgggctcctcctaggtgcactttcttcatctgccttgtgatccacaatcgatgttggacattggatcgattggctaagagaaatctccctcgaccgagctgttgtcccctttgtgaacaggaagatgagacaattaatcatatcttagtaatctgtgttttcagcaggcagttctggttctttattctccaaagaatggggctcattgctcacgacctgtgaaaataattaatcaagatttcttatctttctccggatacttttcaagagatgaagagcaagtgtgataggaaaaaagactcggtggtaaggcaaggtacgccgaggtcaaatgtaatattgttctgtacttcgatttggtgtattttgcttttttagtccctacaaaatgactgggatttagcaaagcggcttatctgttgtgcatcatttctattgtccctccgaattgcatattataaact

SEQ ID NO: 136385 - DNA, 1660 bp, Zea Mays
gcccccctgttcctcctgtcatcttctcctcctcagaaacccaccaaccccgtccagccgccggctgtctcggccgccgccgccgccgccgccgccctatcccggtccttcaggcgaaccaggttggtcatggccttcaacaagatcaaggtctccaaccccgtcgtcgagatggacggcgatgagatgaccagggtgttctggaaatctatcaaggacaagcttatattccctttcgtagacctcgacatcaaatattttgacctcgggcttccacaccgtgatgctaccgacgacaaagtcacagtggaggctgcggaggccacactcaagtacaatgtggctatcaagtgtgccaccattacaccagatgaagcaagggtaaatgagtttggcttgaaggctatgtggaagagcccaaatggcacaattaggaatattctgaatggcactgtgttcagagaaccaatcatctgcaaaaacatcccacggcttgttccagggtggacaaaacccatttgcatcgggaggcatgcattcggtgatcagtaccgggcaactgatgcagttatcaaggggccagggaagcttaaattagtttttgagggaaaagaagagcaagttgagctggaggtgttcaacttcactggtgcaggaggagttgccttatcaatgtacaacactgacgagtccatccatgcctttgctgacgcttctatggccactgcttatgaaaagaaatggccattgtatcttagcaccaaaaacactattttgaagaaatatgatggcaggttcaaggacattttccaggaggtgtatgaagctggttggaaaaccaaatttgaagctgccggcatatggtatgagcaccgccttatcgatgacatggtagcatacgcacttaagagtgaaggagggtatgtctgggcttgcaagaattatgatggagatgtgcagagcgatttcttagctcaaggttttggctcattgggtttgatgacttcggtactggtgtgccctgatggaaagacgatcgaagctgaagctgcccatggtactgttacccgtcattaccgtgttcaccagaaaggaggtgaaactagtacgaacagtattgcctcaatctttgcgtggacaagaggacttgcacacagggcaaagcttgatgacaatgctagactacttgacttcacccagaagcttgaggctgcctgcgttggagccgtcgagtctgggaagatgaccaaggaccttgcccttctcgttcacggatcttcaaatatcacgaggagccattacctgaacacggaggagttcattgacgctgttgctgatgagctcagatcaaggctggcagccaactcgaacctttgaaatccttgccgaagttgtggtgctttcctgcgcgacgctttcgaaccgtttttattatgtcgccattttctttccctgtgccaccaccctgatgaatgaagaaggcctgagctaggcgaacatctgcaggctgcagcagtatgccaaatcattatcattaccgttaccattaccaattggagattgccgtagatttccgcgattatgggaactcatttacctgattatctgatacgtttgaaataaaaggtcgcccattagaatgatttctggttgtctcttc

SEQ ID NO: 136386 - DNA, 1697 bp, Zea Mays
ggtccaatacgtttatactcgtccattcagtcagtcaatggagagtagcagttgttttacaatgtacaaatgaggcgagacggcaggctacactaccagctagctgcacatcaccggcccttgtaatcttagcaaacaaacgaacaaatcaaccagcatatatatcggattaccactactaatcaaactctagctaacctgctagatttgcctcttgatgcatgcgacagcttccatgccaaatgcttccacgttaaaacatcggaaacgcggctgcccgtgtcgctagagcaaacagcccttctcttcttctcagttggcctggcagaacgtacggaagaacaccctcgaaggaaagggaaaaaaaaagaacaagcagtaacggtagaagagaaatcccaaacaagcacgcgacgcgtcgcagctctgcgctgctagatgggaatggcgccattgccggttgctgaatagtgtgcgttcaccaggccattcagtggcttcatgacgtgcccagcctttaatttttgcgctcctcctttgctgcaggtgtgtctgccagtcgaactgataagaccaggttggagcaggtgatcaagctgacctgatgacgctgctaccaatcctgccaagattttcgttaattgttcagacgtttaaatttctttcaaagacaacagatagttaaacaggcaaaataagtagacggtttgaggatgtcttacctaagaaaagcggagatggcttgccgggccttgacttgaattcaggatgaaattgtgcaccgacgaaaaacctatgagttggcagttcgataatctgcaatgtgacaaatcaaatacgtgagaccaggtttcctaaaagaaaatgcatcagactaggccatggttcattcttcatggaaaagtgttggcacccatacctccatgcgtttaccactttcatccctgccaacgaaagaaagccctgccttctcaaattctgggaccatatcaggattcacctcgtatctgtggcggtgccgttcatcaacgtagctagcattcccatacctaaggcagttcagaattcaagcaattatctccgagtactccatagataatcaaatggtggaagagggaccagatgtaaaactcctgcagaaacactggtgaaagatgtgggagtgcttcttacagtttagcagatttgcagttagtgacctggaaaaaggtcctccttgatccaaggcgcattgttgcccccatatgggtttttgaccccttcggaacaacagaagcatggttggaactaatacagctagttttcaacacaaaggaatttaggtaactacactagcagctgtagcaaaataattacctctggcatgaaaataacacatggggtttttgtggttggatcgaactctgtgctgtttgcaccgtgcaacttcatgatagaacgtgcaaactcaatcactgcaatttgcatgcccaagcaaatgccaagatatggaatgttgttttctcgcgcatattttgcagccagaattttcccttgaactcctctgtctccaaaaccccctggcaccaacacaccatctgcaccctgaggtgcaaaaactcgttcagatttttatatagtgggctagtggtgtgtcaccagaaggcattctgtgcttacctttaacaattcccatgctttttcgtaggcatcaagat

SEQ ID NO: 136387 - DNA, 330 bp, Zea Mays
atggcgctcaaggccgctgagtttcgacggaacggggccattgcgctcccttttcggcccagtcagtttctcaggtcgtccactccgtacggcccacagagaaaactggaggaggaagggaaccccaagccggtgaccgtgaagatcatcgagacggtgtacgtggaggccggcaccgccgacgacttcaagtccgtcgtccagcggttcaccggcaaggacgccgccgccgagctggaggaaagcggcaggcctacaccctcacggcctcaccctgagacaaactgtagcatctattcaacatggagtactatatatgctaaaccttga

SEQ ID NO: 136388 - DNA, 716 bp, Zea Mays
caacccaaaccgcccgctactacgttacgttggcagcgcgaaaaaccaaaaaaacgtccaccacctccgtgcgcatgcaccggcgccaccgagccggcccgcctcagccgcacacctcactggcggggagccggggatcatgggggcagcagcggacgacgctgcgtcagtgcgggccgcggtgatgcggctcagcttcggcgcggcggcggaggagaggcgggacgccgcgggggaggtcgcgaggctggcgcgcgcggacgagcggaccaagcgcctcctgcccgagctcggcgtcctgcccccgctcctggacatgctgggcggcgcgggaccgggggcgcgcctggccgcggcgggggcgctgctggagctcgcccgagggacgcacaggttcgtcgaaataaggtgcgcatcgtgcaggccggcctgctcaagaagttgccggtggtcgcggacgacagggacgtgtgcagaagccaggagctggcgctgctgctcctgtccatctcgtcgctagccaacaccgacttcccgctccgcaccaccgagctcctcccgttcctcgtggccacgctgggagccaccgacgtcccgcccgacgcgaagctgccgtgcctggccgcgctccgcaacctgtcggcgaagctggagcacgcgcgcgacgtggcgtccagcggggccgtgcgcgcgctcctgccgctctcgctggagcc

SEQ ID NO: 136389 - DNA, 495 bp, Zea Mays
atggaggcggagggcgaggcggtgccgcgggcgctcctggaggccatgacgcggcacgggagcgcgcggtgccaggagcgcgccacgtacctggccatggtgctcgcgcacggcagccgcgcgctgcggcgcgccatgcgccggctcggcgtcgtgcaggcgctcctggaggtctcgctactcagcagcagcccactcgcgcagcggagggcggccatcatcctgcgctggttcaaggaggatgggccgcagagcaggacgaccagggcgcattcggggcctcgcgtggagggagtggcagaggccacgtcgtgccgcgacgacgacgtagccggcgaggcgaagggttgccgggataccaccgtggacgagattgtgaggcggagcctggataggaacatgaagtctatactgaggagggccacggcgtccgtggacctgaccaatgttaaactgctcgttacgagctccagctctaagagcttgccttgctga

SEQ ID NO: 136390 - DNA, 1203 bp, Zea Mays
atgtcccagcacggcggcctcggcgacacggcccggcggtggcgcgagctccacggcgacggcggctgggcgggaatgctggacccgctggacctcgacctgcggcgcaccgtgctccgctacggcgagatggcgcaggcgacctacgacgccttcaaccgcgagcgggcgtcgccgcacgcggggctgtcccgcttcgccagggcgcacttcttcgaccgggtgcggctgccggcgcacgccgccgcgtaccgggtcaccaggttcctgtacgccacgtcgtcggtggccgtgccggacgccttcatcctcaggtccgtgtccaggtcgcgccggtgcagggagtccaactggatcggctacgtcgcggtggccaccgacgaagggaaggccgcgctcggccgccgcgacgtcgtggtcgcgtggcgcggcaccatgcgggcgctggagtgggccgacgacctcgagttccccatggtgccgacgggaggcctcctcggggacggcgacgccatggtgcaccgcggctggctgtccatgtacacctccagcgacccggcgtccagccacaaccaggacagcgcacggcatcaggcgctgggcgaggtgcggaggctggtggacgcgtacaggggcgaggagctgagcatcaccgtgacgggccacagcctcggcgcggcgctcgccacgctcaacgcgttcgacatcgccgccaacggctacaacgtggcggccacgggcgcggccgcctgcccggtgacctcgttcgcgttcgccagcccgcgcgtcggcggcggcggcttcaagaagcggttcgacgccgtcccggggctgcggctcctccgcgtccgcaacgcccgcgacgtggttcccaagtacccggtcgtgttctaccacgacgtaggcgcggagctcgcgatcgacacgggggagtcgccgtacctgagaagccccgggggcgagcagacctggcacaacctcgaggtgtacctgcacggcgtggcgggcacgcggggcgcgcgcggcgggttcgagctcgccgtggcgcgggacgtggcgctggtgaacaaggcgtacgacgccctgcgggaccaccacggggtgccgccagggtggtgggtgccgctcaacaggggaatggtggagggcgccgacgggcgctggagcttggtggattgcgaggaggacgaggatgatgagtag

SEQ ID NO: 136391 - DNA, 2774 bp, Zea Mays
ggccacgcgctcctccgctcatgccgctgctgcccactaagcccgcacccgcactcaatccgttcctcctcccactcgcctcccttgccttgccgcgcgccctcccgcccatccgcctccacgcaaagaagcgcctacgcggtctcagctcggccgccgtctcggctgcggcgtccacctcctcttccgcggacccgagcacggagctgcgagcgctctgctcccatggccagctcgcgcaggcgctctggctcctcgagtcctcggcggagccgcccgacgaggacgcctacgtcgcgctgttccgcctctgcgagtggcgccgcgcagtggaaccggggctgcgcgcgtgcgcgcacgcagacgaccggcacgcctggttcggtctccgcctcgggaacgccatgctcagcatgctcgtcaggttcggggagacgtggcacgcgtggagggtgtttgccaaaatgcctgaacgggatgtcttctcctggaacgtcatggtgggcgggtacgggaagtccggtttgctggatgaggcgctggacctgtaccacaggatgatgtgggcaggtgtgagaccggacgtgtacacgttcccctgtgttctgcggagctgtgggggcgtcccagactggaggatggggagggaggtgcatgcacatgttcttcggtttgggtttggggaggaggtcgatgtcctgaatgcactcatgaccatgtacgccaaatgtggggacgttatggctgcacggaaggtgtttgacagtatgaccgtcatggattgtatctcatggaatgcgatgattgctgggcattttgagaatggtgaatgcaatgcagggttggagttgtttcttaccatgctacatgatgaggttcagcctaacctcatgacaataactagtgttactgttgcatcaggcttgttatctgacgtaacctttgcaaaggaaatgcatggacttgcagtgaagaggggttttgccggtgatgttgcattctgtaactctttgattcagatgtatgcgagtcttggtatgatgaggcaagcaagaacagtgttctcaagaatggatactagagatgccatgacatggacagctatgatatctgggtatgagaaaaacggcttcccagataaagctcttgaagtgtatgcacttatggaagtgaacaatgtaagtcctgatgatattactattgcaagtgcccttgctgcttgtgcttgcttggggagtttggatgttggtgtcaagttgcacgaacttgctgagagcaagggattcataagctacatcgtagttacaaatgcaatccttgaaatgtatgcaaagtccaagcgtattgataaggctattgaagtttttaagtgcatgcatgagaaggacgtagtgtcatggagttcaatgatcgcaggattttgcttcaaccataggaactttgaggctctttactatttcaggcatatgcttgcagatgttaagcccaattctgtcacttttattgctgcgcttgctgcttgtgctgctactggggctttgaggagtggtaaggagatccatgcacatgttttaaggtgtggtattgaatatgaaggttatttgcccaatgcccttatcgacttgtatgtaaaatgtggccagacaggctatgcttgggcacagttctgtgcacatggtgcaaaggatgttgtgtcgtggaatatcatgattgcaggttttgttgctcatggtcatggggataccgctttatcgttcttcaatcaaatggtgaaaataggagaatgcccagatgaagttacatttgtcgctctgctatgtgcttgtagtaggggtggaatggtcagcgaaggttgggagcttttccacagcatgactgagaaatactctatcgttccaaatctcaagcactatgcatgcatggtggatcttctaagtcgtgctgggcagctgacagaagcttacaacttcataaatgaaatgcctatcacaccagatgctgctgtttggggagccttgctaaatggatgccgaatacaccggcatgttgaacttggggagcttgctgcaaaatatgtccttgcattggagcctaatgatgccggatatcatgtcctattgtgtgatctgtatgctgatgcttgtttatgggataaattggctagggtgaggaaaaccatgcgggagaaaggactggatcatgattctggatgtagctgggttgaggttaaaggagtggtccatgcatttcttacagatgatgagtcgcatccacaaatcagagaaataaatactgttcttgaaggaatatatgagcggatgaaagcatctggttatgctcctgttgaatctcattgtcctgaagatgaagtattgaaggatgacatcttttgtggtcatagcgaaagacttgctgttgcttttggtttgatcaataccacacctggcacctcaatttctgtcaccaaaaaccaatacacatgtcagagttgtcacaggatattgaagatgatttctaatatagtacgaagagatataattgttagggacagtaagcaactccaccattttaaggatggaagttgttcgtgtggagatgaaggttttggatgaagttcttgcagaggggaggcaagcttaattatgttgcatatacggatatacccttgtgctattattcatcttgtacacgttcatcctgtcaatacaatgccatggcgatacaatgctgtcaatactaagcagaacacattgcgttctgtatagcagtttgtg

SEQ ID NO: 136392 - DNA, 512 bp, Zea Mays
atggccagcctcgtgtcgcagccgcgccacagcatccagacgtactgggcgcggaggagctacctgcgcctgcgctcgccgtcgcggcgcctcagggtggcccgcttgggtgccggcagcggcagggcagcagcgggatccgcttccgccgcgtcgacgacgacgtcgtcgtggaaggccagcagggtggcgcgccgcgccgcggcgttgctggcggcgccggggctcctgctcgcgcggctccgcgacgcgtacgtcgacgccatggtggcgctgggcgggtccggcggcgccgtgcggccctgcgccgcgctggcccggtcgcgcagcggcgccgaggccgggctgtgggacaggcgggtgccgctggcgcgccgggggagcgggcgcgcgagccggcggggcggcggcgccgccgacttcgagcgacgtatgatggcgcacatatacagcgtggtcgtcacgccggagctgccgtgcgccgccagggcttgaactcttgacacccttgg

SEQ ID NO: 136393 - DNA, 98 bp, Zea Mays
gcgagaatcgtttaataaacagactgagttataacccatattatagttataaactatattcatcaaactacaaactactagaattggaaataaaataa

SEQ ID NO: 136394 - DNA, 1602 bp, Zea Mays
attcatcaacgcagcgcggcgcctaccgctcaaactccctatgcttcctccccctctctagcggagctgcaggagcaccacccctccaagtcggcgtctagaatccagtggacgttcaagtacgggaagctagtctaagaggggcaggtctcaggtggtttgcgcgggggcgccatggaagttgtgctcgctccggcccagcacgacggcctgcacgcggcgtttgggcccaatcccttcgacatcggcgttggcggagatgggcggttctcctcgagcctctcctcgctcggcggcgatcgcttctgcggctactccaccaccgcctccctcttcgtcaatagccccgggctgtcctcgccgtcgccgcgcgccgactcgctgtcccgcggttcctccgactctggatccgtcgtcgacgacggggacgatgcggcggccaccgccgccagcgtcgcggagcgtcgactccgcctcgcgcgcctcgcgctccagtaccaggaggtggtcaaccgcttcgagctctgcctctcgtacctcgccgacgccatcaacgaggcggccgcgctccgccaggagaacgatgagctccgcgtcgccaacgagtacctcgcccgccgcatcaacgtggtcggcggcaggctcgccgacgagttcagcggtctccgcctcgccgaggagcacaccacgccacctcctctgtcaccgctgcccgccgcgccggtgatgccgaagagcatctccgttcgctcgcccggctatctcaagatggtccagaacggcaagcatcgggcgtccaagccaacgaagggctcgcgcgtgttagtgggcatggaaggcggagtgaaggaggaggagaagctcaacggcgggctgcagttcgaggtgtacaaccagggcatgctgaagacagagctctgcaacaagtgggaggagaccggcacgtgcccgtacggtaatcagtgccagttcgcgcacggcatcgccgagctccgccctgttatccgccatccgcgctacaagaccgaggtctgccgcatggttctcgctggcgttgtctgcccctatggccaccgctgccacttccgccactccatcacccctgccgatctcttcctcccgcgcccttgaagatgtcagtccaccacccactgccactctctcgtccgcttccaccctctccagctctacttcattgtgcggttataccatcgtcagtcttcagaacccaaaaaatgtctgattagttgtgattcagaaaatgatagccgtaaataagctatagatagatacacgagatagaaaacaaaaattgttctacgtaattagcacacaggcaagatgtgaatatgtagttctagacacccaaggtattcatatggggttgatcagggcaatcaaactcaaatatgagttatgttgggattattgtattcgtcgtatcgtttatatacacagtttaggttatgatgttctgcctagttacatttttgggcaaattggatgacaaactggtgagttcatgtaagtaaactaaggctgttatctgaatatctctgatgtgttgaacacttggcaaaaacaagcaccttctccgttgta

SEQ ID NO: 136395 - DNA, 1954 bp, Zea Mays
ccggaacccaaccgacgagttcttccacccacgcgacggcgacactgccaccgcgctcggaggcgctgaagccagccgagaggcggggcccggccccccggcgactagtaggcagccacagccaaccactcgaagtgttcggttccacttccacgttcaggatttttgttcaagatggtgccagcagaaaatacttacagctaagaggaatgttgatctgttctcaatctctccaatcatattacttctggcatcagatacattggatgatattgaccctaaagatgtctccctttttgcttcacgcttcatgagactttgatagaactctacaatctccggcgcacggtgtaccttgtcacccccgccaaggttccttggtagagcacctggaggtggcggtggtggcggtgggccaccaactttccctggaggtggtggtggaggaggtggtgcacctggtgcccgtggcgtttgtactccacttgcaatactggtagcccctgaagcagcggttgatcgagggggaggtggtctgggaactcttgttgctctcttctcaacgttggcaagcttcatctggctcaccaccagggtgttgttttggttgtcactggattgctcactggattcagcattagctgcaggggatctctccttaatttgagcaagttttggagggagtgcaccttttggagaggaaattagagctgaactgtggccaccaccaaacctttgtgctcttgcttgcccagccttctcttttatagccttctcccgttcagttgcaagtttgtgcctatctttgtaagcaggatacttctcatcagcaaaaccttcaactgtcttggacatcaattggaatgaggacgcgacattttcgtcatccaagacatcattgggatccctctttccgtatgttgttatggctgtaccatctccagcgttttttagcattagagcttccagtgggccctttggtttcctccttggagagccactgatggaggaggctaaactactgctgtcatccttgctccttccccaccttttgaatttttgcatcagattagaccttttgcttaggaagctgtatctgctggaagaactgtcaattgacatgttgtcaaagtcttcgcttccaggtgaagaaggcattgaagaaacaacactctcaaggtctgtgtcaccctgaccccgttcagatcctgcgtactccaacatcagttgtttggccctctcctgtgatttggggctcagtgtcctgttaagatcacgtgcagagaccttccctgatggagtctgataattgcggagctcgaatctcagacaggcattgacccagcgcagtctgaaaacagggacccttgaatgaagaattcaaatgaagagaagaaacctaaggaaaggagagcagaacaagattggtacctttgctgtgcctggccccactgttagctctctgaagagttaaagctgcgacggaggctacaacgacaaagcctaatctcacaagcatgactccgttcactcatcactctgctggcctcaaccggcaggagggccgagacggggagccccctctactcatcaaaaaatggtgacccggagttagagcagcagggaggaaagaacgcctcttcgtggctgctgctttggcccggccgtgaagtacagagcgaaagacttgtggcttggaagccggtaggcccatttgctatgcacgggatgacgagaatgggtggtgctggcctgctgggtatcacaagaaaaatgacgaggggagttatcaggctcacaggatggagcatgtcgttaccctgacatggatcagtctagatttgtttcatccaaagcaatactggatttttttttcttgtttcactgtatacgctggaaaactaggacagattttgactgggcgtaattggaataactgacctagttaactgct

SEQ ID NO: 136396 - DNA, 2373 bp, Zea Mays
actaggaccagacctgggtcctgggcagttctttggaagcgccaagcccccgcaaccggcacgaaccgccacttccccacacgccccctcgccctcgtgtcaccaccacaccacccgcgcgccacggcctcggcctcgctgccctgccctgccccgccctccacaccgcgacgcgctccccgcggcaatcgggcgtccccaggagcacgcacgtccttccgcggcccgcgcggccgcgcccaatgcccagggcgcgcggtttatgggcggccgcgcccggtccttcctccgctggctccgtcaccgctcccgccgcgtctcctcctcttcctcctgctccttccacctgacctccaccaccgctaacaataacgacagcaccgacacaagcgaagacctccgtgcccgctcgctcccgcaccagcaccgcgccggggaggagagggaggttgaagcagaggaggagcgggaggtcggagaagagatcgccgccgagggccccgagcccgcgtccgaggtgtgcattgtcttgggggatccggagccgggtgcaggaccgcgcgcaccgctgcgcaccgagccgccacgcatggatccgagcaaaaaggaatctgaattcttcaccgagtatggtgaggcaagccggtatcaggtcagtgaagtcattggcaaagggagctatggtgttgtggctgctgccgtcgacacccagactggtgagcgtgtggctatcaagaagatcgttgatgtctttgatcacgtctccgatgcaactcgcatccttagggagatcaagttgctccggttgctgcgtcacccagacttagttgagatcaaacacattatgcttcctccttcgaggagggaatttagggatatctatgtgatctttgagttgatggagtcggatctccatcaagtaataaaagcaaacgatgatctcacagcagagcatcaccagttcttcttgtaccagctgctccgtgggatgaagtacatccatgcagcaagcgtcttccatcgggatcttaagcccaagaatattctagccaatgctgactgcaagctgaagatttgtgattttggccttgcccgcgtttcattcaatgacactccatcagccatattctggacggattacgtggccactagatggtatcgagctccagaattatgtggctcctttttttcaaagtacactcctgccattgatatttggagcgtagggtgtatatttgctgaattgctcacagggaagccactctttccagggaagaatgttgtgcatcagttggatcttatgactgatctacttggtacaccttcagcagagtctatctccaagataaggaatgagaaagctcgacgatacatgaacaatatgaggaaaaagcctcgggttccctttactaaaaagtttccagggataggccctggcagatccatactttaatggattagcaaataatgaacgtgaacccatagcacaacctatctcaaaacttgaatttgagtttgagaagcggaaactggccaaagatgatgtccgagaattgatttaccgagagattttggagtaccatcctcaaatgctacaagaatacctacaaggagcagaccacaatcagatgaccttcatgtatccaagtggggtggatcgcttcaggcgccaatttgctcatttggaagaaggtactgcaaagggtgaaaaacacagtccacagctgcgacagaatgtttctttgccaagggaaagagtaattggcaataaacatggagatggcaatacaggtgataagctagcgcatgcctcagtgacggatggcatcagccaaccgagcttgagtgagagaagctttctgaagagtgaaagcatcagtgcttccaagtgtataggtgaaaaaccgaagcatgtcaaagatggagaatctgttttagagagcgtggatgaaacagtcgatgatttgtcgaagaaaattcctcaactgaaaacctgatttttctcaagttcactggagcaatgaatagctcgtagtatggcacgttaggttctcaagacgatggacctacggcaaaggtctatagccaatgagaccacaagttctaatgccagtaattctgttgtgatgtaaatttcctcccatttgtgtttgtacttcgcgactgcaaacaacctgtttctgactaaatggctcgtgttttcctccgtggagccatcaccatattctgtaaattttcagttggaagtgaatcttcagctgcagaggcatatttgattttcccccagcaagtaggcctaggcattcagttaattctgtaaagttggttatggaaattttcagttttgacaaaatgttaactgaatttgctacc

SEQ ID NO: 136397 - DNA, 2480 bp, Zea Mays
actaggaccagacctgggtcctgggcagttctttggaagcgccaagcccccgcaaccggcacgaaccgccacttccccacacgccccctcgccctcgtgtcaccaccacaccacccgcgcgccacggcctcggcctcgctgccctgccctgccccgccctccacaccgcgacgcgctccccgcggcaatcgggcgtccccaggagcacgcacgtccttccgcggcccgcgcggccgcgcccaatgcccagggcgcgcggtttatgggcggccgcgcccggtccttcctccgctggctccgtcaccgctcccgccgcgtctcctcctcttcctcctgctccttccacctgacctccaccaccgctaacaataacgacagcaccgacacaagcgaagacctccgtgcccgctcgctcccgcaccagcaccgcgccggggaggagagggaggttgaagcagaggaggagcgggaggtcggagaagagatcgccgccgagggccccgagcccgcgtccgaggtgtgcattgtcttgggggatccggagccgggtgcaggaccgcgcgcaccgctgcgcaccgagccgccacgcatggatccgagcaaaaaggaatctgaattcttcaccgagtatggtgaggcaagccggtatcaggtcagtgaagtcattggcaaagggagctatggtgttgtggctgctgccgtcgacacccagactggtgagcgtgtggctatcaagaagatcgttgatgtctttgatcacgtctccgatgcaactcgcatccttagggagatcaagttgctccggttgctgcgtcacccagacttagttgagatcaaacacattatgcttcctccttcgaggagggaatttagggatatctatgtgatctttgagttgatggagtcggatctccatcaagtaataaaagcaaacgatgatctcacagcagagcatcaccagttcttcttgtaccagctgctccgtgggatgaagtacatccatgcagcaagcgtcttccatcgggatcttaagcccaagaatattctagccaatgctgactgcaagctgaagatttgtgattttggccttgcccgcgtttcattcaatgacactccatcagccatattctggacggattacgtggccactagatggtatcgagctccagaattatgtggctcctttttttcaaagtacactcctgccattgatatttggagcgtagggtgtatatttgctgaattgctcacagggaagccactctttccagggaagaatgttgtgcatcagttggatcttatgactgatctacttggtacaccttcagcagagtctatctccaagataaggaatgagaaagctcgacgatacatgaacaatatgaggaaaaagcctcgggttccctttactaaaaagtttccagggatagatcctatggctctccatttgcttgaacgtcttcttgcttttgatcctaaggaacgaccaagtgctgctgaggccctggcagatccatactttaatggattagcaaataatgaacgtgaacccatagcacaacctatctcaaaacttgaatttgagtttgagaagcggaaactggccaaagatgatgtccgagaattgatttaccgagagattttggagtaccatcctcaaatgctacaagaatacctacaaggagcagaccacaatcagatgaccttcatgtatccaagtggggtggatcgcttcaggcgccaatttgctcatttggaagaaggtactgcaaagggtgaaaaacacagtccacagctgcgacagaatgtttctttgccaagggaaagagtaattggcaataaacatggagatggcaatacaggtgataagctagcgcatgcctcagtgacggatggcatcagccaaccgagcttgagtgagagaagctttctgaagagtgaaagcatcagtgcttccaagtgtataggtgaaaaaccgaagcatgtcaaagatggagaatctgttttagagagcgtggatgaaacagtcgatgatttgtcgaagaaaattcctcaactgaaaacctgatttttctcaagttcactggagcaatgaatagctcgtagtatggcacgttaggttctcaagacgatggacctacggcaaaggtctatagccaatgagaccacaagttctaatgccagtaattctgttgtgatgtaaatttcctcccatttgtgtttgtacttcgcgactgcaaacaacctgtttctgactaaatggctcgtgttttcctccgtggagccatcaccatattctgtaaattttcagttggaagtgaatcttcagctgcagaggcatatttgattttcccccagcaagtaggcctaggcattcagttaattctgtaaagttggttatggaaattttcagttttgacaaaatgttaactgaatttgctaccaaatactccattctaaattacaagacattttgattt

SEQ ID NO: 136398 - DNA, 538 bp, Zea Mays
gctttgccagccttaccgtccctacggcacgacgtctctaacgtcggcgaccgcgacgacgacgcccccgcgtatcccctcctcgcgtgctccgttcgcaaacgctgcctccatctcctgcaggtgcggccatcctgtcacccccaaaaatctcagaatcgtagctattagggtttctacctgtcgatctagaaataaaccatccgtccgaacgcgctgcggaggttggtggcacggcgaggctgtggctattcgtgtccggagacgagcagcgtgagataacacggctccacctcctacccctcccaatcgacgcaagcctctactgcgaacccgtgaagaaatgcgcggacgacaccgaagccacgccgccgcgctcatgcacccgcacgaccgacgatggccgcttgatgcaatatccgacgacaaagaaaaaggtccagagacacaattgaattgccgtccaaaagatcacattctgcaacaatatctcctacattaaatattttatgctttctttgatatcgtcattccagtt

SEQ ID NO: 136399 - DNA, 97 bp, Zea Mays
caggaactgagattgtggcagcggggggcagggttgagagatttatggtttgattacataatcggtggggccttgagattgcgtgtggatgcgggac

SEQ ID NO: 136400 - DNA, 1619 bp, Zea Mays
gccgctaattgagcacacgttcgtcttcctccttccgtcccccggcgtccttatccccacacaagcgccgcttaccgccgggacaggactgttggaagtccccagacggcagcgatggcggaactatcgacatcttcggatggattggtggacgaagaagcgaggcagcaggaaccaggttcaatttggcaagggatgctcctgtagtcctgttctctttggcttttatatgctaattgcttgtgctgctaaccgttagggtttcatcgccttgcctgttcgaagggttaggggttcctactgtccaaattcacctgatccaacctcgtccgttcataccgtttcctgatacgtactacaccacatcccggagatgtgttcactttcaattttgaaggcctgtactgtactgtaccctagttactaaaccttgggtttccctcgtctctcgcttcatttaggatacgtacgacgcttaagtcattcagatcggctaacctatccggtggaatgagtactgtctgcgaatctacatcatgcctttgtgaattttccttcaactttagtagtattattaaattatacccgttttgagcccatacgcttaaaagaggggaaacagtaatattatagctttaacgaacacacgattggagtgtcaagcatggatcatatttcctctgttcctgtttatatagtaccatccgtgatgccgttatagtatttatggaagtcaaactttttttgctggactgcatacaggacaaggaagcgctgaaggtagccatggtctgcaagacacaaaggagcaggacataaaaaagggaaaggcggctcttgtttccactgaactgctgagggaggatctggttcagagtgctgttagttttctgaaacacccgaaagtagtagcctcttcagatggacagaggcgatctttccttgtaaataaaggactcaccatggatgaaatagatgaagcatttcgacgtctacaaagcccgtcatcgaattctgcgagctcaaatatgtgcacatctcaagagagggtggaacctgaagctggacctgtggcccctgtggtacctcgtcatccaaaatcatatatggagatcatggaaatgatacaaaggggtgagcggccagacgatatacaggatattaacgatgaccctccaaatcctgatcaaccaatctcagaacctcgtatggcaccgaaaccaaagccatgggaaaagcaaggtcaagggagtttggcctgtgatttgaaatcgctgccaagggaatccgacgtgctgaggtcagaagttcagcacgacgacggcaccaaccaggttacggagtccgccgatggcgccaaccaagcggactcattgctgcaggcaggcgtagctgctggatctgaatctcctggggttccagatgacgccgcttcttcgcttgagtaaccaccgcgaaaataaatgaatgacgccgtaatcagacgcgaaaacaaacgacctcattaccacaacactgttctgatatttttgggtcctgagagagccacttgagttcacaataaatgtagtacccatcactggatgatcttttttagttgctggaaccatatgatatga

SEQ ID NO: 136401 - DNA, 920 bp, Zea Mays
ctaattgagcacacgttcgtcttcctccttccgtcccccggcgtccttatccccacacaagcgccgcttaccgccgggacaggactgttggaagtccccagacggcagcgatggcggaactatcgacatcttcggatggattggtggacgaagaagcgaggcagcaggaaccaggacaaggaagcgctgaaggtagccatggtctgcaagacacaaaggagcaggacataaaaaagggaaaggcggctcttgtttccactgaactgctgagggaggatctggttcagagtgctgttagttttctgaaacacccgaaagtagtagcctcttcagatggacagaggcgatctttccttgtaaataaaggactcaccatggatgaaatagatgaagcatttcgacgtctacaaagcccgtcatcgaattctgcgagctcaaatatgtgcacatctcaagagagggtggaacctgaagctggacctgtggcccctgtggtacctcgtcatccaaaatcatatatggagatcatggaaatgatacaaaggggtgagcggccagacgatatacaggatattaacgatgaccctccaaatcctgatcaaccaatctcagaacctcgtatggcaccgaaaccaaagccatgggaaaagcaaggtcaagggagtttggcctgtgatttgaaatcgctgccaagggaatccgacgtgctgaggtcagaagttcagcacgacgacggcaccaaccaggttacggagtccgccgatggcgccaaccaagcggactcattgctgcaggcaggcgtagctgctggatctgaatctcctggggttccagatgacgccgcttcttcgcttgagtaaccaccgcgaaaataaatgaatgacgccgtaatcagacgcgaaaacaaacgacctcattac

SEQ ID NO: 136402 - DNA, 1364 bp, Zea Mays
ctaattgagcacacgttcgtcttcctccttccgtcccccggcgtccttatccccacacaagcgccgcttaccgccgggacaggactgttggaagtccccagacggcagcgatggcggaactatcgacatcttcggatggattggtggacgaagaagcgaggcagcaggaaccagggtttcatcgccttgcctgttcgaagggttaggggttcctactgtccaaattcacctgatccaacctcgtccgttcataccgtttcctgatacgtactacaccacatcccggagatgtgttcactttcaattttgaaggacaaggaagcgctgaaggtagccatggtctgcaagacacaaaggagcaggacataaaaaagggaaaggcggctcttgtttccactgaactgctgagggaggatctggttcagagtgctgttagttttctgaaacacccgaaagtagtagcctcttcagatggacagaggcgatctttccttgtaaataaaggactcaccatggatgaaatagatgaagcatttcgacgtctacaaagcccgtcatcgaattctgcgagctcaaatatgtgcacatctcaaggggtgtttgatcattcatgcaggattactgaggaaattaaagtcgatagaaagtgtatgaatggtttagtcattttggctttttaggtatgtagattttgctgtgcacctaactctaagcctagacacatagtaaaaacaatatatctagaaaagccaaaatgacttacaatttgaaaaaggagggagtactttcatttatagagagggtggaacctgaagctggacctgtggcccctgtggtacctcgtcatccaaaatcatatatggagatcatggaaatgatacaaaggggtgagcggccagacgatatacaggatattaacgatgaccctccaaatcctgatcaaccaatctcagaacctcgtatggcaccgaaaccaaagccatgggaaaagcaaggtcaagggagtttggcctgtgatttgaaatcgctgccaagggaatccgacgtgctgaggtcagaagttcagcacgacgacggcaccaaccaggttacggagtccgccgatggcgccaaccaagcggactcattgctgcaggcaggcgtagctgctggatctgaatctcctggggttccagatgacgccgcttcttcgcttgagtaaccaccgcgaaaataaatgaatgacgccgtaatcagacgcgaaaacaaacgacctcattaccacaacactgttctgatatttttgggtcctgagagagccacttgagttcacaataaatgtagtacccatcactggatgatcttttttagttgctggaaccata

SEQ ID NO: 136403 - DNA, 1108 bp, Zea Mays
ctaattgagcacacgttcgtcttcctccttccgtcccccggcgtccttatccccacacaagcgccgcttaccgccgggacaggactgttggaagtccccagacggcagcgatggcggaactatcgacatcttcggatggattggtggacgaagaagcgaggcagcaggaaccaggacaaggaagcgctgaaggtagccatggtctgcaagacacaaaggagcaggacataaaaaagggaaaggcggctcttgtttccactgaactgctgagggaggatctggttcagagtgctgttagttttctgaaacacccgaaagtagtagcctcttcagatggacagaggcgatctttccttgtaaataaaggactcaccatggatgaaatagatgaagcatttcgacgtctacaaagcccgtcatcgaattctgcgagctcaaatatgtgcacatctcaaggggtgtttgatcattcatgcaggattactgagcaggaaattaaagtcgatagaaagtgtatgaatggtttagagagggtggaacctgaagctggacctgtggcccctgtggtacctcgtcatccaaaatcatatatggagatcatggaaatgatacaaaggggtgagcggccagacgatatacaggatattaacgatgaccctccaaatcctgatcaaccaatctcagaacctcgtatggcaccgaaaccaaagccatgggaaaagcaaggtcaagggagtttggcctgtgatttgaaatcgctgccaagggaatccgacgtgctgaggtcagaagttcagcacgacgacggcaccaaccaggttacggagtccgccgatggcgccaaccaagcggactcattgctgcaggcaggcgtagctgctggatctgaatctcctggggttccagatgacgccgcttcttcgcttgagtaaccaccgcgaaaataaatgaatgacgccgtaatcagacgcgaaaacaaacgacctcattaccacaacactgttctgatatttttgggtcctgagagagccacttgagttcacaataaatgtagtacccatcactggatgatcttttttagttgctggaaccatatgatatgagcatt

SEQ ID NO: 136404 - DNA, 1414 bp, Zea Mays
gcccagctccgaaataccacaaacacccccaatcccacccagaatccggcggaagtcaagccaacctccgtcctccatccatgggcgagcaatccctctcccagcccaagccccagcctctctccccgttcccgtcgcctcccgcctccgccgcgttgccgccccccgcctctgcctctgcctctgcctctgcctctgctgcctccacctcccgcaccaccagcgccgcggcctcgcgccccaagaagaaggtgacgaacccatcgcccgaccgtaacccggcaaagaagccccgcctgacgttctcgatcccgggccggcccctgtccgcagtcggcgaggtgggcgtggccatccgctacctgcgcgccgcggaccccgccctcgccgccgtcatcgacgcgcacgagccccccgtgttccagtgcccgcaccgcccgttccactccctcgtccgatccatcctgtaccagcagctcgccttcaaggccgccgcctccgtctactcccgcttcctcgcgcttctcggcggcgagtcctgcgtggcccccgatgccgtcctcgcgctcaccccgcaccagctccgccagatcggggtctccccgcgcaaggcttcctacctccacgacctcgcccgcaagtatgcctccgggatcctctccgacgccgccatcgtcaacatggacgaccgctccctcgccgccatgctcaccatggtcaagggcatcggctcctggagcgtccacatgttcatgatcttctctctcgcgcgccccgacgtgctcccctccgccgacctcggcgtgcgcaagggcgtgcagatgctctacgccctcgaggacgtgcctcgtccgtcgcagatggacaagctgtgcgagcggtggcgcccctatcgctcagttggggcttggtacatgtggcggctcattgaatccaaggtgccccagccggcgccagccatccctgttggatcacttgctttcccttcgccggacggccagagtatgctacagcagcaagaacaacagcaacagcagactgtcatccaaatgatcgacccccttcagatgctcccagggatggggtgaattcggtatcacttctactcattagttactccgtcttagatcaatcaatggttactctgtgcatctgatagtcagctccacacgttgttgttctggaatggaaccgcaggagggtagaattggatatgaaatgaggtttgggcccaacttattaagttgtcaatttggtttgtgttgtttatctgtgtcaagaatctgtgaagatcatggttggctgttgtttacattgtaaaatccacctagcggtattttagaaccttctggaattgttccatgcttgtagttcacctgtgataaaatgattaagaccatgcttaacacaagaa

SEQ ID NO: 136405 - DNA, 2010 bp, Zea Mays
cgcgcccgcgcggccatgtgcaccgagaactacgacgcgtgctacccagaccagccggtggtcgaccgctacctccccgtgtgggccaagctgccggcgttcgccgccaagccggccttcgtctgggccgacgacgacgcggcgtcgacgcgcaccgcgctgacttacgcgcagctcgacgccaccgccgcatgcatggcgcgcaacctcctcgccggcaccggcaccggcagcctccgccggggcgacgccgtcctcgtgctcgcctcgccgggcctccgcctcgtcaagctgctcttcgcgtgccagcgcgcggggctcacggcggtacccgtcgtgccccccgacgacccggccacgctcagcggccccgcgcacgcgcacctcctgcgcgccgtgtcgcaggccaggccggctgccgctgtcgccgacgccggttacatagacgccgtcgccaaggcggtcgcttcttccgtcgccgggggcgagaacgcccgcctggctgccatgctggggagcctgcgctggctggccgtcgacgagctggagcgcgtgtgtgatgggccgcagacgccgtacgtgggctgtgggccggacgacgtgtacctgatccagtatacctccggagcgacgggcgtcccgaggcccgtggtggtcaccgcgggctcggcggcccacaacgtgcgggccgcgaggaaggcctacgacctgcaccccggcagcgtcgtcgtgtcgtggctgccgcagtaccacgactgcggcctcatgttcctgctcctcaccgtcgtcgccggcgccacctgcgtgcttgccgccccgggcgcattcgtccggcgccctgacctctggctcgaactcgtctccgagttcggggccacgtgcacgcccgtgccgtccttcgcgctgccgctcgtcctccggcgcggccagcggcggcggccgcttcagctcggcagcctgcgcaacctcatcctcatcaacgagcccatctacgagtcgcgcgtcggcgagttcgtggaggcgttccgctgccacggcctgcgcgccgcctccgtctcgccgtcctacggcctcgcggagaactgcaccttcgtgtccaccgcgtggcggccgagcgcgtgctctgaatctgatcgcctcccgtcctacatgaagctcctgccgtcggcgaggctatctccggccgcggcgaacgaggtgccggctgagatcgagatcgccgtcgtggacgagggcacaggcgaaccggtggaggacggcgtggagggtgagatatgggtgtcctcgccgagcaacgcgtcggggtacctcggccacccgtcggcgagccgcgaggtgttctgcgcgcgggtgccggggcggacaggcgcgtgcttcgtgcgcacgggcgaccgcggcgtagtcaggggggctgagcggtacctgtacgtcgtcggccggagcgccgacgtcctcgcgctcgacgcaggacggcgccacgtgcacacgcattacgtagagacggcggccttcggcagcgcgtcgggtcgcctgagaggcggctgcgtcgcagctttcgcgacgtcgtcgtcgacgccgtggtcacgttcgcagatcggcgtcgtggccgtcgtcgcggagctacagaagggaagcgccggcgtcggcgatcacaggggcctgtgcgacggcataagggcagcggtgtggcgggaagaaggcgtcagggttggtttggtcgcgctggttgacggtggggtggtgcccaagacgacgtcgggcaagttacgccgtggggcggcgagggagatgctggccgccggaaagctctcactggtctttgaaacacgatacgacgactgtgatggatcggtggctggggtgagaggcgaagaggaggagacagcggcgaagtccggagctagttggctggaaggagagggcggagagaccggcatggctaccgaagccttcgggagcgcgagccgtcgtcttcgcttgcagtcatttctttagcatgagtgttgggta

SEQ ID NO: 136406 - DNA, 1471 bp, Zea Mays
gccctcgactcgcctcgccgcagggggtcacggtcacgccgcctccctccgctgccggcctgctcagcctccctccgccggtcctttcccacggtccacacgcgatcaaaagcgcaaaagccaaccccgacgaaacgacgagacggatacgagtgatagactgatagctaacgctacccacagcagcaactataccagccagcggaccccgacgccgccccaagcccccagcaggctgcagcccctgcgacatagtgggggagcgggtcttcttgagcggcgtcgctctcacgtacggcgtcgggtactcgtcgcggcggcagggagctaggggcaggcatgcgctgatggaattcaggggccaggaggaggaggagcagcccgtctcggaggagatgggcgccagctccgcgccgtcgtccgcccccacccccgccccggggaaccaggaccacgccgccgaggcgaggtaccacgagtgcctgcggaaccacgcggcggcgctgggcggccacgtcgtcgacggctgcggggagttcatgcccggggacggcgacagtctcaagtgcgccgcatgcggctgccaccgcagcttccaccgcaaggacgacgcgcgccgccgccaccaccaactcatgctcccggcgaccgcgacgtcctctcgcgtcccgctgctcctgcctccgccccacccgcactacgcgccgccgccgttcccgtaccacggcacgcccagcggcggcggcggcggcaccgccaccgagtcgtccagcgaggagcgcggcccgccgtccggggccgccgccgtgcaggcgcagggccacgtccggcggaagcggttccggaccaagttcacgccggagcagaaggagcagatgctggcgttcgcggagcgcctcggctggcggttgcagaagcaggacgacgcgctggtgcagcacttctgcgaccaggtcggcgtgcgccgccaggtattcaaggtctggatgcacaacaacaagcacaccggcaggaggcagcagccgcacctgccgccgccgcaggggcagcaacagccccaacagcagccgaagtagccacggtgggagacaaggctcagcagtcagcagcaccatcacagccacgccaccatttgcttaatcccccgcctcatttttttatgggctccgagaggtgtgggattaaacaagggaagtgaaggagggctcctatcctctcttcccttccgtttttgggtttcaccttatccttcattttttgtagtcacttctttcaccattgtcttttgcctcaccattcttgtctgcacatctttgatttcttctgttcctagttcgggggatcaattggaaggaggaagaggcactgtgcatgcttcgtagctacattcctgctaccttgttgccatttgaccccccctcggacagcaagattaaccaatctaataagatctctctactttgctctgaaa

SEQ ID NO: 136407 - DNA, 583 bp, Zea Mays
caaataaacccatagcaaccacgcctcatagtctcagacaatggatgatgcaatgacctagctagtgttcctagagaaatttaaaggcgggcatggataatgcgggatgcggaactcacctaccggttggacgaggagtaggatgcctgcccggcaacaaatcgatccccgctcttccttgcttcgatccgagacggtgtctccaagacaccaagcgctgccccgatcggatcaccgggcgggcctcggcgacgacgggcgtggctacgccgggggcggctgcggaggcgtcgccggcccacccggaccccctgtgggtccgccactgggcgtcgcgtgggcggatcggaggttggtgccgtcgtgcgaggccacggctccgcgagcacaacaatccggaaaacacacggacttcggagtgcggtggcttggcagcgagcgagatggaacatggaagcacggagagcgcgagggaaactgcgagaggcaggcggtccgggaaccactgcggtgcgtgttgctgccgacgatgggctctgttctggtgaatgacaccgacgtgttagagtcgtgggccttttga

SEQ ID NO: 136408 - DNA, 4745 bp, Zea Mays
cccgagtaaagccctgcccgcctgcctgctcgcccctgtccctgcgcttggcctccgcttcgcctcccacagtcccactcccccaacctcgctctcgcctcccctcccgctcccccctccattcctctcctccttcgcccccccaaaaccctgtgcacagagggtggaccagggtgtagggagcggggcggtgagaaagccctagcgcgctcgcgcgtggcgcggccatggacgcggcgcgtagggagaggaggcaccaccggaaggcagcggcggcgggagcggtgggcgttggtggcgtgggaggaggaggagcggcggcggcgcgggcggcgtacggggacgtgttcggcggcccgccgcgcttcgcagcgccgttcggggccgcgccgctggactacgccgaggtgttcggcggcgtcgcggcgacctgctccatcccgtacctagacctgccgcccgcgccttcgctcgccgccgccgagggcttcttcgcctgccgcgggaagggggactacggggagatcttcggccgcttcgacttcgccgactttgcgctgccgtacgaggacctcttcggcgagccgcagccggagcccgttcccgacgccgcaggggagacggacccggagatcgcctcgtccagcgggagctccaccagatcatcgtttagaaaagaatccagccagctggaggatgagccttctatacttcctcaacactatcaaaatctggatcatcatcagcattttaaagaccataagttttctccaatatccttctctacagacacagaaagtccgcagtttgtgatgtcatataacaagactgctgagaggagacctgatgatctaattgagatgatgacctgcacagttaaaccttcggtggactttgtgattgattctcgcaattcattacatggtccagcaaccaatcatgtttcaagaattgattatggaacaatggccaatgatgatagtaataagaaaccaagccctgctaacacgagtgtgcagagtgctgagagtgattttgcagttgatcagaagcagcaaagtcaatcatggacacctatttctggaagtatatctgcaaacgaaaatcacaagaactctgatagtcattcaacacgtagtactgtaacgcctcctgattatgcatttcttcaggtatctgacagtgatacacagacacaatcaatcaaagtacaacaaccattgaagcaacaacctaaactgctcaacaagaaagagagtgcagctaaagaagacgtcaggattgtagacgacaattgctctccaacttctgcacatatcacttcaagtagcaacatgtctcacactgacaagaaagttgatgccaatccaacttctgcatcagcagctatgaaggaggcaatgaattttgctgaagctaggttaaaggctgcaaaagcattgttagagggaaaaggtgacagttttaaattgcggaagaagccaagtcatcttaaaagcacaaggtctacagaaatcaagtctcctatttctgtagaggccgatacttctgaacaaaaactatgggtgaaaaagtcatcggaagaagaaaagaaccctgacgattctttgtctgacaagcacaaaaagctgactgcagtcagattagatcattttgatgacaatggaaaaaaggtacttccattggagaagcctgagcatatggtgcaacactgcactgaatcctgtcaaacttccagtaaactacaaaaactaggcaactggaagtcaggtaatgacttttttgagctaacccgagatgatcagaaatgcaaaaatgatgaagccacagagggaggtgataaatgtgagcaaatgaatcctattactagtgtcatcaatgatcacaatgaaattgaattcaatgcagcaggctctgacttggacaggtatgaaaaactatgggaggttaatgatggcaggagtgtgggggtgaaacctgtaaatctgagagagaacaagacagctcccgtggacaaagatagtgtgtctgtgattttagaatcttctacagaaaataaggcacaccaaaagactcacaactcaattggtgagggacttgtaacactgaaaaatgctaaggaaagccatggtactgataagtgctttgagcttccttctatgagtggagcctccacaaagctggatgtcttcaaggatgtgtcaggttcatttccggaggctcgctcatcagtaaatgccagcgatcttggagaccatggtaatattagtccaaacttaagtccattagcaggaacatcacaagaggacacaaccagtaaactggtatcagaagtatcttgcgatggtgggatgcaacacacttctcgtagtaatgaaaagctacaggaatcctcagatgtatctgatgttgctatttcccagggaagtaacattaaatcattcattttagaagaacttaaagaatctgatgtatgtgatgctttcatgaggggacctaatggaaaagggcaggaagctgaaaattatggaagagaaaaattcagctttattgatggatcactcttgctgcgaccacacttccataacaaaggtgctaagatgaatgtaatctctgaggaagtacagaaagtcaaaaatgaggagaaacttggtccgtgtacacaccccgaagtaacaattgtggatctggatggtgattgtcctaaagatttgaatgatgttattctacaaaatgatgactttgcagacccagaagaatcaaacatgcctaatgtatttgaggtagctagcaagttgattaaaagagatctggatcaagaaatgcatgggtcattaggacatggtgaagaggagaatatggaagaaggaacagatgtacatctttgtgatattaatggcaaagaagtagatgaaaccttgttagaaaatagtgtgtgtacagatactgaagaaggatgtgctcattgtaaccaggaagaccagaattcatctgacagcaccaacagaggaaaaagtgatgtagataacatgtgttatacatcttgtgacgaggttaggtctgaatcattttcaggcgatgaagttgttatcaaaactacaattgatagcactgccagaacatttgttaatttgaaagatgagcaggttttgtcttcagaaatgtatacccgcatgcagcactcaatgcaaaaagatggtactgctgcttttcagacatctgggggtgttcctggtcttgaagaaatcggggatgtttccaacagaggaggaagagaattatcaacagaaaggtctacatgtgaagatcatggcaacgcaatcataatggaagaaaaagacactacaacaaggatatcaaaggcagagcatgcatcatctcccttggagacgatgtgtggtgtaactaaatctgctgaagctcccacaacagttcctactgtgacacggaaaaaagaggtacatggagttcagaggaccaaagagagggagaacatgacaacagcagatagtgcatgtgaaaaggacaaagggtcttctcaaagagtacaggaggaaaacgaaagtgaaaggagattggagaaagaaagagaagttgaagagaaggaaagaaggaaattggagaaagaaagagaacttgccgaagagaaggaaagaaggaaatttgagaaagaaagagaacttgccgaagagaaggaaagaagaaaaatggagaaagaaaaagaacatgccgaagagaaggaaagaagtaaattggagaaagaaaaagaacttgctgaagagaaggaaagacataaattgaagaaagagagagaacttgctgaagagaaggaaagaagaagattagaagaggcggaaagggagagggagcgtaaaaaggatagacttgctgttgaaagagcgacaagagaagcacatgagagagcatttgccgaagctcgtgaaaaggcagaaaaaatggctttggaaagaattaatgctgcacggcagcgggcatctgcagaggcccgagagaaagaagatagagcaagtgtcgaaccagctgctgaaagggctactagagaagctaggataaaagcagaacgtgcggcagtcgagcgagcaactgctgaagctcgggagcgggcaatagaaaaggcaaaggctgagaaggctcttgcagaggcaagagagcggagggaacgatacaaatcctctttcaaggagagttttaagtccaccaatcaggatattcgacaggagtcacagtttcatagggcaacttctagtaatttcatccgaaacccagattccagcaacagagcaatggttgaggttgagtccgctttaagacataaagcaagattagagaggcatcaacgcacagctgagcgtgtgacaaaagctcttgccgagaagaacacgcgggacctgctggctcaaagagagcaagcagagaaacataggctgtctgaattcctggatcctgagatcaagagatggtcaaatggaaaggaaggaaatctgagggccctgctatccacattgcaatatattcttggtgccgatagtggctggcaaccggtgccactaacagatctcattacagcggttgctgtgaagaaagcttacaggaaggcaaccctatgtgtccatccagataaactacagcagaggggcgctacgatcagacagaaatacatatgtgagaaggtttttgatcttcttaaggatgcttggaacaaattcacttcggaggagcgctag

SEQ ID NO: 136409 - DNA, 168 bp, Zea Mays
attattattattattattattattattattattattattattattattattattattattattattattattattattattattattattattattattattattattattattaagagaacaaaaaaagtaagaagacaaacatttggcgttagaaaaatattcttt

SEQ ID NO: 136410 - DNA, 87 bp, Zea Mays
ggaaggggttgaaaaagacccggcctttgtggcctcctcaacggggagtaggtttgcgagaaccgaacctcggtaaaacaaatccgc

SEQ ID NO: 136411 - DNA, 789 bp, Zea Mays
aatatgaaccaaaggagataccaccggatataacatcttggataggttataaattcacttttgttgttagagtcctatcaaagaaaagtgtcaagactattgatccatcctttgaagtgcttatgataaaagaaaaataccaaaaggaacctattatatcatttatcagctcaagtggagttgtaccagcagaatcatcttcctctacaatggcagaatacaaggaattaccattgctaatgccaattacctccaaagacatagaaaaaaggagcgatccacttcacaaccagaacacaccgaagaaactcaagatatggacattgaaccatctggcatttgggaagaatctcagatttcaaacaaaagaagctttggagacccaaactatgacaatcaggaaacaactgatgacaaagatgatcttccacaattcaagaaaatcaagagtacccactctcaaggaaaaagcaaaaaatgatgcatgatagactaagaagacaaagtaaagtagtagactttaaaagatcttgactaaagtaatatatctatattttctgtttcgataaacaacgatagcgctagcactacatcttttgatgtatataaccatgtagtatcaatagcgctaaatcttaagcgtgtagcaccagcagcgctacatattttgatgtatataagcatgtagcatcaatagcgctacatcttttgttaaatataagcacatcttttgatatatatataagcatgtagcatcaatagtcttagctatggtgctaatcttacatt

SEQ ID NO: 136412 - DNA, 979 bp, Zea Mays
tggaaaaattcatgcaatgtgtggagaccttttatgatggtaatgatgaaaaggaatatagggctgttaatgaggacttggataagttccaaaagagacaaggatccttctcaaagaagatggcaaggagctgtgaacgctttgagttccaaccggcgtcttggtggaggctttatggaggtggagcaccagatttgcaatacatggctattagaatcctctcactgacatctagctcttctggatgtgaaaggaattggagcacctttgaacagcatcatacaaagagaaggaataggcttacaacagagcgtctaaactctctagtattcatccaattcaataataaattgctgtccaagaaggagaagattgccagaaagagtaattatgaagtgctcctaagtagtgatgcttctgaagctcaagggtttttctttgagggaggagatgatcatgcattggctgtctttagggatgaggaagatgaaggagtaatgccggggacagggataccatggagtgtccttggagaagcaatgggaactaatgaacaacttcaacctcgcaggagtgcaagagtggctagagagttgtatgatgaagaagagtgggaatctgaaactgaagatcctaatcatctagaagatgacattgcctatgaggatgatgaggagtgaggagattgcatgatggcagcatgctgccaagttatctaaatattaatatctagttatttacttatccaaatgtgtgtggactgtggaccataaaaccattaatgtgtgttgtattgttatttaatttgtggaccattaaggcatgtgatgaactgtgagtgttttctatatattttcttgtgatcctttgacttgtgaattgtgatgttgccctgttgtttggaagcttggctgtgcatgtacaatattgagctgcccctcatagatgagtttctactctttccaaagtatctgattgt

SEQ ID NO: 136413 - DNA, 682 bp, Zea Mays
ggatttgggagaggaatggtgggagatagcgccgtaccccgtggtcagccgccagtgtttcgcactttgctattcagcttcgttcttcaccggttcaccctagccgccaccccaacccccagcgacagggaccttcgccgccaggccgcccccaatccctagcgactgcgagcaccgtcgccaggcgccgtgcagcgagcgtcgccgcctggcgaagtcgcgcgactcgtgccctgcagcgagcgccgctgtcccgcacccaccgtcgaacggctgccgatgcccaacgccctgcagcgagttgcgccgtcgtccgcttcctctcgctggtaacctcgtgtttcgatttggacagattgctcgtgacttggtgttgcgccgccgaccgagcctccttcccctaagtccctaaccgtaagtcctaaatcttggtgagttctgttcatgtgcatttgagcttacgcatctatgatacgcgccttagggattgtgatctgtgattaggggttgtgaaattgagatgccattttagggattgtggaagtgtgaactgtgccttactgaaatcgagatgccatttgagcaagttttcaactattttgttggattggcgaggttatgagacctttccagatactttatatccgaattgttggaaaattatattatgctggtgtattac

SEQ ID NO: 136414 - DNA, 1499 bp, Zea Mays
ggatttgggagaggaatggtgggagatagcgccgtaccccgtggtcagccgccagtgtttcgcactttgctattcagcttcgttcttcaccggttcaccctagccgccaccccaacccccagcgacagggaccttcgccgccaggccgcccccaatccctagcgactgcgagcaccgtcgccaggcgccgtgcagcgagcgtcgccgcctggcgaagtcgcgcgactcgtgccctgcagcgagcgccgctgtcccgcacccaccgtcgaacggctgccgatgcccaacgccctgcagcgagttgcgccgtcgtccgcttcctctcgctggtaacctcgtgtttcgatttggacagattgctcgtgacttggtgttgcgccgccgaccgagcctccttcccctaagtccctaaccgcctaccctagtccaccacctgccgcagctctcgcctccgtcaagatccgaacccctcgcacgcggcacgaccaaatcctagacacctgatcccaatgcgcagggccctcggcagagagacgttactgcgccggcaccgtggatcggcactgctgtggctagctgtaacggcactggtcacaggcaccatctgcctctggtcgtccttctccgttggcctcctcagcacctacagggtccaggatgttgttgcaaatgagttgtggagaaccgtagattcaaatggttggagagcatcttctgcaccacgcatctgttggcctcccccaccagctgaatctgagagcaatgggtacttgcgtgtctggtgcaacggcggcttgacccaacaacgcagtgcaattacttctgccttgattttgtagatatgtaatgctgttgtcgtagcacgaatcatgaatgctacactagtgctgccagagttagacacaaattcattttggcacgatgagagtggttttgtagatatatatgatgttccccacttcatcaacacattgaaatatgatgttcgaattgtcatgagcattccaaaaatcactgcacaaggaaagaccaagaagctcaaagcatataagattttacctcctagagatgcacccgttacttggtacagaacaactgctttggagagactaaggaagtatggtgcaatatatttaactccattttcacaccgtttggcagaaaaaattgatgatccagagttccagagattgagatgcagggtgaattatcacgcactacgatttaagccaagtatcatgaaaacaagtagtgatatagcgaataagctccattcagaaggccatttcatgtcaattcatcttcggtttgagctggatgtgcttgcatatgctgggtgcttcgacatattcacacctgaagaacaggaaatcctgttgaggcatcggaacaaatattttccattgctgttgaggtattggggcaaatattttccaggaaacacacctgactacagggaaagaaggctcattggaaagtgccctttaactccagaagag

SEQ ID NO: 136415 - DNA, 1720 bp, Zea Mays
ggatttgggagaggaatggtgggagatagcgccgtaccccgtggtcagccgccagtgtttcgcactttgctattcagcttcgttcttcaccggttcaccctagccgccaccccaacccccagcgacagggaccttcgccgccaggccgcccccaatccctagcgactgcgagcaccgtcgccaggcgccgtgcagcgagcgtcgccgcctggcgaagtcgcgcgactcgtgccctgcagcgagcgccgctgtcccgcacccaccgtcgaacggctgccgatgcccaacgccctgcagcgagttgcgccgtcgtccgcttcctctcgctggtaacctcgtgtttcgatttggacagattgctcgtgacttggtgttgcgccgccgaccgagcctccttcccctaagtccctaaccggattgtggaagtgtgaactgtgccttactgaaatcgagatgccatttgagcaagttttcaactattttgttggattggcgaggcctaccctagtccaccacctgccgcagctctcgcctccgtcaagatccgaacccctcgcacgcggcacgaccaaatcctagacacctgatcccaatgcgcagggccctcggcagagagacgttactgcgccggcaccgtggatcggcactgctgtggctagctgtaacggcactggtcacaggcaccatctgcctctggtcgtccttctccgttggcctcctcagcacctacagggtccaggatgttgttgcaaatgagttgtggagaaccgtagattcaaatggttggagagcatcttctgcaccacgcatctgttggcctcccccaccagctgaatctgagagcaatgggtacttgcgtgtctggtgcaacggcggcttgacccaacaacgcagtgcaatatgtaatgctgttgtcgtagcacgaatcatgaatgctacactagtgctgccagagttagacacaaattcattttggcacgatgagagtggttttgtagatatatatgatgttccccacttcatcaacacattgaaatatgatgttcgaattgtcatgagcattccaaaaatcactgcacaaggaaagaccaagaagctcaaagcatataagattttacctcctagagatgcacccgttacttggtacagaacaactgctttggagagactaaggaagtatggtgcaatatatttaactccattttcacaccgtttggcagaaaaaattgatgatccagagttccagagattgagatgcagggtgaattatcacgcactacgatttaagccaagtatcatgaaaacaagtagtgatatagcgaataagctccattcagaaggccatttcatgtcaattcatcttcggtttgagctggatgtgcttgcatatgctgggtgcttcgacatattcacacctgaagaacaggaaatcctgttgaggcatcggaacaaatattttccattgctgttgaggtattggggcaaatattttccaggaaacacacctgactacagggaaagaaggctcattggaaagtgccctttaactccagaagagttaattgctgtggatgggggtacaaatttggctcagtacctagtcagattctggctcaagggtattgccaagcttggccctgcatctcagagaggcgatcgtaagtgcttgatctcccagcaccgtcaacttcctacgacaacagaattagcaccaatttag

SEQ ID NO: 136416 - DNA, 2867 bp, Zea Mays
ggatttgggagaggaatggtgggagatagcgccgtaccccgtggtcagccgccagtgtttcgcactttgctattcagcttcgttcttcaccggttcaccctagccgccaccccaacccccagcgacagggaccttcgccgccaggccgcccccaatccctagcgactgcgagcaccgtcgccaggcgccgtgcagcgagcgtcgccgcctggcgaagtcgcgcgactcgtgccctgcagcgagcgccgctgtcccgcacccaccgtcgaacggctgccgatgcccaacgccctgcagcgagttgcgccgtcgtccgcttcctctcgctggtaacctcgtgtttcgatttggacagattgctcgtgacttggtgttgcgccgccgaccgagcctccttcccctaagtccctaaccgcctaccctagtccaccacctgccgcagctctcgcctccgtcaagatccgaacccctcgcacgcggcacgaccaaatcctagacacctgatcccaatgcgcagggccctcggcagagagacgttactgcgccggcaccgtggatcggcactgctgtggctagctgtaacggcactggtcacaggcaccatctgcctctggtcgtccttctccgttggcctcctcagcacctacagggtccaggatgttgttgcaaatgagttgtggagaaccgtagattcaaatggttggagagcatcttctgcaccacgcatctgttggcctcccccaccagctgaatctgagagcaatgggtacttgcgtgtctggtgcaacggcggcttgacccaacaacgcagtgcaatatgtaatgctgttgtcgtagcacgaatcatgaatgctacactagtgctgccagagttagacacaaattcattttggcacgatgagagtggttttgtagatatatatgatgttccccacttcatcaacacattgaaatatgatgttcgaattgtcatgagcattccaaaaatcactgcacaaggaaagaccaagaagctcaaagcatataagattttacctcctagagatgcacccgttacttggtacagaacaactgctttggagagactaaggaagtatggtgcaatatatttaactccattttcacaccgtttggcagaaaaaattgatgatccagagttccagagattgagatgcagggtgaattatcacgcactacgatttaagccaagtatcatgaaaacaagtagtgatatagcgaataagctccattcagaaggccatttcatgtcaattcatcttcggtttgagctggatgtgcttgcatatgctgggtgcttcgacatattcacacctgaagaacaggaaatcctgttgaggcatcggaacaaatattttccattgctgttgaggtattggggcaaatattttccaggaaacacacctgactacagggaaagaaggctcattggaaagtgccctttaactccagaagaggtaggtcttattctacgtgctacgggatttgataactcaacatggatttaccttgctcctggcaagctctttggtgggaaacacttcatgaagccattcaaggctatgtttccacgtcttaaaaaccatagtatgatcagaagtggaaagctggaagaaaatatccgagggctagcagggtcagcagttgattacatggtctgtctcctgtcggacatttttatatatgatggtccgagcaacttcgcagacaatctcatgggtcatcgtctatactatggtttccgaaccacgatcacaccaaacaagaaggcccttgctcggatattcatggacagggaggaagggcacacatctgcatttgaggagagggtcaggcaggtcatgctcacccattttggcgccccccacaagcgcatccatccagagtctttctacacaaacccatggccagagtgcttctgccagacgaaagctaggaatcatgctgaccggtgcccacacaacagtgtaaatgatgtccttgaaagttggttccataataaagaagatgtagaagtggaagctactaatcaaactgactccaccagctaaaccgagagttggctggtggaactgagttatcaaaggtttattgattgagaacagattgtttgtcacagacctgcgaatgacatcattggaggaaggattgatggctccagatctctgtaggcgattatgttcgactcaagatttagttgttgagattcttagtctgggagggtcagaaccagattttggataggtttacattgtcatgtagagttctgtggaagaaaaatcatacgaacgtcatgaactatgtggctactacaattggagatctttaccccatatgctatagctgagtgtttggtggcttcagttctgttggagttatttgctgttcctcactatacatatctggttgaattcatgcgttcctggtcctggaactggaacttccccagttttgatttttgcaattcaccgtaatgctaaaaagtcgactatctccaggctccctatcccactccctatttcaaagttctctctgcaacaatacatctatagtgcaaaacagtgttatacacgcctgcatgcacgacgttgctggagttggcctaattccgggttgctggagttggcctaattccgggctccttcgaggtccatggcagcatgtaactgtattgatttgttctccttgtttgtagcctcacacttggttgaatatttcgaaaaatctagaattccaatattttttcttatttttattttgtttttttagtttctttagaaagagataacagtcctttgtacttgtatatatgtacacaacacatattaatgcaaaccatgtattgtgtc

SEQ ID NO: 136417 - DNA, 2528 bp, Zea Mays
gaatggtgggagatagcgccgtaccccgtggtcagccgccagtgtttcgcactttgctattcagcttcgttcttcaccggttcaccctagccgccaccccaacccccagcgacagggaccttcgccgccaggccgcccccaatccctagcgactgcgagcaccgtcgccaggcgccgtgcagcgagcgtcgccgcctggcgaagtcgcgcgactcgtgccctgcagcgagcgccgctgtcccgcacccaccgtcgaacggctgccgatgcccaacgccctgcagcgagttgcgccgtcgtccgcttcctctcgctggtaacctcgtgtttcgatttggacagattgctcgtgacttggtgttgcgccgccgaccgagcctccttcccctaagtccctaaccggattgtggaagtgtgaactgtgccttactgaaatcgagatgccatttgagcaagttttcaactattttgttggattggcgaggcctaccctagtccaccacctgccgcagctctcgcctccgtcaagatccgaacccctcgcacgcggcacgaccaaatcctagacacctgatcccaatgcgcagggccctcggcagagagacgttactgcgccggcaccgtggatcggcactgctgtggctagctgtaacggcactggtcacaggcaccatctgcctctggtcgtccttctccgttggcctcctcagcacctacagggtccagtgctactactcaaggatgttgttgcaaatgagttgtggagaaccgtagattcaaatggttggagagcatcttctgcaccacgcatctgttggcctcccccaccagctgaatctgagagcaatgggtacttgcgtgtctggtgcaacggcggcttgacccaacaacgcagtgcaatatgtaatgctgttgtcgtagcacgaatcatgaatgctacactagtgctgccagagttagacacaaattcattttggcacgatgagagtggttttgtagatatatatgatgttccccacttcatcaacacattgaaatatgatgttcgaattgtcatgagcattccaaaaatcactgcacaaggaaagaccaagaagctcaaagcatataagattttacctcctagagatgcacccgttacttggtacagaacaactgctttggagagactaaggaagtatggtgcaatatatttaactccattttcacaccgtttggcagaaaaaattgatgatccagagttccagagattgagatgcagggtgaattatcacgcactacgatttaagccaagtatcatgaaaacaagtagtgatatagcgaataagctccattcagaaggccatttcatgtcaattcatcttcggtttgagctggatgtgcttgcatatgctgggtgcttcgacatattcacacctgaagaacaggaaatcctgttgaggcatcggaacaaatattttccattgctgttgaggtattggggcaaatattttccaggaaacacacctgactacagggaaagaaggctcattggaaagtgccctttaactccagaagaggtaggtcttattctacgtgctacgggatttgataactcaacatggatttaccttgctcctggcaagctctttggtgggaaacacttcatgaagccattcaaggctatgtttccacgtcttaaaaaccatagtatgatcagaagtggaaagctggaagaaaatatccgagggctagcagggtcagcagttgattacatggtctgtctcctgtcggacatttttatatatgatggtccgagcaacttcgcagacaatctcatgggtcatcgtctatactatggtttccgaaccacgatcacaccaaacaagaaggcccttgctcggatattcatggacagggaggaagggcacacatctgcatttgaggagagggtcaggcaggtcatgctcacccattttggcgccccccacaagcgcatccatccagagtctttctacacaaacccatggccagagtgcttctgccagacgaaagctaggaatcatgctgaccggtgcccacacaacagtgtaaatgatgtccttgaaagttggttccataataaagaagatgtagaagtggaagctactaatcaaactgactccaccagctaaaccgagagttggctggtggaactgagttatcaaaggtttattgattgagaacagattgtttgtcacagacctgcgaatgacatcattggaggaaggattgatggctccagatctctgtaggcgattatgttcgactcaagatttagttgttgagattcttagtctgggagggtcagaaccagattttggataggtttacattgtcatgtagagttctgtggaagaaaaatcatacgaacgtcatgaactatgtggctactacaattggagatctttaccccatatgctatagctgagtgtttggtggcttcagttctgttggagttatttgctgttcctcactatacatatctggttgaattcatgcgttcctgg

SEQ ID NO: 136418 - DNA, 1589 bp, Zea Mays
tttggcccacacatggcaatggttactttgaggtccacaatagaccttgttccttgaaatatcatttctttaaagcacaaaaatgtgggatgacaatatatgaaaaataaatgtcatagccatcataaccgacttttctgatgaataaatctttccataaataacggaaaactgttctattttgtattgtcttgcaggtaggtcttattctacgtgctacgggatttgataactcaacatggatttaccttgctcctggcaagctctttggtgggaaacacttcatgaagccattcaaggctatgtttccacgtcttaaaaaccatagtatgatcagaagtggaaagctggaagaaaatatccgagggctagcagggtcagcagttgattacatggtctgtctcctgtcggacatttttatatatgatggtccgagcaacttcgcagacaatctcatgggtcatcgtctatactatggtttccgaaccacgatcacaccaaacaagaaggcccttgctcggatattcatggacagggaggaagggcacacatctgcatttgaggagagggtcaggcaggtcatgctcacccattttggcgccccccacaagcgcatccatccagagtctttctacacaaacccatggccagagtgcttctgccagacgaaagctaggaatcatgctgaccggtgcccacacaacagtgtaaatgatgtccttgaaagttggttccataataaagaagatgtagaagtggaagctactaatcaaactgactccaccagctaaaccgagagttggctggtggaactgagttatcaaaggtttattgattgagaacagattgtttgtcacagacctgcgaatgacatcattggaggaaggattgatggctccagatctctgtaggcgattatgttcgactcaagatttagttgttgagattcttagtctgggagggtcagaaccagattttggataggtttacattgtcatgtagagttctgtggaagaaaaatcatacgaacgtcatgaactatgtggctactacaattggagatctttaccccatatgctatagctgagtgtttggtggcttcagttctgttggagttatttgctgttcctcactatacatatctggttgaattcatgcgttcctggtcctggaactggaacttccccagttttgatttttgcaattcaccgtaatgctaaaaagtcgactatctccaggctccctatcccactccctatttcaaagttctctctgcaacaatacatctatagtgcaaaacagtgttatacacgcctgcatgcacgacgttgctggagttggcctaattccgggttgctggagttggcctaattccgggctccttcgaggtccatggcagcatgtaactgtattgatttgttctccttgtttgtagcctcacacttggttgaatatttcgaaaaatctagaattccaatattttttcttatttttattttgtttttttagtttctttagaaagagataacagtcctttgtacttgtatatatgtacacaacacatattaatgcaaaccatgtattgtgtc

SEQ ID NO: 136419 - DNA, 2538 bp, Zea Mays
acactcgtggttgtttaccgtgcgccgggctcctcccccacatgggcaagcgcaggcgcggcacggggagcagggcacacgcggcgtagtagcgccaagcgaggccgcggccacgccttctccaccgttcgtccgtccattcccattctcatttccatttgcctcgctcgccttcctcctccccactccactccattccaacgcaacggcctcgccccgctttataggccgccgcccgcgccacatcgccaccgtctcgcaccgtcgcggccacccattctctctcgtccatcgcatcgctccggctcccagcgcaatcgatccatccgtccctagtccgttattccgcgagtacgttgatgatccctccttacggcagtaaggattccgcaaaagtatggctcccttttcccttgattgatgcggggatttgtcaggaactaggcaagaaaatcagtttttttatatagtcttgccctgcatcttgattcagtacatagtgaaatagatttccaggactgcctggtggttaatggttgtgatcgtgcaggtgtgcttcagctatgcagttcagcagcgtgcttcccctagagggaaaagcgtgtatgagcccagtgaggagaggcagtggaggttatgggagtgagaggatgaggatcaactgctgcagcatcaggcgcaacaaggcactgaggaggatgtgtttcagtgcaaggggtgctgtgagcagcacgcagtgtgtgctcacatcagatgctggcccagacactcttgtcgtccgaacatcctttcggaggaattatgctgatcctaatgaagtcgctgccgtcattttgggtggtggtaccgggactcagcttttccctctcacaagcacaagggccacccctgctgttcctattggaggatgttacaggcttattgatatccccatgagcaactgtttcaacagtggcataaacaagatatttgttatgactcagttcaactcagcttctcttaaccgtcacattcatcgtacctatcttggtggggggatcaacttcactgatggatctgttgaggtgctggctgcaacacaaatgcctggggaggctgctggttggttccagggcacagcagacgccgttagaaaatttatctgggtacttgaggattattacaagcataaagctatagaacacattttgattttgtcaggagatcaactctatcgtatggattacatggagcttgtgcagaaacatgtcgatgacaatgcagacataactttatcatgcgctcctgttggagagagtcgagcatctgactatggattagttaagttcgatagttcaggccgtgtaattcagttctctgagaaaccaaagggtgctgccttggaagaaatgaaagtggataccagcttcctcaatttcgccattgattccccagctgaatatccctatatcgcttcaatgggagtttacgtttttaagagagatgttttgttagaccttctaaagtcacggtatgctgaactgcatgactttggttctgaaattctgcccaaggctttgcatgagcacaatgtacaggcatatgttttcactgactactgggaggacattggaacaatcagatctttctttgatgcaaacatggccctctgcgagcagatttccatccagactaatacagttttcatctcgtatgccccgtcgcagcctccaaagttcgagttttacgatccgaaaacaccattcttcacttcccctcggtacttgccaccaacgaagtcggataagtgcaggattaaagacgcgatcatttcacacggctgcttcttgcgtgagtgtgccatcgagcactctattgttggtgttcgctcacgcctaaactctggatgcgagctcaagaataccatgatgatgggtgcggatttgtatgagaccgaagacgagatctcaaggctactggcagagggcaaggtgcccattggcgtaggggagaacacgaagataagcaactgcatcatcgacatgaatgccagggttggaaggaacgtctccataacaaacaaagagggcgtccaagaagccgaccggccggacgaaggatactacatccggtctgggatcgtggtagtcctgaagaacgcaaccatcaaggacggcaccgtcatatagagactaactttggccttacgcatggcgtgcaaggttacaggttagtcatcgtcttgagagttgagacttagtttgaggcgcgcgcccgaccttgacttgagccgtcggagggacaagaacatgaggaagaagggctggtggtgccggatgttgccatggacgacgagaaatggtttggtgcggtcgcatcggttccagtagctagctcttccgatgttattaatatatgtatctagtggagtagtgcgaacagtgcaataagctgggcgagcaaagccgcggcaactcttggcttggggattgttggtgcatcttgtaaataataaactcggacgcagcaaatgaaacatgcccctcatcttcttccata

SEQ ID NO: 136420 - DNA, 2223 bp, Zea Mays
acggggagcagggcacacgcggcgtagtagcgccaagcgaggccgcggccacgccttctccaccgttcgtccgtccattcccattctcatttccatttgcctcgctcgccttcctcctccccactccactccattccaacgcaacggcctcgccccgctttataggccgccgcccgcgccacatcgccaccgtctcgcaccgtcgcggccacccattctctctcgtccatcgcatcgctccggctcccagcgcaatcgatccatccgtccctaggtgtgcttcagctatgcagttcagcagcgtgcttcccctagagggaaaagcgtgtatgagcccagtgaggagaggcagtggaggttatgggagtgagaggatgaggatcaactgctgcagcatcaggcgcaacaaggcactgaggaggatgtgtttcagtgcaaggggtgctgtgagcagcacgcagtgtgtgctcacatcagatgctggcccagacactcttgtcgtccgaacatcctttcggaggaattatgctgatcctaatgaagtcgctgccgtcattttgggtggtggtaccgggactcagcttttccctctcacaagcacaagggccacccctgctgttcctattggaggatgttacaggcttattgatatccccatgagcaactgtttcaacagtggcataaacaagatatttgttatgactcagttcaactcagcttctcttaaccgtcacattcatcgtacctatcttggtggggggatcaacttcactgatggatctgttgaggtgctggctgcaacacaaatgcctggggaggctgctggttggttccagggcacagcagacgccgttagaaaatttatctgggtacttgaggattattacaagcataaagctatagaacacattttgattttgtcaggagatcaactctatcgtatggattacatggagcttgtgcagaaacatgtcgatgacaatgcagacataactttatcatgcgctcctgttggagagagtcgagcatctgactatggattagttaagttcgatagttcaggccgtgtaattcagttctctgagaaaccaaagggtgctgccttggaagaaatgaaagtggataccagcttcctcaatttcgccattgattccccagctgaatatccctatatcgcttcaatgggagtttacgtttttaagagagatgttttgttagaccttctaaagtcacggtatgctgaactgcatgactttggttctgaaattctgcccaaggctttgcatgagcacaatgtacaggcatatgttttcactgactactgggaggacattggaacaatcagatctttctttgatgcaaacatggccctctgcgagcagcctccaaagttcgagttttacgatccgaaaacaccattcttcacttcccctcggtacttgccaccaacgaagtcggataagtgcaggattaaagacgcgatcatttcacacggctgcttcttgcgtgagtgtgccatcgagcactctattgttggtgttcgctcacgcctaaactctggatgcgagctcaagaataccatgatgatgggtgcggatttgtatgagaccgaagacgagatctcaaggctactggcagagggcaaggtgcccattggcgtaggggagaacacgaagataagcaactgcatcatcgacatgaatgccagggttggaaggaacgtctccataacaaacaaagagggcgtccaagaagccgaccggccggacgaaggatactacatccggtctgggatcgtggtagtcctgaagaacgcaaccatcaaggacggcaccgtcatatagagactaactttggccttacgcatggcgtgcaaggttacaggttagtcatcgtcttgagagttgagacttagtttgaggcgcgcgcccgaccttgacttgagccgtcggagggacaagaacatgaggaagaagggctggtggtgccggatgttgccatggacgacgagaaatggtttggtgcggtcgcatcggttccagtagctagctcttccgatgttattaatatatgtatctagtggagtagtgcgaacagtgcaataagctgggcgagcaaagccgcggcaactcttggcttggggattgttggtgcatcttgtaaataataaactcggacgcagcaaatgaaacatgcccctcatcttcttccatatcttcgcac

SEQ ID NO: 136421 - DNA, 2244 bp, Zea Mays
tgtacaaggaagaaaagatccaacccaactgggactgagctgttgtgattcacatgtctaactcccgaaaagaaggcagaaggtcctttttatagctttcctcagtctgatgtgtgcttccatccttcgctttcgaaatctcccttgtgtttgtgtacaccattgcaccaccaccctttaatcctttattatccagtccgttattccgcgagtacgttgatgatccctccttacggcagtaaggattccgcaaaagtatggctcccttttcccttgattgatgcggggatttgtcaggaactaggtgtgcttcagctatgcagttcagcagcgtgcttcccctagagggaaaagcgtgtatgagcccagtgaggagaggcagtggaggttatgggagtgagaggatgaggatcaactgctgcagcatcaggcgcaacaaggcactgaggaggatgtgtttcagtgcaaggggtgctgtgagcagcacgcagtgtgtgctcacatcagatgctggcccagacactcttgtcgtccgaacatcctttcggaggaattatgctgatcctaatgaagtcgctgccgtcattttgggtggtggtaccgggactcagcttttccctctcacaagcacaagggccacccctgctgttcctattggaggatgttacaggcttattgatatccccatgagcaactgtttcaacagtggcataaacaagatatttgttatgactcagttcaactcagcttctcttaaccgtcacattcatcgtacctatcttggtggggggatcaacttcactgatggatctgttgaggtgctggctgcaacacaaatgcctggggaggctgctggttggttccagggcacagcagacgccgttagaaaatttatctgggtacttgaggattattacaagcataaagctatagaacacattttgattttgtcaggagatcaactctatcgtatggattacatggagcttgtgcagaaacatgtcgatgacaatgcagacataactttatcatgcgctcctgttggagagagtcgagcatctgactatggattagttaagttcgatagttcaggccgtgtaattcagttctctgagaaaccaaagggtgctgccttggaagaaatgaaagtggataccagcttcctcaatttcgccattgattccccagctgaatatccctatatcgcttcaatgggagtttacgtttttaagagagatgttttgttagaccttctaaagtcacggtatgctgaactgcatgactttggttctgaaattctgcccaaggctttgcatgagcacaatgtacaggcatatgttttcactgactactgggaggacattggaacaatcagatctttctttgatgcaaacatggccctctgcgagcagcctccaaagttcgagttttacgatccgaaaacaccattcttcacttcccctcggtacttgccaccaacgaagtcggataagtgcaggattaaagacgcgatcatttcacacggctgcttcttgcgtgagtgtgccatcgagcactctattgttggtgttcgctcacgcctaaactctggatgcgagctcaagaataccatgatgatgggtgcggatttgtatgagaccgaagacgagatctcaaggctactggcagagggcaaggtgcccattggcgtaggggagaacacgaagataagcaactgcatcatcgacatgaatgccagggttggaaggaacgtctccataacaaacaaagagggcgtccaagaagccgaccggccggacgaaggatactacatccggtctgggatcgtggtagtcctgaagaacgcaaccatcaaggacggcaccgtcatatagagactaactttggccttacgcatggcgtgcaaggttacaggttagtcatcgtcttgagagttgagacttagtttgaggcgcgcgcccgaccttgacttgagccgtcggagggacaagaacatgaggaagaagggctggtggtgccggatgttgccatggacgacgagaaatggtttggtgcggtcgcatcggttccagtagctagctcttccgatgttattaatatatgtatctagtggagtagtgcgaacagtgcaataagctgggcgagcaaagccgcggcaactcttggcttggggattgttggtgcatcttgtaaataataaactcggacgcagcaaatgaaacatgcccctcatcttcttccata

SEQ ID NO: 136422 - DNA, 2367 bp, Zea Mays
cgagattacgagacaagagacaagtagacaacccagctctccagcggtccagcggtccagcctctcctagccgaggccaaaacccccataccaacacacacttcgcttctcgctgcctccgcggcggcgcgccgctccgctccgagccctcttcctcctcctcctctgcccgttcggtcgagaatgttctactcgcatcagcttctcgcgcggaaggcgccgctcggccagatatggatggcggcgacgctccactcgaagatcaaccgcaaacggctcgacaagctcgacatcatcaaaatctgtgaggaaattttgaacccctcggtgcccatggctctgaggctctctggaatcctcatgggtggcgtggtgatcgtgtacgagaggaaggtgaagcttctctacactgatgtctctcggcttctgactgagatcaacgaggcatggcggatcaaaccggtcacagaccccaccgtcctccccaagggtaaaactcaagccaagtatgaagcagtaacactgccagagatcaatatggtggtggaacagcccatgtttttctcagagcctgatggtgccaagttccgacgaatgggattggaagatctggatgaacagtatgttcaagtcaatcttgatgatgatgacttctctcatgctgatgatcgtcatcaagctaaagcagtgaatataaccctggtcgataattttgagtctgggcttgcagaaactgatttattcaatcactttgagagatttgacatagcagatgatgagaccacagtcaatatcactcctgatgagtacccacaagttccaagtacgctgattccgtcaccacctaggcaggaagacattcctcaacaagaagaaccgtactacgctgccccctcccctgttcatggagaacctcaacaagggggaccagaggaccaagaggaacagaagatgaagcaaccaccgaaagcatcaaagcggaaagcacgttgggaagtcccacgagtaattatggacaataaccagatgatgatcccaggaaacatatatcagacatggctgaaggatgcatcaagccttgtctcaaaaaggcgtaaacttaacagcaattttaattttattcgatcaaccaagataagtgatctcatgcacatccccccggttgctctaatatctcatgacaacttgttctcagaattatgttatcctaagccacttatgcagctctggaaggactgcactgaggtcaagtccacaaaagcttcttcaggagggcagcgatcatcatcacaagaaccacaaccgaaaaactcaccacctcaggctgggggagagtatgagatggaaacaggtggtctgccgatggatttaacagatggcattgaaaaactcagggcaaacatgagtgcaaaatatgacagagcttacaatattcttcacagtgaccatagtgttactcctggaagtcctgggttaagtcgcaggtctgcttcaagctctggtggctctggatcggcgtttatacaattggatccagaagtacaattgccatcaggaagtggaaggtccaaaagggggcagcattcatctgcaagaagcttggggaatcttgatactgttgaggaagattttccactggagcaggaagtgagggacttcaagatgagaaggctttcagattatgtgccaactcctgacctactggaagaaactgaaccgactcaaaccccatatgagaggcgctccaatccaatggacaagatcacagaaacaatccagtcgcatctcaaacttcatttcgataccccaggtgtcccacaatctgaatccttaagtcatttagctcatggaatgaccaaagccagggcagcccgactattctatcaaatagctgttttggcaacttgtgattacatcaaggttactcagctggaacggaaaggagatgaactgtacggagacatcttgatctccagaggattaaagatgtgacttggtgatgttggaaacaattttgctgcggtggttcccggtgcacatctcgtgtttatattacagaatgcttacatattgcataggatgtcttgtagttaacacataatctatacatggtgatctggtgaaagaaagggagcgagatatgaggcagtagttttgtgttatgtggcaagcaaaattctaagctgttattttagaggtttcataatttaagtacgaacatgtgttatactattatgaaactaagttgtcctgaaagcacttactgaaagggagaaatttacatggtaccttgtcaacgatgaaacatacatcggaggacaacataaagatgcacactgtatcctgctcttcggctgcttcatgtta

SEQ ID NO: 136423 - DNA, 2550 bp, Zea Mays
cgagattacgagacaagagacaagtagacaacccagctctccagcggtccagcggtccagcctctcctagccgaggccaaaacccccataccaacacacacttcgcttctcgctgcctccgcggcggcgcgccgctccgctccgagccctcttcctcctcctcctctgcccgttcggtcgagaatgttctactcgcatcagcttctcgcgcggaaggcgccgctcggccagatatggcgcgtctgctcccttgatcgcacctcctatgcctctcgttgcgggctctaatcgcgctcgtttcccttccttgttccttgcaatgcgtttggttctatgccttatcctggcatcgacccacagtgatggccacgctcgcgccgatttggcggtcactaactgcgtttgcattgtggtttcaggatggcggcgacgctccactcgaagatcaaccgcaaacggctcgacaagctcgacatcatcaaaatctgtgaggaaattttgaacccctcggtgcccatggctctgaggctctctggaatcctcatgggtggcgtggtgatcgtgtacgagaggaaggtgaagcttctctacactgatgtctctcggcttctgactgagatcaacgaggcatggcggatcaaaccggtcacagaccccaccgtcctccccaagggtaaaactcaagccaagtatgaagcagtaacactgccagagatcaatatggtggtggaacagcccatgtttttctcagagcctgatggtgccaagttccgacgaatgggattggaagatctggatgaacagtatgttcaagtcaatcttgatgatgatgacttctctcatgctgatgatcgtcatcaagctaaagcagtgaatataaccctggtcgataattttgagtctgggcttgcagaaactgatttattcaatcactttgagagatttgacatagcagatgatgagaccacagtcaatatcactcctgatgagtacccacaagttccaagtacgctgattccgtcaccacctaggcaggaagacattcctcaacaagaagaaccgtactacgctgccccctcccctgttcatggagaacctcaacaagggggaccagaggaccaagaggaacagaagatgaagcaaccaccgaaagcatcaaagcggaaagcacgttgggaagtcccacgagtaattatggacaataaccagatgatgatcccaggaaacatatatcagacatggctgaaggatgcatcaagccttgtctcaaaaaggcgtaaacttaacagcaattttaattttattcgatcaaccaagataagtgatctcatgcacatccccccggttgctctaatatctcatgacaacttgttctcagaattatgttatcctaagccacttatgcagctctggaaggactgcactgaggtcaagtccacaaaagcttcttcaggagggcagcgatcatcatcacaagaaccacaaccgaaaaactcaccacctcaggctgggggagagtatgagatggaaacaggtggtctgccgatggatttaacagatggcattgaaaaactcagggcaaacatgagtgcaaaatatgacagagcttacaatattcttcacagtgaccatagtgttactcctggaagtcctgggttaagtcgcaggtctgcttcaagctctggtggctctggatcggcgtttatacaattggatccagaagtacaattgccatcaggaagtggaaggtccaaaagggggcagcattcatctgcaagaagcttggggaatcttgatactgttgaggaagattttccactggagcaggaagtgagggacttcaagatgagaaggctttcagattatgtgccaactcctgacctactggaagaaactgaaccgactcaaaccccatatgagaggcgctccaatccaatggacaagatcacagaaacaatccagtcgcatctcaaacttcatttcgataccccaggtgtcccacaatctgaatccttaagtcatttagctcatggaatgaccaaagccagggcagcccgactattctatcaaatagctgttttggcaacttgtgattacatcaaggttactcagctggaacggaaaggagatgaactgtacggagacatcttgatctccagaggattaaagatgtgacttggtgatgttggaaacaattttgctgcggtggttcccggtgcacatctcgtgtttatattacagaatgcttacatattgcataggatgtcttgtagttaacacataatctatacatggtgatctggtgaaagaaagggagcgagatatgaggcagtagttttgtgttatgtggcaagcaaaattctaagctgttattttagaggtttcataatttaagtacgaacatgtgttatactattatgaaactaagttgtcctgaaagcacttactgaaagggagaaatttacatggtaccttgtcaacgatgaaacatacatcggaggacaacataaagatgcacactgtatcctgctcttcggctgcttcatgtta

SEQ ID NO: 136424 - DNA, 2554 bp, Zea Mays
cgagattacgagacaagagacaagtagacaacccagctctccagcggtccagcggtccagcctctcctagccgaggccaaaacccccataccaacacacacttcgcttctcgctgcctccgcggcggcgcgccgctccgctccgagccctcttcctcctcctcctctgcccgttcggtcgagaatgttctactcgcatcagcttctcgcgcggaaggcgccgctcggccagatatggatggcggcgacgctccactcgaagatcaaccgcaaacggctcgacaagctcgacatcatcaaaatctgtgaggaaattttgaacccctcggtgcccatggctctgaggctctctggaatcctcatgggtggcgtggtgatcgtgtacgagaggaaggtgaagcttctctacactgatgtctctcggcttctgactgagatcaacgaggcatggcggatcaaaccggtcacagaccccaccgtcctccccaagggtaaaactcaagccaagtatgaagcagtaacactgccagagatcaatatggtggtggaacagcccatgtttttctcagagcctgatggtgccaagttccgacgaatgggattggaagatctggatgaacagtatgttcaagtcaatcttgatgatgatgacttctctcatgctgatgatcgtcatcaagctaaagcagtgaatataaccctggtcgataattttgagtctgggcttgcagaaactgatttattcaatcactttgagagatttgacatagcagatgatgagaccacagtcaatatcactcctgatgagtacccacaagttccaagtacgctgattccgtcaccacctaggcaggaagacattcctcaacaagaagaaccgtactacgctgccccctcccctgttcatggagaacctcaacaagggggaccagaggaccaagaggaacagaagatgaagcaaccaccgaaagcatcaaagcggaaagcacgttgggaagtcccacgagtaattatggacaataaccagatgatgatcccaggaaacatatatcagacatggctgaaggatgcatcaagccttgtctcaaaaaggcgtaaacttaacagcaattttaattttattcgatcaaccaagataagtgatctcatgcacatccccccggttgctctaatatctcatgacaacttgttctcagaattatgttatcctaagccacttatgcagctctggaaggactgcactgaggtcaagtccacaaaagcttcttcaggagggcagcgatcatcatcacaagaaccacaaccgaaaaactcaccacctcaggctgggggagagtatgagatggaaacaggtggtctgccgatggatttaacagatggcattgaaaaactcagggcaaacatgagtgcaaaatatgacagagcttacaatattcttcacagtgaccatagtgttactcctggaagtcctgggttaagtcgcaggtctgcttcaagctctggtggctctggatcggcgtttatacaattggatccagaagtacaattgccatcaggaagtggaaggtccaaaagggggcagcattcatctgcaagaagcttggggaatcttgatactgttgaggaagattttccactggagcaggaagtgagggacttcaagatgagaaggctttcagattatgtgccaactcctggttggttgcattctgtcctttgctatatataaacatgtgaaactgtctctggacgactggaacataaactgtttcaaccaacatagaagttaacaattttactccaactcctgacctactggaagaaactgaaccgactcaaaccccatatgagaggcgctccaatccaatggacaagatcacagaaacaatccagtcgtaaatatccttaatttgtttgctcatagtgcctgggtcataaattatctgatgctagagttatcttcatgcaggcatctcaaacttcatttcgataccccaggtgtcccacaatctgaatccttaagtcatttagctcatggaatgaccaaagccagggcagcccgactattctatcaaatagctgttttggcaacttgtgattacatcaaggttactcagctggaacggaaaggagatgaactgtacggagacatcttgatctccagaggattaaagatgtgacttggtgatgttggaaacaattttgctgcggtggttcccggtgcacatctcgtgtttatattacagaatgcttacatattgcataggatgtcttgtagttaacacataatctatacatggtgatctggtgaaagaaagggagcgagatatgaggcagtagttttgtgttatgtggcaagcaaaattctaagctgttattttagaggtttcataatttaagtacgaacatgtgttatactattatgaaactaagttgtcctgaaagcacttactgaaagggagaaatttacatggtaccttgtcaacgatgaaacatacatcggaggacaacataaagatgcacactgtatcctgctcttcggctgcttcatgtta

SEQ ID NO: 136425 - DNA, 1531 bp, Zea Mays
cccatccagagaatttccagcagcagcgcagcagcagctcactcactcccctccccctgctccctccactctcgcagtcgcagcgcaagtctcttcagttcagcttctcttccaaaacccaagcaccagcacgtggtaccatcccaaaccacaaggctccagccatggcggccgccggagcagcgatgcgtctgcggctcctgtaccggatgctgcgcgtgggggagctcctcgcgctggtggcgttcctgtcctggtcgtcgtcccgcgtgccttccgccgccgccgccgcgctgcgtctcgcggggtcgctcctcctcaacgcccgcttcgtcttcgtcctcgggaacgccatcgtgctcctcctcctcgcgctgtcgcggcgcgagcgcgacctctcctcgtcgtcgtcgtcgttctcctccgcctccggcgggcagcagacgagcacgaccgccggcacaccgccaccgcaggacgccgccagcgccgtattcccttcctcgttttccgatgctcctacagctccaccggctccctccacatcgctggaagccttcagcgcgcccccaccggccccggcgtccgacgacaggcccgggagccccgcggcggcgcgggcgagcaagctggcgcgcgccgcgccgcggcggagcaggtcggagaagatggcggcgggcccgcggctgctgcaggttcggcgcgcggcgtccccgccggcggcccccgagctgcggcggacggagtcggagaacgggcggcggcggcggtcgtccgtgtcggcgcgcgcgtgccgctggggcgcggacgacgccgacgagttccggcgcacggtggaggcgttcatcgacaagcacaagcggttccaccgccaggagtcgatgacgctggccgtcgtcgcggggaccgggtccgggtccgggtccggcgggcactgcgaggccgccccggccttcactggcgccctggccgtcgtggagtagtttagccgaacttgtcgtcctgtgcagcagatcgagtacatagcggagtcgggcgacgcttccgtcgccgaacttgtcgtcccgtcagtgtccatagcttgtcaaggctccttccttcctgttgttccttgagaagggcgagcttttcaagtgttttctctttttttttccttcgtcttgcgccataggagagagagagagagagaaccctgtgactacgaaacgggggtttagcgttggatgcgcggcgtggatccggatccaacggagcggccgatgaactttactctcgtccgtttggcagccatggaaatggacggaaattgcatgcatgctggatgatgctcgctggctggtcgaatcgaatggcgaggcgtccggccggtccgtccgtgtgactggcagtggcagatgacgcgacgcgtcagacaaatccagaatcagatgcgagtagacaaatgcagagggcatcgcctttttcgatgtctcacactgtgctgtgcagggcacaggaggacttcttccacttccagtcgtgccgaatcaat

SEQ ID NO: 136426 - DNA, 499 bp, Zea Mays
gtccccgaggtccgcaccaccgaagccccgagaaaccctaggcactaggaccaggagggcgcgccgtgcagccatggcgaagaaccggaacaagaagaacagggccaagagcggcggcctcgccaccatggacacctctgagggcggccccgccacatccactgccgcagacgtcccacaaccaatggatacgtccgagggaaagcagccatcgtcaccaccgcggcgctcggttcgatcaacaaggaaggtgctggaagcaaggatcagagtgctagctgttggcgtaacatcacccagctgatggagagattttagtttgctagctagatgaatctttagactttgcatgtaatagaactaaaagatcacttcagaattcagaaaacatgtatgctattatttttatatgttcatcacacaaattgtgttccaaaacaatatatgttggaattcaaagtcaaagattgatctctttcttttagtaatcaaatttcat

SEQ ID NO: 136427 - DNA, 3110 bp, Zea Mays
attagctgagctcgtacacggccggccctctctcggtgcgtgcgtttgcgtggctgtggcaatatacggtgcgtgtggggcggcggcgacgagggttttgctgctccgtacaccgcgtgcagcggcgacgcgaccgcagctggtcgccgccccggatcgaggagggggaggagccggcggaggcccctgtggtggctgcgggggcgggagcgggagcgccatgaggggcggtggccgtggcggcggcgggaggcagccttcctacgcggcgccggacggggcggatgcggcggcgatcccggtcgcctcaaggaagatggtgcagagcctcaaggggatcctggccgaccgctcggagggcgagatctacgccacgctctgcgactgcggaatggaccccgacatagccgtcgagaggctcatctcccaggatacttttcatgaagtcagaagaaagcgggataggaaaaaggagactaaagttaatcacgaaacaaggcctcgacctttccagaaatatacataccgaggatataaggctgtttcagatcgaagtgggcgagaccctacaggcggtttcaaaggccctgtaaaaaaggaaccagagatgcaagctccactaaactcatcagccttggatgtcaagacaagtgacactacagaaatattttctgctactatcaatgttgcccagactgatgctaagaacaccacttctcagcctttatctaaagtgcagcatggttggggtggtattccaggtcgcccttccatggctgaaatagtgaagatgggcaggcctcaagctaaagttgggagcagatctgttgcaagtagcactgcgttgccaaccgttggtgattcagtcatttccaatacaccaaatcttgtgcctgaggaatataacagaactgtttttgcatcagaagcaggccatgtcgcagcagataaattgccaaacggtgctgttgaggtgcactctctacctaaagatgcttccgcatttgatatgttaccttcagctgagggaacagatgttgaagccccttccatgagtgctaatgcacaagggtcatcaacgccagatgccaatgaagatgacattgaaaaatatgcaaatttggaagagggcaatacagaaagcttgatatctcctggacaagtttctgcttctggtaaagatatacaatcagaatatactgaagttgtcagccatgtggatgaaggctcgatagagaaaacaaatgactttcagctcaatggccttccatttgagcacaaccaaaatctgaatggagacgtgtctacagcgacaacacaatttgatcatttgactctgcatgagggaccaaaattgtccgatgataatccggctgtaataattcctgatcatcttcaggtttcgaatgctgattgtgcgcatttgacgtttggtagttttgtgtctggaacacttgattcatccttgacaacaaaacctcttgaaagtcatggggatgctgcggcagttcctgatgatgattcaattgaccaatcagatggcaggatccatgacgatgaaggcaaggtgactttagctactgatgttaatgaatatgttacttctgcggcaaacagcaacgaggagaatcttgatattacatcagtacagcaatctgaagtcactagagctgatttcttggatgtcacaagcaatactgaatacaacctaacatcaactccagattatgcaacttcaagtgcaccgttgcaagattctgcttcacagagtttacaggaaaaccgacaattccagaacatctctcctttctcaagcttcatgcaaatgcaaaatggtctcctgccaccagcaattccaccattgcgtgaatttgatccagcattttcactattgctcacccatcctcctatgatgcatggtacaatgtcatcatccatgagcaatacaactgtttctacgcagccccaagagaatgccaatccagttggtttacccaaccctcaattgactcaatctcagcaaagcaccagcattgcttcagggcctccactccctcagcatcttcttcatccctatgctcaaccaacccttcctcttggctacgcaagcatgattggctatccatctcttccaccaagctatgcatatctcccgcctgccgcttttcagcaaccatacatgaacagtggcttgttccaccaggcagcagcggcagttcccacctcaagtgtgaaataccctctaccgcagtacaaaagcaacattgcccttgctagcttaccacagccaggctctttgctctcaagctacgttgggggctttggaactgcaagcaacatgcctggaaatttccctctgaatcaaagcacagcagcagcaacaacaactcttgggtttgatgggacggtcccttcacatttcaaagatggaaatcaatttatttctcttcagcagaatgagaaccctgcaatgtggatgcatggtgctagttcacgagggatgcccccacttgcagccagtaccatgtatggctatcaagggcagagtcatcaggccggccttcggcagggccaactaccttcacaatttggctctgcgcttgggcagtcacagccaggcctgggccctgaacaccgaaaccctagcgatagtaacctaagtggcgctgctcaggctaaccaaatgtggccaaatacctactgatccatcccccttgtcgacttctgtggaaggcggtcctgttgtgtgtgcaacgccggtgaggccatgcagtgcttgtgttctgatccaggcacgcggataccagctgtgcctgtgcgcatgagtcgctgtcgtgacattttgaggcacaagagacatatgttcgagcatgctctacctgtagggtttctaggatatggcaaaagaaaatgtagctcgatctatttattcaaattctgatagagaaaggacttcctcttttctattttattctcttttgtcattcacatatcatgtgacaaataaaaccgaaatatctaacagcagcgccattagttcccgaggaagtgaaactttacatcacaggtattgcgtgcctcttggcttcaattttatgattgaggtgatt

SEQ ID NO: 136428 - DNA, 1847 bp, Zea Mays
agtactctattgctctgtattattgctgttgtttactctaatccaacaggacatgcattccgtttgcacatgtcggaaccgcgaacatacaccacctcacatggctatggcttcatacaaacagcaaagccaatcaaacacatagagaggctgcatacttagctttctgtgagttcaaccaacgtcgagaccctgcagcaggttcttcagactacgacgcacgcacaccggtgttcttggagaccgaaaaaagggtaaacgggagcaggatggatccggcagtcagtcacgtccagagctctggattcttccgtccttccttccagcgaggttggggccacactagctgccacggtgtcgtcccacctatatgtccccaagaagttcgctgggcctgaaccaaccaacagtctttctccctcatgctctgtccaataataatactacgtacgtaaagtcgcaaacagtggttggattcagcaatgatgcatgaatgtgctattgcccattgtatctccaccattgttgctgttcctttctgatccagagctccctccacatggcgtcatctcactccggcacaagaaaatgctgctctaaacaaacctagctgctaggaaaatatcatctccatcttcaaccataaccacgagccatgatgaatgatcatcatcctcatttcatatacacaataaacatactatattatatacgcgcgggagcatcactgacagcgatcggcacaaggcgccctagctagaaccttcttccgtatcattaccaaccaccaccttcatccacgtccaaaaatctgcttctcacatcacgtttgataccatattttgtataccaccaccaccaccatttacaagcaaagcaattgttgttgatatgaaatgaaacgaccgatcgaggttgcaatcgcatgcactgacagcgaccacccactcacctccagccaccattttccagctgcccgcggcgggtcagcgccgccgtcgtttcctccgcgtggtggcggcaggcgagccgggctggcgcgccgagcgccgcgtccacggcggcgtcgctccaccggtccttcatcgcccggttcagccgcgccacgaagccctcgcgccgcgcctctaagcgcctcagaagccgcgccgagaacgtgccgcacccgtgcgcgtcctcggccgccgccgccgcctcgtcgtcaccggccgcgcccgcgaggtagtcgaccatagcctccgtgacgcgcgcgggggcggcgccgcggccgtcccagagccacatgcgcgcgaccgcgcggcgcagcgcggcggccacggcggcgtcgttcgccgacgccgacgacgacgcgacgaggccggggctcagggacacgacgtactcccccggggccgcggcgcgcaccgtggcgccggcgcccgcggtgaggttgcgcgcggccatccggacggtcacgcgccgcacctgcctgcgcgggaacgacgcgtccgggaacagcgcgcgctccacggcgcggctggcgcgcaggagggcgcgctcggcgcggccgttggacgccaagtgcaggtcgaagcgccgcgccgccgcgctgccccgcgccgcgtcgttcgcgacggcgactgcgaagcccttgctggcctcgtgctgcgctagcagggacgcgcacgccacggcgagcacggccgctatgcggaggacgatgctccgggtcgaaggggaggaggagggcgccgacggcacgatggtgatgtcgatggggaggaggagcggagcctcggcgtccatgtccattggtggtgtagtggaccggtccgactgtccgagcgaggctttggcctgccggacgg

SEQ ID NO: 136429 - DNA, 360 bp, Zea Mays
atggcacaacgccgatgtttcggtgagtaccagcgccagcgcccactgatgcagcggcggcggcgacgatgccgttcagggatcttgtgtatatgtcggtggtgtcaggtgctatcctatctaatgggttcttctttggtccagctgggagatggaaggggggagctctcatgttcacggccacatcaggcgagcctttgccgtttgcacaagcataggccttctgcgactgcagcgtgtaacctcccatggcctgcgatgggttggtactgtccaaccttgcaggcatttggcggtaaccgtatgcttgtgggatctgttggtgaggaggataccttgaatccgtcactgggccattaa

SEQ ID NO: 136430 - DNA, 232 bp, Zea Mays
ctcttcgcatcccgctatcgtctatgacatcatcatgtattagacttgcagtatgaatcatctctatgatctcagccaagcgccgatgttctaaaggaacttacggcaaagcagctaattcagcagttgctctcgataccagaaaaactaatgctggtcttaacctctttccaccagcactgaaaatttgttctgctgcagaaactaaaactggattttctgcaccaacaag

SEQ ID NO: 136431 - DNA, 2703 bp, Zea Mays
ctcttcgcatcccgctatcgtctatgacatcatcatgtattagacttgcagtatgaatcatctctatgatctcagccaagcgccgatgttctaaaggaacttacggcaaagcagctaattcagcagttgctctcgataccagaaaaactaatgctggtcttaacctctttccaccagcactgaaaatttgttctgctgcagaaactaaaactggattttctgcaccaacaagctgttgaagttatatcagtgatcactgtgggagataatactatcagagctcattaagcacgaactgataaaataaccttcaacagtcatgtgtacctgttgcagattgcaaattagagcaggcgtaatatttgatttaaatgttctgaaattttaggccttatttatatgaataacaaagatctatagacgactgtaaagctgtgatgtatcatcatatagttcttaagggaaatgtttttttttacattcagggccaaaaatgtgtagtatgagcatatcgaccacctttcccataacctgaagcatttaggagagttgttgtgtgcatgaaacttattatgttgtccaagctcaaggccttagtctaagaagttcgtaaggaaaatagattttgcattcaataaaaaatgtgtagtatgagtatatcgtctgcaatgtgtatgaaacttattatttgtcaaagctcaagtccttactctaagttcttaaggaaaatatttttttgcattcaaccaaaaatgtgtagtatgaatatattgtccacctttgtcaaaactttaagcgtttaggagagttgttgtgtgcatgaaacttattatttgtcaaagatcaaggtcttagtcgaagacatggacatcaccaatggtggagcttggacaggaaaaaaagtgggggaatgtaacatgagatgaaagtagagggggacaaattagtttcttgtcagcgaaagggcctctagctgagttggttagatggtctgagtagcactcctcaggtcttgagtttgactccgtgtgaaagcgaatttcaggctagggttaaaaagatcccctcatctacctcacgccaaatcacacgtctaaggctgaggttcaggcctcatgggttttctcaacctgtgtcagaaggtaccagaggttgtctaataccctacaagtcaagttttttttgtcaacacttaaatgaataaaaatagatgctccattaagaatttgtctagcttaggggtggcaatggccttctttggtcctaactaagctccactggatatcacacctttagaaaataataatcgtgactcactttgagtcaatgtcataggcctggtggatcctagatatgaggagtggggaagcgctgaagtatgagtgtgtgactgtgtgtacttcttactttcagtcctacttgagatctcgaagcatgttaacattgaagaaacgaaaaacttgcagaaaagaacaaaaagggcagccaaagatgctgtggaggccacaaaaaaatgacaagttatagtaagcataattgcaaattccaccggacacttatggtgttctgagctccaacttgtcaaaaatgagaccactacatgaagaaaatacatgctcccttgaaaaggatggaagcaactattaatgcctaataatatatgtattcctgtcattttcataccactttcgaagagccggcgcaaccatggaactagacagttgctgatagcatatgattgttacttattttactttggcatttcatgagaatattttgtcttcaagaaattccgtgaactacgagcacttgaggaatgtgccagagacaaaatttcggaggcctggtggagcctagggatcatgaggactgggaaagtgctcaagtattgactgtacttattttcagttctatacgtgttcaagaaaaaataacctatttgatattttagtcggattgatggatctatgaaactaaaaatacataagttctcaaagcatgtcaaattgaaaaaataaagtgaagtttgcagaaaaaggacaaaaaacagtggtagaagttacggagaccacagaaaaatgacaagttagagcgaacggaactgcaaaatccatcagcccactcttggtgatctaagctccaagtcatcaaatatgagaccaatacaggaagaaacgcatatgcttttaatgtctttagttgtctctatattcctatcattttacagggcacttcaaagatcaggtgctgccatgcactgttaaggatagcatatgatggttaccaattttatttggagtttcattgaatattttaccttgaggaaattccatgaactaggaacgctcgaggaacatgtctaagccgaaggcaaacggatgatgtagcccgttaacatgctggttatatagatttgaatgcattttctaaagaaacagcaaaggaaatgcgtaacctttggctgcaaacatgtcggatatgagtaatgcattaatggcctttcccacaagtcaaatcacaactatatatatgctatcaattgcaatcacgaaaaaggagaaatttgacggtcacgtgcgcatagcttaaacatgtgctctctgaagtctgaaaagaagggaaaggaaaagggccccaaagtcctaaactgtatcgcttatagaattcgagaataagctcaccgatttgagattgttgttgagg

SEQ ID NO: 136432 - DNA, 373 bp, Zea Mays
agccaagaggttcacggccacgggagcaaccctacagaaccatcaccaccaccgctctctcttcctttgctcttctctgcctgcctgagctcaccgcacctcgcctcctcaccgtggatcctccgttaatccggtataaaatggccgatgccgaggatatccagcccctcgtctgcgacaacggaactggcatggtcaaggctgggttcgctggcgacgacgccccgagggccgtcttccccagcatcgtggggcgcccgcgccacactggtgtcatggtcgggatggggcagaaggacgcctacgtcggtgacgaggcgcagtccaagaggggtatcctgaccctcaagtacctcagcttacacatcacatt

SEQ ID NO: 136433 - DNA, 978 bp, Zea Mays
gaaacaaacaggggctttcatttctccccgccctgcagcacgaccgcgaccagccaccgtctccgcccccgccccggttgcttcagatctcctcctcccccacccggccacccccagccgcaccagccaccggccagctcctccgcaccaggataatctctgcccttcgtaccccctcgccattgcgcgcgcatataaatcccacatccccatcgctctcgcctctgcccacccacccgccgcgcccctactgcgcagcacgcacgtcccctccgcggccctggatctaggctgatcggtcgccggccgggagcgaggatcgggatctcggcccggggctgcccccccgccggaatggaggtcttcggccccgtcacgcccggacaggtgtcatttttgctaggtctattccctgtcctcatctcatggatctactctgaaatcctcgaatacaagaaatctttgtctcatgggaaagttcattcagacgctaatttggataatggaaccatcaaggaggatgaaaagtcagtattacttgaaggaggacagttgaaatcaccatctacaaagttcaggaacttgtctaccaaagcgaatttgttacggtttataactatggacgagtcttttctgcttgaaaaccgtgctgtactgagagccatggctgaatttggcgttgttctggtttacttctatatctgtgaccgcacagacatatttccagaaagcaagaagagctacaatcgtgatctgttcctgtttctatacattcttctcatcatagcatcaacacttacttcactaaagaagcatcatgaaaaatcagcattttcaggaaagtctatactctatcttaatcgccaccaaactgaggaatggaaagggtggatgcagaattttagaggtggcgccgagtatgatgacatgttgatatggcccaaccgaataaggtgtattttaggaagcagtagttga

SEQ ID NO: 136434 - DNA, 76 bp, Zea Mays
gctacgtgggaagatgccctggaatttcggcgtgcacacccagatttcaagcttgaggacaagcttgttgtcgagg

SEQ ID NO: 136435 - DNA, 1994 bp, Zea Mays
ctactgcaatagttttcttctcacttgtatatttcaagctttcgagtttcgacaactaaatgccaccaaaatgtacttactgcagtagtgcttttgcattcccttttggtttctgtcttacacaggtactccgtctgttccaaattataagacgttttagctttctagatacattgctttaactatgtatgaacatagtgtatatctaagtgcatagcaaaagttatgcatataaaaaagccaaaatgccttatagtttggaatggagggagtattgtgttaatccattctggttgcaagtcttatttctgatgtaccattattttgctgcttctgagatatacaatgcaatccgtgtgttcattgcttgctatgtctggatgactggatttgggaatttctcatattactatatcaagaaagattttagtattgcaagatttgctcagatgatgtggagattaaatttctttgtggcattctgttgcattgtccttgacaatgatctcatgctctattatatatgcccaatgcacacactatttactcttatggtatatggatcacttggtctgtttaacaaatacaatgaggtaccatcaatcatggctattaagattgcttgctgcttcttgtctgtaattttgatatgggaaatccctggggtatttgaatcattgtgggccccctttacgtttctgctaggctataaagatccatcgccatccaaggcacacttacccctgctacatgagtggcatttccgatctggcctcgatcgatacatatggattattggaatgatttatgcttacttccatcctaatgttgaaagatggatggagaagctggaagaatctgagactaaggttagattatcaatcaagggaaccattgtcactctttcattgacggttggctttctgtggtatgaatatatatacaagctagacaaagttacatacaacaagtaccatccctacacatcatggatccctataactgtttatatctgcctgcgcaattgcacccagcagttgaggaatgcctctttagctcttttcgcatggcttggcaagattacactcgagacttatatttctcagatccatatttggcttaggtctagcatgccaaatggacaaccaaagtggcttctttgtttcataccagattatcctatgcttaacttcatgcttactacagcgatctatcttcttctatcataccgtgtgtttgagatcacaaacgtcttgaagtcggcttttatccccagtagggataatagccgcctataccaaaatttgattgctgggatcgccatctcagtgtgcttgtatctctgctcgcttattcttctgaagattcctggtgtatagggatgaagatcttgatagaaggtttcttgtaaaatgtttgcttgataggatgtttcagctcgggcctcgatccccttttgctgttgtggagatagttgggatgcgcggagaagcggctaaagttggacatacggggaattgaattgccagaggctgcagatacagaagtccgaatcttgatctttttgttcattcaaaacacggatggatacaacaagtaggcaatccttccattcttttggaagttgtagcaactgttcgctagactatgttgatgcaacctcgttgtatgagttatcctgtagaactgcaccgtgttgtgccataggtattctgaagctgtaaaaaaaacgacgggcatttcttcttccttgaaaagaagaaatataaaggcagaggcgcagagccctttcttctcctaattgtaatgtcgtgtttgctttggagtttgaaccatccagtctatatcctgcttcttcaagtgttcgtgctcgtgctgtacgtgcgtacccgcgggctcagtcgaccggtggacggtggtagactgtatgcacggctcaaacttggtgtatgtgtgaaaaattacccgccactgttgttggttacattgaaata

SEQ ID NO: 136436 - DNA, 1529 bp, Zea Mays
aggactggtttacgcctttacggctcgcccccgtcttttcttctcgtgttctcccctccccgcgtgcgctccctttcgtggcacgactgggcgaccgccgctgtacgccagctgctcagatctcgtcgggccccttcgccggcgaccatcacctgttagggcaatgatgggaggctggggggtttcggatgggtacgagggatcaaagaggacacgaatgatgatggaatcgaatccctacttcgcagtgaacgcagggagtccattggatgtctcaaagaggtctaggattgttgaaccaggcccgccctattttggggccatgggcagcaacactggtggtgccagtggtggcttctaccagcccttcaacagcagcaacttagctggtgcaggggctagcactggcatccaaaactttccaggtgtacggctgcgaggtctcccttttgattgcaatgacattgatatctgcaagttctttgtgggactggacatagtggactgcctcctggttaacaagaatggccgcttcactggtgaggcttttgtggtcttcccaacagctatgcaaacagaatttgctctgcatcgtaacaggcagaacatgggccggaggtatgttgaggtgttcagatgtaagaagcaggagtactacagtgcaatagccaacgaggtgagccagggtggttactttgagtcggagtgtcgccgctcctcacctcctccgaggccccctaagaagactgctgaagacaagggcagcatggagtacactgaggtgctgaagctccgtgggcttccctactctgcgacgactgaggacatcatcaagttcttcctggagtatgagctgacagaggagaatgtgcatattgcgatccgctcagatgggaaagctaccggtgaagcctttgttgagttcccaacagctgaagttgccaagacggcgatgtgcaaggataagatgactatcgggacgaggtatgtggagctgttcccgtctaccccagaggaggcgagcagggcgagaacccgaggcaggcattgaagaaacgaatggcttggctgaatgatctctggttgcatgtggctgcaatcgactgtagttttcacttcgcatgcttatctgtatcgcttttagattgtgttagttgtgtgtatttgacttcttatatgcgaactgaactgtaacaactttcctttgttggccggccgcacatgtacggcataatcatttatggattttgctacgtttgagtttctttcgttgatgttggggacgtgatggaatttaagtgttgcagtgaaatgcttggtgagctcactttggccccataagctggtgttaatcatgttgccgctgcattgctacgttgtattcgagcgaaatgagctcgtccctagtgacgctgcaaatgaggggatcattgattcaacgtcaatgcatatctaaggctgaaatttccttattatagaagaaaggctcaaatttgagcatttgcaagtgtaaatgtctaaacgttgac

SEQ ID NO: 136437 - DNA, 1844 bp, Zea Mays
caagccagctaaagctttgttcgttttttctatatttaaacacttaaatatacattatgtatacaaactaaaatgtttttttatgattagacgtacgaaagtggccttcgtcactggtagatggaaaacgtaatgccggcgaagttgtttatgttacacgatgagcacatggttgttggccacacaagagtcaaacactcccttccctgcgccgatggtgacactcccacgccacaccccacaatccaatcccaaccggaatcgcctgcagccggcgcccggctccgccagtccaatggctccgccgcttgctcgcctcattctgatccttctcgctgccgccgtcccactcttggctgctcccgcggcggccgcggcggcggtgtttccgaaagaagcacttccgaccaagtccgggtacctccccatcccgcccgtcaacgcctctctcttcttcgccttctacgaggccacggatccagtcacgccgccggcctccacgccgctcctcctctggctgcagggcgggccggggtgctccagcctcctgggcaacttcttcgagctcggcccctacttcgtgaaccccgacggcgagaccctctcgcgcaaccccttcgcgtggaaccgccgcttcggactcctcttcatcgacagcccgctcggcacaggcttcagcgcggcgccgtccccggccgacatccccaccaaccagtccgtcatcgccgcgcacatcctcgccgcgctgcagtccttctacgccctggacccagccctccgcgcgcggcccttcttcctgacgggcgagagctacgcgggcaagtacatccccgcggcgggggcgcacatcctggacgcgaaccgggcgctgccggaggcgctgcgcgtgaacctccgcggcgtggccatcggcaacgggctcacgcacccggtggcgcaggtggccacgcacgcggactcggcctacttcctgggcctcctcaacgcgcggcagaagcgggagctggaggcgctgcagtcggaggcggtgtcgctgacacgggcccagcggtgggccgcggcgtcggacgcgcgggggcgggtgctgtcgtggctgcagaacacgacggggctggccacgctgtacgactacgcgaagcagcgggactacgcgacggccgccgtgggggcgttcctgaaccgcgccgaggccaaggcggcgctgggcgcgcgcgaggacgtggcgtgggaggagtgcagcgacgcggtgggcgtggcgatgcacgcggacgtgatgcgcaacgtgctgccgcaggtggagtcgctgctgcggagcacggcccgcgtgctgctgtaccagggcgtccgcgacctccgggacggcgtcgtgtccaccgaggcgtggctgggcggggtgcgctgggacggcctgcgcgcgttcctggacgcggagcgcgccgtgtggcggacggccgcggagggcggggagctcgcgggctacgtgcagcggtcgggctcgctgacgcacgtggtggtgtacgccgcggggcacctagtgccggcggacaacgggcgcgcggcgcaggagatgatcgagggatgggtgctggggacagggatgttcggccgcggttgtggtgatcgcgtccgcgacggcgtcaggagcgccgccacatgatggctgcccgagcaccccgacagcacgggcggaatgtgtcccagctatcttactgcgcgatatggattcttgttgctcggatttgaatgggttcgattcgattctatgtttaccgagtgatgaaacagatcggaatgcaaaaaaaacagagatacttttaactgtttgttacaggatgttgaagcct

SEQ ID NO: 136438 - DNA, 1332 bp, Zea Mays
ctcttctggagctttgaatggaaattctatctctggaggtcaatctttgcatggacatatagacgacaccgtacataaggattcagacatcgcttgtgatggtttgagatttaggaaagggaatgtgaacaagaacttgggaaacggtgttagccacacaacagatagtgttagcaacacaactgccaatcattatcaggacaattctggaagtgatccagagcagaatgatcattccttttcaatagattcattaaatcctaagaagttgcgttcaactgaaaccaatgacacatctcaaattccagagtctggaggattttcagtatctcctaatgattggatggccccgaatcttagtgttcccttgtttcatcttgttgatgtggtctttcagctccaagatggaggctggataaggcgtcaagcattttgggtagcaaagcaaatactgcaattgggaatgggagacacgtttgatgactggcttgttgacaaaatccaattacttaggaaagggaggataattgcttttgctgttaagcgcattgaacaaattctctggcctgatggaattttcatgacaaaacatccaaagagaaattcgcctccacctcctcctggtgctcagagcaatggcatgggaaactatctaagcgatgaacaacggatagaagctgctcatcgtgcaaattttgtccgtgaactgataatagataaagccccatctccactagtgagtcttgttggtcgaaaggattatgaaagatgtgctcatgatatctatttctttcttcagtccccggtttgtttgaagcagctagcgttcgaactccttgagctgcttgttctttcttcatttccggagttggatggcactgtgaggaagtggcacgaagataaagagcaattctgcgcccagtaatgtttatcaaacgtttgaatttgtcacgggcggtgtttgtttccaacacatatcgtctttccagagtggtgtggcctgtgaattctgcgaaaataaggtggtggcttcagaggagtgcccgtggatatctcagtttgaagtgggtggtggctttgtgcagtgtgaatatggttagatagtgcgaggatatggtccctttttccaccgggccatggcagaacggtttttgtgcccgatagagttcatttttccccctccagatttggtatacgtaatgctgctgcctgaaaggaaagagatggtggcgcattttttttgcacccgttttggtggtacactggtacccgtcttgtgtaaatctgcatagagataaatgaagtttcgaggtggtcaatgaatgataatag

SEQ ID NO: 136439 - DNA, 800 bp, Zea Mays
atggccgacgccgccaacccgccgaccaagcccaccaaagcctccgctcccttcgttgtaattgacgccgccagcgccaacaaggcccgcgacggtggcgccgatgccccgacaccgtcggcggggcacggccgccgctggctgcggcgggcgtgctgcggcgtggccgtcggcggcgcgctggccgcggcggcggtgctgtcgctgtcgctcaccgtgctcagggtgcgggacccgacgctgtccatggagtccgtggccgtcaggcgcttcagcgtgcgcctggacgccgcgtccccggcgcgcccgctgcggatcaacgtcacgctgtccggcgccatcgtggtccgcaaccccaactacgagtccatgcggttcggcgccagcgccacggagatcttcgtggacggcgcggcggacccgggccccgtcggcgtgggccgcgcgccgcccggggaggtccccgcgcgcggtgccagccgggtggccgccgacgtcgacgtgctcgtcgacagggtcgcgcccgccgtggtcgcccaggtgctgttcggcggcggcgaggtgcgcctcgccacgcgcaccgccgtcgacggcaggctcagcctgctcggcgggctctacggccgccgcaccgtgcgcgtcgccatgcggtgccgcgtcgcgctccgcgtctctgccgcggccgtcgccgtcgccggcaaccccgcgtgcgtcgcggacttcgggcgctgacgtggtctactcttcgtcagctgtagtctgtgggtgagccggccggtgtagtttttgccctttctctt

SEQ ID NO: 136440 - DNA, 103 bp, Zea Mays
tctttccatggtagggtgcgatgacgaggtacacacaaccctgatcaatcgcctccgatggcgatctgatgttcaccttttacctttggttcgtattcgctga

SEQ ID NO: 136441 - DNA, 1730 bp, Zea Mays
acaaccaagagccaacagagcaacgcccaggcacacacgacgcggaccaggcaaccagctgccgagggaggaaccctagcggaacactgtgcaggtgacggcggcgcgctaccggtgacggcggcgcgctaccggtgacgggggatacggtggcatcgtccccctcggcccctcttccatccccggcgcggcggcgccagcagccggcctgcagggcttatattttacggtgagcacattcttttgctgatggagaccactgaacctctacaggatatcatgtgtgagtttcgtgctggtaagatgtctcatgagggaacacgagtggttccagacacgcgcaagggtcttgtccgcgttggtaggggtgaagagggattagtccattttcagtggcttgaccgtggacagaacatagttgaagatgatcaaatcatctttcctgatgaggcggtctttgagaaggtgacagaatctcctggagggtttacatcttgaagtttaagcaagacagcagaaaattcttcttctggatgcaggaaccaaatgctgatggggactcccagacttgcatgcaagttaatgcctacataaatcgatcattagatgctgaggctgatcttcgagtacctattgaagcagaaatgtctgaagatacggctgatgatgatatctcttccagagctgggaatctagttgagagcatgaccgctgatttggctggtgaagtgacgtctgctgctggacctgtacgcttggaggatctgcagagaattctgagtgcaatacagtcatcaggtgctgcagctgaccctgatgctggagtaggactaggagacatcttgaagcctgatctggtcttgccattaattgaggacttgcccattgaacaattggcatcacatcttccggagggtggctcatggagtcctggtgatatcgttgagcttctccaaagtcctcctttgcgccaacaattagatgcattcacccacgttctgcggactgggcagatagatcttgctcaatttggagttgaccctgacaaatataagttcacggtggtgtcgttcctggaggcattggaagactcggttggaagaggtgcttctgaagctggagacaaggatgcagaggtcgagcgaggcagtggaaatgatgccatggacgagagttgatatccgtgtactaggtgtctgaattcatacgtgacaagtcttgtgttgttgttttgggtagaacgctagctcatagtattttgggcttctggcacacagaaagcaagtttctggacaagttttggacattattgctgctgtgagatgtagtgctaggcaacagatggtctggttggtggatcatggattccatggcattgagaagcttgcaaggctagattgattgtgttctgcgggggtaaatcttgcgtggcgttttgaacgtggattggtaaacagaatagcatcttttgaacgtcggttgttccatgtccacagctgatggtggtggcctcgaatgtcgtactgtacgtccatgtcgatgattccgtcgcaggagcctactactactatatccctgttctatgtaagatatgtgtactccagtacaaacagtatatggacagctcaggatttttttatattgttctacacatacatctttagatgatttttatggatatgatgagtcaaatcttgaggttagaacattatcgaattcataacttacct

SEQ ID NO: 136442 - DNA, 1944 bp, Zea Mays
atggggggtctgctcaaggaagagggcccggcggtggatgtctccgtggagggtaccctggtctggctgcgccgccccaacggctcctggtggcccagcatcgtcatctcgccgcaagacgtccccgaaggctgcgccccgccgccgcgctgccccgccacgcccatcatgctcctcggccgtcgccccgacggaccaaccttcgtcgactggtgtaacctggccaggtgcaagcgcgtcaagcccttccgctgcggggagctcgacttcgagcagcgcatcaccaacgccctcacactcgccgccagcggcaacaggtccagctggagctacaacaagggcaggtacgcccgcatggagggcgccattctccaggccctcgacatagagaaggatagcgctcttggcccggtaaccaaggcctacctccatgcccccagctgctcacctagtcccaaagttggaatgcccaacggacaagtcaaagatgctgcaccaaaggatccttctccagccatccagccgcctctgccgccgccgcggtccaagaggaagcgcaagacgccctatgactccgaggacgatacgcctcaaggctcctgccgtatgagggatctcagggacatcggatccaagacggtccccacaatggacctgtctaatgctgccgcaatctttgctcccaagtataatgatctgcctaatgttgggcaggccagaagaattgtgcgctctcaggccaccacaaagaggaagcatgctgctgcacatcaggaccaaccttgcgggatccccaggaagaaggataggtctcgtccgctctcagagctctgcaatggagatatctggaatggttccagaccaaatggtcagaaggctgatgaacacttgttgggtgtggcaacatgttcaagcagctcctctggcacttcaaccttggatactccattggacacaaacagctgtcatcgcagcgcagcatccacagatcaagcaaagggcacagcaatatcctgcatggcaaggctactcagtgatgattcacggcatgggaatgattttgtcggaactccccctgctgcacaaaatatctcggaacccgatcatttgcatagatatcaaccttgtggattgacaaataatcctacctggaaagctgggaaacatgcatgtaaaagtattaagatgagaaccataaggtctgttggtcatgagggcaaggacaggacaagagattctaataatgatcatggctgccagaaaacaaagacaggaaagcacgaagcagcaagagatgatgaggttgtccttttggagaataggctggagaagcgttcattgaataagaacaagccggctgaacatgatactaaaatgcatattgccatagttcctagtggtatggattgtgttggcacggttcagcagcaacactgtaaaagcaagtgtggtcctgaggagtcattagaaaccttaagcagccattcgaactgtgagagtggttcagtatcgtcagtggtgtttgaaaagccactgcatttgaatcccagcctttatgatgtggagttgagtgtgctggggagcagcaacacttggcgccgtgtgccccttgtctctcttatgagtaggttgaactgtaaacccgtggtggggtatccagtctcggtggaggtcagcgatgatctgtttggctgtccttcatcaaggagagatgtccagctgcccgctacgagtcgttttcagcgcgccgtgccatcatcagcgttggagaaagaagaggtggacaggttatggcagccgcatgccaaaaggggaggggcaggggcaggggcagtgacctcgtcgtcgagaaagacgcgaggagcggcgtcgggggcgaccatcgcgtgcatcccgctccgagtcgttttcagcaggatcaacgaggcgctgagaatgccctag

SEQ ID NO: 136443 - DNA, 1991 bp, Zea Mays
ctcccaccctttccagatctgcctgcgagcccccgccacgcaccctcatgacccaccactaccccccgacgcgcatcacgcgaggggagcgtcactactgctgccgccgccaatggctctctgccctgaccgagcccatggacgacctcaccgtggggggcctcgcgctcttcgccgccgtcgctgacttcatagacgactccgctcccgcgatgccgcagccagcggcggccagcaccgcgcacgagcccgagcccgagcccgggagcccctgctcagtcgccagcgactgcagcagcgtcgccaccgccgacttcgagggatttgccgacctcggctccgcgctcgtgctcgacgacctcgtctcctccgcctccacctccgccagctctgcctccgggcccagggccgccgccgccgctcccgccaggagcgtcttcgcgctcgactgcgtgccgcgctgggggctccagtccgtgtgcggccgccgacccgagatggaggacgccgcccgcgtgctgccaaccttcttccacgtcccgctctggatgctcgccggcgacgcgcccgtcgacggcctcgaccgggcgtccttccgcctccccgcgcacttcttcggcgtctacgacggacacggcggcctccaggtcgccaactactgccgggagagaatccacgaggtactggcagaggagctcaccaaggcagaggaggccgcgtccgacgctgacctgggtggcctcgaccctaacactcagaagcactgggagaaggcctttgtgggctgcttcagccgtgttgatgcagaggtgggaggagacgcggcgaccgaagccaagcctgtggctccagacaccgtgggctcaacagcggtggttgcgcttgtctgctcatcgcatgtcatcgttgccaactgtggcgactcgcgagcggtgctctgccggggcaagcagcctgtggcgctttccgtggaccataaaccaaacagggaagatgagtatgcaaggattgaggcccagggtggcaaggtcatcaattggaatggctatcgagtcctcggtgttctcgccatgtcccggtcaattggggacagatacctgaagccatatattatcccagtccctgaggtcacaattgtcgcccgtgcaaaagatgatgagtgcctaattattgcaagtgatggcctctgggatgtgatgtcaaacgaggaggtatgtgatgctgctcgcaagcgcatactgctgtggcacaagaagaattcagatgcctcatcgtcagcccaaagaagcggtgattcgccagatgaagcggctcaagcagctgctgagtatttatcgaagctggctctccataaggggagcaaggacaacataaccgtaattgtagtcgacctcaagtcacataggaagatcaagagcagagcataaccgtggattcggtaagacttggacagtagaaatggttgttactacactaggacgctagaaaggtggagaaaaggctcctgttcagtctgctgcacatgtacactggttggcccaacactagtctttttccacaaccatataggctgccacgtttgttcagggactcatacacagatctaatctggttagaaattgggctgacgaagtaaggtaaatctgaaatatatatataacatacatatgtagattccaaatagctattactgactgggtttggggcattgtttctgtttctaacaggtaaaggtacaatagaaaccgccagcattaaactgtacctgtgctacttgtgttttggtatattgatgtctaggagtagcagattagcagtgcaaagaatactacgataccccaagttgtttctgcaacaaatgttatgtgcatgtatatcataaaataagaccatctgtaatatgaattcaattcttggcatccgacgttattaattcagttgattgccaacaggatggttgttttgctgctgagaattacatctcattcggt

SEQ ID NO: 136444 - DNA, 252 bp, Zea Mays
atgaggccggaagagctcaatcgttgcaattcttccatatataggcacatcaagcatcggctggaggccctgaggggtaagcaaatggatttcgatccgggtacatttcgcgataataaggttgagctggttggggctggtaaagttgcctacgcaggagtggctgacgctggtgggcttgtgcgccgtgacgacgtagttccacacgctcatctccgccgccgccgaggagcagtgggctctggaaggtga

SEQ ID NO: 136445 - DNA, 1724 bp, Zea Mays
gtacagaactacggtctcagatgaagcgtcaaaaacggcatctgtgttcaccttggccagacgagctcctgctcctgtgggttgttgttggatgggataagaaacaaagcatttttcactacagtggttgacgactttgactagaaagaaaagcattttcactaaccatcagagttctcaagtgcattatcgttgctacccgccggcagacttttagcccaatcataggacttgaggtgcatggaaccaaacagtatcttgctaaacactgtcatcccaggatggttgtggaggggaataattgccgatttcggtaaacagaagataccaaactgcaaagaaacagttcaatggttgtggttgagcaagcaagatccttaccgaaaaggcgcaggcttgcgggatgtgagaaactaaattaccgaaaactcggaggaaccgtagaagtgcaaataggtaactggaggggggcttgtaggatcggcatgcttgaagacggacatgcttggggcaaccctgacgtcacgaggcttcagctcatctgcatcgaaaattcatcccatgatgattattagttagtaggtttacaggaaaagcagtggatgcaatgcgatagtcagctgcatagcattagcagctatgcttgcattccatgcccaagttaaggagcacgcagcatgcattgttggagttgtgtcatggtcgcccatgcctacctgacgaccatgactgatgaatggcagattcaggatacacggatcggagtgtggtccgtggttcccttcccccacaacgacaagagtatgtatgtaacagtatttctaattaaacaggtgtacttgaaaaactacagtcatggcagggcagcagtagttatatagttggttggttggtgttggttaaaatatcactctctggctagctctttgcagtgtgccatgggatgggggagcttgccgcgacatgcatagcaaaggcagcgaaggccaaggggctttggataacaagcatgcataccaaaaacggaacctcgtcctcatcacgcaacgcaacagtaaaaaccttggataatatcgctgtctccacatcctaagcacgagaaacatggcgggtttcaatcaacacaaatcgcacaaggaccaaaaaggagatacgtactgaggaggcccgagaggcgggcgacggcgtccggcggcgggacgaagcccgggtaggagttggcgaagacctccctgctggtgtcgaagagcctctgcatgggcgagatggaagaggcggcgtcggccttcttgtggcggcggcggttcttcttggaggaggcgcgggacctgtcgcctacgggcgataggtccaccaccctggccggcctcgggtccgccaccttgctgcctccgacctgaaccggcatatcacagggctcagggttaggtcaggtgcgacgccgggcgagacgggatcttggtcttggctacgggcggcggcggcggcggcgggagggagggaggggatcgaccgacgggggtgggtataaatcctgagtcgggagagtgcaggtggagattggtatttgcatccatacaagtagtagacggacgaaggctaggcaaggcaaaaccaggggcgggagcggggcggcgacgggaacgggaggaaggaggcgagaccggagaccgctctccctccacttcctgtgggcaccaaatcccatactgcctccggttccg

SEQ ID NO: 136446 - DNA, 2852 bp, Zea Mays
ccatcccgtcccgattccaatccaatcccccgcaagcgcgaagagaggagacgagaagggggagggatccacagttcacacacaccccgcttcccatggcgctagcgctgcgctgccctcccgccgccacctcgtcccggagccccttcctaccgtcgacctccccagcccctgcggggaaggtcccgaggaggccgcccgccagctggaggtgcctcgcctactacggcgacggcggattccgcaagaactacgaccacatccccaagcagttccgcgaggagaacctcaaggatggactgatggataattacaagcatgttcctcaattcctttatggattaagtgatgctcagatggaaatgtttatgaatgacgataacccttataatcggcagtcccagaaagttacagaggaaagcgtttctgctgcgaggagctacgatgagtttggtatgtacaccttgtcaggcatgcatgagggccctgcaagttacagcatgggtatgggcatggggggcagcatgagcatgagcatgggcagaggagggagaggatatagaagaatgagaagctctgctccagatcttccgtcattgctactggactctcgaattatatttcttggaatgcctattgttccagcagtaactgagcttattgctgctcaatttctatggctagactatgacgaccgcacaaaacccatttatctgtatataaactccactggaactatggacgaaaataacgagcttgttgcatctgaaactgatgcttatgcaattgctgattttatcaatcgaagtaaatccaaggtttacacaatcaatcttagcatggcatatggtcaggctgcgatgcttctttcccttggtgtcaagggcaaaagaggagtgctgccgaattcaatcactaaattgcacctgcctaaggtgcacaaatctggtggagctgccattgatatgtggattaaggcaaaagagttagatacaaacacagattactacctcgaactcttgtctaaaggagttggtaaaccaaaggaagagcttgctgaattccttaggggcccgaggtacttccgagcacaagaggctcttgattatggacttgccgatacgatattacactcgctggatggttctttcaaaccaaaggacctgaccgcgcagctagccaaggcacaggcgatgcgccagtcaggcaagcgtgcagctgctggagctgggagatggtcaactccaaccgcacccaggtagagactagaatggtagagcaggacaatatatgttcatctggatggtcttgtggctctgctatacaaagaggccagccttttgtatacttgtgttggaaatccatggagcttggaattagacgcacggctggatagtgagatgttgtgtactgtagtgtagtgtcagttgtgacgtacgtgtatcatctgtgtgcaatctttgctacactcgacccacatacattgcattcagatagattaatttcaccagtgaaaacgatagcctgtatggcaacagatgttctgcactgatgctgatcgttggtccgttattttggtgacatgtttactggtggtgaaatgtgaatggccatgatcatctccaccgtatgtttatactgacacaacaaagtataaacatgaataaacttgttcgacaattcatcaacactgttacatttataaacatgtttacaattcacttgtgtctgtgcagtgcatgtatatatccacatcatggactgtatgtgtcacgtagtttgtggtggtgacaagcgctattacgattgtcacagagatgcatgcatggttggcttctagttcctgctggacctggagaagagcctgctggagacgaatacgccgagggagaaggcggcgacggcgacggcgatcacctccctgttcctcttgaccgtctccacaaggccctccgcccactcggagcccgccagcccctggagctcctccgccacgcgctccttgaagccacggcatgcctttctctggtgctccgccgcagctgcagcatttgcattggcccgctcttcctcggtgcgccgctccgccaggctttcggtcggatccgtcgccttgctctctgcgttggcctgcgtctcgggctgcttcttcgtgtcggctgccggtgcaggtgctgcggcggcggccttgggcttatcttcctttgccgtcgtgtcggctgccggtgcaggtgctgcggcggcggcggccgccttgggcttatcttcctttgccgccgcctccttgtgctgctgctccggctccgatttggcgcccttggctcccgccacctgcttggtggcggcagcggcatcggcatcggcatcctcgggcttcttggcctgctgctggtcttcctttgcgggcgcgggcaggcgcttgggcacggtgagcgtgaggactccaaggtcgaagcggccggcgatgtcgtcgaggttggaggtggatggcagctggaagaccttgttgaagcgggagtgcctggcgttggcgttggcggcggcggcgtcggagcgctggccgcggacggtgaggcggccggcgccgtcgacttgcaccctgaaatcttgtttcctgaagccttcttacaagcaagcaaagcaaagaatggagtcatgcatgcgcatacaggtccaggtctccattgccattagctagagctcgtactactactacctgagaggtggatgcggaggatgaagctgctggcgttctcctcccactcgtacctcgggtccaactcctgaccagcagccgcaggcggcttggacgagcctcctccttgcttgctgccggcggtggccattggcga

SEQ ID NO: 136447 - DNA, 1513 bp, Zea Mays
gacgcagggcaatcacggatttcatggtacaagataagaagaatgccagggcactgcccctgcccctgtggtttggacagctagctacatggactcctgctttcacgttctcatacaggcactcctgcactgtgctccttcgtctcctcctcccctgcctgccaccaactgccaaggtttatgttcaggtggcactgccagcagaagtgatccgttgacttcagctatgggcaacctgtgctgctgtgttcaagtcgaccagtcgactgtggccatcagggagcagtttggcaagtttgacagcgtgcttgagccaggatgccactgcatgccttggttcgccggcaagcgtgtagctgggcaactcacactcaggctgcagcaactggatgtgcgctgtgagacaaaaacaaaggacaatgttttcgtgaatgtggtggcatctattcagtaccgcgctctggctgacaaagcaagtgacgctttctacaaactgagcaacacaaggtcccagatccaagcctacgtctttgacgtgatcagagcaagcgttcccaagctccatttggacgatgctttcgagcagaaggacgagatcgcaagggcggtggaggaagagcttgagaaggccatgtcggcttatggctttgagatcgtgcagactctcatcgtggacatcgagccagacgagcatgtgaagcgcgcaatgaacgagatcaacgcagctgcgaggctcagggcggctgcaaacgagaaggcggaggcggagaagatcgtgcagatcaagcgcgcggagggggaggcagaagccaagtacctgtccgggctgggcattgcgcgccagcggcaggccatcgtggacgggctcagggacagcgtgctggggttctccgtcaacgtgccgggcaccaccgccaaggacgtcatggacatggtgctcatcacccagtacttcgacaccatgaaggagatcggcgcgtcgtccaaggcgtcctcggtgttcatcccgcatggccccggagcggtgcgcgacattgccacgcagatccgcgacggcctcctgcagggatcctctgtcgccaaacactaagctgcctgccgttgccgttgctgctgaagaacaccaccaccactattatatatataatataatgatgatcttggtaccagagtgatgcttgtctatattgttcatcactcatcgtcaccatctgctaggatggctatctttatgcttggggattggagaaaaccttatctaaccttttagggaaccggtaatatatataatgcagcatgagtttgcagtatgttcatcagaaccttttagagtctagatgcatgaatggcatcatagaatagaatacaagagttgcttccattccatcactgagttactttttcctcagcaccggttgctgctgcccgttgcaactgctagagatattaaatctgaactgatctttataaatttataataaatttatcttagcttaaaaaaatataaaactaa

SEQ ID NO: 136448 - DNA, 1533 bp, Zea Mays
gcccctgtggtttggacagctagctacatggactcctgctttcacgttctcatacaggcactcctgcactgtgctccttcgtctcctcctcccctgcctgccaccaactgccaaggtgccaagtgcagataccttccctgcctcacaaacaacgccaccctgtactagataccatcagggtcttcaaccagggcaggtttatgttcaggtggcactgccagcagaagtgatccgttgacttcagctatgggcaacctgtgctgctgtgttcaagtcgaccagtcgactgtggccatcagggagcagtttggcaagtttgacagcgtgcttgagccaggatgccactgcatgccttggttcgccggcaagcgtgtagctgggcaactcacactcaggctgcagcaactggatgtgcgctgtgagacaaaaacaaaggacaatgttttcgtgaatgtggtggcatctattcagtaccgcgctctggctgacaaagcaagtgacgctttctacaaactgagcaacacaaggtcccagatccaagcctacgtctttgacgtgatcagagcaagcgttcccaagctccatttggacgatgctttcgagcagaaggacgagatcgcaagggcggtggaggaagagcttgagaaggccatgtcggcttatggctttgagatcgtgcagactctcatcgtggacatcgagccagacgagcatgtgaagcgcgcaatgaacgagatcaacgcagctgcgaggctcagggcggctgcaaacgagaaggcggaggcggagaagatcgtgcagatcaagcgcgcggagggggaggcagaagccaagtacctgtccgggctgggcattgcgcgccagcggcaggccatcgtggacgggctcagggacagcgtgctggggttctccgtcaacgtgccgggcaccaccgccaaggacgtcatggacatggtgctcatcacccagtacttcgacaccatgaaggagatcggcgcgtcgtccaaggcgtcctcggtgttcatcccgcatggccccggagcggtgcgcgacattgccacgcagatccgcgacggcctcctgcagggatcctctgtcgccaaacactaagctgcctgccgttgccgttgctgctgaagaacaccaccaccactattatatatataatataatgatgatcttggtaccagagtgatgcttgtctatattgttcatcactcatcgtcaccatctgctaggatggctatctttatgcttggggattggagaaaaccttatctaaccttttagggaaccggtaatatatataatgcagcatgagtttgcagtatgttcatcagaaccttttagagtctagatgcatgaatggcatcatagaatagaatacaagagttgcttccattccatcactgagttactttttcctcagcaccggttgctgctgcccgttgcaactgctagagatattaaatctgaactgatctttataaatttataataaatttatcttagcttaaaaaaatataaaactaa

SEQ ID NO: 136449 - DNA, 1529 bp, Zea Mays
gcccctgtggtttggacagctagctacatggactcctgctttcacgttctcatacaggcactcctgcactgtgctccttcgtctcctcctcccctgcctgccaccaactgccaaggtgccaagtgcagataccttccctgcctcacaaacaacgccaccctgtactagataccatcagggtcttcaaccagggtttatgttcaggtggcactgccagcagaagtgatccgttgacttcagctatgggcaacctgtgctgctgtgttcaagtcgaccagtcgactgtggccatcagggagcagtttggcaagtttgacagcgtgcttgagccaggatgccactgcatgccttggttcgccggcaagcgtgtagctgggcaactcacactcaggctgcagcaactggatgtgcgctgtgagacaaaaacaaaggacaatgttttcgtgaatgtggtggcatctattcagtaccgcgctctggctgacaaagcaagtgacgctttctacaaactgagcaacacaaggtcccagatccaagcctacgtctttgacgtgatcagagcaagcgttcccaagctccatttggacgatgctttcgagcagaaggacgagatcgcaagggcggtggaggaagagcttgagaaggccatgtcggcttatggctttgagatcgtgcagactctcatcgtggacatcgagccagacgagcatgtgaagcgcgcaatgaacgagatcaacgcagctgcgaggctcagggcggctgcaaacgagaaggcggaggcggagaagatcgtgcagatcaagcgcgcggagggggaggcagaagccaagtacctgtccgggctgggcattgcgcgccagcggcaggccatcgtggacgggctcagggacagcgtgctggggttctccgtcaacgtgccgggcaccaccgccaaggacgtcatggacatggtgctcatcacccagtacttcgacaccatgaaggagatcggcgcgtcgtccaaggcgtcctcggtgttcatcccgcatggccccggagcggtgcgcgacattgccacgcagatccgcgacggcctcctgcagggatcctctgtcgccaaacactaagctgcctgccgttgccgttgctgctgaagaacaccaccaccactattatatatataatataatgatgatcttggtaccagagtgatgcttgtctatattgttcatcactcatcgtcaccatctgctaggatggctatctttatgcttggggattggagaaaaccttatctaaccttttagggaaccggtaatatatataatgcagcatgagtttgcagtatgttcatcagaaccttttagagtctagatgcatgaatggcatcatagaatagaatacaagagttgcttccattccatcactgagttactttttcctcagcaccggttgctgctgcccgttgcaactgctagagatattaaatctgaactgatctttataaatttataataaatttatcttagcttaaaaaaatataaaactaa

SEQ ID NO: 136450 - DNA, 1836 bp, Zea Mays
aaggtaataatggccacactttcttcttcttctttgcttgccttctgcactgcaattgccgccgcaagtgctgtgtgtttgcctctcgttcatccccaaaccctacctctcgcctcggtctcctttgaatttctccatcgatctattattgttcctatataaaaggatgctgtcgtcgggaaggaaatcctcttgtctgccgcgacgactccaaagtctactgcaaacctgcattcttatccgctgcagtttctgattccgacaccattcatccagtttccatacttttgaccggccctataatttctcaaacgtgtggaggcgcctgcaattcgcccccagatatcccccccaaccaatttgatagaatttccaagttttttttcccgcaagtcttccgaatctcgtcaacgtcaaggtgccaagtgcagataccttccctgcctcacaaacaacgccaccctgtactagataccatcagggtcttcaaccagggcaggtttatgttcaggtggcactgccagcagaagtgatccgttgacttcagctatgggcaacctgtgctgctgtgttcaagtcgaccagtcgactgtggccatcagggagcagtttggcaagtttgacagcgtgcttgagccaggatgccactgcatgccttggttcgccggcaagcgtgtagctgggcaactcacactcaggctgcagcaactggatgtgcgctgtgagacaaaaacaaaggacaatgttttcgtgaatgtggtggcatctattcagtaccgcgctctggctgacaaagcaagtgacgctttctacaaactgagcaacacaaggtcccagatccaagcctacgtctttgacgtgatcagagcaagcgttcccaagctccatttggacgatgctttcgagcagaaggacgagatcgcaagggcggtggaggaagagcttgagaaggccatgtcggcttatggctttgagatcgtgcagactctcatcgtggacatcgagccagacgagcatgtgaagcgcgcaatgaacgagatcaacgcagctgcgaggctcagggcggctgcaaacgagaaggcggaggcggagaagatcgtgcagatcaagcgcgcggagggggaggcagaagccaagtacctgtccgggctgggcattgcgcgccagcggcaggccatcgtggacgggctcagggacagcgtgctggggttctccgtcaacgtgccgggcaccaccgccaaggacgtcatggacatggtgctcatcacccagtacttcgacaccatgaaggagatcggcgcgtcgtccaaggcgtcctcggtgttcatcccgcatggccccggagcggtgcgcgacattgccacgcagatccgcgacggcctcctgcagggatcctctgtcgccaaacactaagctgcctgccgttgccgttgctgctgaagaacaccaccaccactattatatatataatataatgatgatcttggtaccagagtgatgcttgtctatattgttcatcactcatcgtcaccatctgctaggatggctatctttatgcttggggattggagaaaaccttatctaaccttttagggaaccggtaatatatataatgcagcatgagtttgcagtatgttcatcagaaccttttagagtctagatgcatgaatggcatcatagaatagaatacaagagttgcttccattccatcactgagttactttttcctcagcaccggttgctgctgcccgttgcaactgctagagatattaaatctgaactgatctttataaatttataataaatttatcttagcttaaaaaaatataaaactaa

SEQ ID NO: 136451 - DNA, 1470 bp, Zea Mays
tcgtcaacgtcaaggtcgagcgtttagcacgcaacccattttgtattgtcattatatatataaataaataataaaagcgacatgttgtgcttgtattgtatgtttgctccaatctttcaaattcgctagatgatgctgaccctcccagtctgcttctttatgatgaatccaatccgtcgtggagacatctaagcaggctttactgaatctagttgctatttaaccaggtgccaagtgcagataccttccctgcctcacaaacaacgccacccttgcttattcacactattaattatcggtagtagtaactggcaactattgggcctataggtttatgttcaggtggcactgccagcagaagtgatccgttgacttcagctatgggcaacctgtgctgctgtgttcaagtcgaccagtcgactgtggccatcagggagcagtttggcaagtttgacagcgtgcttgagccaggatgccactgcatgccttggttcgccggcaagcgtgtagctgggcaactcacactcaggctgcagcaactggatgtgcgctgtgagacaaaaacaaaggacaatgttttcgtgaatgtggtggcatctattcagtaccgcgctctggctgacaaagcaagtgacgctttctacaaactgagcaacacaaggtcccagatccaagcctacgtctttgacgtgatcagagcaagcgttcccaagctccatttggacgatgctttcgagcagaaggacgagatcgcaagggcggtggaggaagagcttgagaaggccatgtcggcttatggctttgagatcgtgcagactctcatcgtggacatcgagccagacgagcatgtgaagcgcgcaatgaacgagatcaacgcagctgcgaggctcagggcggctgcaaacgagaaggcggaggcggagaagatcgtgcagatcaagcgcgcggagggggaggcagaagccaagtacctgtccgggctgggcattgcgcgccagcggcaggccatcgtggacgggctcagggacagcgtgctggggttctccgtcaacgtgccgggcaccaccgccaaggacgtcatggacatggtgctcatcacccagtacttcgacaccatgaaggagatcggcgcgtcgtccaaggcgtcctcggtgttcatcccgcatggccccggagcggtgcgcgacattgccacgcagatccgcgacggcctcctgcagggatcctctgtcgccaaacactaagctgcctgccgttgccgttgctgctgaagaacaccaccaccactattatatatataatataatgatgatcttggtaccagagtgatgcttgtctatattgttcatcactcatcgtcaccatctgctaggatggctatctttatgcttggggattggagaaaaccttatctaaccttttagggaaccggtaatatatataatgcagcatgagtttgcagtatgttca

SEQ ID NO: 136452 - DNA, 1484 bp, Zea Mays
gatgaatccaatccgtcgtggagacatctaagcaggctttactgaatctagttgctatttaaccaggtgccaagtgcagataccttccctgcctcacaaacaacgccaccctgtactagataccatcagggtcttcaaccagggcaggtttatgttcaggtggcactgccagcagaagtgatccgttgacttcagctatgggcaacctgtgctgctgtgttcaagtcgaccagtcgactgtggccatcagggagcagtttggcaagtttgacagcgtgcttgagccaggatgccactgcatgccttggttcgccggcaagcgtgtagctgggcaactcacactcaggctgcagcaactggatgtgcgctgtgagacaaaaacaaaggacaatgttttcgtgaatgtggtggcatctattcagtaccgcgctctggctgacaaagcaagtgacgctttctacaaactgagcaacacaaggtcccagatccaagcctacgtctttgacgtgatcagagcaagcgttcccaagctccatttggacgatgctttcgagcagaaggacgagatcgcaagggcggtggaggaagagcttgagaaggccatgtcggcttatggctttgagatcgtgcagactctcatcgtggacatcgagccagacgagcatgtgaagcgcgcaatgaacgagatcaacgcagctgcgaggctcagggcggctgcaaacgagaaggcggaggcggagaagatcgtgcagatcaagcgcgcggagggggaggcagaagccaagtacctgtccgggctgggcattgcgcgccagcggcaggccatcgtggacgggctcagggacagcgtgctggggttctccgtcaacgtgccgggcaccaccgccaaggacgtcatggacatggtgctcatcacccagtacttcgacaccatgaaggagatcggcgcgtcgtccaaggcgtcctcggtgttcatcccgcatggccccggagcggtgcgcgacattgccacgcagatccgcgacggcctcctgcagggatcctctgtcgccaaacactaagctgcctgccgttgccgttgctgctgaagaacaccaccaccactattatatatataatataatgatgatcttggtaccagagtgatgcttgtctatattgttcatcactcatcgtcaccatctgctaggatggctatctttatgcttggggattggagaaaaccttatctaaccttttagggaaccggtaatatatataatgcagcatgagtttgcagtatgttcatcagaaccttttagagtctagatgcatgaatggcatcatagaatagaatacaagagttgcttccattccatcactgagttactttttcctcagcaccggttgctgctgcccgttgcaactgctagagatattaaatctgaactgatctttataaatttataataaatttatcttagcttaaaaaaatataaaactaa

SEQ ID NO: 136453 - DNA, 2262 bp, Zea Mays
cctcgccttccgcttaaaccccatcccaactcatcgaagccctcgccaatcggcacgaccatggctgccatccacctgcgcccgctccgctccgtcgccgtctcctccgcgaggtaccgctcgcttctccaccttctcgcccgccccctctcctcttcccaatcgtcccacgcctaccaccctttccccaccccggccgccgccgcccccaaccatgttcaccaccaccaccctacccaccacagccagcagcagtcggcgccgccgaggaacccgcctccccttggcccctctccgcagtggtccccgcagcctccgccgccccgcggctatgggcctccaccgccgcagcacccgcatgtgccgccgccgccgccacgcggctacggacctctatcaccgggacagcacttgccgccttcgccacacggctacggccctccactgccgccgccgccaccaccacacggccacggacctccgccaccaggacagcatgttgtgccgccgctgcctccatcacacggccacagacctccaccatcgtgccagcatgtgccaccgccgccgccatcgcacggtcacggacctccgccaccgggccagtacgtgccgtctgcgctgccacgcgaccacgggcctccacccccgcaccagcaggcaccgcctccaccgccgccgcctgagcctgtagcggggcctggggagctgatgggattgtgccgggagggtcgggtgaaggacgccgtggagcttctggacaagggggcgtgcgccgacccagccgccttctacgagctcgcggcagcctgctccaaccctaagctgctggaggagctcaggaaggtgcacgacttcttcctccgctcacccttccgcggcgatctacgggtcaacaacaagctgctaaagatgtacgccaagtgtgcagccatgccccacgcccgcaggacgttcgacaatatgcctgaccgcgacatggactcgtggcacatcgtgatcgatggctactcggtcaatgggctcggggacgaggcgctgcgactgttcgagctgatgaaggagtgtatgtcacccaccagccatacctacctgcttgtgctcaatgcttgtgccaattccgaggccattgaggaggcgctcctttactttgatgccatgcacagggaccatggcattgagcctggtgtggagcactatgttggaatcattgaggttttggggaagtcagggcacctcaatgaggccctggagttcattgagaagctgccgtttgagcccaatgccatggtgtgggagtcgctcttaaacctggcccggatgaatggagacattgatcttgaggaccgggcagaggagttgttggtgtcacttgatccatccaagtcaaaccataagaagctcccaaccccacctccaaagaggcgtctgggaattaacatgcttgatgggaggaacaagctagtagagtataggcttccaccaaagattgaaaagaaggtggtcaatgagcagaggtacgtcccagacacaagatatgtgctccatgacattgaccaggaggccaaggaacaggcattgctgtaccacagtgagaggctggcaattgcttatggtctgattagcaccccagcaaggactccacttcgcatcattaagaacctgaggatatgtggggactgccacaatgccatcaagatcatgtcaaggatagttgggagagagctcattgtgagggacaataagaggtttcaccatttcaaggatggaaagtgctcctgtggagattattggtgataatggattaaagtcattcctctcaccagtatttgctgccatcctttacatggatatatatgctggcagccatggtttcaattgataataagcattatgaaggtatccaatggtgatgttagtagtttctcatccttaaatacacttaagatccttagatgcaagcacctgtatcatgcaaggttatcgcttcttgatgcactaatcaatcttactctctgtatcagtttcatgtttctcacgggaaacatgtgctaatttgaaatatatagctatatggttgtaagaactgattcggccttgctttaatttggatgaagaactaaaatgaatcttatgtatttgtgcacataaattttattttctcgtttgattatgtgcattctatgttgggatatgctactaattaatttaattagtatttttgctattgtcaccattgcttgcccacttaaccagactatc

SEQ ID NO: 136454 - DNA, 459 bp, Zea Mays
atggtagcaacatcgagggtcggcgccaggggctggtacaccggttctggtatggtttttcctggcgtcgtcagccatgcggctggtgatgaagacggccccaagggcgcaaaacaactggtaggcatcgccccccacgaagatgtaggtgtcggagtggccgacgatgggcaggccgatgttgctggagagcgccatgctgatggcgttgagccgcgcaaacagatcgtcgaagtacgcctggtcggcaacccaaagacccatgagaggcagaggcgtggccgtgggtcgctcgtactgcgtgatgttggtgttggggttccgatagtagaggtagccggtgatgccgtcgacgaggccgcgccacggcctgggcagtaccgaaattccggcgcgtaccacggggctgcgcgcccggacgagccactaccgcctgacgccgggtctggtcgggtttag

SEQ ID NO: 136455 - DNA, 165 bp, Zea Mays
ccgccgctagccgccagctcgcgcgccccgtcgccgccaccctgcgcgccccgccgtcgccaccctgcgcctccaccctgccgtcatgccccgcctccttggtcgccgccaccgaacgtcgcctccagcgcctctctggctccgtgcctagccccacgcgcctcc

SEQ ID NO: 136456 - DNA, 935 bp, Zea Mays
tcgtgtcgtcggcaaggcagcaggtagctagctagtaggaaagcaatgcggtggtacgcgaacgcgaaggaggttggcggcggcggcggcggcgccggcacggtggtgctggcccacggctacggcgccaaccagacgctgtgggacaagctcctgccggccctctcccagcaccacagggtcatcctcttcgactgggacttcaccggcgaacgggaggaggcagcggaacggtacacgttcggcaggtttgccgacgaccttatcgcgctcatggacgacaagggggtgcggggcgcggtggtggtgggccactccatgtccgccatggtcgcctgcatcgcatcggccaggaggcccgacctcttcgcccacctcgtcctcctctgcgcgtctcccaggtacctggactcgccttccgaggggtacgtgggtggcttcgaccgggcgagcatcgacgccatgcttgccgccatggagtcggacttgggcgcctgggtgaggggcttcgtgcccaacgccgcgggcgccgacccgtccgccactgcagagctggagcagagcttcctgtccatgcacccgcgcgtggcgctggaggtggcccggatgatcttcctatgcgaccagcgcggggccctggacgccgtggccgcgccgtgcaccgtcgtccaggtgtcggacgacttcgcggcggcccccgccgtggcggagtacatgaggggcaggatgaagcgggcggcggaggtggaggtggtggtcatcgactccgtcggacacttcccgcagctcgtcgcgccgcagcagctgctcgccgtgctgaagcgcgtgctacagcgtgctgctgcagccaacgaggagcgcgcggcggcagcggaagaagaggccgatggtggcatcgatgtcacggcctaggtagatgcctctgtgcttgtaag

SEQ ID NO: 136457 - DNA, 122 bp, Zea Mays
gttgctattagggcttcaacggttcccaacactaaattttactttttcaccgtccctcatcccctaaagtatagctcctataacgatttcctctacatctatcatctatacataatactccc

SEQ ID NO: 136458 - DNA, 725 bp, Zea Mays
tgacggcatagattgcttcgaccttggagcgatgtctacagtaaatgaacggcatagattgcttcgaccttggagagactcatgacatgaggaaatagccagtcatcttttctactcgccgatgagtcctaaaccaagaaccagggaataataataaagtttctgtacatgctgctgggcaaacagaacacgaataggatccacatccacaagtctcaacctcccctcccacggaatcgatccgactccgcccaccaccaaggaaatgggagtaaaatacctactccagcacaagatgcaagccttcccctatctctatcagtaccaaccatccaataaagccccaccccgcaaggattcccaaatatttcgaacggcctgagtccatgatcgagcaggcaaggtaagggataacccggcgtactgaactgaaaccgggttcttggagatggtaatctgccgtgctctcactgggagttaggcctggaacctcgatgacggccccgactctcttcggtcactgcttatctcaaactcgcttgaacttgccttggactcgttgtctgcgtggctgctgtggcctctccggctccggcggtccttcagaggatcacacagcacaagatttagaacaaggaattacggtatcgacggaacaaagctcaagatgtacaacaaacctcccgtgaaggcacgtcttctgcctcgagcatccgaacaacctg

SEQ ID NO: 136459 - DNA, 800 bp, Zea Mays
atgaaggcactgtctctatttttgatgggtcagtagccaccctctgttggctaacgacatgtcccaaatagcctgttttctgttgggatatgctcttgactgcggctgcgcggccgtcggcgatggaggcatggcaccgcgggcaggagcagcaagcccggggcatcgtgttgtaggtgagggacgggaacctggagcgggcgctgtcggtcatggagctcaagatgcggtccgccgcatccggtcgcgcacccaccgccacgtgaaggactcggagaagcgcgtgctcgcgcgtaaggcgctaatgcagcacgtccggtaccaggagctcggcaagaagctccgcgagatcctcatcaggaacatcaggtcagggccatcctcccatctccaccaatacctgtacctgctagcgcactgcctctgtgtgcttgtctttgtcacttcttgctggttgatttgttgatcagacatttatagtggcttgcggtgacgaattggaacggattctatagtgatcgccaagtgctcgacgaaatgtctcgtgaagttctatctaccacgcttagtggaattgagtgtgtttgcggattgagttgcgctgaggaagaagtttcagtgctgagcgcagtgtcaacccggtgcaggtatctggattggaaggtttgtgtgagaggaacactttcatgtgcacccaactcatccttagctcacttaggcatccacgaaacaggtgtgttgtatggtggtaccaggatatatgaacatgctacaaattttgaacatgctacaaatttagg

SEQ ID NO: 136460 - DNA, 783 bp, Zea Mays
atgaaggcactgtctctatttttgatgggtcagtagccaccctctgttggctaacgacatgtcccaaatagcctgttttctgttgggatatgctcttgactgcggctgcgcggccgtcggcgatggaggcatggcaccgcgggcaggagcagcaagcccggggcatcgtgttgtaggtgagggacgggaacctggagcgggcgctgtcggtcatggagctcaagatgcggtccgccgcatccggtcgcgcacccaccgccacgtgaaggactcggagaagcgcgtgctcgcgcgtaaggcgctaatgcagcacgtccggtaccaggagctcggcaagaagctccgcgagatcctcatcaggaacatcagacatttatagtggcttgcggtgacgaattggaacggattctatagtgatcgccaagtgctcgacgaaatgtctcgtgaagttctatctaccacgcttagtggaattgagtgtgtttgcggattgagttgcgctgaggaagaagtttcagtgctgagcgcagtgtcaacccggtgcaggtatctggattggaaggtttgtgtgagaggaacactttcatgtgcacccaactcatccttagctcacttaggcatccacgaaacaggtgtgttgtatggtggtaccaggatatatgaacatgctacaaattttgaacatgctacaaatttaggagccttttggtagatttttcatggcatgtggtgatccaacgtatcaggtttgtgtcactaatttgatcctgcatctttatcata

SEQ ID NO: 136461 - DNA, 159 bp, Zea Mays
atgcagggcggcaggatccgcgtccaacccggccgcaccgtcgtgaagctagcagagaagatcgccaaggactggcggcggctccacacccgccccggcgagcagctgctcgtgctcgagggcgaggacctcgtccacgacggcgccgtcatcacctga

SEQ ID NO: 136462 - DNA, 912 bp, Zea Mays
gcatctataaagttatcagggttcagtagaaatgcaatcactggctgcatttccctgtgttgtttatagtatgattacatagggaataagaaaataataataaaaaaagagagtagcatttgcttaattgtatttccttggcacccaagcttccttctgaaactgtagccttctgctttttccgcagtgtgctgtgcgccgcaagcttcctcgctgaaccgggctgcgaaattgggaattgggagcgccaggaagcttctgtgatcaggtcagctccaggtctccgcttgttgattcccactaccagatccaagggaccacctgttcaactagggcgtctgctagaatggtatggtaatcgcacgcgtttcgtgccagccaaggagcctgatcctgacgtggttcgtgggacgtcaacgcgatgacggcagcacttgaaaccattgtggctggaaagcccagcggccagagctatattggtattgcctcccttcttttatttaaaataataagggcattcccttctctaaatttaatttatgatgcggttatttgctaccgtacgtaagcattgcccgtgtgtatgttggaattggaacgccaagtcaaaaaggatggacgggtcgcctgcaaaattgaccggcgtgtctttttttttgaaagtttaggagggggaagccctactgtaaattttgaattaaaatggttaattacagcagagtggagagtcgaaatctgcagctaggtacaagtgaatcagatgctagaggggagcaagggatagaacatagaaggcactaaaagaactaaatttgtctctgatgaagccagtctgaaattgagttgtcatatttttctcttgctctgtgaatgaccataagtagtttctttctgaactcatttttgcaattc

SEQ ID NO: 136463 - DNA, 1738 bp, Zea Mays
gatgctggtgcgcagcgtcgtgaacgagtggttgccgcccgagtgcgcgatctggtcctctccggcttcggctacctgcgctcgcgcacgtcgtccgaccacaccatcatcgtcgagaagaagaacgacgggttcgctaacaactacgtctactgcgctgtgaagacttacctcgccacgcgcatgaacaccgacatccagcagcgcctgcgcgtcagcagcatggacgaggacgacaagatgatggtcagcatggatgagggcgacgagatgctcgatgtttatcaaggcacggagttcaagtggtgccttgtctgcaaagacaactcaaatgactccctcaacagcagccagaacgagtcccacttcttcgagctgaccttcaacaagaagcacaaggacaaagccctcagatcgtacctcccgttcattttggccacagccaaggccattaaagcccaggagagaaccctcatgatacacatgactgagtacggcaattggtccccgattgaactccaccacccatctacattcgacacgcttgccatggacaagaagctgaagcagtccatcatcgatgacctggacaggttcatgaagaggaaagattactacaggaagattggcaaggcatggaagcggggttaccttctgtatggtccacctgggactgggaagtcaagcctaatcgcagccatggccaaccatctcaggtttgacatatatgatctcgagctaactgcggtcacatccaactcagacctcaggaggcttcttgttaacatggacaaccgatccattctagtcattgaagatattgactgcaccatcgaactcaaacaacggcaggaggccgagggacatgatgagtcagattctacagaacaaaacaagggggaaggcaaggtaacgctgtctggactgctcaactttgttgatgggctgtggtcaacaagtggggaagaaaggatcatcgtcttcacaaccaattacaaggagcggcttgacccggcactgctgcggcctggaaggatggacatgcacatccacatggggtattgcaccccagagtctttccaaatccttgccaacaactaccactccatcgagtaccatgacacgtatccagagattgagaaactgatcaaggaggtgacggttacgcccgcagaggttgctgaggttctgatgaggaacgatgacactgatgttgtgctccatgatcttgtcgatttcctgaagtcaaaaatcaaggatgccaatgagatcaagactgaacacaaggaagcagacaaccagctagatgagaagaaaaatgacaaaaaataaaacccagtgcatttccttccaaaaaagaagatgaaagctaatggcggtttaagactgagcacaaggaagcaaataaccagctggatgaggagaaaggcaacgagatagtgagaaaaaaaaacagtgcaattccttctagtagaggaaagaagatgaaagcaacacatcgtatttcatatagatagatcctacaggggatccattggcatatgtgagtgtttgcatattgttaacattatgtttttggtgatcaatgaggtgtaatggtacttgcagtgcatctgcagaattctgttagtgcttgtttaggagcatgtatgcagaactacagatatgtaaaatcccattacaacttacatgaaactgcaaacatgccattgcatgcaaatggcaaccttggaaagtg

SEQ ID NO: 136464 - DNA, 828 bp, Zea Mays
cctaaacctagcgcgcgccactctccctggcagccgccgccaggaagcctccactccagcgcccgagcgcgacggcacgaggccgtgagcacctgcagcccgcagaggcagtgccgctgcctgccttcgtccgagcgagcgagcccaggcggccaggccctaagggctgaccgagccgccgctggccgctgcgcgcgagcagccgctgagctgcctccgagccagccgccacccgccaggccgccagcacggtcgcgctgcccaccctggtacgccaatcctcatctctatgcggcgcccaagaaaactctgcacaaagctcaactggtcagctccttttgctaactctatgatcaattatatctgtatgtaagacctacatgtatgttctcaccggatcccagctctaagaggttgaaattagtcctcgtctcccactttgcaaagtcctggtggtctgaaacaatagaaaagccattgtatgtagcgtaaaaatgcatggaattcactatcacataatagcaaatctggatgctagacacacgtatcggtcttctgtgacaatcatggtacaaggtttacctcgatgattattcttttctgagacccatcatcctccaacactggtatatcattttatttaattctactatttaatttaatttaatgctacttgcaagaatgcatagtgtacactatataattcaatgctacgaactttacacttggaaattacctgattttagttgtggcggccctggacctctgtaacacaaatggagaggcatatgtaaacaccttacttgtagcttgtgtgttagtagttcc

SEQ ID NO: 136465 - DNA, 1410 bp, Zea Mays
cctaaacctagcgcgcgccactctccctggcagccgccgccaggaagcctccactccagcgcccgagcgcgacggcacgaggccgtgagcacctgcagcccgcagaggcagtgccgctgcctgccttcgtccgagcgagcgagcccaggcggccaggccctaagggctgaccgagccgccgctggccgctgcgcgcgagcagccgctgagctgcctccgagccagccgccacccgccaggccgccagcacggtcgcgctgcccaccctgccggccgtcgacaccaagcaggccttgagcttgtggcagccgtggtgatcggtcttatcaccagtggtgtcgttagatgccaaatgcagtttgctctgcacgaggattttgctttctggtgtctgtcccgttggaaccggggatttcctgagtgacgaatagacttcccatggcagctattctgttgaggatgtgggaaaggtgcactgcagagtctgagaagtgagagaaataaatgacaagtggtttcaactaaaccaagcaccacagttggaggtcaaatccttggaagacaatattgtgaagttattgtagcttgtgtgctaaaacgagatacagttttgcctcgccctggagtgatgtcgttgtggtgcttttgtgactgatcatctctggagcttttgtgaatgatctagctagatatctgtaaatgatctagttgtgaatgatattataattgtgatgcttttgtgaatatataattgtggtgcttttgtatttataatcaccgacaagcaaaaaggacagttttcataaattataattagaaacacatgtggatcatctggcaacgaacgaggaatcgaatggagtacgtacgtacgcgcgtacactgtctttatacatgccatcgacgacgacaattaacctaagaaatgaatgatgagggccatacatcatcagccagctgacctagacggcgtcaccgttctcggccgccgggtagtagcccgcgtcaacgtcgccgcggcacgacagggaggacgcggagcgcggcggcacgggcgggcgcgccagccggcggccgaagctgtcgtagtggatggcgcccgcgaagtccagcggctggcagcgctcccccatcaggatccgccggctccagagggccacctcgcccgccgaccccgacgacgccctgcccttgtcgatggccgccccgcgcgcgcacagcgccgccgcaaccacgtcggccgtcgtctggtggtgcttcgttggcctcctcctctggtggcgccggaggaggcgccgcgtcgcgcgcgacacgcgcactgtgcacgccgccaccaggcccgacaccctgcccaggagttcctcgccgtagcccgccgccatgcttttgtcgtgcgatgatctggaaagt

SEQ ID NO: 136466 - DNA, 1488 bp, Zea Mays
cctaaacctagcgcgcgccactctccctggcagccgccgccaggaagcctccactccagcgcccgagcgcgacggcacgaggccgtgagcacctgcagcccgcagaggcagtgccgctgcctgccttcgtccgagcgagcgagcccaggcggccaggccctaagggctgaccgagccgccgctggccgctgcgcgcgagcagccgctgagctgcctccgagccagccgccacccgccaggccgccagcacggtcgcgctgcccaccctggtacgccaatcctcatctctatgcggcgcccaagaaaactctgcacaaagctcaactgccggccgtcgacaccaagcaggccttgagcttgtggcagccgtggtgatcggtcttatcaccagtggtgtcgttagatgccaaatgcagtttgctctgcacgaggattttgctttctggtgtctgtcccgttggaaccggggatttcctgagtgacgaatagacttcccatggcagctattctgttgaggatgtgggaaaggtgcactgcagagtctgagaagtgagagaaataaatgacaagtggtttcaactaaaccaagcaccacagttggaggtcaaatccttggaagacaatattgtgaagttattgtagcttgtgtgctaaaacgagatacagttttgcctcgccctggagtgatgtcgttgtggtgcttttgtgactgatcatctctggagcttttgtgaatgatctagctagatatctgtaaatgatctagttgtgaatgatattataattgtgatgcttttgtgaatatataattgtggtgcttttgtatttataatcaccgacaagcaaaaaggacagttttcataaattataattagaaacacatgtggatcatctggcaacgaacgaggaatcgaatggagtacgtacgtacgcgcgtacactgtctttatacatgccatcgacgacgacaattaacctaagaaatgaatgatgagggccatacatcatcagccagctgacctagacggcgtcaccgttctcggccgccgggtagtagcccgcgtcaacgtcgccgcggcacgacagggaggacgcggagcgcggcggcacgggcgggcgcgccagccggcggccgaagctgtcgtagtggatggcgcccgcgaagtccagcggctggcagcgctcccccatcaggatccgccggctccagagggccacctcgcccgccgaccccgacgacgccctgcccttgtcgatggccgccccgcgcgcgcacagcgccgccgcaaccacgtcggccgtcgtctggtggtgcttcgttggcctcctcctctggtggcgccggaggaggcgccgcgtcgcgcgcgacacgcgcactgtgcacgccgccaccaggcccgacaccctgcccaggagttcctcgccgtagcccgccgccatgcttttgtcgtgcgatgatctggaaagtgctacagcagcgggttcaat

SEQ ID NO: 136467 - DNA, 1725 bp, Zea Mays
gtcggggtccgggcggagcagcaggttcgacgacttgacgtcgccgtgcgccaggccgtgcgccgtgtgcaggtgtgccacgccgcgcgcggcgcacagcgcggcacgcacccgcgcgtcccagtccatggccgtccgcccggtgccgcggctccctggttgagttgaatcatgcgtgaatagatacagaccatgcatgatgaacatgttctacgaagaaaaaaatattcctcaaactggatacgtgaactggtcactgtctatctgcagtcatcaccagtgccctaccctacctcccttcgaaatacactcatggtctcatggagcaagcaagatatcttggtcaaggaagagaacgaagtagctgtcaggcaggcagagaggccggataaagatattaatgtacgacgcgacagcgcatccgacttgaacaattggccacagtaactcagaggacgccatcgccgggataagcgatggctgtggaaccacaaattcaaccacgaagtaactcagacgacgtgctcggatcggaaaaggctgtagatcgctcaccgtggaggcgggcggagaggctgccgccgggaaggtagtcgaggacgagcagtttctcgtccttggagtagtagtacccgcgcagcggcaccaggttgcggtgcccctcggcggctccggccgcggcctccacgcaggcgccaaactctcgccgcgccgccgccacgtcacgcaggcgcttgacaaccacggtggcgccgtcctccagcaccgccttgtaggacgtgccaaggccgcccttcccgagcacctccgcggacgcgcgcagcaggtcctccaggtcgaagctgtaccggaggtgcgcgtgtttccccacgaacaccagccggccacgctccgcgctgccggcggcagcgctgatgtccttggaggaggacgtgaagtcgccgcccgacgccgtcagcccgcgcgtgggcggcgtcgccttcgcctcctccgccgccgccgagtgttgacggcgccggcgtaccgcgcacagggatagaaggagcaccaccaccagcagggccgccgcgccacagcccaccgcgatggccacgaccgccgcgccagaaagcttccgtttcttcgtcgcccccgtggacggcacggcgcacgggcggtcgacgaggggcttgccgcagaggccggggttcccttggaacgactccggcgggaatcgcgcgaggttcgcggggatgggtccttggaggtcgttaaacgagacgttgaacgcctccagcctggcgccgctcccagtcccagcaggcaggccaccggagagccggttcgcgtcgagcttgagcgaccgtagcctgggcagccccacgagcagcgcgtccggtatgggtcccgagagctggttgcgcgagagcgcgaggtgctcgagctcgggcagcgcccccgtggcgagctccggcgggacggcgcccgacagcaggttgccctggaggtagagcgcgcggaggcgcgggagagcgaggacgtcgggcgggacgggccccgcgaggcggttgtcacgcagcgacaggacctggaggttctggaggccggagagggtgccggtagggacggcgccgacgaggcccaccccggggaggtggagctcggtcaccgtggcgttggcgggggagtcgcagcggacgcccgtccaatagcacgtggggagggatgcgttccattgcagcggcc

SEQ ID NO: 136468 - DNA, 3978 bp, Zea Mays
gactgcccgtgcgcgccctcgctcagtcgctctcgcgcgcggcgacaactgagccaccgccgacggtccaactcttcgtcggaccctttgccggcgacgagcacccaccaggtaacccctcactctcttccctcgcatgctcttttgcaggggtttcatggtagcgtgacctgtctcggcctagaaaatgtatataaagaaggcaagatgttctgccctgggtacaatttggtgatatttttctccccatgtaagcttgttggcttattggccatctgtctggttcaggtcgtaatcgaagggtttaagagctacaaggaggagatatcaacagagcccttcagtcccaaagttaacgtagttgttggtgcaaatggatctggcaaatcaaatttctttcatgctatacgatttgtcctgagtgacatgtttcagaacctgcgaagtgaagataggggtgcccttctccatgaaggtgctggacactcggttgtatctgcttttgttgagatagtgtttgacaattcagacaatcgtattccagttgataaagaagaggtacgcttgcgcaggacaattgcttcaaagaaggatgaatactacttggatgggaagcatgtcagtaaaactgaagtcatgaatctgctagagagtgctggtttctctcgttctaatccatactacgttgtgcagcaaggaaagattgcatcccttaccttgatgaaagattctgaacgactggatcttctcaaagagattggtggtacacgtgtttatgaggatagacggaaggagagcttgaaaataatgaccgaaacagccaacaaaaggaagcagattgatcaagttgtccactacttagaggaaagactgagagaactcgatgaagagaaagaagaactaaagaagtaccagcagctggacaaacagagaagatcacttgagtatactatattggaccatgagcttaatgacgcaaggaatgaattagcttcgatggatgataaccgaagaaaaatttctgaaagtatgtcccttgcggacaatgaagtggtggatgtccgagagatgatcaagagttttgataaagaaataaaagtctcaactaaagggataaatgataccaaggcgcaaaaggaaggtgttgagaagaggcgtactgaagctctgaaggtagttgctaagattgaacttgatttgagagatataaaagataggattgtgaatgagaagcgagcaaaggatgaggcagcgagggatttgcagagtgtgaggagagagagtgaaaagtcaaagtctgaattggctgaaattagtaaggtgcatcaggccaaactaaaggaagaggaggatatatcgaagagcattatggatcgtgagaagcggctaagtatattgtaccaaaagcagggaagggcgacccaattcgcaaacaaagctgctagagataagtggcttcaaaaggaaattgaagatctcaagcctgtacttttatcaaataaaaagcaggaaggtttacttcaagaagaaatccagaagcttaaagatgaaatcaatgatttaactaactacatcgagtctcggaaaagcgaatcaagtaagttagaggaaacacttgcgaaaagacataatgactataacgatttgaggaagcagagagatgtgcttcaagaagaaaggaagtcatattggaaggaggaatctgaggtgacagctgaacttgataggctacaagaagatcttataaaggcacagaaaagcttggaccaagcaactcctggggatatcaggagaggcctgaattctgttagcagaatcattaaggaccatggtattactggtgtttttggtcctgtattagaactggttgattgtgaagagaagttctttacagctgttgaggtcactgctgcaaatagcttgttccatgtggttgtcgagaatgatgacatatcaacaaagatcattcaaatattaactagagaaaaaggtggaagggtgacatttataccattgaacagagtgaaagttccagatctcagctgtccgcaaagtcctgattttgttccattgttgaaaaaattgaaatatcgatctgaccatcgtcgtgctttcgaacaggtttttggcaggacagtcatatgccgagatctggaaactgcgactaaagttgcacgtagcaatggtctagattgcatcacacttgatggtgatcaggtagggaaaaaaggtgctatgacaggaggcttctatgattctagacgctcaaaactaaagtttgtgaagataataagggataacaagacagcaattgatagaaagacgggtcatctagagagtgtcgtaaacaagctaaaagatatccttttttggtttaattataatttagttaccaaacagcagcaaatggatgctgaacgtgatcatgcgaagtcagagttggaacaatttaaggctgacattgccagggctatgaagcaaagggggtcacttgagaaagcccttgtcaagaaggaaaaatcacttaacaacatctgcaaccaaattgagcaagtccagtctagcattgcaatgaagaatgatgaaatgggcacagagcttattgatcagctaacttcagaagaaagagatctcctttcacgattgaatcctgaaattactgatttgaaggagagatttctaatgtgtaaaaacagtcggattgagatcgaagcacgaaaggaagaattggagaccaatttatcaacaaatcttatcaggcgtcagaaagagctagaagcgataatttcatctgcagattctagaaccttgcctttggaagctgaggcaaaggagcaagaactgaaaagttccaagagaaaccttgatgaactaacttcattattaaaggctaatgtcgatgccataaataatttcaccagaaagatggatgatctgaaaagaaaaagggatgatctgaaggctcgtgaagctattttagagcagactgtacaagatggtgccaaagacttagaacagttgatgaacagcaggaacacttatctagccaagcaagaagagtgcacgaagaagatccgagatttgggcttgttgcctgctgatgcttttgaagcgtacaagaggaaaaacaagaaacagctacataagatactctatgactgtaatgagcagttgaagcagtttagtcatgtgaaccaaaaggctcttgaccaatatgtgaacttcacagaacaacgcgaacaactgcagagaaggcgagctgaacttgatgccggtgatgtgaaaatcatggaactcatatcggttttagaccaaaggaaggatgaatccattgagcgcacatttaaaggggttgcaaggcacttccgtgaagtgttttctgagctggtgcaaggtggtcatggatatttggttatgatgaagaaaaaggatggggatgcagttgatgatgatgaggaggaggatggacctcgtgatccaggccctgatgggagaatagaaaagtatatcggtgtgaaagtcaaggtatcatttactggcaagggagaaactcagtctatgaaacaattgtcaggcggacagaagacggtggtcgcactaacactgattttcgctatccaacgatgtgacccagctccattttatctgttcgacgagatcgatgctgctctggatccacaataccgaacagcagttggaagtatccttattgtttgttctagtgtctagctatgcacatgatcaatgcctcttctttgtgtgtcaatagtcctgctgctttccttaagtttcattccagatatgatccgccgtctagctgacatggctgacactcagttcattgcgaccacattccggccagagattgctaaagtggctgataagatatatgccgtgagacacaagaatagggtgagcaacatcgacgtggtgtccaaggaggaggccctggacttcatcgagcgtgatcagacttag

SEQ ID NO: 136469 - DNA, 4635 bp, Zea Mays
gactgcccgtgcgcgccctcgctcagtcgctctcgcgcgcggcgacaactgagccaccgccgacggtccaactcttcgtcggaccctttgccggcgacgagcacccaccaggtaacccctcactctcttccctcgcatgctcttttgcaggggtttcatggtagcgtgacctgtctcggcctagaaaatgtatataaagaaggcaagatgttctgccctgggtacaatttggtgatatttttctccccatgtaagcttgttggcttattggccatctgtctggttcaggtcgtaatcgaagggtttaagagctacaaggaggagatatcaacagagcccttcagtcccaaagttaacgtagttgttggtgcaaatggatctggcaaatcaaatttctttcatgctatacgatttgtcctgagtgacatgtttcagaacctgcgaagtgaagataggggtgcccttctccatgaaggtgctggacactcggttgtatctgcttttgttgagatagtgtttgacaattcagacaatcgtattccagttgataaagaagaggtacgcttgcgcaggacaattgcttcaaagaaggatgaatactacttggatgggaagcatgtcagtaaaactgaagtcatgaatctgctagagagtgctggtttctctcgttctaatccatactacgttgtgcagcaaggaaagattgcatcccttaccttgatgaaagattctgaacgactggatcttctcaaagagattggtggtacacgtgtttatgaggatagacggaaggagagcttgaaaataatgaccgaaacagccaacaaaaggaagcagattgatcaagttgtccactacttagaggaaagactgagagaactcgatgaagagaaagaagaactaaagaagtaccagcagctggacaaacagagaagatcacttgagtatactatattggaccatgagcttaatgacgcaaggaatgaattagcttcgatggatgataaccgaagaaaaatttctgaaagtatgtcccttgcggacaatgaagtggtggatgtccgagagatgatcaagagttttgataaagaaataaaagtctcaactaaagggataaatgataccaaggcgcaaaaggaaggtgttgagaagaggcgtactgaagctctgaaggtagttgctaagattgaacttgatttgagagatataaaagataggattgtgaatgagaagcgagcaaaggatgaggcagcgagggatttgcagagtgtgaggagagagagtgaaaagtcaaagtctgaattggctgaaattagtaaggtgcatcaggccaaactaaaggaagaggaggatatatcgaagagcattatggatcgtgagaagcggctaagtatattgtaccaaaagcagggaagggcgacccaattcgcaaacaaagctgctagagataagtggcttcaaaaggaaattgaagatctcaagcctgtacttttatcaaataaaaagcaggaaggtttacttcaagaagaaatccagaagcttaaagatgaaatcaatgatttaactaactacatcgagtctcggaaaagcgaatcaagtaagttagaggaaacacttgcgaaaagacataatgactataacgatttgaggaagcagagagatgtgcttcaagaagaaaggaagtcatattggaaggaggaatctgaggtgacagctgaacttgataggctacaagaagatcttataaaggcacagaaaagcttggaccaagcaactcctggggatatcaggagaggcctgaattctgttagcagaatcattaaggaccatggtattactggtgtttttggtcctgtattagaactggttgattgtgaagagaagttctttacagctgttgaggtcactgctgcaaatagcttgttccatgtggttgtcgagaatgatgacatatcaacaaagatcattcaaatattaactagagaaaaaggtggaagggtgacatttataccattgaacagagtgaaagttccagatctcagctgtccgcaaagtcctgattttgttccattgttgaaaaaattgaaatatcgatctgaccatcgtcgtgctttcgaacaggtttttggcaggacagtcatatgccgagatctggaaactgcgactaaagttgcacgtagcaatggtctagattgcatcacacttgatggtgatcaggtagggaaaaaaggtgctatgacaggaggcttctatgattctagacgctcaaaactaaagtttgtgaagataataagggataacaagacagcaattgatagaaagacgggtcatctagagagtgtcgtaaacaagctaaaagatatccttttttggtttaattataatttagttaccaaacagcagcaaatggatgctgaacgtgatcatgcgaagtcagagttggaacaatttaaggctgacattgccagggctatgaagcaaagggggtcacttgagaaagcccttgtcaagaaggaaaaatcacttaacaacatctgcaaccaaattgagcaagtccagtctagcattgcaatgaagaatgatgaaatgggcacagagcttattgatcagctaacttcagaagaaagagatctcctttcacgattgaatcctgaaattactgatttgaaggagagatttctaatgtgtaaaaacagtcggattgagatcgaagcacgaaaggaagaattggagaccaatttatcaacaaatcttatcaggcgtcagaaagagctagaagcgataatttcatctgcagattctagaaccttgcctttggaagctgaggcaaaggagcaagaactgaaaagttccaagagaaaccttgatgaactaacttcattattaaaggctaatgtcgatgccataaataatttcaccagaaagatggatgatctgaaaagaaaaagggatgatctgaaggctcgtgaagctattttagagcagactgtacaagatggtgccaaagacttagaacagttgatgaacagcaggaacacttatctagccaagcaagaagagtgcacgaagaagatccgagatttgggcttgttgcctgctgatgcttttgaagcgtacaagaggaaaaacaagaaacagctacataagatactctatgactgtaatgagcagttgaagcagtttagtcatgtgaaccaaaaggctcttgaccaatatgtgaacttcacagaacaacgcgaacaactgcagagaaggcgagctgaacttgatgccggtgatgtgaaaatcatggaactcatatcggttttagaccaaaggaaggatgaatccattgagcgcacatttaaaggggttgcaaggcacttccgtgaagtgttttctgagctggtgcaaggtggtcatggatatttggttatgatgaagaaaaaggatggggatgcagttgatgatgatgaggaggaggatggacctcgtgatccaggccctgatgggagaatagaaaagtatatcggtgtgaaagtcaaggtatcatttactggcaagggagaaactcagtctatgaaacaattgtcaggcggacagaagacggtggtcgcactaacactgattttcgctatccaacgatgtgacccagctccattttatctgttcgacgagatcgatgctgctctggatccacaataccgaacagcagttggaaatatgatccgccgtctagctgacatggctgacactcagttcattgcgaccacattccggccagagattgctaaagtggctgataagatatatgccgtgagacacaagaatagggtgagcaacatcgacgtggtgtccaaggaggaggccctggacttcatcgagcgtgatcagacgtacaatgctagctgaggctgctgctgctgctgctgctgctgtgtattgattgatctgcaggcagatgctaacgcagacaggatagttcttgttgtgttatggatattctggcctattgttgtagctgtgtatatgtgtgatgcagttaggtagctattggaccagcttgtttggcgcatcaacgttgtgaatgtagcagctaccaccttggtttggtaccagctttaattaagtttgggaagcgctgattagactagacgtacgttacatgttgccccatgattgttgtatggcacgcccagcccaaaatggcagtaatcagttcatttcgacaattaacgtaagtgtaagtgtacgagtagtggtattcaaatgttttttaactgtatttttctagtacatttattttttgtacccataaatcatgttacacgtagtttcattggagggagcataaacatgttcctttgacagaaagcctaataaggctataaaacaaaaattactacacgtagtttcagcaacgcaaacaaaaaaccccgtgcctgcctaatgaattggtcattaggcatgggcttctgcttctctataaggcgactacgagctcccagctgctcagtagctagggtacatgcccatccttcctatggtgctcctgcagccgaagttgacagagcctcgaggctttctgctgccatttgccttcgtggtggatttcgcaatcctcttttccttgcccgtgaacttatcactgtctcg

SEQ ID NO: 136470 - DNA, 2809 bp, Zea Mays
gtctcctcttcttcccccgcctcggagcgccagcggcttcatccgatctccttctcacctcctcacctcaggcgcacaccgatcactctcttccctcctccagcagtccagctcacacccaccgccccaccccttccactcaaatccagggacatcgcagatccaccggctctccgatccgctcgcctccgcacccgcccgatcggatcccgcagatggtttacgatggcgccgtgaaggaccaggaccaggagaccgtggcggcgagcactgcatcggcggcatcggtggtggcggtgtcggaggcgtctcccgcgccggtggtggtggtggtcagtgcgaggccctcggcgaggccgccgcacgacaagcgcctcggcgtgcgccaccccttgaagcaccgctggtttcgtgctggtgggaagatgatgatggagcccggaggggtgctgcctgctcacgcgcatgaggaggaggaggagggagccagcgaggtggaagaggaggagttagtggaggcggaggcctcgtccgcggagacggtgacgtggggcgctgaagtggaggtgtcgtccgcgccggcggcaggggtgcaggagatgaacgcggaggtggagggtggcgaaatggaggtgtcgcctgagcctgcggtcgctgtggggggcaccgagttggagccccagcaggacgacgaggacgaggtctcgtccgtcgtgttggcgcgaggggagaggaagcaggaggcggctcctgcttctgcggtgctagctgtggaggcgcccatggaaatgggtcaggatgaggagagggcggagaaggagaagaggggcaaggagagggaaaggcagaaggagcgggagagggtggatgaggtcggctacatgagcggaggatggaagagtgttgatggaacactgaattgtggatattcaagttttagaggaagaagggcaagcatggaagatttctatgatataaaagcatctaaaattgatgataaacaaataaatctcttcggaatttttgatggtcatggtggttcacgtgctgctgagtatttgaaggagcacttgtttgagaacctcatgaaacatccggagttcatgacaaatacaaaattagcattaagtgaaacatatagaaagaccgattcagagtttttggatgctgaaaggaatactcatagagatgatgggtcaacggcatcgacagcagtgatggttgctgatcatctttacgtggcaaatgttggagactcgagggctgttatatcaaaggctggcaaagctattgcgctctctgaagatcacaagccaaacagaagtgatgagaggaatcgaattgagagtgctggtgggatagttatgtgggcaggaacttggagggtaggtggtgtacttgcgatgtctcgggcatttggcaaccgtctcttaaaacaatttgttattgcagaccctgaaattcaggaacaagaaataaatgaggagttggagtttctaattatagctagtgatgggctgtgggatgtggtttcgaatgaggacgctgttacacttgtgaaaatggaggaggaaccagaggctgcagctcggaagctgacagagaccgcgttctctcgcgggagcggcgataacatcacgtgcatcgtggtgaagttccagcatgacaagccgcgcagtggcggtggcgattccccttcctcgcctcgtctctaggcgacaggagttgattccatttgtttttggttatacgtgttgtcggggtcctttttaccttgagccggattttgctggcccccgaggctgatacttgagaaaaggagtcggttcatgttcattgcctgtcttgtctatatatgcccccctccctaattttgcttctccggtggcagtgctgcccattggcatgcacatcgtcggcattgtcgtagacttgtagtttgctgttgtatcagtgagagagagagttaattctgtgaggtgttcattttgagatgtcactggaccgatcttcagtccagctagatccgtaagatgtgcagtgcataatctcgtagaggtgatgatattcgtcagaagaatcagtgagagattaccgtgtcacattactgtgtttttctaatgtaatgggtgtactgtttctatatatgtgtgtatatagtctctaccttaatcagggttagggtttaggggccggccgatgccagctcacacagacacaggccgactgtagaggatctgattccatcttgctacactccgttccgcttagacatagaaaccctcccctcctatagcaagcaagcaataaagatgatctgccatttaccagcgatcattgcaagagcatttcccatccgtaaaatggtgaaaccgatcggcgtctcgaagaatgatttggcgtccgcatagagcagatatgtgcttggccacctcatggcagtcactgcacatcctggtgttcttgatcaccctgatgggcgtcccgctcgcatctgagtggatcagcccataagtgatagctagcttctcggtgtggctgagcagcagcttctccttgtcttcttcggggacgttatacgctatgcagctagtgtccgccacataccctgccttccttatctgaagaaccagacgaaccagttgttggtatatctccgcggtgtctgggtgtggtggcttcccctcgacttggaacacatggatgctttgctcgatctgtatccagctccacccaggtcgagtgttcagcgctctcgctttcattgcatacttgaggctctcggcttcatcgaacatctgttcacgct

SEQ ID NO: 136471 - DNA, 2832 bp, Zea Mays
gtctcctcttcttcccccgcctcggagcgccagcggcttcatccgatctccttctcacctcctcacctcaggcgcacaccgatcactctcttccctcctccagcagtccagctcacacccaccgccccaccccttccactcaaatccagggacatcgcagatccaccggctctccgatccgctcgcctccgcacccgcccgatcggatcccgcaggttttgtgcccgccacgagttagatggtttacgatggcgccgtgaaggaccaggaccaggagaccgtggcggcgagcactgcatcggcggcatcggtggtggcggtgtcggaggcgtctcccgcgccggtggtggtggtggtcagtgcgaggccctcggcgaggccgccgcacgacaagcgcctcggcgtgcgccaccccttgaagcaccgctggtttcgtgctggtgggaagatgatgatggagcccggaggggtgctgcctgctcacgcgcatgaggaggaggaggagggagccagcgaggtggaagaggaggagttagtggaggcggaggcctcgtccgcggagacggtgacgtggggcgctgaagtggaggtgtcgtccgcgccggcggcaggggtgcaggagatgaacgcggaggtggagggtggcgaaatggaggtgtcgcctgagcctgcggtcgctgtggggggcaccgagttggagccccagcaggacgacgaggacgaggtctcgtccgtcgtgttggcgcgaggggagaggaagcaggaggcggctcctgcttctgcggtgctagctgtggaggcgcccatggaaatgggtcaggatgaggagagggcggagaaggagaagaggggcaaggagagggaaaggcagaaggagcgggagagggtggatgaggtcggctacatgagcggaggatggaagagtgttgatggaacactgaattgtggatattcaagttttagaggaagaagggcaagcatggaagatttctatgatataaaagcatctaaaattgatgataaacaaataaatctcttcggaatttttgatggtcatggtggttcacgtgctgctgagtatttgaaggagcacttgtttgagaacctcatgaaacatccggagttcatgacaaatacaaaattagcattaagtgaaacatatagaaagaccgattcagagtttttggatgctgaaaggaatactcatagagatgatgggtcaacggcatcgacagcagtgatggttgctgatcatctttacgtggcaaatgttggagactcgagggctgttatatcaaaggctggcaaagctattgcgctctctgaagatcacaagccaaacagaagtgatgagaggaatcgaattgagagtgctggtgggatagttatgtgggcaggaacttggagggtaggtggtgtacttgcgatgtctcgggcatttggcaaccgtctcttaaaacaatttgttattgcagaccctgaaattcaggaacaagaaataaatgaggagttggagtttctaattatagctagtgatgggctgtgggatgtggtttcgaatgaggacgctgttacacttgtgaaaatggaggaggaaccagaggctgcagctcggaagctgacagagaccgcgttctctcgcgggagcggcgataacatcacgtgcatcgtggtgaagttccagcatgacaagccgcgcagtggcggtggcgattccccttcctcgcctcgtctctaggcgacaggagttgattccatttgtttttggttatacgtgttgtcggggtcctttttaccttgagccggattttgctggcccccgaggctgatacttgagaaaaggagtcggttcatgttcattgcctgtcttgtctatatatgcccccctccctaattttgcttctccggtggcagtgctgcccattggcatgcacatcgtcggcattgtcgtagacttgtagtttgctgttgtatcagtgagagagagagttaattctgtgaggtgttcattttgagatgtcactggaccgatcttcagtccagctagatccgtaagatgtgcagtgcataatctcgtagaggtgatgatattcgtcagaagaatcagtgagagattaccgtgtcacattactgtgtttttctaatgtaatgggtgtactgtttctatatatgtgtgtatatagtctctaccttaatcagggttagggtttaggggccggccgatgccagctcacacagacacaggccgactgtagaggatctgattccatcttgctacactccgttccgcttagacatagaaaccctcccctcctatagcaagcaagcaataaagatgatctgccatttaccagcgatcattgcaagagcatttcccatccgtaaaatggtgaaaccgatcggcgtctcgaagaatgatttggcgtccgcatagagcagatatgtgcttggccacctcatggcagtcactgcacatcctggtgttcttgatcaccctgatgggcgtcccgctcgcatctgagtggatcagcccataagtgatagctagcttctcggtgtggctgagcagcagcttctccttgtcttcttcggggacgttatacgctatgcagctagtgtccgccacataccctgccttccttatctgaagaaccagacgaaccagttgttggtatatctccgcggtgtctgggtgtggtggcttcccctcgacttggaacacatggatgctttgctcgatctgtatccagctccacccaggtcgagtgttcagcgctctcgctttcattgcatacttgaggctctcggcttcatcgaacatctgttcacgct

SEQ ID NO: 136472 - DNA, 145 bp, Zea Mays
agaacaggttctaaatcgcgatcaattcccttttcaaaaggctgctgcagcagctcgggctcctcctgcatgccacaaatggcccacaaaaaagaagaatcctagaacaaaatgggaggtcgctaaccaacttctaggagagaca

SEQ ID NO: 136473 - DNA, 1011 bp, Zea Mays
ctgcctttgctcgctgtcatggaaacgacgtcatgcttcctggcctccaaagcatcgtccgccagcaggagcaccgcggtgctgccgcccaccgcccccggcttcgcaaagcctaagccttatctgcagctccttggtagcagccgccgccgtgcctgctgcggcagcatcagcgcgcggggggcgccggaggacggcgccgcgccaccacccatcggtcccgactggcgctcgttccgtgcgcagctctacttcaaagagcagctgccagcggtacagaccggcggcgacaggtgggcgcaccctctagcggagcccgagaaggggtgtctcttgatcgccacggagaagctggacggctcgcacatcttcgagcgcacggtgatcctgctgctgtcgtcgccgtcgtcgctgggccccgtcggcgtgatcctgaaccgcccctcgctcatgtcgatcaaagaggcgtcagggtccatcttcgcggacgacgccgacatcgcgcgcgccttcgcgggccggccactcttcttcggcgggccgctggaggagtgcttcttcgtcatagggccccgagcggcggccggaggcggaggcgacgacgcggtggcgcggacggggctgttcgaggaggtgatgcccggcctccactacggcacgcgggagacggtcgggtgcgcggcggagctggccaagcgcggcgtggtgggcgtccgggacttccgcttcttcgacggcttctgcgggtgggagcgcgagcagctgcgcgacgaggtgcgcgcggggctctggcatgtcgcggcctgcagcgccgccgtgctggagctcgccaccgtcgtcaagggcgggctctgggaggaggtgcaggggctcgtcggggagaggaggctctggtgacgacctcactctcactgctgccgtggggcgttcaatcttcaatgtaattattatgagatcgatcgatcgatcgacttgcaagtcaaaccaatgcatccatccatttcgaaaaca

SEQ ID NO: 136474 - DNA, 661 bp, Zea Mays
gccgcgagccccaaatgcgagaggcggcggccgcagcaccaacagcacatgggcaggcaactaaggcagaggcacggccacggccataggaggggttacttttactgccgcgctgcggattcgtcgcccaagtaccacccagggcagtcttgccggaagatcaagaggaaggagctgaggtccgagcaagaagtggagggcaacgacaatgcagtggagaacacggaggatggacaggagagatcagattgtactgtttgcactgatctaccggctgatgttgatggcgaggtgaaccaagatgggcatggctcttctagtaatggaagagtggagggtcgtgatgatcttgccatggtatatcagaaggatggggagatggagagggtactcgagaagcaggctgagctaattggacagttcaaggctcaagaaaatgctcagagggagtgggaggagaaattcagcctgaggcgtgattcagttatggtacacactttcctttttcagatatgaatcattttttacttaatacgaagttcatgcatttgattgtataaaaaataaaatgagctaatattttcatattgcccactcatttctgctctccaacttccaggataatgttaacttattaaacaacaagctaaatcaggctgaa

SEQ ID NO: 136475 - DNA, 107 bp, Zea Mays
ttttgggtcaggcaaccaaacatactctatcctttaatcagatttctccacctgccctatgttctcccatgtatggtcaaatgaggtgtttattcatacaaaactga

SEQ ID NO: 136476 - DNA, 1982 bp, Zea Mays
ccgtgaccccgctggcgtgcacacgtactagcgttttccggcgctaaagcagggagggctaatcgcgtccgtgatcaaacccccgccccagcagttgctttttattcacccgcctcccccttgtcgctcctccacaccgcacacgcacgcacgaacgcgctcccaccccctcccgccgccaccgccgccaaaaccccggcccgacttggcgtcctccgccaacctcctcctgggcagcgcgggcggggggatatggcatcggaggacgtggtgggcaagagcaggggcgacacggccgtcaccaccatcgtcaacctggcggaggaggccaagctcgcgcgcgagggcgtcaaggcgcccggccaccagatcctcaccatctgcaagtcgctcgtcgccggcggcgtagcaggcggagtgtctcgtactgctgttgctccacttgaacgattgaaaatattgcttcaggttcaaaatccgcacagcatcaagtacaatggtactgttcagggtctcaagtatatctggagaacagagggcctccgtggacttttcaagggcaatggtaccaattgtgcaaggattgttccaaattctgccgtgaagttttttagctacgagcaggcgtcaaagggaattctgtgggcctaccgtcaacagactggtgaagaggatgctcagcttactccgctcttgcgccttggagctggagcatgtgctggtatcatagctatgtctgctacttacccgatggatatggttaggggaaggatcactgttcagacagacaaatctccctaccagtaccgtggtatgtttcatgcactgggtacagtctaccgtgaagaaggctttcgtgctctatacaaagggtggcttccatctgtaatcggagttgttccatatgttggtctcaacttcgctgtatatgagtccctcaaagactggctactccagacaaattcatttggccttgcaaatgacaacgagctgcacgtagttacaaggcttgggtgtggagctgtggcgggaaccattgggcagactgttgcataccctcttgatgtcatcaggagaagaatgcagatggttggttggagccatgctgactctattgttactgggcaaggcaaagaagcactccagtacaatggcatgatcgatgcattcaggaagactgttcgtcatgaaggcgttggtgctctgtacaagggtcttgtgccgaactcagtcaaggtggtgccctcaattgccattgcatttgtgacttacgaggttgtgaaggatgtgctaggagtagagatgaggatatcagactgaggatggtcgttttcaactgctatttttgtaggctttgggaagttgtgttttttttttgtaggcagggcgggtagaagggtatgaccgcggctccattcagcatcaggccctctcagcccatgttggatatatatcatatatcctgccactggcttcagtcaggtcctagaattgttgctgggtcgtgcaaaaagtaataagtcggctgtaaagcttattaagcatctgcctaactcatcaaaagaaatctattccttattgatgatgtaccgagattttcgaacttaaagcggtactacgtgctgctaacagttgattaatgatttttctttgttgctggtgatttttcaacttaaatgttttggagttctgcacttgatgttcatacggagcgtctgtttttgagatatctgatcgcatctgagaaggaatctccaaattttacactataaaattaaatgattggatcagattaagatcggttctatttctatttattttttaactaaaatttatttatgaatttaatattttatgaagaaatatttagatcgtgattcattacatccctaataatacctggtgcacgaaacacaagatgtgtacaaatttccagcaatatgtaaagtttggatcccccttttcgtaaaataaaataaaaa

SEQ ID NO: 136477 - DNA, 1569 bp, Zea Mays
gcacgcacgaacgcgctcccaccccctcccgccgccaccgccgccaaaaccccggcccgacttggcgtcctccgccaacctcctcctgggcagcgcgggcggggggatatggcatcggaggacgtggtgggcaagagcaggggcgacacggccgtcaccaccatcgtcaacctggcggaggaggccaagctcgcgcgcgagggcgtcaaggcgcccggccaccagatcctcaccatctgcaagtcgctcgtcgccggcggcgtagcaggcggagtgtctcgtactgctgttgctccacttgaacgattgaaaatattgcttcaggttcaaaatccgcacagcatcaagtacaatggtactgttcagggtctcaagtatatctggagaacagagggcctccgtggacttttcaagggcaatggtaccaattgtgcaaggattgttccaaattctgccgtgaagttttttagctacgagcaggcgtcaaagggaattctgtgggcctaccgtcaacagactggtgaagaggatgctcagcttactccgctcttgcgccttggagctggagcatgtgctggtatcatagctatgtctgctacttacccgatggatatggttaggggaaggatcactgttcagacagacaaatctccctaccagtaccgtggtatgtttcatgcactgggtacagtctaccgtgaagaaggctttcgtgctctatacaaagggtggcttccatctgtaatcggagttgttccatatgttggtctcaacttcgctgtatatgagtccctcaaagactggctactccagacaaattcatttggccttgcaaatgacaacgagctgcacgtagttacaaggcttgggtgtggagctgtggcgggaaccattgggcagactgttgcataccctcttgatgtcatcaggagaagaatgcagatggttggttggagccatgctgactctattgttactgggcaaggcaaagaagcactccagtacaatggcatgatcgatgcattcaggaagactgttcgtcatgaaggcgttggtgctctgtacaagggtcttgtgccgaactcagtcaaggtggtgccctcaattgccattgcatttgtgacttacgaggttgtgaaggatgtgctaggagtagagatgaggatatcagactgaggatggtcgttttcaactgctatttttgtaggctttgggaagttgtgttttttttttgtaggcagggcgggtagaagggtatgaccgcggctccattcagcatcaggccctctcagcccatgttggatatatatcatatatcctgccactggcttcagtcaggtcctagaattgttgctgggtcgtgcaaaaagtaataagtcggctgtaaagcttattaagcatctgcctaactcatcaaaagaaatctattccttattgatgatgtaccgagattttcgaacttaaagcggtactacgtgctgctaacagttgattaatgatttttctttgttgctggtgatttttcaacaaaaatataaataaattaaaaaaacaatagataaaagaaac

SEQ ID NO: 136478 - DNA, 2347 bp, Zea Mays
caaaatcctatttccctctcccacaccacgcgccgcgcctgtctgattctgcccgccagccacgcccgcagatctcgcttcggcgccctgattccgtcgtatgcaaggtcacagccctgccttccatcgtcgcccccatgccatggtccccttctatcctcgctcacttccagccgccaacggaaccccccgcgtacgtttggcagaaactgtagagaccgtcgaagacgggggcagtcctcgccgacgctgaagtgcttgagcgcgcggatctgatcctgctgcgtttcgggggtgacggaccggaggaaggagacgtaatcgtcggcgtggaagcggcagaggtcgcggtcgcgggcagggtgagggcggaacacttgcatctggtcgaggaggccgtagcggccgagcagcgcgtgggtcatgcggatgcggtgcggcttcatcgggtggcaatgctcgtagtagcagttgcccacctccacgtcgtagaagtagcagacgcggcgcttcgacccgtccgcgccagtggtcggtagggagttgccgccaccgcacagcacgacagagggtgtgtcagtcggggcgcgagcaccaactttgcatccattaactgctctgctcagagcatcaggtgcgcttcagcgtctagccatttggcggcttgggctttctgcggttgggaggaacggagtcttaagattagcgctgtcggtgtcgtccttgaggtggacgtcaacggcgaggagctctttttcgttgataagattggcagcttgctgcccacagcctagcggtcgactctctatttttggactcactgttgtctagccgcttgtttcttgtggacaccttaccttagccttggcgatgagtgatgcttggcagcttgccatatcatatcctgttggaatcgaacctgcttctgattcttccttcttgtagtttacctctgcgcgtccctgctaaccgttccacatagtatcacaaaaaaatggcactaccttggcatcgtcttccccaattcgggtgtatggaattcttggagcaaaggaccagcacacggtcacctccaaagaaagacccaggctgcttctacaaggagctgtacaaagtgcttcacgactgcagattttggatgagatgatggataatggttttccactcacaactgagccaaacatcttgaaagagatgatcaccccacctaatattgtgaacaaaatgttgaatgttgttactggcaagagttctacccttggcagcaaacttccagatgcagctgcttcttttgtaccttggcgaagaacaacagtcaaggatgcaagcaatgaagtctatgttaacatagtcgaggaacttgatgcatatgtgaacagagagggggttcttgtgaaatgcgaagcatacggtgaagtccaagtaaactgcagcctcccaggatgaccacatgtaagcaataggtgctgctaccagcaaaaaggaagccagaggccttgctgctggaccaagattagtccaaaggttatctggttttggggaccatcgatctgcagacaatgtggcaagagtggtagaggaggagcttgcacatgcctctatggtttgtattgatttctcaaagaatgccaagtgatgggtcgtgaaccaagcaatactttccaagacttgataaaggagtacgaagttgtactgaagggtccattcaactacacggctcgtgatgaagctggtataccccgagaatggttcatgatagattagcttgtattgttgagatggaaaaagagaatgcaagtttgggataagcagttgaagtctcatcctccaaagaacgttgaatcagaaatcttgtgtgagcatatcaagaaagagagggagacagcaaaggctggaaaacgaccatactatctgaagaaacctgaacttcgcgaaaggaagctaatgaacaagtacaacgagctcaaggaggcaggaaagcttgatgcattcatggaaaagcggcggaggaagaatgcctccaaagatcatcggttcatgccgtaccgacgcagtggagatgcataatagtttcctgattctggagacgagcgaaaggatgattttaggacggtgttctcatggtggctgggacactggacagtcagtgtctctgttactttgttgccctagccgtacaatcgtcagctccgtgcacaatctctactacttcttaagaatagagtgcaggcgtccacagtggttttttatgtttctcatttcactctctgcattttcagttacaactacactgcatatgctggcagatttgttcatatattactccagctgacattttcactatcgc

SEQ ID NO: 136479 - DNA, 771 bp, Zea Mays
aggtttttgaaacatttgttgaatctactcttgtacaaccaacatttgtccttgactacccagttgagatatcaccattggcaaaaccacatcagagtcatgttggccttactgagcgattcgaacttttcatttgtggccgtgagattggcaatgtgttgtctgagctcatagacccaattgatcagcgaagccgtcttgaaaatcaaataaaacaacacaatgctaagcgtgctgcaatggctaaggaggtcaaatctacctagggtgaaggcgacgacaattactcgtatgaagtttctttagacgaggacttcttgacttcattggaatacggaatgccaccggcatcaggaatgggcctcagtatcgaccggttagtaatgcttttgacgaactcttctagcataagggacgttattgcctttcctgtcttgaagattcaacaatagatccccttcattctgtgaagagacgtgcctgctgaagaaaacactagcagccttccttttgcgcttggttcagtacagcaggttttatatctgctgacatttttatagctcatagatgtggctatttattatttgatgatgtaattgaggtgtactatagttcagagtccaagtcgatattaaaaactttatagatgttttaataataatggaatccacattttgcaattaatgctgcaaaatagctatctccactggatactctgattcttcagtgacatggttgccttgaactaccatttaagagattctttggtct

SEQ ID NO: 136480 - DNA, 109 bp, Zea Mays
cctcgcaaacgacatgctactcgcgtcggctatccccgtctatccctgtctacccctccgacgtctatctcatcgccttggacccgcgggtcagctctgaccgtcttcc

SEQ ID NO: 136481 - DNA, 2451 bp, Zea Mays
ctccattcccatctcccccctccctgcgcgcagccgcacaccaccaacacctttcaccagacgccgccgccgccaccccccatccctgtcccgtcccgcgcgcggccgccacatccgtccgggcatcctcgtctccccagccccgctgccgcagggttcatcagcagaagctgcttgcaccgccgccgccgccctcttcctgttctactgattttgcttcgggttcggctaaatttcgtcggatggatatcgatgccagcgccagcgtcatgtgccagctgctgagccccgagggagaccctctaggctctgcgctctatctgccccagaacgtcgggcccccgcagctccaggagattgtcaatcagctcctccacaatgaggagaagttgccctatgcattctacgttggagacgaggagctctctgtctacctgggtgcttacatgcggcagaagaacgccaatgttgaggttactctgcgcatagtatgccaaccacaagcacttttccggatcaggccggtcaaccgatgctctgccacgattgctggccacacggaagctgtaattgctgtttcttttagccctgatggaaagagtttggcgagcggttcaggtgacaccactgttcgcttttgggacctgagtacacagactccactgttcacatgcaaaggacacaaaaattgggttctctgtattgcatggtcacctgatggaaaacatcttgttagtggtagcaagtcgggagaacttatattatgggacccaaaaactgggaaccaattgggcactccacttatgggacacaggaaatggattactgctgtatcatgggagccagttcatttgcagtctccgtgccgccgctttgtaagtgcaagcaaggacggtgatgctcgcatttgggacatcaccacaaggaaatgtgttatttcccttacaggtcacactagttcagtgacctgtgtcaagtggggtggagatggtttgatttatactggttcccaagattgtttaatcaaagtatgggaaacttctcagggaaagttggtcaaaacattgaagggtcatgggcactgggtgaattcgcttgctttgagcacggaatatgttctccgtactggagcatatgaccacactggcaagacattttcgactgcagaggaaatgaaagaggctgctcttgcgagatacaagaagatgaggggtaatgctccggagagactagtttctggttctgatgattttacaatgtttctttgggaaccaacaattagtaaacaacctaaagctcgcatgactggtcatcagaagcttgtaaaccatgtttacttttcccctgatggacaatggttggcaagtgcatcctttgataaatctgtcaagttgtggaatggtatcacaggtaaatttgttgcagcattcagagggcacgttgcagatgtctaccagatcagctggtctgccgacagtaggcttctactaagtggaagcaaggattccactctaaagatctgggatattcgaacacacaagttgaaaatggacttgccgggccacgcggatgaggtgtacaccgtggattggagccctgacggtgaaaaggtggcgtctggtggcaaggatcgggtcctcaagctatggatgaactgattgattattatatatctatgcttgggcgaattatatattgtagtgatgataattttgaaggtatactgagatcaattaattgtacaagatccatgcttggctcaaaactggaagaagctagctggaaatcatgagttcagttggtggtgctcttcttcttcttcttgttcttcttcttgaggtccgtggcatagtagttgcatgtgatgaagacgcctcccttgaagcactctgctcgtgcgcatcccaccttggtgctcctcttgccgaccatgagcgcgaagtggccgcactccttgtacgccctgccgcctgtgcactgctccgtgtccctgtcgtagatggactcctccttgccccaccagaagacggcctccttggcggtggcgttccagtcgtcgtggctcctgaacaggctctcgccgtacttgtggccgctgtggacgagctcgcagtccttgcgcatgcggttggaccagcgccgcgcctgccgcgccagcttcctgtcccacttcatgggcggcacgccgtagcgcgcgcggagctcgttgtgggcgtccacgaactcccgggcgatgcccttgtaccaccccgtgccgttggtcggtgacacgatgcccttctccttggcgtacttgagcagctcctgctgggcagccttctccgccgcgaccgccttctccatctcctgctccttctccttctccttctcgccggcctcttccgacgacgacgacgaagtagattctccgctgctactgtcggtctcagtctcactctcagacggagacga

SEQ ID NO: 136482 - DNA, 2874 bp, Zea Mays
ctccattcccatctcccccctccctgcgcgcagccgcacaccaccaacacctttcaccagacgccgccgccgccaccccccatccctgtcccgtcccgcgcgcggccgccacatccgtccgggcatcctcgtctccccagccccgctgccgcagggttcatcagcagaagctgcttgcaccgccgccgccgccctcttcctgttctactgcttaatcttagattttgcttcgggttcggctaaatttcgtcggatggatatcgatgccagcgccagcgtcatgtgccagctgctgagccccgagggagaccctctaggctctgcgctctatctgccccagaacgtcgggcccccgcagctccaggagattgtcaatcagctcctccacaatgaggagaagttgccctatgcattctacgttggagacgaggagctctctgtctacctgggtgcttacatgcggcagaagaacgccaatgttgaggttactctgcgcatagtatgccaaccacaagcacttttccggatcaggccggtcaaccgatgctctgccacgattgctggccacacggaagctgtaattgctgtttcttttagccctgatggaaagagtttggcgagcggttcaggtgacaccactgttcgcttttgggacctgagtacacagactccactgttcacatgcaaaggacacaaaaattgggttctctgtattgcatggtcacctgatggaaaacatcttgttagtggtagcaagtcgggagaacttatattatgggacccaaaaactgggaaccaattgggcactccacttatgggacacaggaaatggattactgctgtatcatgggagccagttcatttgcagtctccgtgccgccgctttgtaagtgcaagcaaggacggtgatgctcgcatttgggacatcaccacaaggaaatgtgttatttcccttacaggtcacactagttcagtgacctgtgtcaagtggggtggagatggtttgatttatactggttcccaagattgtttaatcaaagtatgggaaacttctcagggaaagttggtcaaaacattgaagggtcatgggcactgggtgaattcgcttgctttgagcacggaatatgttctccgtactggagcatatgaccacactggcaagacattttcgactgcagaggaaatgaaagaggctgctcttgcgagatacaagaagatgaggggtaatgctccggagagactagtttctggttctgatgattttacaatgtttctttgggaaccaacaattagtaaacaacctaaagctcgcatgactggtcatcagaagcttgtaaaccatgtttacttttcccctgatggacaatggttggcaagtgcatcctttgataaatctgtcaagttgtggaatggtatcacaggtaaatttgttgcagcattcagagggcacgttgcagatgtctaccagatcagctggtctgccgacagtaggcttctactaagtggaagcaaggattccactctaaagatctgggatattcgaacacacaagttgaaaatggacttgccgggccacgcggatgaggtgtacaccgtggattggagccctgacggtgaaaaggtggcgtctggtggcaaggatcgggtcctcaagctatggatgaactgattgattattatatatctatgcttgggcgaattatatattgtagtgatgataattttgaaggtatactgagatcaattaattgtacaagatccatgcttggctcaaaactggaagaagctagctggaaatcatgagttcagttggtggtgctcttcttcttcttcttgttcttcttcttgaggtccgtggcatagtagttgcatgtgatgaagacgcctcccttgaagcactctgctcgtgcgcatcccaccttggtgctcctcttgccgaccatgagcgcgaagtggccgcactccttgtacgccctgccgcctgtgcactgctccgtgtccctgtcgtagatggactcctccttgccccaccagaagacggcctccttggcggtggcgttccagtcgtcgtggctcctgaacaggctctcgccgtacttgtggccgctgtggacgagctcgcagtccttgcgcatgcggttggaccagcgccgcgcctgccgcgccagcttcctgtcccacttcatgggcggcacgccgtagcgcgcgcggagctcgttgtgggcgtccacgaactcccgggcgatgcccttgtaccaccccgtgccgttggtcggtgacacgatgcccttctccttggcgtacttgagcagctcctgctgggcagccttctccgccgcgaccgccttctccatctcctgctccttctccttctccttctcgccggcctcttccgacgacgacgacgaagtagattctccgctgctactgtcggtctcagtctcactctcagacggagacgactggtgcagcagagacgacgacgaggaggccagggcgcccgaggaggggacgttggagaggacgacggcgacgacgaggagcagcagtactgctatgctgctgctgggcgccatgctggctagctatggttcaagatcgagctaggcacgccgacgccggccctcctctcttgccaacgtcgtcagtgttgggaaggagggtaagggctgccggcaggggccttttatgcatgcatgccaacagctagctagcggtcctccattcttggctctgctccaacgcacgcatgcatggccttttttcgcgcggtttcgctggttcgttggacggttcgtcttcatcgattgtcctgttgcttcaatcatcgtagctaggtgtctatatatagctgctaccttgcttctctagctt

SEQ ID NO: 136483 - DNA, 1527 bp, Zea Mays
aatcaatattcgagtagatttaagtttgtaagaaaacacagcaaaaggaagaaaaaaaaaggtggtggttggatgattggggagggaggccaggccggtgccctgttggtagagggaatgagggatagtgggattccaagccagccaccgtctggttgggaaagtaaaagcaggttcgttctcgggttttgattgggattgggttctgcttcgctctagctagctgttggtcgaattccatccatttcttccgttgcatcggcccctcccttccttctctagttcccttcccttagtattaactacgacgatggtggtggatgctggtgttggtgttggcggcggcggcggcggcgccgggacatgtgccgtcggaggattcgcagtctgggacgtgctgctgtggcgccggggccgcgccgacgtgagcgcctgcctgctggcgggcaccgtctcctcctggctgctcttgtacggcggctacaccttggtgtccctcgcctccaacgtgctgctcctgctcctcaccgtgctcttcctgtgggccaaagcggcgcgcctcctgaacaggccgcagcctcccgtcccggagctgcgcgttccgcagcaggccgtggacgaggcggcggcgctgctgcgctctgctctggacgccgcctcggacgctttccgggacatcgctctgggcagggactcgctgctcttctacagagccttcctctgcctgtggagcgtgtccatcgtcggcagcgttacagatttcccgaccgcctgctacgcaagtgtggtggccgctctgaccatcccggcgctgtaccacaggcaccaagagtgcatcgccacctacttgagcttcgcctacatgaacctccggatgtacgagatggcgtacgagaggctgtccatgaaatgcttcgtcaaggtcagggactggacaatggagctactcaaggatccatgatcccttggttgtttgcgagcgagtgagtgcttcaggtatagagtagattgatcggtagatagaatagtggtggttttgattgattgatgctgactcttgttgtttgatcgatcagtgctctggtagatatagtagtggttttgattgtttggactttagcatgcaaacattaaacattctttctacagccttactaactaggccttactaacacaaaacatggagctcgatcctgatgcgcacgcacatcagctagcagaagaacatggagctcctgactttgtcatgcaggcgaggcagctccggcacaggagcactgccagccgaggtatgccctcctccctggctggaggacgcgtctgacatctcctccaatctcaggaacgtgctcacctgggctgcagcgaggtgggcgtagcacactggagcaactgcaaacacaaaaacagacactagaaaaaaatcaacctgctgtccctgtgctgcacaagatggctttagattcaagcggcctacccactgagatggctgtcgtgctcctctggtacctgcacagcaggacacgc

SEQ ID NO: 136484 - DNA, 1571 bp, Zea Mays
tgcctttgcctttgcctgcttttatatttgtcgcgggtccttctcctatctgccaacggcagcagcagacacagctgagagctggatcacctctcgattccaggagcagtacgtcgtctcctattctactccatccatccaccgcccttgaaaagaagagaaaggtcaaaggagcaccgctgatcgcgatcgtacctcacttcgcgcgctctctctctctctccctctctctctaccgccgccattcacctaccaacaagtgcgtgtgtagtgagaaagaaaccttattggctagctcagctgagctcgccggccggcagcttcaccatccaatacagcgaggagcaagctctgctctccgaacccggccacccatggctctcgtcctcctcctcctcctgcccatcttccttctctcatcgtcttcctgcctcgtcctcgccattccaacgctagccagccaggctgccaccctgctctccctcaaggactctttctcgcctccgctcccgccgcagctgcgcagctggaccctcgccaactatgcctcgctctgctcctcatggcccggcgtcgcctgcagcaaccgcaccgtcgtctcgctcgacatctccggctacaacctctccggcacgctgccccccgctatcgccgacctcgctggcctccgtttcttctccgccgccgccaactccttctccggagacattccgcccgccatcgccgccctccgcgacctccgccacctcaacctctccaacaaccagttcaacggcacatcgtgcggctgctggccttctgctcggggcccgaggcgaagctgctggtgtacgagtacatggtgaacggcagcctcggggaggcgctgcaccgcgctggcgctgatgatggcggcggcggtgtggtgctgtcgtgggcgtcgcgtctccgcgtggcgacggaggctgccaaggggctgtgctacctgcaccacgactgctcgccgccgatcctgcaccgggacgtcaagtccaacaacatcctgctggacgcgcgcatggaggcccacgtggcggacttcgggctggccaagttcctgggcggcagcggcgcctccgagtgcatgtccgccgtcgcaggatcatacggctacatcgcaccagagtacgcgtacacgctcaaggtggacgagaagagtgacgtgtacagcttcggcgtggtcctgctggagctcatcacggggctgaagccggtgggggagcacctcggcgacgacgcggtggacctggtgcagtgggcgcgcgcccggagctctgcagggggcggcgtcctggcgctgctggaccctcgcctcggcggcgacgtcccggtggcggaggcggcgcatgtgctgttcgtgtcgatgctatgcgtgcaggagcacagcgtggagcgccccaccatgcgcgaggtcgtccagatgctgcagcaggcacggcaccagcctagctaggacgacgactggagaaacgatgtgaaaatgtgatagatagacagaggtggtgttgtgtacgttgtcattgcattcggtaactatatatatttttagcaga

SEQ ID NO: 136485 - DNA, 1296 bp, Zea Mays
cgaggagcaagctctgctctccgaacccggccacccatggctctcgtcctcctcctcctcctgcccatcttccttctctcatcgtcttcctgcctcgtcctcgccattccaacgctagccagccaggctgccaccctgctctccctcaaggactctttctcgcctccgctcccgccgcagctgcgcagctggaccctcgccaactatgcctcgctctgctcctcatggcccggcgtcgcctgcagcaaccgcaccgtcgtctcgctcgacatctccggctacaacctctccggcacgctgccccccgctatcgccgacctcgctggcctccgtttcttctccgccgccgccaactccttctccggagacattccgcccgccatcgccgccctccgcgacctccgccacctcaacctctccaacaaccagttcaacggcacatcgtgcggctgctggccttctgctcggggcccgaggcgaagctgctggtgtacgagtacatggtgaacggcagcctcggggaggcgctgcaccgcgctggcgctgatgatggcggcggcggtgtggtgctgtcgtgggcgtcgcgtctccgcgtggcgacggaggctgccaaggggctgtgctacctgcaccacgactgctcgccgccgatcctgcaccgggacgtcaagtccaacaacatcctgctggacgcgcgcatggaggcccacgtggcggacttcgggctggccaagttcctgggcggcagcggcgcctccgagtgcatgtccgccgtcgcaggatcatacggctacatcgcaccagagtacgcgtacacgctcaaggtggacgagaagagtgacgtgtacagcttcggcgtggtcctgctggagctcatcacggggctgaagccggtgggggagcacctcggcgacgacgcggtggacctggtgcagtgggcgcgcgcccggagctctgcagggggcggcgtcctggcgctgctggaccctcgcctcggcggcgacgtcccggtggcggaggcggcgcatgtgctgttcgtgtcgatgctatgcgtgcaggagcacagcgtggagcgccccaccatgcgcgaggtcgtccagatgctgcagcaggcacggcaccagcctagctaggacgacgactggagaaacgatgtgaaaatgtgatagatagacagaggtggtgttgtgtacgttgtcattgcattcggtaactatatatatttttagcagaaggtcagctgtaaattaaaaatatgacctgacagcggcagcccagccacccaacgcccagccc

SEQ ID NO: 136486 - DNA, 1170 bp, Zea Mays
aaaacggtcatcgcccttgtcttcttcttcttcttcttcatctcaccaacctttcccttcccgtcccaaccgccgtccgcctgctcccttccgctcacctgcttcatctgttttgaagaaaaaaaggaaaacagaaggaagagagtaaaagaggcctgcgctgccctgcgccccagagtatgcgcttctaacacttgcatatttggatggatgatgtatatggacggatagaggtcttcccccaacactttgtaccatcaaaagaagctatggagacacctgacggtctatcaacaagtaagaatagcctggatagtccaccaagttcatgtaagcgttcctggactccaagacgagttaagggagctgcatccattttgcatttattgtccattccccgcataagatggtctacaagcaatgaggatgatgacaagattgaattatctagagccgaagtagaaactttacgaaccgaaatagcgggtgccgaggaaagggaatctcacttaaaagctcggttggaaaacattgatgaagttttgagatatgcacggctttctggctatctctacattagaagtcgatggacccaactccctggtgaaccacctatattagatgatgctgatgtggatgactggcttcctcgctttgttgttctacaagggcagtgtttatactattatctgaaatgtacagatctgagcccacaggaatctacactcttatgtgatgttgttgaagtagggcagcttccagactttgtgccagaagatgaaaagacgagatatgcgttttacctgttgacccgtcaagggttgaggtttgaatgctccagtacctccgaaatacaggttgattcatgggtaagagcactgtcaagtgactgcaaattgcaggatggcgctggtgatgataagatgatgaatacgaggagtagccaagtagaagctgggtcatcatggtagacgatgtatggagtgctgtacagtacaatagtcaatgaaatgtacatacattacatgcatgtaaagggagcaacatagtagacgcattcaacacgagatgacatgttgctcgtggtatttttcaacttttagggagcacacaaatgatgtatttctgtagcaaaaaatccgtcgtccgtttgagtttgatagaccgtaa

SEQ ID NO: 136487 - DNA, 1251 bp, Zea Mays
aaaacggtcatcgcccttgtcttcttcttcttcttcttcatctcaccaacctttcccttcccgtcccaaccgccgtccgcctgctcccttccgctcacctgcttcatctgttttgaagaaaaaaaggaaaacagaaggaagagagtaaaagaggcctgcgctgccctgcgccccagagtatgcgcttctaacacttgcatatttggatggatgatgtatatggacggatagaggtcttcccccaacactttgtaccatcaaaagaagctatggagacacctgacggtctatcaacaagtaagaatagcctggatagtccaccaagttcatgtaagcgttcctggactccaagacgagttaagggagctgcatccattttgcatttattgtccattccccgcataagatggtctacaagcaatgaggatgatgacaagattgaattatctagagccgaagtagaaactttacgaaccgaaatagcgggtgccgaggaaagggaatctcacttaaaagctcggtatgatatgcacactttgttgaaagttttattttggaaagtggaaatatgctgatgattgtatttgttttggtctttcaggttggaaaacattgatgaagttttgagatatgcacggctttctggctatctctacattagaagtcgatggacccaactccctggtgaaccacctatattagatgatgctgatgtggatgactggcttcctcgctttgttgttctacaagggcagtgtttatactattatctgaaatgtacagatctgagcccacaggaatctacactcttatgtgatgttgttgaagtagggcagcttccagactttgtgccagaagatgaaaagacgagatatgcgttttacctgttgacccgtcaagggttgaggtttgaatgctccagtacctccgaaatacaggttgattcatgggtaagagcactgtcaagtgactgcaaattgcaggatggcgctggtgatgataagatgatgaatacgaggagtagccaagtagaagctgggtcatcatggtagacgatgtatggagtgctgtacagtacaatagtcaatgaaatgtacatacattacatgcatgtaaagggagcaacatagtagacgcattcaacacgagatgacatgttgctcgtggtatttttcaacttttagggagcacacaaatgatgtatttctgtagcaaaaaatccgtcgtccgtttgagtttgatagaccgtaa

SEQ ID NO: 136488 - DNA, 105 bp, Zea Mays
ctttctaatccattcagtggtgacatcgttccttcctctacggcccgtgtacatccactcatggtcctccatcctctaacagaagcctagcaacagaaaatttcg

SEQ ID NO: 136489 - DNA, 1582 bp, Zea Mays
ctgcgttgaaggaagaagagggagatggggactccgatctgttggtgtcagaaggagagacgagtctgcgaaggaaggagtgagatccgatccagtccagtccagtccagtccaacggaaacctttgcgttttttaagcgagccacgccaataacggagaggcatgcaccgacgatcggcatttccttccagtggcggtgagaagggaaagggaggacagcagagcagaggtcgagcatcgcatcgcatcgcatcgcgcgctttgcctgccgcagcggctaacgaacgcgtggatcatcccttctattattaattaattgggaggagtgggagtgatagctgcagcacccagcgcccatcactgagcccatccggaaccctagcctcctcgtcgttgaatccaccacaccatgagcgggagcgcctccaggaagctcttccaggccgccaggtccatcgtcctctccgcttctcaacgctcctccttctccgtcctcgccgccggtatgtatccttggcccttggacccctgtggaatgtcatggaatctaatccattccaaaccaaatcacgccgcgtctttgatatgatgtgattgattgttcaaaggtttcagctttttatatattttatccgtctttgatgttctcgatgtgcagagggccgcaccgccgcgctcgccaactttggcaggaagatcctccccagcgcctgctcctaccacaggcagggatcccacgccgcgtcgggatggggagccatcgctgccgcagtccccgccgcagtttacatgctccaggaccaggaggctcatgctgcagagatggagcgcactttcatcgccatcaagcccgacggcgtccaaagaggcctgatttctgagattgtgaaccgattcgagagaaaaggctacaagcttgttgccatcaagctgattgtcccatccaaaggattcgctgagaagcactaccatgatctcaaggaaaggcctttcttcaacgggttgtgtgacttcctcagctctggccctgtacttgcaatggtttgggaaggagagggtgtcatcaagtatgggagaaaactaattggtgccacagacccacagaaatctgaaccaggaaccatcaggggcgatcttggtgttgttgtgggaagaaacatcattcatggaagtgatggcccggagacagcaaaggatgagatcgccttgtggtttgaacccaaggagctggtctcttataccagcaatgcggagaagtgggtctatggggtgaattaaccagcgactaaatctcttgaggtttgcttttttcttttcagttttcacataattgccgacagaccaaggcaggatgtaataaagtagctaccgtcacctattacttttgagttggattgattgtggtgcagtaaggcacaaggaaaggaaggaatacaccgtgaaatttgttaatcttcatgagtctgtttttgctcttgttttcagtaaggcacaaggagtgcagtgccaagcaagcagaggggagagctgagttttattgccatcttcattcaagcctttgtacaggggctagctaaccaa

SEQ ID NO: 136490 - DNA, 1427 bp, Zea Mays
ctgcgttgaaggaagaagagggagatggggactccgatctgttggtgtcagaaggagagacgagtctgcgaaggaaggagtgagatccgatccagtccagtccagtccagtccaacggaaacctttgcgttttttaagcgagccacgccaataacggagaggcatgcaccgacgatcggcatttccttccagtggcggtgagaagggaaagggaggacagcagagcagaggtcgagcatcgcatcgcatcgcatcgcgcgctttgcctgccgcagcggctaacgaacgcgtggatcatcccttctattattaattaattgggaggagtgggagtgatagctgcagcacccagcgcccatcactgagcccatccggaaccctagcctcctcgtcgttgaatccaccacaccatgagcgggagcgcctccaggaagctcttccaggccgccaggtccatcgtcctctccgcttctcaacgctcctccttctccgtcctcgccgccgagggccgcaccgccgcgctcgccaactttggcaggaagatcctccccagcgcctgctcctaccacaggcagggatcccacgccgcgtcgggatggggagccatcgctgccgcagtccccgccgcagtttacatgctccaggaccaggaggctcatgctgcagagatggagcgcactttcatcgccatcaagcccgacggcgtccaaagaggcctgatttctgagattgtgaaccgattcgagagaaaaggctacaagcttgttgccatcaagctgattgtcccatccaaaggattcgctgagaagcactaccatgatctcaaggaaaggcctttcttcaacgggttgtgtgacttcctcagctctggccctgtacttgcaatggtttgggaaggagagggtgtcatcaagtatgggagaaaactaattggtgccacagacccacagaaatctgaaccaggaaccatcaggggcgatcttggtgttgttgtgggaagaaacatcattcatggaagtgatggcccggagacagcaaaggatgagatcgccttgtggtttgaacccaaggagctggtctcttataccagcaatgcggagaagtgggtctatggggtgaattaaccagcgactaaatctcttgaggtttgcttttttcttttcagttttcacataattgccgacagaccaaggcaggatgtaataaagtagctaccgtcacctattacttttgagttggattgattgtggtgcagtaaggcacaaggaaaggaaggaatacaccgtgaaatttgttaatcttcatgagtctgtttttgctcttgttttcagtaaggcacaaggagtgcagtgccaagcaagcagaggggagagctgagttttattgccatcttcattcaagcctttgtacaggggctagctaaccaa

SEQ ID NO: 136491 - DNA, 862 bp, Zea Mays
aaaatgatcgagtgggctcccatgtgattttgtcatcctagtgacagaaattttctccctttttttttctcaagctcacaacactcctctgctgtgattccagatggagcgcactttcatcgccatcaagcccgacggcgtccaaagaggcctgatttctgagattgtgaaccgattcgagagaaaaggctacaagcttgttgccatcaagctgattgtcccatccaaaggattcgctgagaagcactaccatgatctcaaggaaaggcctttcttcaacgggttgtgtgacttcctcagctctggccctgtacttgcaatggtttgggaaggagagggtgtcatcaagtatgggagaaaactaattggtgccacagacccacagaaatctgaaccaggaaccatcaggggcgatcttggtgttgttgtgggaagaaacatcattcatggaagtgatggcccggagacagcaaaggatgagatcgccttgtggtttgaacccaaggagctggtctcttataccagcaatgcggagaagtgggtctatggggtgaattaaccagcgactaaatctcttgaggtttgcttttttcttttcagttttcacataattgccgacagaccaaggcaggatgtaataaagtagctaccgtcacctattacttttgagttggattgattgtggtgcagtaaggcacaaggaaaggaaggaatacaccgtgaaatttgttaatcttcatgagtctgtttttgctcttgttttcagtaaggcacaaggagtgcagtgccaagcaagcagaggggagagctgagttttattgccatcttcattcaagcctttgtacaggggctagctaaccaa

SEQ ID NO: 136492 - DNA, 1696 bp, Zea Mays
gaatgaccttttgtgttcgtcgtctccccaaaaggacctcccaagacctggcatctccagcgaatgcgacgccgggaaccaccgaccgtgcgtcctctctcctcgtgcgcttcgcccgtctccacagttggtgcaggtccgcctgattcggatctgcatggtcaagctacaacggggcaggagccagagagctcccatggctctatcgagttgggatgatgaagatagagaggcaacctccgtcgaccgtggttccaggcgtttttttcgtccgatgatatcggcggcgctcctggtccagcttgcgacgcaacttggattctctcctctcctctcctctcgttgcaacaaggcagtccagtgaatgagacggatggccccagctgtgcctgtagctgatgcatgatggagctgagcctgtgggtgggaatctcttctctgctggtggccactcgcctagctccaaaaacacacacacacacactctctctctctctctctctctctctctctctctctctatctagtgggaagtttcacatcactagctccatcgcaattggtatgggtggtgcttctgcacaaaagaaaaaagatgtgcctgtctcactccccaaccaacttgtgaattgtcatgcatcgatcctagctagagcatctccgagagcaaaaacccttgttacagttttccaactcacattctactatatattaggatgtgttgggcacacatggaagtaaggcaaaatgatgcatcgacatgtgatacgtgagcacgtatttcagaacccgataggttggttggagtgggcttcttaaaattattactccgaagcgtgcaattgagattgtagtattataatacccacgtatttgtaaatttgttatcgtcgttgctttaaacacccatctatagctcactcactgctgctgttactggcatttctcccctcatcccgttcctgaaaacggatctgaggccgtcgtcttccactgggtcgcgctcctgttcgctccgtcgtcagaaatgcaggcagcgccagcaggtcttgcttcacgctcctcgcggatggtggcccctccggcccgcgccgatgcagttgaagctccttccgaagcacaaagattaaatagagtttggaatggtcttttagacgccattagacacatgcaagtctcagccgatgagttgaggaggttgaccagacgcaaccatgtgcctgagtatgtagagtacctacgcaaaaatagattatgaagcccatgtgagtgctgttactgaaattgcacaaggtctagaccacgtgagcacagatttggcggaagttcttattggtccgcaacctcttcttgaagattatgaagcccttggtttgtacgatgatttccaatgcgatggtgaagatagctctgtggactcggatgagatcaatgatcgtcgtctatcgcatatgaacgagcgtatatgagatatttgtttgcgagagagttcagtttgccattgatgtctgtagcttatgaagcccttagttagttgccactgttgttcctggtacttgtatgaattgggttatgaaaatgaagagttgtgttatgagttgtattttgtgatcatataatggcttcatgtgataattctgcacctgttgtcactgttgttatgagttgtatcttatgaagcccttagttagttgcc

SEQ ID NO: 136493 - DNA, 1698 bp, Zea Mays
gaatgaccttttgtgttcgtcgtctccccaaaaggacctcccaagacctggcatctccagcgaatgcgacgccgggaaccaccgaccgtgcgtcctctctcctcgtgcgcttcgcccgtctccacagttggtgcagaaacagtgcaacagtgtttacggggtgaactgctggagttggcgttagatagtcgatggtctactgccgccgtgctctctcactgccagtgtcccaccaccgccatgcatgttttgcggcaattgccggctactatactcctccgtctccaatcatcaggcaccagcttgcgacgcaacttggattctctcctctcctctcctctcgttgcaacaaggcagtccagtgaatgagacggatggccccagctgtgcctgtagctgatgcatgatggagctgagcctgtgggtgggaatctcttctctgctggtggccactcgcctagctccaaaaacacacacacacacactctctctctctctctctctctctctctctctctctctatctagtgggaagtttcacatcactagctccatcgcaattggtatgggtggtgcttctgcacaaaagaaaaaagatgtgcctgtctcactccccaaccaacttgtgaattgtcatgcatcgatcctagctagagcatctccgagagcaaaaacccttgttacagttttccaactcacattctactatatattaggatgtgttgggcacacatggaagtaaggcaaaatgatgcatcgacatgtgatacgtgagcacgtatttcagaacccgataggttggttggagtgggcttcttaaaattattactccgaagcgtgcaattgagattgtagtattataatacccacgtatttgtaaatttgttatcgtcgttgctttaaacacccatctatagctcactcactgctgctgttactggcatttctcccctcatcccgttcctgaaaacggatctgaggccgtcgtcttccactgggtcgcgctcctgttcgctccgtcgtcagaaatgcaggcagcgccagcaggtcttgcttcacgctcctcgcggatggtggcccctccggcccgcgccgatgcagttgaagctccttccgaagcacaaagattaaatagagtttggaatggtcttttagacgccattagacacatgcaagtctcagccgatgagttgaggaggttgaccagacgcaaccatgtgcctgagtatgtagagtacctacgcaaaaatagattatgaagcccatgtgagtgctgttactgaaattgcacaaggtctagaccacgtgagcacagatttggcggaagttcttattggtccgcaacctcttcttgaagattatgaagcccttggtttgtacgatgatttccaatgcgatggtgaagatagctctgtggactcggatgagatcaatgatcgtcgtctatcgcatatgaacgagcgtatatgagatatttgtttgcgagagagttcagtttgccattgatgtctgtagcttatgaagcccttagttagttgccactgttgttcctggtacttgtatgaattgggttatgaaaatgaagagttgtgttatgagttgtattttgtgatcatataatggcttcatgtgataattctgcacctgttgtcactgttgttatgagttgtatcttatgaagcccttagttagttgcca

SEQ ID NO: 136494 - DNA, 983 bp, Zea Mays
gaatgaccttttgtgttcgtcgtctccccaaaaggacctcccaagacctggcatctccagcgaatgcgacgccgggaaccaccgaccgtgcgtcctctctcctcgtgcgcttcgcccgtctccacagttggtgcagcttgcgacgcaacttggattctctcctctcctctcctctcgttgcaacaaggcagtccagtgaatgagacggatggccccagctgtgcctgtagctgatgcatgatggagctgagcctgtggatctgaggccgtcgtcttccactgggtcgcgctcctgttcgctccgtcgtcagaaatgcaggcagcgccagcaggtcttgcttcacgctcctcgcggatggtggcccctccggcccgcgccgatgcagttgaagctccttccgaagcacaaagattaaatagagtttggaatggtcttttagacgccattagacacatgcaagtctcagccgatgagttgaggaggttgaccagacgcaaccatgtgcctgagtatgtagagtacctacgcaaaaatagattatgaagcccatgtgagtgctgttactgaaattgcacaaggtctagaccacgtgagcacagatttggcggaagttcttattggtccgcaacctcttcttgaagattatgaagcccttggtttgtacgatgatttccaatgcgatggtgaagatagctctgtggactcggatgagatcaatgatcgtcgtctatcgcatatgaacgagcgtatatgagatatttgtttgcgagagagttcagtttgccattgatgtctgtagcttatgaagcccttagttagttgccactgttgttcctggtacttgtatgaattgggttatgaaaatgaagagttgtgttatgagttgtattttgtgatcatataatggcttcatgtgataattctgcacctgttgtcactgttgttatgagttgtatcttatgaagcccttagttagttgcca

SEQ ID NO: 136495 - DNA, 1800 bp, Zea Mays
gaatgaccttttgtgttcgtcgtctccccaaaaggacctcccaagacctggcatctccagcgaatgcgacgccgggaaccaccgaccgtgcgtcctctctcctcgtgcgcttcgcccgtctccacagttggtgcaggtccgcctgattcggatctgcatggtcaagctacaacggggcaggagccagagagctcccatggctctatcgagttgggatgatgaagatagagaggcaacctccgtcgaccgtggttccaggcgtttttttcgtccgatgatatcggcggcgctcctggtccagcttgcgacgcaacttggattctctcctctcctctcctctcgttgcaacaaggcagtccagtgaatgagacggatggccccagctgtgcctgtagctgatgcatgatggagctgagcctgtgggtgggaatctcttctctgctggtggccactcgcctagctccaaaaacacacacacacacactctctctctctctctctctctctctctctctctctctatctagtgggaagtttcacatcactagctccatcgcaattggtatgggtggtgcttctgcacaaaagaaaaaagatgtgcctgtctcactccccaaccaacttgtgaattgtcatgcatcgatcctagctagagcatctccgagagcaaaaacccttgttacagttttccaactcacattctactatatattaggatgtgttgggcacacatggaagtaaggcaaaatgatgcatcgacatgtgatacgtgagcacgtatttcagaacccgataggttggttggagtgggcttcttaaaattattactccgaagcgtgcaattgagattgtagtattataatacccacgtatttgtaaatttgttatcgtcgttgctttaaacacccatctatagctcactcactgctgctgttactggcatttctcccctcatcccgttcctgaaaacggatctgaggccgtcgtcttccactgggtcgcgctcctgttcgctccgtcgtcagaaatgcaggcagcgccagcaggtcttgcttcacgctcctcgcggatggtggcccctccggcccgcgccgatgcagttgaagctccttccgaagtgagtgaaaagtgttccttgctccttccaaagtttagagatcacagcagcgaggcacaaagattaaatagagtttggaatggtcttttagacgccattagacacatgcaagtctcagccgatgagttgaggaggttgaccagacgcaaccatgtgcctgagtatgtagagtacctacgcaaaaatagattatgaagcccatgtgagtgctgttactgaaattgcacaaggtctagaccacgtgagcacagatttggcggaagttcttattggtccgcaacctcttcttgaagattatgaagcccttggtttgtacgatgatttccaatgcgatggtgaagatagctctgtggactcggatgagatcaatgatcgtcgtctatcgcatatgaacgagcgtatatgagatatttgtttgcgagagagttcagtttgccattgatgtctgtagcttatgaagcccttagttagttgccactgttgttcctggtacttgtatgaattgggttatgaaaatgaagagttgtgttatgagttgtattttgtgatcatataatggcttcatgtgataattctgcacctgttgtcactgttgttatgagttgtatcttatgaagcccttagttagttgccactgttgttcctggtacctgttgatcatacaattgttagttgtcactgtt

SEQ ID NO: 136496 - DNA, 1578 bp, Zea Mays
cgtcgtctccccaaaaggacctcccaagacctggcatctccagcgaatgcgacgccgggaaccaccgaccgtgcgtcctctctcctcgtgcgcttcgcccgtctccacagttggtgcagcttgcgacgcaacttggattctctcctctcctctcctctcgttgcaacaaggcagtccagtgaatgagacggatggccccagctgtgcctgtagctgatgcatgatggagctgagcctgtgggtgggaatctcttctctgctggtggccactcgcctagctccaaaaacacacacacacacactctctctctctctctctctctctctctctctctctctatctagtgggaagtttcacatcactagctccatcgcaattggtatgggtggtgcttctgcacaaaagaaaaaagatgtgcctgtctcactccccaaccaacttgtgaattgtcatgcatcgatcctagctagagcatctccgagagcaaaaacccttgttacagttttccaactcacattctactatatattaggatgtgttgggcacacatggaagtaaggcaaaatgatgcatcgacatgtgatacgtgagcacgtatttcagaacccgataggttggttggagtgggcttcttaaaattattactccgaagcgtgcaattgagattgtagtattataatacccacgtatttgtaaatttgttatcgtcgttgctttaaacacccatctatagctcactcactgctgctgttactggcatttctcccctcatcccgttcctgaaaacggatctgaggccgtcgtcttccactgggtcgcgctcctgttcgctccgtcgtcagaaatgcaggcagcgccagcaggtcttgcttcacgctcctcgcggatggtggcccctccggcccgcgccgatgcagttgaagctccttccgaagcacaaagattaaatagagtttggaatggtcttttagacgccattagacacatgcaagtctcagccgatgagttgaggaggttgaccagacgcaaccatgtgcctgagtatgtagagtacctacgcaaaaatagattatgaagcccatgtgagtgctgttactgaaattgcacaaggtctagaccacgtgagcacagatttggcggaagttcttattggtccgcaacctcttcttgaagattatgaagcccttggtttgtacgatgatttccaatgcgatggtgaagatagctctgtggactcggatgagatcaatgatcgtcgtctatcgcatatgaacgagcgtatatgagatatttgtttgcgagagagttcagtttgccattgatgtctgtagcttatgaagcccttagttagttgccactgttgttcctggtacttgtatgaattgggttatgaaaatgaagagttgtgttatgagttgtattttgtgatcatataatggcttcatgtgataattctgcacctgttgtcactgttgttatgagttgtatcttatgaagcccttagttagttgccactgttgttcctggtacctgttgatcatacaattgttagttgtcactgttgttcctggtgctca

SEQ ID NO: 136497 - DNA, 933 bp, Zea Mays
actatttgagtttacataactatactttatagaatctatcacaaaacacaggcaaaagacattgttgggagtagtaggggcacaaaaaccgtgggcgcctcgctcaacacgagcaacattgtttacggcactagcagaaatgcagaatacgtccgcgccatctattatccagcacacatgatccgatatgttttagcgttaggagcattatatatttggattgcaatactgatgtgtgagagaatctcattcttctatttgtattgtaggcacaaagattaaatagagtttggaatggtcttttagacgccattagacacatgcaagtctcagccgatgagttgaggaggttgaccagacgcaaccatgtgcctgagtatgtagagtacctacgcaaaaatagattatgaagcccatgtgagtgctgttactgaaattgcacaaggtctagaccacgtgagcacagatttggcggaagttcttattggtccgcaacctcttcttgaagattatgaagcccttggtttgtacgatgatttccaatgcgatggtgaagatagctctgtggactcggatgagatcaatgatcgtcgtctatcgcatatgaacgagcgtatatgagatatttgtttgcgagagagttcagtttgccattgatgtctgtagcttatgaagcccttagttagttgccactgttgttcctggtacttgtatgaattgggttatgaaaatgaagagttgtgttatgagttgtattttgtgatcatataatggcttcatgtgataattctgcacctgttgtcactgttgttatgagttgtatcttatgaagcccttagttagttgccactgttgttcctggtacctgttgatcatacaattgttagttgtcactgttgttcctggtgctcatgatttcaagatcattttgat

SEQ ID NO: 136498 - DNA, 174 bp, Zea Mays
tgccaagccatcctcctctctcagttcatcggacgtcgatctccgttgcacttgtctccctcaatgctctccactgtacgcccagttgtctcgaacctcatcgtcgtttctcatctacaatctcgtcagcctctgctcgacatgtgtttggtgaagagcctgagccaagtgttg

SEQ ID NO: 136499 - DNA, 86 bp, Zea Mays
ggtgatagatgtatgttagagtgattactccatctttccatatccacataactcctactattatattatgctcctatgacatgagc

SEQ ID NO: 136500 - DNA, 4895 bp, Zea Mays
atgcctcccggcggtaggcgcggcgccaagcagcggcccaactggaccagggaaccccagctaggtgacctcgtcctcgccaagatcaaggggtacccgcgttggccagctaagatcagcaggcccgaggaatttaatcatgagccaacgccaaaaaagttctttgtctacttctatggcaccgatgagattgcttttgtaccgctggcagatcttgaggaatttactgagaagacaaagaatgatctgttagaccgagctccaaatatgaaagttaaaagaaaatatgttcaagtatttaatgatgctgtggagcagatctgcaaggcctacaatgagttgccaaaaacatctgaagctgcaaatggagcattgcctgatcagagtgaaaagccttcagagcaccttgtgaggtcacaggatgttggtgagattccaggattgggacaaatggaaggtgatagccctactgattactcgcatacttcagcgaaaaggccagggaccgaggaggatgtcaaagatgatggtcatgaaatatgtgatcattctttagcagtttatcaaaagaaaacatctttactagaggatcctaagcatcccatgacaaagaagtctgctgcatccaagtcttctcttgacatttacatggaacaggagcattcaccaacatctgtccgtgctgaaagggaggctgaagaggtgaaaattgaaaaagagagctgtcccctagatggttttattttggaacctaacttggaggtagtttgtgcccttgaagtgccaaagaaatctaaatccaacaagccgttgaggaatgctgaaaggaaggaaaacaaacgtgctggtattggtagccctattgaaaggattgttgctgaggctgcatctgatgttgtattaaacatgagtgctgacaaagagagcagagaatttaagaagtcaaaaatcatgacaaaacaatcactaactactgattcagagaaaatggattataataaaattgtgcatggcgggcctgacgagcaattgactggaaaatcatctgcagggttttcttccaataagaaatcgctgccagatagtgggcagcacaagatggacagtagtgctgatacacgtccgggaaaaaagccaaggcttatggacagggctggtgaaacagataagacagttgacaagagtgagatgaagtcaaacattgattatggaaagcattatgctgtgaaacatgagcggcctacctctatggaaacgtgtaaaaacacgattcttaagaccagtaccagcgatgatagggcactgagatcaggtggtgttgtatcacccatatcaaggcttcattctgaggtcatggaaccagcatgtggttctgtgacactgtcaactgttgctgattctgttaaaaagggttccagcatgaaggaggatgcctcacgtgttgataggcaattggtgaaacctaagagaagagcatgtcgttttgatgaagatgaggatgaaggacagcgaacaccacttcatagaacttctgctaaatctctctctacacatatagtcccaactgagaaagcaggtattcggggaaaattttcttctcatgttggcaatgtttttggaaaaaagttaggccctgcaagagaagagaaatcaaggagtgttaggatgtcacctgtgaagcatgagccaattttttcttcaccgagtcaggataaagtgcatgctagacaccaggtagtcgagaaaagactgatcacagggttggttgagactcctgctgtcattggtaacaaaatgagcctggttgatggcaaatcctctgctcaagtaaaaatgccggcatcctctgaggtgaagaaacttcgtagtagttcttctaaaccatcacacctaacatctgggaactcccattcccgaaactatcctgccccagaaaagatccccttgctgccccaaccagaagaaacaaaggctaaatctaagctagctacgtctgttgagcataaggtgggcaccactttgtcaactgaacagagtgggaagcgggatcacttgaaagaggaaagatccagttatgttgataaagcagtttcttctgaacctaaccctggctcggccaagtcaataaaacatcttattgcagctgcccaagcaaggaggaaccttatggcttctgttcatgcaaaatttgatgggtcttcgactgataatgctgatattacgtccacaccatatggtttgccgggactaagccctagtcctgttttccgcattccatccccacccagaattgcttttcccgggagtcctggtcaacgtattctgaaaagcccaatagagtttgacaatggtcatggaaagagtcccaaatctaggcaggccagcggttcacctagtggtggtactgatgcagctattgctcgtgatgctttggagggaatgatagagactttatcgaggacaaaggatagtataggacgtgcaacacgccatgcaattgagtgctctaaatatggcattgctggagagattgtcgagcttctcatacagaaattgcagagcgagcctaattttcatcgcagaattgacctcctttttcttgtagattccataacacagtgttctcattctcagagaggagttgccagggcttcatatgttcccactgttcaagcggcattgcctcgtcttctcggtgctgctgctccacctggagctggtgctcgtgaaaaccggcgccagtgccttaaagttttaagattgtggcttgagagaaagattatgccagaagacatactccggaagtacatgggcgacattgaggtgccaaatgatgatactagcactactttaatgttgaagcgaccatcccgtgctgaacgttctgtagacgatcctattagggagatggatgacatgcttgttgatgaatatggaagcaatgcaacttttgagctttctggaattttatcatcaaaagtgtttgaagatgatgaagacttccctaaaaataatgggtcatcaccatttgtttcacaggcacggcctgttgaaaatgatgtcatacgaaaaactgaagatactattgctccagtatatgttgaggaacacattattatagtagagaatgtaactactgatgctgctatggaagatgctttagagttaccaggcaacaaacaacagactgatggagctgtccttattgaacacgactctattcaagatccaggttcagagcaggcaattgaccagaatgactttccctctctacccgatggccctccaccgcttccgtcagattcaccaccacctccacctcctttgcctccttcaccaccacctgttacaccgccgcctccgccaccacctccactttctccagcttcaccacctccgccaccacctcccccactgccatctggaccacctcctcagcctgctccaccacctctggcaacccaggtcacacctcttccttctattcctccgcctgttccttcatctccaccatcattgagttatcagcctccagctcctgagtactttgtgacggccaatggtgatcaattaacccagatgacaggaaatatattgattcaagctattggaaatgcaacaaccttcattcctagtggaccagttaatggacaagctgcggttaattttgttacttcgatgcaggcagaatatggaaacaataacatatttatggcaccacaagcttctaatggtaattaccagtttcggcccactggtgtaccttttcagcaagggaatttcagtgcctttccatctgcacaaacacatccagttcaacctcactctcacatggcacacatgaatcccatgggccaacaagctgtaccacccacgctcaatccttatgctgtgcagtcatttccaaacagtcagagccattatccatccgaggaacattggcggatggcatctggtaacttcagcccagatggccagcataattggctagccggtggcggagcattaccttgctcagaagggccatatgtgcaggatggatattcaaggtcaaacattgacagatcttcaattaatcctatgaaccatcaacatactgttctgaatcatttgccgtatggagcaccactaccaggccatgttccgcagatgctaccagccaggtctgatgtccacactcttaattgctggaggccctcttgatagagttgtaaactgaacttctttatggttttaacgtggaaagctcagaacactggaggcaatttgaattgagtgcaacaattcatggctttgttagtctgtgagatgcacttgcctcattgcctgggtgtaacgatgagatctgccatagtatatggaatggacattttacaatgtaactagtcttggcaacagcatccagcagactaatctctcttagtgtctgaagaacgatagccgaacgatgacagggtttgatttgttgatgcgtcgttttggttctcacccgagccagtttttgaagtgaaagcaataataatgttgttggtgcaccgctgaggtgtttaggttttactgctggtttggtgttgggtgatggttcctatcatctcactaaacaagattgttgactgtacatctgggagggaggtgatctgggatattgaggtgggtatcatcatgtgacggcgaggcacttggtgccaaatcgtactgaattttgttatctgggtctcagtctgctgcttttgtcccgcccgtattcgtttattcccgcaggggcaggggcaggaccctgttggctggccaggccacatatcctttttagtcccaagcaagttggagagccacacagtatatattatataaataatagtgagacatatttttttatgagattacttaaaagcaaa

SEQ ID NO: 136501 - DNA, 504 bp, Zea Mays
atgtgcgcgcccatcttcccacatcgccccaaaacaggatctggtgctcccgttgccccgttcctcgccccagtcatcgccagatgcgcgcagcctcgtcgccccgtcgcgctcgtcaacaccgtcgtgcgcgcccgcctggtgaaccttgttgtccgcgcagagatgctcaccatcgccgtcgtccacgccccgtcgagtcacgccctcgccatctccgtcgagctccaaggtgaggatccccagcgtgtacccctgaccatggcctccttttcttctctatcccggtcggtgctcagtgccaaggcagcgccctactcgctcggtcagccatggccatggccgggcgcagctcctacggcaaactctagcccccacggtccggcgtgtttctcccttgcccctgcgcggccctgctcggcaggcgtggccttgtccaccatggcgctggcgttgagtcccctccctcctcgcagcaagccgcagcagcaagccgaccggtag

SEQ ID NO: 136502 - DNA, 1254 bp, Zea Mays
gaccagcaccagcgtccggttcgctgcaccactctggagccagcactgcaggtgggcgccgtgggtgtggttggggtgagagagagagagagggagggcgtctgcgtctggccctttcaccttctcgcgtagtccgtagagatagagtgccgccgccgccgcctgcatcctgctaccacgggtcgagacgggtagatgaggaggaggaggagaacagctcgtcactgacgctgtgagttgcggggcgaccacatccatccgttccccctttcccttctccatttcccctttccggagccagggtaatggggcagatgggaggaccagacggcgacggcccgcaccaccagtaccactaccaggcgctcctcgccgccgtgcagaaccccagccagggcctgcacgtgcctctccacgcaggagcgggagcgcccgccgccggaccaggacccagacctggagctgatgctgatgcctcctccacgcataatgccaatgccactccccactctcagcctccaagagctttcactgattggagcgcgtccaacagtgcctttgccgcacagcccgcccctgctaccaccaatacacccttccactacaacctctcccagtcttatgccctatggacccattacatgctcaacaagaatgtatcctactctacttactctacaccacatgagccgttgcgccatacccacatcccggataagtattcaggttgtgcattcagccttgggtttgactctttcactacgatgtcccttggaccaaatatttgtgccaacatgacgcccatggaaagatctatatctgccaaagaacctgagaattcagaggatttgcctacagtagttagaagcagtgatgaaatggacactagaaacagtggcgacgttcgtcgtgacacagttgacactcttcctgagtcgaagcagagccatgaaagttgcgcttctgttagtaacaagttcgactctggagagtaccaagtcattttgcgcaaggagttgactaagagtgacgttgcaaattccgggcgaattgtgcttcccaagaaggatgctgaggctggtcttccaccattggtgcaaggagatcctctgatactacagatggatgacatggtgcttccgattatatggaaatttaagtatagattttggccaaacaacaaaagcagaatgtatattctggaagctgcaggtgaattcgtgaagacacatggccttcaggcaggggatacac

SEQ ID NO: 136503 - DNA, 1245 bp, Zea Mays
gaccagcaccagcgtccggttcgctgcaccactctggagccagcactgcaggtgggcgccgtgggtgtggttggggtgagagagagagagagggagggcgtctgcgtctggccctttcaccttctcgcgtagtccgtagagatagagtgccgccgccgccgcctgcatcctgctaccacgggtcgagacgggtagatgaggaggaggaggagaacagctcgtcactgacgctgtgagttgcggggcgaccacatccatccgttccccctttcccttctccatttcccctttccggagccagggtaatggggcagatgggaggaccagacggcgacggcccgcaccaccagtaccactaccaggcgctcctcgccgccgtgcagaaccccagccagggcctgcacgtgcctctccacgcaggagcgggagcgcccgccgccggaccaggacccagacctggagctgatgctgatgcctcctccacgcataatgccaatgccactccccactctcagcctccaagagctttcactgattggagcgcgtccaacagtgcctttgccgcacagcccgcccctgctaccaccaatacacccttccactacaacctctcccagtcttatgccctatggacccattacatgctcaacaagaatgtatcctactctacttactctacaccacatgagccgttgcgccatacccacatcccggataagtattcaggttgtgcattcagccttgggtttgactctttcactacgatgtcccttggaccaaatatttgtgccaacatgacgcccatggaaagatctatatctgccaaagaacctgagaattcagaggatttgcctacagtagttagaagcagtgatgaaatggacactagaaacagtggcgacgttcgtcgtgacacagttgacactcttcctgagtcgaagcagagccatgaaagttgcgcttctaagttcgactctggagagtaccaagtcattttgcgcaaggagttgactaagagtgacgttgcaaattccgggcgaattgtgcttcccaagaaggatgctgaggctggtcttccaccattggtgcaaggagatcctctgatactacagatggatgacatggtgcttccgattatatggaaatttaagtatagattttggccaaacaacaaaagcagaatgtatattctggaagctgcaggtgaattcgtgaagacacatggccttcaggcaggggatacac

SEQ ID NO: 136504 - DNA, 1006 bp, Zea Mays
gaccagcaccagcgtccggttcgctgcaccactctggagccagcactgcaggtgggcgccgtgggtgtggttggggtgagagagagagagagggagggcgtctgcgtctggccctttcaccttctcgcgtagtccgtagagatagagtgccgccgccgccgcctgcatcctgctaccacgggtcgagacgggtagatgaggaggaggaggagaacagctcgtcactgacgctgtgagttgcggggcgaccacatccatccgttccccctttcccttctccatttcccctttccggagccagggtaatggggcagatgggaggaccagacggcgacggcccgcaccaccagtaccactaccaggcgctcctcgccgccgtgcagaaccccagccagggcctgcacgtgcctctccacgcaggagcgggagcgcccgccgccggaccaggacccagacctggagctgatgctgatgcctcctccacgcataatgccaatgccactccccactctcagcctccaagagctttcactgattggagcgcgtccaacagtgcctttgccgcacagcccgcccctgctaccaccaatacacccttccactacaacctctcccagtcttatgccctatggacccattacatgctcaacaagaatgtatcctactctacttactctacaccacatgagccgttgcgccatacccacatcccggataagtattcagaagttcgactctggagagtaccaagtcattttgcgcaaggagttgactaagagtgacgttgcaaattccgggcgaattgtgcttcccaagaaggatgctgaggctggtcttccaccattggtgcaaggagatcctctgatactacagatggatgacatggtgcttccgattatatggaaatttaagtatagattttggccaaacaacaaaagcagaatgtatattctggaagctgcaggtgaattcgtgaagacacatggccttcaggcaggggatacac

SEQ ID NO: 136505 - DNA, 1008 bp, Zea Mays
attcattctaacatcagccgtaggattcggatccagtgaacaaccggattcttccaggcgcttcctcccactccaaatttctctcctcgcgctctcctcaccaccacccgcctctcccccacgcttgcccacgccgcctcctctccctccccgtctcccctacgagggtgctactaccaccttaccggcgttcgagaccgaggtggcggctttgccggacaaggacgatcctccgcgggcgccgccgccacagagtagatggacgcggagaggatgaatgccctggaatatatgttcacgcgactgtccctcgccgacgacacgtgcctgaagccggtgctcgcccacacccctagctcccatgcgtcgtcacttcgcttccgtgttctgaacatctgtatgacggcacagcaattcgctcatcgacctcatcaacattgtgcttgattcacattgcaatagctcctgcgtggtaacctgatatccagactctctcattcgcctgaccgacatcgtgattggttcacacttcaaaaccttctgttgcctgatctattacattttcagatgacaacaacactacgaataaaaggagtgacgcctacagttagccatagcatctgatgcttttgttaaatgcagctcagactgatgatatggttaactagatgtaatatataactactacttttgatttgatgcccactgcggttctaggacacccatagcaagaaacgaccctctttttgcatgtatacatgtcagtatctcatactaccaaaacaaacacttgatgaagacatagatgtgtagccttgcaatgtcatactttaaatctacaaatatcccctccctatgtaaatgtaccaaatttattggcacatcatatttgccgcttatactgtaatctacaaccgtattttaatatcgcgcgtaggggcgcgacatgcaatagttaatgaaatcggacggggaattggggatgggaaggagctatttgccattaca

SEQ ID NO: 136506 - DNA, 1638 bp, Zea Mays
attcattctaacatcagccgtaggattcggatccagtgaacaaccggattcttccaggcgcttcctcccactccaaatttctctcctcgcgctctcctcaccaccacccgcctctcccccacgcttgcccacgccgcctcctctccctccccgtctcccctacgagggtgctactaccaccttaccggcgttcgagaccgaggtggcggctttgccggacaaggacgatcctccgcgggcgccgccgccacagagtagatggacgcggagaggatgaatgccctggaatatatgttcacgcgactgtccctcgccgacgacacgtgcctgaagccggtgctcgcccacacccctagctcccatgcgtcgtcacttcgcttccgtgttctgaacatctgtatgacggcacagcaagtaggccccttccgtttcatctccccatccgcctcttcacttccgtgatgaagcatagaggccagcacgcatgcggcgagctccaacctccaaaagggttgcatcagttgaagcatcgcagttctccacttcgcactaacattgtcatctcttgcgtaatcgcgcagacgcggtgcccgtcggtgctggcttcctatagtttttggatcccccgcctccccacccattcttctgccacatccatccgctcgcgctgctctacttagcgcggatgcactattgcggtgtacgaccttcaccatggggatctccattaacggttatggaagaaaggttggctagtgtggaccatgcacggaggttgctcgatcgaatgtccaactgatttttttgggttatcatatttgctacttagcttgcttgccgcaaacgacactgcaacaaatttgtttagattgtaaagtagggtagactcatgtggaaccatgcacgcatgatgcttgatcaaatatcccaatattcttttggctaacatatttgcatagctatactgcagcacatctatttaaattgtaaagcaaggttgactcatatgggccctacggggaacttgctggatcgaataccccaatagataatttttggctaacacatttccatggcttgcttattcaaacctcattactacaccagccatctttcctattgtatataccttcacatattaaatgttgcagatacatactaattctaattgtgtttttttgcagttcgctcatcgacctcatcaacattgtgcttgattcacattgcaatagctcctgcgtggtaacctgatatccagactctctcattcgcctgaccgacatcgtgattggttcacacttcaaaaccttctgttgcctgatctattacattttcagatgacaacaacactacgaataaaaggagtgacgcctacagttagccatagcatctgatgcttttgttaaatgcagctcagactgatgatatggttaactagatgtaatatataactactacttttgatttgatgcccactgcggttctaggacacccatagcaagaaacgaccctctttttgcatgtatacatgtcagtatctcatactaccaaaacaaacacttgatgaagacatagatgtgtagccttgcaatgtcatactttaaatctacaaatatcccctccctatgtaaatgtacc

SEQ ID NO: 136507 - DNA, 1809 bp, Zea Mays
attcattctaacatcagccgtaggattcggatccagtgaacaaccggattcttccaggcgcttcctcccactccaaatttctctcctcgcgctctcctcaccaccacccgcctctcccccacgcttgcccacgccgcctcctctccctccccgtctcccctacgagggtgctactaccaccttaccggcgttcgagaccgaggtggcggctttgccggacaaggacgatcctccgcgggcgccgccgccacagagtagatggacgcggagaggatgaatgccctggaatatatgttcacgcgactgtccctcgccgacgacacgtgcctgaagccggtgctcgcccacacccctagctcccatgcgtcgtcacttcgcttccgtgttctgaacatctgtatgacggcacagcaagtaggccccttccgtttcatctccccatccgcctcttcacttccgtgatgaagcatagaggccagcacgcatgcggcgagctccaacctccaaaagggttgcatcagttgaagcatcgcagttctccacttcgcactaacattgtcatctcttgcgtaatcgcgcagacgcggtgcccgtcggtgctggcttcctatagtttttggatcccccgcctccccacccattcttctgccacatccatccgctcgcgctgctctacttagcgcggatgcactattgcggtgtacgaccttcaccatggggatctccattaacggttatggaagaaaggttggctagtgtggaccatgcacggaggttgctcgatcgaatgtccaactgatttttttgggttatcatatttgctacttagcttgcttgccgcaaacgacactgcaacaaatttgtttagattgtaaagtagggtagactcatgtggaaccatgcacgcatgatgcttgatcaaatatcccaatattcttttggctaacatatttgcatagctatactgcagcacatctatttaaattgtaaagcaaggttgactcatatgggccctacggggaacttgctggatcgaataccccaatagataatttttggctaacacatttccatggcttgcttattcaaacctcattactacaccagccatctttcctattgtatataccttcacatattaaatgttgcagatacatactaattctaattgtgtttttttgcagttcgctcatcgacctcatcaacattgtgcttgattcacattgcaatagctcctgcgtggtaacctgatatccagatgtccacttagtcaaatccgagtgcttaagtattaacagtgattggatctggacttgtgcacaccggtaaacacatgaacagaggagattaaggattaccgtcatgtagatcttggcacggcaatggtagctggtcgccgtaggtgtagccactgtccgtcctgcagaaaaggaagggctcggatccagttgctggcgcagagatccgaagccgccatgggaagaactcttccagtcactccgacttataggcgatgagtccttctgtggattagggtttagggcgagctctctcattcgcctgaccgacatcgtgattggttcacacttcaaaaccttctgttgcctgatctattacattttcagatgacaacaacactacgaataaaaggagtgacgcctacagttagccatagcatctgatgcttttgttaaatgcagctcagactgatgatatggttaactagatgtaatatataactactacttttgatttgatgcccactgcggttctaggacacccatagcaagaaacgaccctctttttgca

SEQ ID NO: 136508 - DNA, 553 bp, Zea Mays
gattcggatccagtgaacaaccggattcttccaggcgcttcctcccactccaaatttctctcctcgcgctctcctcaccaccacccgcctctcccccacgcttgcccacgccgcctcctctccctccccgtctcccctacgagggtgctactaccaccttaccggcgttcgagaccgaggtggcggctttgccggacaaggacgatcctccgcgggcgccgccgccacagagtagatggacgcggagaggatgaatgccctggaatatatgttcacgcgactgtccctcgccgacgacacgtgcctgaagccgttcgctcatcgacctcatcaacattgtgcttgattcacattgcaatagctcctgcgtggtaacctgatatccagatgtccacttagtcaaatccgagtgcttaagtattaacagtgattggatctggacttgtgcacaccggtaaacacatgaacagaggagattaaggattaccgtcatgtagatcttggcacggcaatggtagctggtcgccgtaggtgtagccactgtccgtcctgc

SEQ ID NO: 136509 - DNA, 201 bp, Zea Mays
acaagtggcaggcttttaagtgaccatcgcagtcgtctcactcctaaaatggtggaagctttgatgtgcattcaaagttggcttcgtcacactcttaaagatgctggtgatggaagattcaatagtttttggtcttgccttgaagataatgaagaagacatgaaaggagaatcttgtgtgttggctgctgattctgaataa

SEQ ID NO: 136510 - DNA, 2237 bp, Zea Mays
cacagaagcaaacgaatccgcgaccctccgacagtgctgttttccgttagaggcttctcgtcttccccggctcaggcaacctccagctgcagcggcggcgatgggggtgaagaacctctgggacatccttgactcctgcaagaagaagctcccgctccagcacctccagaacaagaaggtgtgcgtggatctttcctgctggctcgtgcagttctgcagcgccaaccgctccccggccttcctcagggacaaggtgtacctcaagaacctcttccaccgcatccgagccctcatcgccctcaactgcagcctcattttcgtctcagatggggcgattccttcagtcaaattggctacttataggcgccgactgggattaaatgctgctgaggctactcgagaggaggccaactcacaacctctgacttctttgcgtcggaacaagagctcagagttctcacgcatgatcaaagaagccaagcatctcgggttggcccttggcatcccttgcttggatggcatggaagaagccgaagcacagtgtgcattgcttaatttttcttccttgtgtgatggctgttttacatcggattcagattcattcttgtttggtgcaaagacagtttatagagatgttttcataggagagggtggttatgtaatttgctatgaaatggaagacattcagaataagcttggtttcggcaggaactcactgatatcacttgcagtccttcttggtagtgactattctaatggagtccatggctttggcccagaagcagcatgccgccttgttaagtctttaggggatgacaccgttcttggtcaaattttgtccgatggagttaaacctgcaagaaaatgtaaaggaaaaggcagtggcgccaatgcagggacggttggtggaacgtgcccaaaagcaagtacctgtgaggttgggattaaccaagattctggtagtcaatttcgtgacataataaatgcatatctggagccaaaatgtcattcaccagattcagaagctgtgcagagggcatgcagccagcggccatttcttcgttcacaactccatcagatatgcgagcaatactttgcgtggagccctgtgaaaactgatgaatatatccttccaaagattgctgagagagaacttcgaagattttcaaatctccgctccacgtcttcagatctaggaatgaaaccttcgctgaatgagattcctgtaccgtgtcctgtactggcgattgtgaagcagcgaaaagttcaaggaagtgaatattatgaggtttcatggagaaacatagatgggctccaagtttcagttgttccaggggaacttgttagaagtgcttgcccagaaaaaataactgaatttttggaaagcaaggatgctcagaagaaacaaaagaggagagctaggccaaagaaatctggtcaagctgccgtaaaagacgtggatgcgcagctccaagaattgctacttggaattgaatctgaaagtggtagctttccatgtacggccaatggccctcagacagcagctatacagatggttgcaccgctccaggaatttgttgatctatcttctccatcaccacctatacgatcttgtaagattgccaggtccagaaagttgagtgattcagacacagtaacaatggatgggattcatctgcagcaccaaagtctgcagattggatcgatggagtcaaattcggcactgggtcttgagccaattgatctgtcatcaccctcgccttgtgctgctcataaaccccaggctgctccagaagcaccaccactgtgtatggaggcagaaagaagagccctttgggatataagcaatttggtcgagaaagaaccctcctgttgcaagcatgaacctggaacaaatgtgcaggtggaagagtcaccattgttcaggcatgggactgggatggcaggcgaagctgattcttcacggagaggcgatgcgcagagtagggaagtagtagaagctgccatgatcgacctctcttctccatcaccagttaaagtcgataatagtagaaggaatggtaagaaggattgtgaggctggcagcagcagtcagtctccagaacacgagaggaaagcgagggagctcagattgttcctagacagtataagagacgagttgtattaacattcgattggattgtatgtaaaccgatatgtgcaatgatgatgtgtgttctccatttcaatggtatctc

SEQ ID NO: 136511 - DNA, 3199 bp, Zea Mays
atggcatctgcattgcagttgcagccacgccaacaactgggcagcggcgacatctgcatctcccacctcgtctccctcccgtatctgcaagccttgatcccgccgccagccatccatccaagggagccatgtctccatccggcgagctgctggcttccatctcctccgtcttcactgtcgccttcgtcctcctcgcctgcgtcgagctcggcgacgccgccgccgccgccgtcggcgtctaccgcctcatccagtacgacctcgccggcgctccgctcggctcccgcgccgcggtcctcaaccaccacgctgccgcgctcccgctccccgccggcgcagacctctcccgctccgccctcgtcgcgccgctcctcgacctcccgctctctttcctcagagagtacctggtggagaaaaaacatctggggggattactcattctgctcccgacaaataatgacagtgtggatgacaaggggcaattcaaaggtgtactgactgagctggagaagttgcttctgcatgaacaagttccatatccagtgtactttgctttgcatgacgacaatcttgataacctgctggcagatatccatagaattgcctccacaggtcaaccagcctctgcaacaacaggaggttacaaacttgtcgtatcctcagcagagcctagaaaagtgtcatctccaaccatttctaatatccagggatggttacctggatttaaaggagagggtgatagcgaacagcttccgactattgccatagttgcaaactatgacaccttcggtgctgtacctgcactttctgtgggaagcgacagcaatggaagtggagttgtggctcttctagagattgcgagactattttcacgtctgtattcaaatcctaagacaaggggcaagtacaatattctctttgggttaacatctggtggaccctacaattacaatggaactagcaagtggcttaggagttttgatcagcgtgtacgcgagagcattgactacgcaatttgcttgaacaatgttggttcctggggcaatgacctctggatgcatgtatcaaagcctccagaaaatccctatatcaagcaaatctttaaagaattttcagatgtttctaaagaaatgggtgtttcagttggaatcaagcacaagaagattaatgtctcaaatcccagagtagcatgggaacacgaacagttctcaaggtttagggtgactgcacttactctttcagaaatgtctacccctcctgattttttggaaagcactggcggtcttcatgacactagagaatctacagatgctgagtcagtaatccgagctgccagattagtttctgagagtcttgcgagacgcatctatggactgaagggaaggaacatagatgtttttgcagagaatagcagcttagccattaatcctcactatatccggtcctggttggatctgttgtcacggacaccacgggttgcaccttttctgcagaaaaatgaccccttcatagcagcactggaaaaggaactgtctgcacacactactgatgtgcgtgttcaaagtgatgcgcttgatggcatgttcactttctatgatgcgacgaaagcaactctaaatgtctaccaggttgcaggtgttacttttgatctgctgttccttctggtgctcggctcctacctgattgttctcttctgtttcctagtgattactacacggggtgttgatgatctcattaacatattccggcggcctccatcacgcaaactcaagggtgcataggctaggctgtgttttgtgtattagcgccagccaagagaccgcatgcctagtagtcattagaagaagagatagagatgaggatgacaggcaggcaggcaggctagcttgcttcccacagcacatagacaaacattttttttcctttttgtgtcaggaatttcgactgtaatttagctgtattttggttacaattctggcttattcggggtggactggtggcggtgtctgatgagagacagagaagcacacaccaccacgccgcctctgaactttggatgctgagaaattcttgtctgaaacacaaacactgaaggcctgccgtgcctgtgtttacttgttgtctgaaatataaaaaataatagagaagaggaatataaagtcaaagcgaaacgaagcacctaccttgcaggatgagatactggaacatggagataggccaagaagatcgtgattgaatttcagtcccttgattttagatcggacggccgatagatagatagtaggatggataaggcagtgagtgatccagggccaatgggccatccaacaaagagtcagccgagtctgctctgctgctccatcggatctcccgcgcgccaaaccatgccgacgcagcaagcatgttctgctgcggcagcattgagatcgcggcggccttcccctgcatccacgacgacgacctcccggcagctgcggctgcgtccgcctcgtgccgccaccgcgggcgtgcggctgacggtgtcggacgcggagctggagtcccgcgggttcgctgtgcggcgcacggcggagggcatcgacgtggcggcgctgaacgaggtgttcgtgcgcgtgggcttcccgcggcgtcaggaggagcggctgcggcgcgcgctggagcacagccgtgtggtgtggctgtcggccggggaggaggaagggcggcccgtggcgttcgcgcgcgcggccggggacggcgtgttcaacgccgtggtgtgggacgtggtggtggagccgtcgagccagggcctcgggctgggacgcgccgtcatggagcgcctcgtcgacgagctgcggcgcgacggcgtggccaacatcgtgctctacgccgagacgcgcgtggtggggttctaccgcctgctggacttcgccatggaccccgacggcatcagggggatggcatactaccgcaagtccactactaccgccgcttgattcgtctcgtctgtcttgaactcattcatcaatgaaggaagtcgatcgaattccctaaagccccccatgtttgtatgatgtagatatgacatggtttatttttatcactcatctcatagttgctcgtttattacctttcattttatattccgcgaaaacgatctagctagaacatgtacttatatttcccgcaaatcaagcaatataaaaacctcacttctttc

SEQ ID NO: 136512 - DNA, 513 bp, Zea Mays
atgtatttacacccaaagttgcaatgtatcccagcggtcacacacctcctgatcgcaaacaggaaccacggtttggtatttggcggtacgagcaaggactgggacgacatccgtcagttcattgctagtctggaacgcgcctctgaaaactcctctgcgatagccagcaaaatcggaggtggcaaatcgaccaaccattctgtggagcgagccgaacaaaaagaaaagggtgacatagtagttctcgatttagatgacgaggatggagatggaaacagtccagaacacaataagttggcatctgagatggacaaagaactcgggacatctgtattggctcgtaatatcgcagaaaggatggcaactaatgggagccaaacatttgaaactgtgcatgcttatggaggcaagaacacgcaaattgttccgtatggccaaggttctactctggtgaatcagtttcctttgcaaaccagttggcaaccatctagtggaaggttccataacttgtag

SEQ ID NO: 136513 - DNA, 969 bp, Zea Mays
gcctcccatgcatgattctctctcatcagtctccctgcctctcgatcgatcactactagcttgctgcggcacgcaggaggtggatccgatacaagttcgatgggcagcaagacgggcgccgtgtcgtcgttgctgtgctgcccttgccggtgcctcttctgcggcgtgctcagctgcctcttcagcgtgctcgcctgcattttctgcgtcgccgccctcgtcgccctcgtcctcttcctcctgttccggccccacatcatccgcgccaccgctatctccgccgacctctccgacttcaccctcaccccgcggacgtggatcctccactacaacctctccctcggcctgcaggtccgcaaccccaacaagcgcatcgccctccactaccgcggcgtcgtggcgcaggcgcacttccagggccagcagttcggccacaccgccccgccggacttcttccaggacaccagcgagacgagcaccctcgacctcgccttcgccggtgagagccccatcgtcggtggcattgccgcggccgccttccggagggaggccgccgagggggccatcttctctgtggacgtcaagatcagctcgcacatgaagctcaaggtttgggtgctcaaggtaccggggcccaagaccaagatcgattgccccctcaggctccagcgacgggatgtcgcccatggccaacgcccgccggagttccaccagacggaatgcagggtcaccttcttctgaatctgaccgctcgctccggattccaccttagagttcgttgcatgcatgcattcttgctgcatctgatattttccagcatctctacctacatgctggtggcaataatcctctcgtcatcattaattaattagatagatagatagatatgtttcgctacattgtttatgagaatagaagaacacagatttattgctagaagttacaacaacatatatatatttttcgtat

SEQ ID NO: 136514 - DNA, 1321 bp, Zea Mays
gccagtgccagtggcaggcttataaacactaggagtcgtcccttccttgctctgctttcctctctgctagctagctcttgtcttgtcactgagtgagcagaaggagtgtgtggtggagtgcaaaccaaatcaaacgaagaaaagtgggagcgaggaggaagaaaagaagaagaagaagacgacgacgacacccaccaccagcagcaagcagcaatcagcaaccagcataacgaaatgtcgatcaagtactgcgaccagcacaaggactgcgagcggcagcgtctgtaccgtcgcttctgcgccgccctggtgggcgtcatcgtgctcgtcctcctcatcgtgctcatcgtctggctcgtcctccgccccaccaagcctcgcttcttcctcaacgacgtgagcatcgtgtgcatcaacgtcagctccgcctcctacctcaccgtcaccatgcaggccacgctggcgtcgcgcaacaccaacgaccgcgtcggcatctactacgaccgcgccgacgtgtacgccgagtaccgggcgatgcagatcacggtgcccaccgcgctgccgcccttcttccagccgcccaacgacgccgccgtctgggcgcccttcctctccgcctccaacgtcccgctgccgccctacctcgccaccgcgctcacacaggacgagacggcggggtacctgctcgtcaccatccgcgtcgacggctggatccgctggaaggccggggccttcatcaccagccactaccacctcagggtgcgctgccccgcgctgctcaccgtcaacgacggacaaggaagctacggctccaacgccggtggggggctcggctacttcaagttccagcgcgcagcaccctgcatcgtagacgtctgagatcgatctcgattcaaaaatcacattaaagaagctcggccgggatgaattgaacaagaagcccttttctttttcgtaataagatatatacatatgaatcaaataatagcttcaactctttggtttatttttgttgcttttttttcttttttttgtttggatgggaaaaaacgtagactatattgtagcaattaatatctggaggatatgcttctagatggatggatatatgaacgaaagggccggccgccgggaaagctcagctaactttgagttacctctacttttccctatctctgtactgtagagtgtattttggatttcctcgaggtatggtgggacaaaaaaaaggactattgctttgaatctacggaattcatgagagggacaaacccacacacacacaaaatgtaagtgtacgtgttactattaagttgttgat

SEQ ID NO: 136515 - DNA, 831 bp, Zea Mays
attcccccgccgcgccggcttcatccctctttcttcttcttcttcttcttcacacaagcgtgctccttctgctcttgtgctaagtagctagctcacaacagaagaggacgagaggaagcaaggcggcggcggcggcggcagcaacaacatacaccgctggccgtggcgccatgggcatcctggaccacatgtcgcatgtgtgcagcatcacggagacgaaggaggcgctcaagctcaggaagaagcgaccgctgcagacggtgaacatcaaggtgaagatggactgcgaaggttgcgagcgtcgcgtgaagagcgcggtgaagtcgatgcgcggcgtgacgagcgtgacggtgaacgcgaagcagagcaagtgcacggtgaccgggtacgtggagcccgccaaggtgctggagcgcgtcaaggccaccggcaagaacgccgagatgtggccctacgtgccctacacgctcaccacctacccctacgtcggcggcgcctacgacaagaaggctcccgcgggcttcgtccgcagcgcgccgcaggccatggcagaccccagcgctccggaggtcaagtacatgtccatgttcagcgacgagaacgtcaacgcctgcaccatcatgtgatgcatgcatatgtatagtctctcgatcgtatcatgtgtagtagtacgagctagctagtgcatatcgatcttcgtactgtatcatatcgatcgaaagaaccttaatagccaatacaagaggaatgtgaattaagcaatctatatagtatattacaaactaaaacttctaataatatcagtctattaaaatacatataataagcaaa

SEQ ID NO: 136516 - DNA, 1125 bp, Zea Mays
atgcttgagcaagctctgctggtggcttgctagctatttctatcgatccagcagctatagctatgcatgcatgcagcaatggcggacgatgagcagcagcaggcagcagcatatgcgtgcgtgccgccagggttcaggttccacccgacggaggaggagctggtggggtactacctcgccaggaaggtggcttcccagaagatcgacgacctcgacatcatcagggaggtggatctctacaggatcgagccatgggatctccaggtccaggagaggtgcggctactacggcggcggccaggatcaggaggagccgacggagtactacttcttcagctacaaggaccgcaagtacccgagcggcacgcgcaccaaccgcgccaccgccgccggcttctggaaggccacgggcagggacaagccggtgctctcctccagcagcagcggcgtcgtcatcggcatgcggaagacgctggtgttctaccgcggccgcgcgcccaacggccgcaagacggactggatcatccacgagtaccggctgcagagcaacgagcacgcccccgcgcaggaggaaggatgggtcgtctgccgcgccttccacaagcccatgcccaaccaccaccaccacatgatcaggcacgccgccgcttcctgctgctactactatcctgcccctgctgctgcgcctcccgccgccggtctgccgccgcataatggccacctgcacctccacagcccctccgcggagtcggcggtggattggaacctgctgagcagcctgctaccgcccgggcagctggatttcgtccatcacacgctgacaccgccgccggcttcttctccttcttcctgctccacgacgaccaccaccaccaccaccaggaacaataacaatgaatgatgcgtgacaagacatcttaatttttccagctagcaatccaagacgactgattattatatctactgttttaaccaaccacgcccacactacacactagctagcttacgtacgtagcgtatatatatattttgcattgtagggttactaggaactcatcatttcacgtgtacgagcttgagatctatctggaactgatatcagattgcttgatcatcaaacaatgaa

SEQ ID NO: 136517 - DNA, 346 bp, Zea Mays
tggagttttttgtttttttttttttgttcaagcgatttcatgactcatctgatttaaaaacaaaaccattttttctgctttttgtactaactctattaatatattataaatgcagagttcatcccatcatcccacccccctaaaattttcttcatttcttttctccattttttctgcaattttttgctcatgtttcttgaagagaaaacgcatattgaagttttggttaaacaaaaaaaattgtgataataggaacttctttttatcatcttgtcctctacgactctactcagataataggaatttctttatcatcttcataaactcaagtagattggaatctgtg

SEQ ID NO: 136518 - DNA, 415 bp, Zea Mays
tttttagattgttgttttttcactgaaactcaatgctaccctgataatcttgttatctagataaacttgacaatgtaacaaagtttgattgcaatgattactctttattacacatcttacttctataatattgactgcttgctgccatttaatatatcacagttggaagaaagcatagatattttgactgtctcaactgaacaggagagggaatcctttgcgcagaaacttagtgaggagagggaatcctttagccttggacaacataaggccattggtgatccgattcttttcagattgagtgaattaaaagcccgaccagctgcctgtgaaaatgctcgattgtatcttgatgagctgcaaaaggtatcaataagagaacctaataacgatttcactgggcccaaaatttgat

SEQ ID NO: 136519 - DNA, 1778 bp, Zea Mays
tctgggccggtccatccgtttccgacacgctcacgcaattcgggcgaaaagaacagaaaagcatctgtctcggttacgtctctttttctctctctctctctatcggccgcgtccggcgtcccgtccaaaaagggaaagcgatgcgcgtggcgtggcggcacttcctcctccgcctgcctcgcccgccatggccgcgcgcgccaaggccgccgccgtcgacgaccacgaccccatgccgccaccgctgccgctcccatggccgcgcccagcgccgctcctcgtcatgctgtccctgctcgccacggcctcctacctggccctcacgcgctttcccgccgcgctcctcccgatcgcccctcgctctcgcccccacgacgcgcccgcgcacgcgcccggggacagctgcgcggggttctacgcgggcgcggggccggcgcgcgaggtgtgggcgtccgtcgaggagttcggggccgtgggcgacggggccacgctcaacaccgcggcgttccggcgcgccgtcgcggagctgggcgcgagggccgtcggtgggggaggggccaggctcgacgtgccccccgggaggtggctcacgggcagcttcaacctcaccagccgcttcaccctcttcctgcaccgcggcgcggtcatcctcggctcccaggatccagaagagtggcctctcattacccctttgccgtcttacgggcgcgggagagagcggttaggaccacgccacatcagcctcattcacggagagggcttaaacgatgttgttattaccggtagcaacgggaccatagatgggcaaggtcatatgtggtgggagctatggcggaaccgaaccttgaaccacacgagaggccatctcatcgagcttgtgaactcaaccaacgtcctgatatccagtgtcacgctgagcaactcccctttctggacagtacacccggtctactgcagcaacgtggtgatgaaggatttgaccatactggctcccctggatgctccaaacacagatggcattgatccagactcgagctctgaagtttgcatcgaagactgctacatcgaaagcggagacgacctcgtggccgtcaagagtggctgggaccagtacgggatctcatttggcaagccgagcacgaacatcgtcatccagagggtttcgggcacgactccgacgtgctcgggcgtaggcttcggcagcgagatgtcaggaggcatatctaacgtgctcgtccgtgacctccacgtgtggaattcggcgcaggccgtgaggctcaagaccgacgtagggaggggtggctacatcaccaacatcaccatagccagtgtggccatggagaaggtcaaggtgccgataaggttcagccgaggcgcagatgaccatcctgacgacaggtatgacccggccgcgctgccgaggatcagcaacgtgctggtcagcgacgtcgtcggtgtacacctgcagcgagcaccgatgctggaggcagtgcctggcgcagtttatgaggggatctgcttcaggaacttcagcttcagagggataaggcggcagcaggacagcaggtggcattgcgagtctgtgtatggagaggcgcatgacgttttccctgcaccgtgtgaagagttcaggagagatggatcctcctcctggtgtggacttctttgaccaactactctatctagtagtagtacatactacagcgcccacaagttttgggagtggatgatataggttttttagattatacagacaaactcaattttttaaactttaa

SEQ ID NO: 136520 - DNA, 1816 bp, Zea Mays
tctgggccggtccatccgtttccgacacgctcacgcaattcgggcgaaaagaacagaaaagcatctgtctcggttacgtctctttttctctctctctctctatcggccgcgtccggcgtcccgtccaaaaagggaaagcgatgcgcgtggcgtggcggcacttcctcctccgcctgcctcgcccgccatggccgcgcgcgccaaggccgccgccgtcgacgaccacgaccccatgccgccaccgctgccgctcccatggccgcgcccagcgccgctcctcgtcatgctgtccctgctcgccacggcctcctacctggccctcacgcgctttcccgccgcgctcctcccgatcgcccctcgctctcgcccccacgacgcgcccgcgcacgcgcccggggacagctgcgcggggttctacgcgggcgcggggccggcgcgcgaggtgtgggcgtccgtcgaggagttcggggccgtgggcgacggggccacgctcaacaccgcggcgttccggcgcgccgtcgcggagctgggcgcgagggccgtcggtgggggaggggccaggctcgacgtgccccccgggaggtggctcacgggcagcttcaacctcaccagccgcttcaccctcttcctgcaccgcggcgcggtcatcctcggctcccaggatccagaagagtggcctctcattacccctttgccgtcttacgggcgcgggagagagcggttaggaccacgccacatcagcctcattcacggagagggcttaaacgatgttgttattaccggtagcaacgggaccatagatgggcaaggtcatatgtggtgggagctatggcggaaccgaaccttgaaccacacgagaggccatctcatcgagcttgtgaactcaaccaacgtcctgatatccagtgtcacgctgagcaactcccctttctggacagtacacccggtctactgcagcaacgtggtgatgaaggatttgaccatactggctcccctggatgctccaaacacagatggcattgatccaggtctctgcgctagctgttactttcattaccattaacaactcgatctctactgacagcttctctcgctgattggaacaataataatggcagactcgagctctgaagtttgcatcgaagactgctacatcgaaagcggagacgacctcgtggccgtcaagagtggctgggaccagtacgggatctcatttggcaagccgagcacgaacatcgtcatccagagggtttcgggcacgactccgacgtgctcgggcgtaggcttcggcagcgagatgtcaggaggcatatctaacgtgctcgtccgtgacctccacgtgtggaattcggcgcaggccgtgaggctcaagaccgacgtagggaggggtggctacatcaccaacatcaccatagccagtgtggccatggagaaggtcaaggtgccgataaggttcagccgaggcgcagatgaccatcctgacgacaggtatgacccggccgcgctgccgaggatcagcaacgtgctggtcagcgacgtcgtcggtgtacacctgcagcgagcaccgatgctggaggcagtgcctggcgcagtttatgaggggatctgcttcaggaacttcagcttcagagggataaggcggcagcaggacagcaggtggcattgcgagtctgtgtatggagaggcgcatgacgttttccctgcaccgtgtgaagagttcaggagagatggatcctcctcctggtgtggacttctttgaccaactactctatctagtagtagtacatactacagcgcccacaagttttgggagtgg

SEQ ID NO: 136521 - DNA, 87 bp, Zea Mays
gtcatgatcgatgcattatatgttaggtccaaagctactctgattcatttattcatgaggttaggccatgtaactgactgattgacg

SEQ ID NO: 136522 - DNA, 912 bp, Zea Mays
atgctgccactgcgaggtgcgagcataaatctcaagtcctcagtcttggatctcccatgcaatgcaccccccgagaaaccctcgcagcccaatgacgatgacgacgaccaagacgaagtaggaggcggaggcggaggcgtcatcagcacacaaaggcaggcaggcaggcaggcgcgcggtccaaagattccgtcccagactgccgacgccatggccgtgccgccccgcgccagcacgccggaggaggagccagaagacggcgagttcaccttccccacgccgccgccgccgctcctgggtgtcggtgcgcgctgcaaggacttattcctccacccggcaccggcgtccgcgtccgcgtgctcgtccccgcccgtgtggctgctgtcgtcgtcgtcgtccccgatccgccgcagcttctccgccgccgactgcgccgcgtcgccgtggcgggaccggcgggccctgctcgcccgtctccgcgacggcggtcgctcacccgcgctcagcgactacgccggcggcttctgcgaggaaggcggggaggaggacgaggagaggatggacagcctgtgggaggacctgaacgacgacgacgacgacgacgacgacgcggcggcggcccgtggcgaggacatcttcttcgggcggtccatcgacgtgtcgcgccgccggtccgtggccgccaacgccgccgaggaggcgggaagggtgggcaaggacaaggaccgtatcagcggcggcagcgcggtgctcggcgcgtccaggagctcccggcggcggcccccggggctggtggccatgatgcgcgggctcaggaggatgttcgtggcgcacaaggccaagagccgggtgcacagggacgagcagagcaccgcctccgcctctgcctattccttgagcaggaaaggatga

SEQ ID NO: 136523 - DNA, 285 bp, Zea Mays
atgaaggggagatacggggcgggggcgtacctagaagggcgaggagcttgggggcgcacacgtacctggaagggcgtcgatggaagggcgatgagcttgggcgaggatcgcggggcccttcggagctcaggagatgcgaaagcgtgggtagtccgtcgtcgatggaagggcgcggtgggggaggatttgggggcgagcgaggatttcggcgtcggctgtggatgcgctgatggcggctacgccctggcgccgagggagaggttttcgggagcgaagtgcgcgtag

SEQ ID NO: 136524 - DNA, 337 bp, Zea Mays
aaattaaactattgttaggaggaagtggcggtggctgcggcgacggcattggcgacgacggggtatccgatgccgtgcctggtggttgggaaggcgacgaagaggaggctgcagagcacgccaacgccgagcggcagaacgtcgagcaggtcctgcgtggccctgtccggcgtgggcccgtacaggcagacgacgacgtccctgtccctggcggcgacgaccccgaagacggcggcggacagcgcctgggacagcgccgatgtcgccggggatccgccttggttcgggaggaggccgtcttcgagacgtggtggctcgtgctgctgatcgggcgtcg

SEQ ID NO: 136525 - DNA, 632 bp, Zea Mays
agctgcgacaacgtagcatacactagtgcttttgctagctacttgtgcgagaagagagagcgcacggcgatagatatggcgcatagcaagcgcgaaatcaagcccgggagggcgcataccaaggtggccggcgacgacgagatgctgcggaccgggttcttcgacggcacgccgctggagggcggcaagatcgccgactcccagcccgtcgacctcttcgccgctgcccgccgcgtcgccgacgccccgtactcatcgcagcaggaaggaccacacgaggaggggaccaacaagaacgccgtcatcgcggagtcggagcccgtcgacctgcccgcgagcgcgcggggcgtggcggaggtgaaccgtgctgggccggaggagcagacaggccgcggtcggcagggcatggccgagcccaccgccggtggacgtcgcttgggattaggtcgcccggccccggcttaacgatccagatcaagcagtactcgactaccgccactacactacctgctctgctcgtgtcttgtttccagttttctttctctgtaagcggtgtagggtttgccaaacttttatgtacgaattatgaatatcaataaagtcgatctgctgctgcgaaaacaaaaaagaga

SEQ ID NO: 136526 - DNA, 972 bp, Zea Mays
agaagataagcctatccatcccttgcattggtattgtcatctggggcagggcaggggagggcaggagaagctatctattggccatctatccagcagccgctctccccagccccactctctccatctagagctccctaactgcaccggccgccacaccaccgtaccccgacccctcgacaacaatggccaccgtcctaggcagcccccgcgcgccggccttcttcttctcgccgtcctccctccgtgccgcgccggcgcccaccgccgtggcgctgcctgcggccaaggtgggcatcatgggccgtagcgccagcagcaggggcaggctgcgcgcgcaggccacctacaacgtgaagctgatcacgccggagggggaggtggagctgcaggtgcccgacgacgtgtacatcctggaccaggccgaggaggacggcatcgacctgccctactcctgccgcgcggggtcctgctcctcctgcgccggcaaggtcgtctccggctccgtggaccagtccgaccagagctacctcgacgacggccagatcgccgccggctgggtgctcacctgccacgcctaccccacctctgacgtcgtcatcgagacgcacaaggaggaggagctcaccggcgcataatcattcatgcccatccatctctatctctgtgggtcgtcgttgtgtgtaatttgagtacgcgcgtacacgtactgcttttgtttcatttgagcactgttcgtgtaagcgtcgagttgccctgccatcgtctctctctctctcgatctctactatttctgtgtgtgcgcgcttctatttttccaatgttgagttacgcatatttgtccagtaaccttgttttgcttaatcacacacagctcccaaattccagtcgttctgtggtgacggttggttgtggggtgtggcggcgacgtcagtcatgggagaagagatccgaatgcatgggggtgttggcgct

SEQ ID NO: 136527 - DNA, 459 bp, Zea Mays
aaccaaatggtgattcaacaaatgataggaagagagagtgaacggaatatatgccgttcaactattcgggtcaacctcacatgaacgattcattaccctttttcgtcgagtacgtcaataaattagagaaatcccttagagcaatatgtttcttacatccacaagatccttttactcaaagggattcacaagaccttagctataaccaaagatcagggcaaaagatagagaagagagctttacctcgatctatcgattccactcgcgaaacttcaaatcaatggagggaataggtggaggacctcaacatgatgaagtcctccaagtttcaatggatttggctcaatattttggttgaggggagggtttgagagggggatagagaaggggcggcgtctccttttcaaataactcgactaaggaatgagaagagagagagaagagaaaaaaagaaataaa

SEQ ID NO: 136528 - DNA, 723 bp, Zea Mays
gctggctgcactcactccatccatcatctcattcgcatatctggggcagggaagctatctgtccaccagaccagcactagcagccgctcactccagccattacccgcagctagcaaacaaatggccaccgtcctgagcagcccccgcgcgccggccttctccttctccctccgcgccgcgccagcgcccactaccgtggccatgacccgtggcggtggcgccagcagcaggctgcgcgcgcaggccacctacaacgtgaagctcatcacgccggagggggaggtggagctgcaggtgcccgacgacgtctacatcctggactacgccgaggaggaaggcatcgacctgccctactcctgccgcgcggggtcctgctcctcctgcgccggcaaggtcgtctccggctccgtggaccagtccgaccagagctacctcgacgacggccagatcgccgccggctgggtgctcacctgcgtggcgtaccccacctccgacgtcgtcatcgagacgcacaaggaggatgaccttatctcctaagcaaattaataaagcaccgccaattatcacgtcgacttgcaagcacaggagagtagaagatgtctcaatactggctgtgcatgtaatttttttgtccgtttcaaactgtattgtaaactattacctctgttttcaaatattttttaaatatttatcgccggctaagaagagaaaaaaagaaataaa

SEQ ID NO: 136529 - DNA, 760 bp, Zea Mays
gtggacgaaataaattctggcgccaagaagataagagcctacacgctggctgcactcactccatccatcatctcattcgcatatctggggcagggaagctatctgtccaccagaccagcactagcagccgctcactccagccattacccgcagctagcaaacaaatggccaccgtcctgagcagcccccgcgcgccggccttctccttctccctccgcgccgcgccagcgcccactaccgtggccatgacccgtggcggtggcgccagcagcaggctgcgcgcgcaggccacctacaacgtgaagctcatcacgccggagggggaggtggagctgcaggtgcccgacgacgtctacatcctggactacgccgaggaggaaggcatcgacctgccctactcctgccgcgcggggtcctgctcctcctgcgccggcaaggtcgtctccggctccgtggaccagtccgaccagagctacctcgacgacggccagatcgccgccggctgggtgctcacctgcgtggcgtaccccacctccgacgtcgtcatcgagacgcacaaggaggatgaccttatctcctaagcaaattaataaagcaccgccaattatcacgtcgacttgcaagcacaggagagtagaagatgtctcaatactggctgtgcatgtaatttttttgtccgtttcaaactgtattgtaaactattacctctgttttcaaatattttttaaatatttatcgccggctaaaaaaaagaaataaa

SEQ ID NO: 136530 - DNA, 929 bp, Zea Mays
acgatgagcaacgtgtgatcctcgatgggggttgcattgcactgcagataagccgaccgctcaccgcccgccacgtagcacccccacccacccttccctccgccaataactctcccttgtcagctagctagcgagccgtgtggccgcccgtgtcgtgtagtgtgtagtcgcagcagctagcgcccggccggccagtcgagtgagtccatcctccatcgccatccaatggccgccaccgccctgagcatgagcatcctccgcgcgccgccgccctgcttctcgtccccactcaggctcagggtcgcggttgccaagccgctggcggcccccatgcggcgccagctgctgcgcgcgcaggccacctacaacgtgaagctgatcacgccggagggggaggtggagctgcaggtgcccgacgacgtctacatcctggacttcgccgaggaggaaggcatcgacctgcccttctcctgccgtgcggggtcctgctcctcctgcgccggcaaggtcgtctctggctccgtcgaccagtccgaccagagcttcctcaacgacaaccaggtcgccgacggttgggtgctcacctgcgctgcgtaccccacctccgacgtcgtcatcgagacgcacaaggaggatgacctcctataattctagctagctatacaccgccagggcccgtcgtcttgtgccaccacatgcagtaccgcccgcgcaggagatgagacgtgtcgtctcaataattctagctatatatatatatatgcatgcatgcatgtacttttccctgttccaaactgagtatattctaaattacaagatttaatcacaaggtttagagcaactccaaccatgagtctcataattggctctatattttgatttagcaactcacttaatttgtttaagatctaaacacatgttttgtttcc

SEQ ID NO: 136531 - DNA, 2004 bp, Zea Mays
aacctaacagaagcaaccgaatatcccctcgcctttcaactcgtcttcctcctcatgtcgtcgcctcctatccctctatatcttctattctaagccacctcgatcggaccctagatagatgcaagaaaagaaaagagaagagcctctgtggatagtggtgggtgctggatcactgggcggagcagcttctcatatcggatcgatcgattaattaatatatactataaacatacaatcaattacatacatatacgccaagagaagaggaacgccggcccgtttcacttgtctccttcctccgatccctcccggcggccggccgggctcgggcgtttttccccttttgtttcccatggaggacgccaagatggggaacggcgccaccatccgcgcggtgctcgccatcctccagtggtggggattcaacgtcaccgtcatcatcatcaacaagtggatcttccaggtcccgtccctcgcgcttgctcttgtttaaatcctggtcttctttttttgtttcaattcaatttccagagatggccatgtatgtagttatatatatattcattcaaggggatttaggggtggatccgtcaggacaaccaagagatttcgtctctttttagttcttgccttcatccaatcgttcgataggtgcagattaatcgcccccatgatgttgtcgtctttttcttcagtgatttggtaggaacataaaggaatcatccttttttttttgtccgactgaaaagaaaattacttacttgaaccggtggtggttcgtagattggatttccagatttaattgtaatcatggtaagaagagcctgttcttatcctgtgacgctgactctgtgtggggttgtcagaaactggagttcaagttccccctgacggtgtcgtgcgtccacttcatatgttcctccatcggagcctacatcgcgatcaaagtcctgagaacgaagccgctgatcgaggtggcctcggaggaccggtggaggaggatattccccatgtcgttggtgttctgcgtcaacatcgtgctggggaacgtgagcctgaggtacataccagtgtcattcatgcagacgatcaagtcgttcactccggcaacgacagtggttcttcagtggctggtttggaggaaatactttgagtggcgcatctgggcgtccttggtgcccatcgttggaggaatccttgtcacctccgtgacggagctgagcttcaacacggctggcttctgcgccgcgctggtggggtgcctggccacgtccaccaagaccatcctggcagagtcgctgctccacggctacaagttcgacagcatcaacacggtgtactacatggctccgctggccacgctgatcctgtcggtgccggccgtggcgctggagggcggcgccgtgctggggtggctgcggacgcacgagtccgtgggaccggcgctggcggtcgtcgtcacctccggggtgctggccttctgcctcaacttctccatcttctacgtcatccactccacgacggcagtcaccttcaacgtggccggcaacctcaaggtggccgtggcggtgctggcgtcctggatggtgttccggaaccccatctccgccatgaacgcactcggctgcggcgtcacgctcgtcggatgcaccttctacggctacgtcaggcaccgactctcgcagaaccaggcgcccagagcccgcttggagatgctgccgctcaccgccgtcgacaagcaaggcgacaagatataaaaagtcttttcgaataaaccatctgattctttctgatccacctagcctaaccgccgatcgagaatgcatccaccatcagagatgacaggaaattattttttgttggcagccagattttgataatgagtcagttcagttgttgcttaaagagaaatgtcatgaggtctataaagtcttttggaatgataaatcttgttgtcttggttaaagagaacttagagaagaagatgaaaaaaaaaattaaaaa

SEQ ID NO: 136532 - DNA, 2358 bp, Zea Mays
gccctcgctggtttcccccgctcctccaatttggacagccgcttcggcttcgcttcatcctcccccctcccaccccaactcctcgtcccgctccggcgtgcgtttcctttcccggcttgggttgcccaccgagatcacccccctcaaaccctagcccctcttctcctcctctgaccatctcctcctcctcgcgcttcgccttcccaatctcgctgccgtttcttgggcctgggactcgcgctctgctatctgtgtccgcgtatggcctgcgacggcgccgccagaggccgccctcccaagcgccccgcttcgggaggcctggcccagcccaacgtcgtcacctacaagagacgccgccgcggcaccggcgccaacgccggccacagcgccgtcacgtctggccccgaccccgctgaaatgagcgcggtggtgcacgccatcgattcccagcaaggtgggcgccaaacgctgggcaggcactggagaaactggagggacacgctggagggcgtcctacaatccactgctgggaagcagggctccggagggattcagagctgcatccgagctgcgctcagatttagtggttgccctcccacagaacatgggaacttagctcacgacggaggagcaggcagagatgaccctgttggagctgtacattctgaagagaatagtggtgccttggttcagttagaagacggaacagctgcacctttggaagccaacaaaacgatgtgccataatgctctctttgacattctgatctccgagaagtttgcgatgctgtgtgatctgctagctgcaacattccatgtcagtaagcctgacgatgtgattggtttgcaaataattgatgccaagatgagaaatggggattatgcacagaaccatgcgctgcttgaccatgatatcaagcagatatggaagaagtttgaacacgttggccaagaaatggctggtctggcaagcagtctctcagtgatttcacaagcttctcaccaaaagcaggcttctggtgtttcagaaattgatgtggctgaacacaagatagaagaaacaagcctggttggtgttgcccgcaaagccctaagggagttgactccccagtgcgattctggctattctacgataccaaaacgagctgggaggtctggatcggatggaatttgcaaggattgtggcagaaaggcagacagcaaaggaagaattatctgtgacagatgtgaagctgcgtaccatgtttcgtgtctgaagcttgccatcgatgaagaggccccagcaaaatggtactgtcccagctgcgttgagccagacgtagctttgaagcataaaaaccatggcaggtcacatgaaggctgtgatgtatgcgagtggctcgtggtgaagccagaagagcctgctgaagatgttagcgagcctgaactggcggtcaaaacgcaggagagctcagtgtcaagcatgggcgaagacagcgaaccagacctctcaacgactgctctagcgaacttgtgcaagaactgtggcacatgcgaagacgaggacaggaagttcatggtatgcgggcatggtttatgttctttcaagttctaccatgtcctgtgcctgaaagagagacagattgcaagcgagaagcagaagaatctaaagtgctggtactgcccgtcttgcctgtgcagacggtgcttcaaggacaaggatgatgagaaaatagtactgtgcgatggctgcgacgaggcttatcacatctactgcatggacccgccgtgcgagtctgtcccgagaggtaaatggttctgcacgcggtgtagcgcgcggaggtcagtgcaagggatgcagaggtatgagaagtcgatcctggagaaagtcaagcgtgctcctggtgccaatgggccgaaggtgcaggcatctgctggtccagaaaaataggcagcagtgtggatgatgtttcacaggccatactagggtagaagaaagggaaggatacttttgttcctctgagggagggggtatacattgctctggtagctttgaagaatcgatggatgggttgtgtatacgtggggggaaggaagatgccccgttggctgctgatgttgattcactgtgctgccatttcgtttttggaattcttgagtgtcgctcggcttgttgttgtgctgttatgttgtgtctgatggtaagtggcatcgcttatcgatgatatgtacatgcctgtaactcgttttcttttatttgttggacattgtgtgtgtgtgtgtgtgtgtttgaattgtgatgacctagagaacgctggtgtcaatcaatgcagcgtaccttgtttgcgcctaaatttggtagacaaaagaggagattacc

SEQ ID NO: 136533 - DNA, 441 bp, Zea Mays
atgaacgaagctttcaataatgggaagcaggctaggtcgttgtacctagatgatgatgtactggaagatgaagcaggaccagatgatgatgtccatgttatagggtcaatgtcagcatcatccaaggcatcctcatcaatgctcttggagatgattttcaatttatcatgggaccaagttgatgaagctattggtgcatctgcatatctcaaaggtcataattttcctaggagagttgctggttggtgtgtgagaaggaatgaagaccttgaggaagaggatactaatttagcaaatgaagatgatgaggatgaggaatatattcttgatgatcttaatatggaagatgaaattgaaggagacaatagtggaaaagatggtgatgatcaagaggtggatgctcatggtcttaatattgatgagttcgataatagttactaa

SEQ ID NO: 136534 - DNA, 1860 bp, Zea Mays
gtcgcgccgcgcgccgaggagaactcgccaccgcaaaggccgtcgtctgtagcctcgcctcgccgtcgttctatactcccaataaagtcctcctccgccaggcgcacgatgtcgtgggccgacctcccactcgatgtgctcgtggacggggtgatcgcgcggcttcctatccccggcgaccgcgcccgcttggccgccgtgtgccgcgcatggcgcgccgccgcgcgcgaggtggtgagccacatccagctcccgtggatcgtgctcccatacggcaccgtctgcaccgccggccgcggcgcagcctgttcgtccttccggatccccgggttccccgacgaggccacctgcctcggcgccgcccacgacggctggctcgccctggaccgcacggacgacgtggtcgggcgcacgtcctggttccggacgacatggcccgtcgtcgtcggagacacgtggaagcacgtcatgttgggcaagtccgacgtgaaccacaagcacgcctacgcgctgcacaaccccttcagcgacgtcaccgtgccgctcccggagctggacgccgtcatcggccgtgtcgccgagaccttccgggtgcgtaaagtgctgatgcgttcgccggctccagatgacctcgtcgccgtcatgaccaacagctggaactgcaacgtcatcttgtgccgcgccgggaagggtacgttcgtgctaccctactacaggatcgtcgacgtggcgttccttggagaagacacgctgtatggaatcaccaccggcgaagaactccttgccttccacctcggcgaggatgacgacggcagacctaatgttgccaggattgagctggtcatcaaaaacacgttggccaattattattatgatgaatttggatggttgtggccagcagaagtagctagcactagtagcaacaacgacgaggatatggatatggatgacgatgattatatggaggaggatgatccggcagtcgtcgatgatggtgacgacgaccaagctgatagcttcaacggcgatgagatggtctcggacagcgaggtgtttgatgggtacggcgacggcgaggaccttcaagtcaaggacgagttatatctgggtcgatacctggtgcggtcgctgagcggagagctgctgctcgtgaggcaccaatggcaatcatgcccacgttccccttcctacactcgcaaggtcgagttcttcaaaggcagattttagcgccggcaaatgggctgccgccggtggattagccaagggggaggcgatctttctgagtccatcgcacagcaagtgcgttcgcgcaagcggaggcgtccgtgaaggctttgtgtactacacaaaacagatggacgacgtgttcgacacgagatcgggcaccgttcgtgccgccattacagctgggtggccagaactatgcgcactggagaaatcgggatggtttttccctccggagctagtggtttgacagatagagctgtctatgattatatattttcatccacatttctttttaattaggtctagagtgcttcttctttttcttttccttttttctttttacaaaagctaaggttgtaatggagtatctttattcattgttgtttatttattttaatttggtataataaaaaaacttttaacaagtctcctcctcctttgtaatatccaaaattagtgaataatactgggaataggttataaattctatgcgatgtattcttctatttatttattggtcaattggaatcatatggaaccaaccataacaataaatctgatacacgcggaaatttacatcccccatcgatccaaccaccatgactttacaggctacaatacatcaactcaacc

SEQ ID NO: 136535 - DNA, 574 bp, Zea Mays
gttgctatgttcctgaggatctatggatatctgctttcctgttggtactaaggaagccaacaagaaattttggactgctacctggattaatgctcgagaaaaaaggtgcatgacatcaatattgctattctatttgttctatagaaccttatgtgaaaacgtgcattacactgtcccagcctcctagagactatagacatggtatgtagtccctggggaccgagcctcagagctagaggaagttattcgtgtacatggatatggaggaaaccctgaccgccttgcatcgctggcagtgcttggggagaagacaacattgatgtctccagatgttcttgtagcccgtggtgtgccctgctgtaggttagtacagtatcctggagagtttgtgatgacattcccaagggcataccacattgggtttagtcatgggcatccacaggctacgccatgcctccacctccacagatcacgcctaccctgccccgcccgcgacagcctgcaagcattaatgaagttgtctgttttgcaataactatgtggagcagtttgatcatcattgtccatgggtcgg

SEQ ID NO: 136536 - DNA, 1030 bp, Zea Mays
ggatagatggagaggaaacggaaggagatggagaagggcaagtctgagctgagactggccatggaggagctccgtttgtgcggttcaagagatggggcggaggaggaggaggaggtgcaggttcagcaggtgaaagtgcaggagcagcacaagtcatccacaatggacctcctctatgtctccaagcagctcatccatgtccttgatgagattggaccaactctgctagtcctgaggcaggacattcagcaaaatgtccagaggttacaagacctgcatgaaaaggactgttccaaatacgcgtgcttgacggcgatagtcaccgaggaaatggagcaagggacagcgaagaagaccaagagctgcaccagagctatcatctggctgtctaggtcgataaaattctcaaagtacttactggagaggctgctggagactcctgagtcgagcctggaagagatcgtggaagaagcctacgcaaatactctgaagccatggcatggctggatctcgtcagctgcttacaagttgtcaggtagcactgaagctcatcccggaaagagagttcttcgtagcgctgctgatgggtaactgtcaagacttggaggatctagcagaagatgccaggatgctggcctatgccgtccagcccttgttacaggagatcgatgcgatttcggctaagcacaacctggacaagatgaaatcctcttaggacacgaggattttgccgatcacctggtgactgtacatagctgcatacgtgacctgaccttgtcttgtggctgtaaaagtgaaaggtgtaattttggggtttgtctgtagatttctagtgacatatcgaatgtgtaaaaaaaaaaagttgtcttcagtgtatccctgcagtggttttagtgcatgtatacccctcacgacctaggcacagaatcctcttctagtgtcaaattgtgtagtgcttgttttctttcttcgatttttttccaacgtaatggcacaacctctgctttttaataagaagaaaacaagaaga

SEQ ID NO: 136537 - DNA, 854 bp, Zea Mays
ggatagatggagaggaaacggaaggagatggagaagggcaagtctgagctgagactggccatggaggagctccgtttgtgcggttcaagagatggggcggaggaggaggaggaggtgcaggttcagcaggtgaaagtgcaggagcagcacaagtcatccacaatggacctcctctatgtctccaagcagctcatccatgtccttgatgagattggaccaactctgctagtcctgaggcaggacattcagcaaaatgtccagaggttacaagacctgcatgaaaaggactgttccaaatacgcgtgcttgacggcgatagtcaccgaggaaatggagcaagggacagcgaagaagaccaagagctgcaccagagctatcatctggctgtctaggtcgataaaattctcaaagtacttactggagaggctgctggagactcctgagtcgagcctggaagagatcgtggaagaagcctacgcaaatactctgaagccatggcatggctggatctcgtcagctgcttacaaggtagcactgaagctcatcccggaaagagagttcttcgtagcgctgctgatgggtaactgtcaagacttggaggatctagcagaagatgccaggatgctggcctatgccgtccagcccttgttacaggagatcgatgcgatttcggctaagcacaacctggacaagatgaaatcctcttaggacacgaggattttgccgatcacctggtgactgtacatagctgcatacgtgacctgaccttgtcttgtggctgtaaaagtgaaaggtgtaattttggggtttgtctgtagatttctagtgacatatcgaatgtgtaaaaaaaaaaa

SEQ ID NO: 136538 - DNA, 1365 bp, Zea Mays
atggaatcggagaacgaaaagctccgtaaagaactggctactctgctcagagttgttcaaaagcgtagttgtgacatcgttgatgtcgtcaaatcagccttccaacctttcaactcacctttggtggacgaattgaaccgagcactagttgagattgacgacctcgccaaggatctcgaagacgtagcagtgcaaactcagtgggaggtctatgaaagaccttgtgggttgtacatgctcatttatatcatgtttgatctacctctgttgcatagaatggggagtgattggaaccagtatcaactggcgcacatctccgctggagatttgttgcgggcggaaatcgctgctggctctgagaatgggaagcgggccaaggaattcatggagaagggccagctcgtgcctgatgagattgtcgttaatatggtgaaggaacgccttcggcaaccagacgctcaagaaaatggttggcttttggacgggtacccaagaagctattcacaggccatggccttggaaactcttgaaatccggcctgatactttcattctgttagatgttccagatgaactccttgttgaaagggtggttggaaggcggcttgatcctgtaacagggaaaatatatcatttgaagtattctccgccagagaatgaagaaatcgcttcaaggcttacacaaagatttgacgatacagaagaaaaggttaagttgaggctggagacttattaccaaaatatcgagtccttgctatcaacatatgagaacattattgtcaaagtgcaaggagatgccacagtggatgctgtctttgctaagatcgacgagctgctgggttctatcctggagaagaaaaatgaaatggtttccagcacatgagcaaggtaaaaatgattgggtgcagtgcagatccgacaagttcatgtaatgcaagtcacctctcatgataggaacttctccaggggaatatatctgaagcacaggacgacacgtacaagtaatgtaagccagtctcacgtaatggaaatttctccatgtggatgtggtcaaagcataggaatttttttcctccaattattaactgtacgcgaatggaagcgacagatcattcgtaggttgtgagggcttcagagatcatctgctgctgtacatgttttgttgctgtcttgtgaacatacatgtcttgttgtttctcaactggaggaatgctgttaacctgctgtatcatttccttgaatggcttatgtgagagggaggaggacctgagcagcagctcttgcaatctttgtctaaattccttcggatggtgaagcccatttcgtctgttctccgaaaagtatattgattgcattttccgaagaa

SEQ ID NO: 136539 - DNA, 1286 bp, Zea Mays
atggaatcggagaacgaaaagctccgtaaagaactggctactctgctcagagttgttcaaaagcgtagttgtgacatcgttgatgtcgtcaaatcagccttccaacctttcaactcacctttggtggacgaattgaaccgagcactagttgagattgacgacctcgccaaggatctcgaagacgtagcagtgcaaactcagtgggaggtctatgaaagaccttgtgggttgtacatgctcatttatatcatgtttgatctacctctgttgcatagaatggggagtgattggaaccagtatcaactggcgcacatctccgctggagatttgttgcgggcggaaatcgctgctggctctgagaatgggaagcgggccaaggaattcatggagaagggccagctcgtgcctgatgagattgtcgttaatatggtgaaggaacgccttcggcaaccagacgctcaagaaaatggttggcttttggacgggtacccaagaagctattcacaggccatggccttggaaactcttgaaatccggcctgatactttcattctgttagatgttccagatgaactccttgttgaaagggtggttggaaggcggcttgatcctgtaacagggaaaatatatcatttgaagtattctccgccagagaatgaagaaatcgcttcaaggcttacacaaagatttgacgatacagaagaaaaggttaagttgaggctggagacttattaccaaaatatcgagtccttgctatcaacatatgagaacattattgtcaaagtgcaaggagatgccacagtggatgctgtctttgctaagatcgacgagctgctgggttctatcctggagaagaaaaatgaaatggtttccagcacatgagcaaggggaatatatctgaagcacaggacgacacgtacaagtaatgtaagccagtctcacgtaatggaaatttctccatgtggatgtggtcaaagcataggaatttttttcctccaattattaactgtacgcgaatggaagcgacagatcattcgtaggttgtgagggcttcagagatcatctgctgctgtacatgttttgttgctgtcttgtgaacatacatgtcttgttgtttctcaactggaggaatgctgttaacctgctgtatcatttccttgaatggcttatgtgagagggaggaggacctgagcagcagctcttgcaatctttgtctaaattccttcggatggtgaagcccatttcgtctgttctccgaaaagtatattgattgcattttccgaaga

SEQ ID NO: 136540 - DNA, 1298 bp, Zea Mays
atggaatcggagaacgaaaagctccgtaaagaactggctactctgctcagagttgttcaaaagcgtagttgtgacatcgttgatgtcgtcaaatcagccttccaacctttcaactcacctttggtggacgaattgaaccgagcactagttgagattgacgacctcgccaaggatctcgaagacgtagcagtgcaaactcagtgggaggtctatgaaagaccttgtgggttgtacatgctcatttatatcatgtttgatctacctctgttgcatagaatggggagtgattggaaccagtatcaactggcgcacatctccgctggagatttgttgcgggcggaaatcgctgctggctctgagaatgggaagcgggccaaggaattcatggagaagggccagctcgtgcctgatgagattgtcgttaatatggtgaaggaacgccttcggcaaccagacgctcaagaaaatggttggcttttggacgggtacccaagaagctattcacaggccatggccttggaaactcttgaaatccggcctgatactttcattctgttagatgttccagatgaactccttgttgaaagggtggttggaaggcggcttgatcctgtaacagggaaaatatatcatttgaagtattctccgccagagaatgaagaaatcgcttcaaggcttacacaaagatttgacgatacagaagaaaaggttaagttgaggctggagacttattaccaaaatatcgagtccttgctatcaacatatgagaacattattgtcaaagtgcaaggagatgccacagtggatgctgtctttgctaagatcgacgagctgctgggttctatcctggagaagaaaaatgaaatggtttccagcacatgagcaaggaacttctccaggggaatatatctgaagcacaggacgacacgtacaagtaatgtaagccagtctcacgtaatggaaatttctccatgtggatgtggtcaaagcataggaatttttttcctccaattattaactgtacgcgaatggaagcgacagatcattcgtaggttgtgagggcttcagagatcatctgctgctgtacatgttttgttgctgtcttgtgaacatacatgtcttgttgtttctcaactggaggaatgctgttaacctgctgtatcatttccttgaatggcttatgtgagagggaggaggacctgagcagcagctcttgcaatctttgtctaaattccttcggatggtgaagcccatttcgtctgttctccgaaaagtatattgattgcattttccgaaga

SEQ ID NO: 136541 - DNA, 392 bp, Zea Mays
atcactttgcactacccttttatctagtcgctgcagggccagggcagtgaagtctcttcccgttcttgagttctagcgagagtgcatcgtgtgagtgttgtggttcatgttcacgtcggtgtttactctccccggccatcagtgtctcgtcgggaacgccgcggtgccgccggtgaacgccgctgggaacggtctcgccgtggcagaccttatctggggccggttgcgtgcgtgatctggggttggtctgctctgtggtgagtcgcaagtgcctgctccaccatggttgggaactctactgcatcgtcgttccggcttaacaccatcgaagttggaagccgccgacacgcgcagaggaagcgcgggcgcgcgcggtgctggagcctagggct

SEQ ID NO: 136542 - DNA, 97 bp, Zea Mays
ctggattctagaagacgacatgaagtcgcaactaatcagctaacaagtcagacgaagctcctccgcaaagtcggggaaaaccgagatgcaatgacgc

SEQ ID NO: 136543 - DNA, 1238 bp, Zea Mays
ccaggccaagtcgtctcagtcctcttctaccaccaagctcccgtctcttcccctcctggtctcagcgactccatcctctccctctccagatccccgcccgtgacgccgccggctgttacctctccggctcatcgtcctcaggcccaggtcttgatccgcgatccgccgatttccatccggcgcttactcggtgtcccgtcacctgcgggttttgctgtgcggggaggctgatccggcgagcgccttggatgaattcgcgccggtctcggtcggtgaagctggtgtcagcgcgcgccaacggggacggggccctggaggtggacgtacctgaggaagagggagacgcgcggatgagctcctcggccgccaacaccgtgtactgctgcatcgccaggggccggagcgtgatctaccggtacagcagcaagggcggcgacccgcaggcggaggccacggcggcgctctgcctggaccggtcgccgccgcaccaccggcattacgtgcacacctccgggcgcaggagctacgggtacctgacggccgacggccacaccttcttcgccatcatcgaccccagcgtcggcagcgccggcgcgctgcagttcctggagcgcgtccgcgacgcgttccggagcagcgcaggcgtcggcgggcgccagccgcacgagtcgctggtgccggccgtgcagcggctggtggcgtcgctggagaagatgccccacgccgcgttcgtgctcgatggcgcgggcgcgggcgcgggcgacggcgacggctgcacgtcgtcgtccaaggcgcccctgctcgggaagagcgggagcaggaaggagaagcggcggtccagggacaagctgtcgtcgtcggcggcgggggcgggggcgggaggctgtgaggacgagcaccacgggacccgagcggtgaggatagacgtgatgccggccgaggacgtcggcggcatgtcgctggagcgcagcggcagccagtccaggctgcggaggcagcagtcgtcgcggtcgctgtggatgcggcacgtgaaggtcatcgtcgccgtggacgccgtcgtctgcctcgtgctgttggcggcctggctggcggtgtgcaaggggttccagtgtgtgtccgggtgatggtggtcagtcgtgtacagtgttttgaggagacctgaggatggattcaatgcaaattgcctatttcgattgattgatcagaagagggtacctgcctgtctgtgtgtctgcttc

SEQ ID NO: 136544 - DNA, 704 bp, Zea Mays
gttattaaatttcattccttcgcatacctagtcctggcaccacctacaaaatggttttggttttatacatgtaatacacaaaccgcgtgacatttttaattccacactctctctctccatcaattccttgcttgattgcttggcatggttgcgcggtcaatgtccaacccgtccccaattcgaatcctcttcttcctctgtgctgctgctgctcacagacccaggccaagtcgtctcagtcctcttctaccaccaagctcccgtctcttcccctcctggtctcagcgactccatcctctccctctccagatccccgcccgtgacgccgccggctgttacctctccggctcatcgtcctcaggcccaggtaattcatcaattgccgtgcttttatcgtttccctaccgatttacggtacagtacttgctccactccgtcggccgtgctgctgcggccagtgattgattcgtcgggcaaaggaccgtcttttttcttccatccatccatccatccatccatccatccttatgagcgattctagcttcttggattaaatcaattgggcggatgagcaccgtgcctcgcgaatttgcaggtcttgatccgcgatccgccgatttccatccggcgcttactcggtgtcccgtcacctgcgggttttgctgtgcggggaggctgatccggcgagcgccttggatgaattc

SEQ ID NO: 136545 - DNA, 2815 bp, Zea Mays
cggggctcctcccttccccttcctcctcgccgcccgcggcgacctcaccgagaaagagaaatctcgctcgcggtcgcggccaaacggcggggtcgccctcgcctctgcctccgataaatacacgcgctcgctccccctcctccctcgagcccagtcgcgtcgagtcgacgctcactctctctctccacgtccttccctctccacatccagctgcgtatccaccaatcgacagcgacctcctcctccacgcgctccgctccccctccctccctttcccttcccttccctctccctccctccctccttagccgttaagcgtcctcccctccgcaccgcgcggcgaggctcgtcggcgccgtcgaggcccagctgcccctccctacaggaagcgcccgtccgacgccgcgagcacgcgcgcctcctccgctcccgatctctccacgcgtgccggagatcggccgcggcgggctcccgatcccgcccgatctacccccgcgctcccggccgagatgtggggcggcgactccaacgccaagcagatgctcaagtcccggggcggcacgggcgtcgtcggggggttacccgcggccggggacgaggagtcggactacttcccgcccaccccgcgcaaggactactggtggtccacgggcctcctcaagctcgtcaccgccaccgtcatcttcatgggcggcgtcgtgctcggcctctccgtcagcggcagcgtcgcgcgctactactacaacgcctcccacgccgagctcttcttcccggccaccacctacggctgcgacccgcgggaccgggactgcggcatgggcctcgccttcagggccttcgtccacccgccccgcctcgcgcactccatgaccgacgacgagctcttctggcgggcctccctcgtgcctagggccgaggagttcccgttccagcgggtgcccaaggtcgccttcctcttcatggcgcgcggccccatccccttcgcgccgctctgggacaagttcttccgcggacaccaggggctctactccgtctacgtccacaccgtgccggactacaagctcaatgtgtccaagagctccgccttctacggcagacagatccccagcgaggaggtgtcctggggatcaattaccttggtggacgctgagaagcgcctgctggccaatgccttgctggatttctcgaatgagcgcttcgtgctgctctcagagagctgcattcccgtgttcaacttcccgacggtctacgagtacctcatcaattcggcgcacagtttcgtcgagtcctacaacatcgacacccctcagtgtgctggccggtacaaccgtcgcatggctccccacatcatggcagatcaatggaggaaagggtcagagtggtttgagcttaaccgcgagctggctgtccagatagtagcggactacaagtactactccatcttcaggaagcactgcaggccatcctgttatccagacgagcattacataccgacttatcttcatctgttccatgggccactcaacgccaacaggactatcacatgggttgattggtcaagaggaggcccgcacccagcaagttatggtgccacagacatcacagaagacttcatccaggccatcaggaataatggtacgcagtgcttttacaactcgaagcccacctctgtctgctacctcttcgcgaggaagttcgctcctaatgctttgccacggctgatgaacctcacctcgaccgtgctggacttctgagccgattctcaccatgcgggcgggcgggcgtcgttgtcagcatctcgctactgaggtatatctatggatgcatgtgccggtcgggaactagagcttctataccctgctagattggagtctgcgacatgtgtctcacaatagatgaatgatcagaggtgggttttggtgtatgcgcctctcgcggatgatgacgcagtgtgggacagtgaaaacagccttttcactcgccctgaagatgatctccgcgagtgatcgacagatggcgccgcctacggagatgacgtttctttcacctcccattcttttttaatatatcatagtcatatgatagaggatgtcttctcttcttcttcttcctcctccctatctatctctactgtattgactcggtcagatactaatttctgtgaatataacttatccatcattgctttacttcaaatctggcgctgccagatgcctccatatgcttggtagtctgtctctctaaaccttcaagcaacaggttggcatttgttgttctgtcgatgatgctgatgcacaagtatacgggcaaggcaagctagctagggatgcaggcagcagaatatgccatattcttgcagacagtgcacatcatgtacaattgtggctgtcagtcttttccggcaaggggtaaaaagtaggctcctttcttgaaaggcacacatgagcatgcctataccatgctgttgggtttagattcttgatcagttcaaacatgggggatcctgtgttttattcttgcttttttatcagttgaaacagatagccacgaacatgcttgattgccttcatttgacagatgaaccaatattctaagattggctggtgaacatgggggacatgatttaggctggtggagccttgtcatgccctggtgtttgtaatgtataaaacccacgagcaaaggtccctggaccatggtattatagtgggtgggtccctttgtgctctgtatctaatctagccttagtctaatccaggcattagtttatgtgctgctacctgtttgtttacttccacatatatatggttgcagt

SEQ ID NO: 136546 - DNA, 2801 bp, Zea Mays
aggtaggcgtcgatgagtagtactcagacgccgccggcctcacgctgctgctccaggtcagcgccgtcccgaggctgcagatcaggaggtgcggtgcgtggatcagcgtcgaccccatccccgcgtgtttcgtaatagcaaaaatctccgtccatcagggaggtcggtcttgcagttggagttgggcacattcgcctctatcgggcgggcacattccctccgtcccgtgacttccaccttccttacccttcgtatggtgggggcccacctcgccgcccccaccccccgctgcccttctctcttccccgtctccgactccacacacctcccctttccactcgccgccggcgatcccgaaccgggagcagcgcacatggcaggccgggacgagaggtggggggcgcggggcggcccgggggacacgcacgcgtcgacgagccgcgcacccgcgggcaccgccggggagtcggagggcgcgtcgccggactcgctgcggaacacgccctccaacatcgcgcggctggaggacgcgatcgggcactgcgcggcgcggcgcaaataccttgcgcacaccaagagcccctccgacggcaaggacgtccgctggtacttctgcaatctccccctcgccgacaaagtgctctcttcgtccgtaccgcggacagagatagtggggaaaggagactatttccggttcagcgagagggactctctggcactggaggcgtctttcttggagagggaggaagtgctgcttgcatactggtggcgtgagtatgctgaatgcagtgcaggaccgagaggatccttggttgaaagtgatgattctgcatatctttataaggtggaggaagaacgggttggggttcctgtgaaaggtggactatatgaggttgatttgatgaggcggcattgcttccctgtgtactggaacggtgaaaacaggcgtgtcttgagaggccactggttcgctcgcaaaggtggtgttgattggattcccttgcgagaggatgtttctgaacaacttgagttagcatataattgtcaggtctggcatcgtcgaaaatttcaaccttcaggcctatttgcagcaagggttgacctccaaggaagtacactggatttgcatgctctttttactggagaggatgatacttgggaagcttggcttgtctttgatacgggtcctaagcttggtagtaacacaatcaaattaaggcgcggattttctccttctgaatctgcaagtacaaagccttcacaggatgagttgcgtcagacaaaagaagaggaaatggatgattactgctctcaggttccagttggtcatctggtattcatggttcatggcattggacagaggctggagaaagctaatcttgttgatgatgttgttgatttccgccgagtaactgctaacctagctgaaagatacttaacttcttatcaaagaagtacccagagggttctatttattccctgtcagtggaggaagggcttgaaactcagtggtgaaagtacggttgagaaactcactttggatggagttaaaggtcttcgagtcgcattaggtgccacagttcatgatgtcctatattatatgagtcctatctactgtcagcatattattgactcggtctctaaccagttgaacaagctgtacatgaaatttctgaagagaaatcctggttacagtggaaaggtttcattgtatggccactcattaggaagtgttctgtcgtatgatatactttgtcatcaagaatcccttttggccccatttccaacagagtatctgaacatggaaacatctgatcgaagtcaaggagcaaagtcagccaatgaagttgctctgcatgattcaggtgcaaaggatcatgatacttatactctagggcattcttgtactggtaatgaaaacagtgccgttgatgaaggtagcaccagaactgacatgtcacatatggacagcattgtcccatcatgtgtgctcgaggattcattaaataacccagaaactggtgtgccacgtggggcagttgttgctgagcaaaatgaaaaagaaaataggattgagaatcatcagacggtgtatactgaggaaggaacaacttcaggtgtaagcacaaaagatgctgaagcatcacacatttcaagatctgctgaggatgtccatgaagaggtccttgacaaagaaaaaatgatcatttcactagaagaagaggtgaaacgtcttaaagctaaactagatcagcttgaacagcataagcatctagtgactgagagcaccagtggtgttgagtatcatggaggcaaaaatggcaatcatgccttgaactttggcgaacttttcactgcacaaggaagtataaaccagccctactcaccacaaatcaaatacacaaaactaaactttaaggttgacacattctttgctgttggatctcccctgggtgtcttcctttccctgcgtaatgtccgtattggtattggcaaagggcgagattattggaaagataagaacataattgaagagatgccatgctgccggcagatgttcaatatttttcatccttttgatcctgtagcatacagagttgaaccacttgtatgtgaagattatcaaaagaagcgtcctgtaattgttccctaccatagaggcggaaagaggatacatgttggagtgcaggagttcacagaagatatttctgcacgttctcaagccattgcctgtcaattgaagtcactgaaggtcaaagcagtagctgctttgctagcattgagcagaaatgacacagaag

SEQ ID NO: 136547 - DNA, 2931 bp, Zea Mays
ggggggtgactgggtgagggagtcccagcagcggtgactgttgcggtgttgccgcatccacgccctagtcgaccacgccgcccccagcagcccgctgctgccgcggctcgcgcccccaggagcccccgccgtcgcggctcgcgcctcgtatccgtaacagctacaccgcgccgcctacccccgcttcctgctggctgcatcgtcctcaggtcttccgaagatgactacaaaacttgagcaatcttctgcggagcatcgcccagcaaaattcgcagcaccatcgtctttgacccccaagatctcaatgtttggggcaaaagctggattcatcatacctaagaacaagctggccggctcactcgtaatccggagcaccagtgacaagaatgaaacaccaactgcatccaacgaagatagcagcaggcatgttcacagaaagacaaagtgggggcctgaccttgctttggaccctgtcgtgtgcaaaggaagggctttggcctaccagactcgagtggagcaaatttccaagcagctgaagtctggagctttggacacgtccgaaattgatggttcagtgtctgctggaaatgaattgaattctattggtcctgacatcttgaaagagaacgagctgggaaatgttgaactattggaacttgaaagacgagagcttatcggtgaaatactccgtttgaatccgggatataagacacctgagaactacaaaccagtacttagggagacaaaaatccctgttccggcagaagcacacccaggaaataatattattggagttcttctaggatctgagagcaatacccagaagagactacatgaagaaactggtgctgtcattcgagtgtatgggactaagaaaatcaatggagagaagagtgagattcgtcatcaagacataaatgaaacacaagatgcttatgaagacctatacatcaatgtatcggctgactcttatgataaagtagatgctgcagttgtgttgattgagctgcttcttgctcctgtttccgtaaagtcgacagctacttcaacagctgctactgtttcttcagcagatacatccaaggatgcagtttcagctaatgtgcaactggagcagaataccacgtcacagccagatctacttcattaccaatcacacaacgcaccttggctgcccacaccccagaccaatgctccatcaattccttccacggggcctgttttgagtacattacctaacaatccatcgcagccacaaccgcctgctggttctttcagtatgcctccatatactggtcaacctcctcacatgaatagcatgccagcaaatccatttcctgttcctgggcctcagcaaccagtaccaagcaatcaacaacatccacctcaatttcgagctaactcctcgattgggccttttttcggtcaaccacctggtattgtaagccaacaaatgccaccatcttcctcaatgccaccgccagttagaccccttcaaataccccatgcctctggtggctggccccctttctctcctgttacatcacaatctcataggcctctgcaagctccaccgacttttatggcagtgagacctcctatttccgtctctcctcttggtgcaactccaccgcaaggtcccattgcattgacaccaccaaatatgcccaccatgtaccgcggccagcatccaccagtaccaaatttcactggttcagcgccattggtttccaggcctcctggtggtggggctcagtcttttcctacagctgcgcctcaaggcccttcctcagtagcatttcccggtggaccatcgctgcggccaccttaccctccggcgcctgatcaagcgagggggccacctccagctttctctccagttggatcaactcctggcatggtgcctccacctattgcatcttccggcctgcctgccccgcgtcctgcgaacacgagctgcatccagacacaagtagtagcccctttgagacctccgctcccagccgcgggcgattttactttccggcctgccataccaccggcgcatgctccagagttcgcagcaccaggcagtcaaatgggagcaatacatggcagaactcaccaccctggaccattctcctcccatcctggtgaccagaagaaccccagccaaggtttccaagggccgtttgatggcagcaggcccatgtacacgacgaatcaggctcggatgcacgctccacctcctccacacttccacggagccttccccaggaacgcatctcctcttgagttcccagcggggttccggggagcctggccgtccgtgcaggcacctccgatgccggcaccgtcacatccatcgtctttcccgccgtttcagttgaggccaccgccaccgccgcagcaggatatgtctggcgcaggcggcaccaggtggcccggtggcaatcaaatctacaacccttttgcaccaacggctgcggcggcggctcagagagcggaggctgaccctgagtacgaggatctcatggcatcagttggcatgaagtagcgaagactgctggctggcccctgatctgtctgtggcacaaacacagaggcttcttcctattgcttgccaagatgtgcgggttactaatctcctccaatgtatctctagatggtactgaattccgttccatcatagacaggtgccatgcttgaacgaaaaacaaaaataaaaaataaactagtggaccttgtttgagacatgctgttgggtgccgaggttgtgtttgtgcctatctcgaaatctcatgcatgtgttgctcccggcgtcagctgatgttgtttattttatggagaggaatttgtgagcctgttctgagaaagaagaacatctgttggcattatcacgtgtgtgtatatatacatgaaggatggggtggaatatggtaggtatgcggt

SEQ ID NO: 136548 - DNA, 1599 bp, Zea Mays
gggagtcccagcagcggtgactgttgcggtgttgccgcatccacgccctagtcgaccacgccgcccccagcagcccgctgctgccgcggctcgcgcccccaggagcccccgccgtcgcggctcgcgcctcgtatccgtaacagctacaccgcgccgcctacccccgcttcctgctggctgcatcgtcctcaggtcttccgaaggcgagctccaatccccaaccactattcacaagatgactacaaaacttgagcaatcttctgcggagcatcgcccagcaaaattcgcagcaccatcgtctttgacccccaagatctcaatgtttggggcaaaagctggattcatcatacctaagaacaagctggccggctcactcgtaatccggagcaccagtgacaagaatgaaacaccaactgcatccaacgaagatagcagcaggcatgttcacagaaagacaaagtgggggcctgaccttgctttggaccctgtcgtgtgcaaaggaagggctttggcctaccagactcgagtggagcaaatttccaagcagctgaagtctggagctttggacacgtccgaaattgatggttcagtgtctgctggaaatgaattgaattctattggtcctgacatcttgaaagagaacgagctgggaaatgttgaactattggaacttgaaagacgagagcttatcggtgaaatactccgtttgaatccgggatataagacacctgagaactacaaaccagtacttagggagacaaaaatccctgttccggcagaagcacacccaggaaataatattattggagttcttctaggatctgagagcaatacccagaagagactacatgaagaaactggtgctgtcattcgagtgtatgggactaagaaaatcaatggagagaagagtgagattcgtcatcaagacataaatgaaacacaagatgcttatgaagacctatacatcaatgtatcggctgactcttatgataaagtagatgctgcagttgtgttgattgagctgcttcttgctcctgtttccgtaaagtcgacagctacttcaacagctgctactgtttcttcagcagatacatccaaggatgcagtttcagctaatgtgcaactggagcagaataccacgtcacagccagatctacttcattaccaatcacacaacgcacctgcacctccgatgccggcaccgtcacatccatcgtctttcccgccgtttcagttgaggccaccgccaccgccgcagcaggatatgtctggcgcaggcggcaccaggtggcccggtggcaatcaaatctacaacccttttgcaccaacggctgcggcggcggctcagagagcggaggctgaccctgagtacgaggatctcatggcatcagttggcatgaagtagcgaagactgctggctggcccctgatctgtctgtggcacaaacacagaggcttcttcctattgcttgccaagatgtgcgggttactaatctcctccaatgtatctctagatggtactgaattccgttccatcatagacaggtgccatgcttgaacgaaaaacaaaaataaaaaataaactagtggaccttgtttg

SEQ ID NO: 136549 - DNA, 739 bp, Zea Mays
ctttgctctgcattagaattagtagtttatatgtattttctctccttttctaactatcaggatcattgtgcttcgttcagcattcaacttctaatatttagagctagcgtaaccatggaaagatatcgttacatatgacaatgcacatacgataatagattgactcgagatttcatcaaattttattttacggttcgaaaggaaacctgccggctgctgctgtcatctttcattgttcaagtggccacatgcctttcttctaatttagctatcaactgtttgctcgggcaattttcttgatgtgatttctccttttcgttcagttactcaccaaacatcaaagaaatcaaggtcttggacaggaagaaagtcaggagagctaagctgtattacctgagggacaggatgaacgcacttaaaagatgaggatttcaacttgtttctaggatttctttttgccgcgcggatcagcatggtttctcaagatgcaatcacattgtttggtgttccatctttgaaaaaaatcatagtttggggttgtcagttgccatgctccgatcttctttcttttgatttgatgcgctgtaacattagtgcgaaaattcatgtgctcaggtctattacgttactttcccaatctttttttagtatgtgcgtctgacatgaacaagctggaacactttactcatcaaagcgaaactattgtatgatgattcatgctatccggttttagatgtca

SEQ ID NO: 136550 - DNA, 1248 bp, Zea Mays
aacaacactgactgggccggccgtcgatgcactgcattcccccccttccgtccgctgcatccctccgccgccaccgccgcccaagccaggtgctgaggctttcgttggtctcttcgccggcgacgagcacccaccagggcacgggcctcaggatgcagtccttggtccggaatgtctgccgagccggaagccgtggagcggcggcgaggctcctggaggccgccgcggttcatccgggggcggcgcagccgtcctcggccgtcagacacctcaggcatccttgcgggttcgctcgtccgatcggggtagatcaacccaagcctgtgcagcgccggaccattttgcgtgatggcggccgcgttccggctgccgcctccggattcggtctctgcgcgaaagttctcgttgcgacgaggggtctgtcgacggcgggaaatgctgctgaggttgcctctgattcggacgattccacctctcctgcggttgagcaccccccgcgcatcaagttcaagaggcctgacaagaccgctagacacattatgaatatcctgaacaaagaggcggtcgaaaaggtccgctcggagagggcgattcctgatgtgcagcctggatgtatcattcagatgagattggtaataccacttctttgtgttcctgctttagcgctgttcctataggtttctggtactgatccttcctgtgagtcgatgaacagcaagttcctgagaacaaacggcgcgagtcgacactgaaagggattgtcataggaaggcgcaacgctgggatcaatacaaccttcagattgcgtagattagtggctggcgtgggagtcgagtctgtctttccactttactcaccaaacatcaaagaaatcaaggtcttggacaggaagaaagtcaggagagctaagctgtattacctgagggacaggatgaacgcacttaaaagatgaggatttcaacttgtttctaggatttctttttgccgcgcggatcagcatggtttctcaagatgcaatcacattgtttggtgttccatctttgaaaaaaatcatagtttggggttgtcagttgccatgctccgatcttctttcttttgatttgatgcgctgtaacattagtgcgaaaattcatgtgctcaggtctattacgttactttcccaatctttttttagtatgtgcgtctgacatgaacaagctggaacactttactcatcaaagcgaaactattgtatgatgattcatgcta

SEQ ID NO: 136551 - DNA, 1156 bp, Zea Mays
aacaacactgactgggccggccgtcgatgcactgcattcccccccttccgtccgctgcatccctccgccgccaccgccgcccaagccaggtgctgaggctttcgttggtctcttcgccggcgacgagcacccaccagggcacgggcctcaggatgcagtccttggtccggaatgtctgccgagccggaagccgtggagcggcggcgaggctcctggaggccgccgcggttcatccgggggcggcgcagccgtcctcggccgtcagacacctcaggcatccttgcgggttcgctcgtccgatcggggtagatcaacccaagcctgtgcagcgccggaccattttgcgtgatggcggccgcgttccggctgccgcctccggattcggtctctgcgcgaaagttctcgttgcgacgaggggtctgtcgacggcgggaaatgctgctgaggttgcctctgattcggacgattccacctctcctgcggttgagcaccccccgcgcatcaagttcaagaggcctgacaagaccgctagacacattatgaatatcctgaacaaagaggcggtcgaaaaggtccgctcggagagggcgattcctgatgtgcagcctggatgtatcattcagatgagattgcaagttcctgagaacaaacggcgcgagtcgacactgaaagggattgtcataggaaggcgcaacgctgggatcaatacaaccttcagattgcgtagattagtggctggcgtgggagtcgagtctgtctttccactttactcaccaaacatcaaagaaatcaaggtcttggacaggaagaaagtcaggagagctaagctgtattacctgagggacaggatgaacgcacttaaaagatgaggatttcaacttgtttctaggatttctttttgccgcgcggatcagcatggtttctcaagatgcaatcacattgtttggtgttccatctttgaaaaaaatcatagtttggggttgtcagttgccatgctccgatcttctttcttttgatttgatgcgctgtaacattagtgcgaaaattcatgtgctcaggtctattacgttactttcccaatctttttttagtatgtgcgtctgacatgaacaagctggaacactttactcatcaaagcgaaactattgtatgatga

SEQ ID NO: 136552 - DNA, 1183 bp, Zea Mays
aactgcagtagctcataacctatattaataaaatagtgatactgctctgttagaccttcatggaaaacgatggggatgggataacttagaaaaaacccacatatgtttttttttcatgggaaatctgtgacgtcaaatatgttgggatttatctgtcaaaatgtgtagtaggaaaaaaacaatgcattatgtctctggaattttcttgctggaagagaacccaactaacaatggtgattgctttgcttccattttcagaaaactatcaggccatactttgcataccactaccagaggatcagatacggtaacaaggaagcgttgtgttgggcacacttatgtgggcgtctcagattataagctggttactcagcagtgtggagtggcaactggcaaccataatccataatgacaaaaatggaaggctccacttggcagtgtccaaatcatgtctacgcgtttggtccagccagagtcaggaagctcactggacatggtgccgtcagagccagagatcgttcacctgactccatggctcctgaggtcactatcagtcgtgttgtccttcctgctgaacaggctgctgaatgtggaagcactcatgggctccatccctgtgctggccatgtaggttagcgagctcgcagatgtcatcttcactgccatgctgttgctgctaaactatggcctcgcatatggagccgcattctggctcttcttaaacacctggtcagatataaaccatcgcagcagcagcgatggaggtggagggtacacgctctccacaccgccgccgcctgccagtgctggacagatggttcctcgacacctgccctgtggcaatccatctaccctttggcaagctgaaggacatcgtcgtccagtgacccgaacacgcgcggtccagaaatgtttcttccatttctctgcggagagcacaaagaggctcaagacgaaggcaaacaccgggaactgcaacggtcatcatctcctcattgaagtccctgctctctcaccttgagcgagcagtgtgccaccgtctgcatactttgttgaaggaactctatttttcttttgtgctgttatataccaagtcaggtactgctatccttactatttttgctaaaaaatgctgttatagctatgaattcatgcttaatacttatcctcctgctctctttta

SEQ ID NO: 136553 - DNA, 2351 bp, Zea Mays
tctcgaaatgaagctccatcttctgtggctgcatccaaggtgcagcccagttctggtacagcagccaaaaaagacaatcaaccttgcaatttaaggcaaatagtaaagcacagccaaagacagccaagtccgtagttgagatgttgcggagaacaccagaggaggtggtggatgagagactttcaggctcttatcagcccacaatcttggctagtgcaaaaagcaaggaggacaaacactatgtggacatgcagtggactttgttcttctatgagtggtgtacctttcaatgccgcggcagctaggcagtttcagattgcaattgaggccacaacacagtttggttcagggtataagcctccaacaccttaccaactaggcgagccattgctacaagaggctgtgaagtcaacaactacaatgagggaggaacatgagcgtgcatggaaacactatggttgcacactcatgtctgatggatggtctgataggaggggacgccatctcattaacttcttagtgaacagcccagagggcacttactttttagagtccgttgatgcatctagtgaagtacatgatgcatacatgcttgctgatttgcttgagaaaaagttgatgagattgggagagacaaggttgtacaagttgttactgataatggtgccaattacaaagctgcaggcaagcttctaatggataggattcctacattattttggagtccatgtgctgcacattgcttggacctaatgttggaggacataggaaacttgaaggaattcaagaaaccaattgcacgtgcaaggcgtgtgacaactttcatataccgacatgggagaattcttgctgccatgagagagaaaactggtggggctgatcttgtgaggcctgccgccactcgttttgctacttcctttctcacattgaagagcttgtacaagcacaaggatgctttgaaggctttatttgcaagcacagcttggactgataacagattgtcaaagacaagtgctggattggatgtgtataacattgtcttctccacacagttttggaattcagtagaagattgccttagagcttcagggccactacttattgtacttagggtggtagatggagatgagaggccagctatgccagaggtccaagcattgatgaaatgtgcaaaggaaaagatcaatcaaagctttgctgtccaaagcaagaagactttactcaagaaaatcataactataattgaacggcgttgggagaaacagatggatcacccattgtatggggctgcaatgtatttgaacccaggaaagctgcatcctctcataagaaatgatgatgatgctactgttggtcagctaagaggttgctttcttgatgtgcttgcaagaatggtagatgatgaggaaactagagacaagatcaattctcaagcaatggattacgagtttcttagaggagcagctttttcaaataagatggccaaagataacctacaaactatgaccccacttgagtggtggcgttcgtatggtggtcgtgctattgagttacagagatttgctagacgtttggtgagtctttgtgcgtcttcatcaggttgtgaacgcaattggagtacctttgaatttatccatacaaagaaaagaaatcgattgttgcataagaggttgaattctattgtcttcatttcctacaactgaaagatgaaggctaggttccaaaaactacgccagaagaaggggaaaaactttgatccattggttcatgaggacttcaactgggacaatgagtgggctgattctttgcatgtagtccctgaaggtgggcgtgggtgtgagtgtgaccttacatgggaccttgtggataatgccattggagcatcacaagcacttcgtggccgaaacttaccaagaagggcccataatgtgtattcaagaagaaattctgttgctgcacaaaatatgtcagaggctgaagaggaagatgaagatgatgttccacatgatgatgcagaaatcacagattgtgaagatgaatctaatggtggcaatgatggtgaagaaggggaggcacccaatatcccaggagagtttgatgatgatttttgagcgacgggagagtagctattgctagattgcattagcatatttgctgcattactaactgcagctagttactattaattatgccattacaaactatctatgtggctatttcagatttggtattgtgctgttttaaattttgtgacttgctattgttcctttagaaactactttgtggctatttcagatccactattgtgctattgtgaatttgtgatgatttctagtttatgagctgtaaca

SEQ ID NO: 136554 - DNA, 2130 bp, Zea Mays
gcaccactctcccgccgtccccctcactctccgccgccggcgaggtgtgatgccacgaaggtcggcggaggcgccggccatttgatgcgcccacggccgcctcctcacggtgcgctgtccaagcaccacctcctccgcatccgccgctgccttccacccgtttggtttaatgctgccctcgcccaggacccgtccctgccacccgctgcctcctcctcccccgcgtttctctcatccctcatacgctactgcacgaccaagcgcgcccgccgccccggtgagcaggcgcacgcgcgcgccgtcgcgctcgggctcggcgcgcacccctcggtgctccccgggctcgcctccttctacatcgcgctcggcgacctccccgccgcgcaagcctccgtcgagcgggcggcgggaaaggcgcgggcgttcccgtggaacctgctcatttgggggtatgccgaccgtgggctatgggacgacgtcatcctcgcgtatcagaagatgctggcgctgggcgtggccgccgacaggttcacgtacccgtcggttctgcgcacatgcggcgagctccgagattccgccattggtcgggggattgagaagcgcattctgacgtggaggtatggtctggacatgtatgtctggaacgctctggtgggaatgtacgccaagtgcggggagatgaaggacgcgcgcagggtgtttgatggaatgcctgcgcgggatgttgtcagctggaactccatggtgtctgggtacgtgtcggcgggtatgtggggcgaggcgtttgacctgctgcagttggttcctggggcgaacattgtcgcctggaacgcggttgtggcaggaaattttaaggcggggaactacggtgaggtgatgaggttggtgtcgcagatgaggacatgcggtggtccggggctggattttgtgactgttgtgattggcttgagggcttgcgctaggggtgggtatctgaggattggcaaggaattgcatgctgcctctgttcgtctatgctttgataggcttgagcgcgtggagagttcattgatcaccatgtactccagatgccagatgatgagatctgcatacctcctgttcagaacatgctcaactcagagcatagtaacatggaattcattgctagcaggatttggattcatggaccaggttgaggaggctattttcgttttcagagagatgatttattcctctgtctttccaaatgatgtcactgtgttaactatgctttcacttagtgcacgttttggacacctctgtcatggaagggagatgcactgctacattttcaagcatggacttggggcctctaacatattgcagaactcacttgtcgatatgtactcaaagtctggacagatggcaactgccaatagagtgtttgaccagatgcaatgtcaggacaggcatgcctatacttcattgattttgggctatggaatgcaaagagaagggcatctatcactgaagctctttgatgaaatgattgtaaacaatatcaaggtggaccatgtaactatggttgctgttctttcagcttgcagccactctgggctggtagctcaagggcaactacgatttgctcagatgtatgatgtgttttgcattgcaccgagggtggagcatttttcttgcatggttgatttgtactgccgtgagggtttgctgagtatggctgaggagatagttaacaagatgccattccagccaactgccgcgatgttggcaactctaatcgaggcttgccggatccatggcaaaacagaaattggggatcgggctgcaaagaggctgttggcaatgaggacaaataacccgggtcactacaaattgattgcgaacatgtatatatcagcaaaacgctggccagaactagctaaagttaggtcattaatgagcgtcatggaactaaatatgattccaactcattccttactggagtcagaatatgagatatgtccaattgaaaaagattattgcttaaaccgatgtctgcatggaggcttgtctgacgacatgacagatactgatttctctagtagtgaggaagtgaaatggaatgaagctttcggtgggtaacagtaaagctggaatccaataggctgtttt

SEQ ID NO: 136555 - DNA, 3172 bp, Zea Mays
ggaaagggaaatcgaccaactgaccaagtgttcgccaaaaaccaagcatagcaaagaccaaagcaaaaggccatcactgacggcaagaaagaggaaggagaccccccgagggtcgacgtctcgcgatttccggtggcaaggttcggttttgatccagacgcggccccaggttgctcatcccagtaacagtcgccgcttccggcggagcaaccgtaggaaaagatcccgatttcctttttatccggtagcagttcgtggtggcgccgccgccccccgctaccttcgttttgcgaggttccgattcgccagctgctggagtgaggtggggagcgcgtgtcgtgggattcccgttcggatctgcggagggggctgctctcctgctccaatttggttggccggcaatgagggtccttgaatcttgttgatgcgctgccagatgcgggaggagtactgggggaaggtttcttgaaatcttcgtctgggctccgtggagtgaggtccctcgccgggatcgccctgtcgtcctatgggctgtgtcagttccagacaattccacggcggggacgaccgtggggacggcaagccgcgccggcggccctcgagcaactcgctgaagcgcctggttagttccagttccagcaagaggcatgaggagttagaagaggagtatgaggaaggggtggctgtggcagccacgtcctcaagcgccggacgccgcgctgggaatgacgccagcacggcgaggttgatccggaagcctccagcattggtggtcgaggctgtgccggcattgttagaggaggcagccactttggcggttggtgtagttgatgcagaaagggaggtttctgcaacgactgggaaccggaagaggcctccagcggatgtacaagtcaatggtgtggcggaacaagagccgaggagcggtggcgttagagcagagggggaggccaaactgaggaccaaggacatgcccaatggcgtccagggggagcacgtggcagcaggatggccgagatggctcacagaggtggcggcagaggcggttcgtgggtggcaacctcggagggccgagtcttttgagaagttggacaagataggacaaggtacatatagcagcgtttataaagcacgtgatcttgagaacggaaaaattgtggctctgaagaaagttcggtttgccaatatggaccctgagagtgtccgatttatggcaagggaaatccacatcttaagaagacttgatcatccaaatgtcatcaaacttgaaggtttggtgacgtcacgcatgtcaagcagcttgtatcttgtatttgaatacatggagcatgaccttgcaggccttgcagctaccccaggcttaaaattctcagaacctcaggtcaagtgttacatgcaacagctactctctggacttgaccattgtcataaccgtggtgttttgcatcgggatataaagggtgcaaatctcctacttgacaataatggcattcttaaaatagcagattttggtctagctacattctttaatcccaaccaaaaacaacatttgacaagtcgcgtagtaacattgtggtaccggcctcctgagcttttgttgggttctactaactatggtgctgctgttgatctatggagtgccggttgcattcttgctgagttgctgtcagggaagcctatcatgccaggacgaactgaggtggaacagttacacaagatttttaagctttgtggttcaccatcagaggagttttgggctaatctgaagttatcccgagctaccatattcaagcctcagcatccgtaccgccgatgtgtgaatgatgtatataaggacttccctactactgctttaacacttctggactatctacttgctgtagaacctgggaataggggtaccgctgcatctgcccttgacagtgaattctttacaacaaagccttatgcctgtgatccatcaaatctacccaaatatcccccaagcaaggaatacgatgctaagcttcgagatgaagaagctaggaggcaaagagcagctgctaaaggacaggaagctgaagctggacggaggaagcaacttcctgcacccgatggtaatagtggattgcagcaccgccgagttcaggtgaattccaaaaacagcacttacaagttcactccaaaggaggatgtttctggatttccaattgatccgtcagcaagagctgcagataatggttacccacagcgtgttcctttgatgcaagctggccgttcttcgtccactctgggcagatcaagtggaatggatccaaaagcccaacgatttcacacctcccaaattgttactattactacagaaatgtccaaccaatctactgcatctgggcagagaggcaatgctccgaagatgtctaaccttggggaaagtgcccggaggcaatatttgagagagcaccggtccagttcaagatacagtcagctcaccgctgctgacccttctgacagacctgagtggaatcatcagttccaagaaagaccatcatcttcccatcggaaggatgatgctgcggtaaacaaagagactacagtggtgaatggcacaaagaagaacagaatccactattcgggaccactgatgcctcacggagcgaatatggatgagattcttagagagcacgagcgacagatccaacaggcggtacgaagagcccgccttgacaaggggaagggaaagcacaacggcgagagagaccagtcagaggcactgctgtacaccaccgggaatgtcagggctgatcgctgaaaagttcagtttggtgtggacccccgatttgagcaaccatcagaagcgtagaaaatagcattgagtcccttctatttttccacaccaagtggagaggtttttgctttgccagaaactccaactcctgatgcggtttggtgcccaggagatacagctgccaaaaagaaaacctgttcctgtagagatttaccacccagagtttagcattaggctgtctaaaatatttttttctcaagatttgttgctggttatccatagccatcaattgtatatctcaagtcaagagtactctccctgaaagttgatccacatacctgttttgacatatgacaagatgaatacagatcgaaatacaggccactgtctgctaccctctgaactctg

SEQ ID NO: 136556 - DNA, 648 bp, Zea Mays
ggaatcagtttattggcgcacatatgacgagaatttttcttcttctccttgttcaggtgaatggcacaaagaagaacagaatccactattcgggaccactgatgcctcacggagcgaatatggatgagattcttagagagcacgagcgacagatccaacaggcggtacgaagagcccgccttgacaaggggaagggaaagcacaacggcgagagagaccagtcagaggcactgctgtacaccaccgggaatgtcagggctgatcgctgaaaagttcagtttggtgtggacccccgatttgagcaaccatcagaagcgtagaaaatagcattgagtcccttctatttttccacaccaagtggagaggtttttgctttgccagaaactccaactcctgatgcggtttggtgcccaggagatacagctgccaaaaagaaaacctgttcctgtagagatttaccacccagagtttagcattaggctgtctaaaatatttttttctcaagatttgttgctggttatccatagccatcaattgtatatctcaagtcaagagtactctccctgaaagttgatccacatacctgttttgacatatgacaagatgaatacagatcgaaatacaggccactgtctgctaccctctgaa

SEQ ID NO: 136557 - DNA, 1282 bp, Zea Mays
acgcgctcgtcccgtctccttccctcccttggtcagcctcagccaccgaccgttgcaccagctcgcatggcgctccacgccgtctcccccgcggcggtctcctccccgctacgcgccctctcgcgcagcctcccccagcgctcaggctgtggttgtttaccaaagcagtccgtcacgatttgctcctctacgaactttgcgagaaaacttcaggatggaccagtggactttgctgctaggcgactggttcttggacactcggacaagagagcagttctgacgcatgccactattgaagaaattgaagcggagaaatccctcatcgaagaccaagctaaagaaaagatggagaaggcgatcgaaacagtccaaactaacttcaacactgtgaggacagggcgtgcaagcccggccatgcttgaccggatcgaggtcgagtactacggaactccagtgaacttgaagagcattgcacagataagcactccagatgcaacttctcttcttattcaaccatatgacaagtcaagcctcaagcttatcgagaaaactatagttgccgcaaatcttggtgtgacaccaagcaatgacggagaagtgatacgagtgactgtcccaccattgacatctgatcgcagaaaggaattagcaaagacagtagctaaattggctgaagatggcaaggttgctataaggaacataagaagagatgcaatcaaagcttacgataaactacagaaggaaaagaagctttctgaagacaatgtgaaagatttgtcagctgacctacaaaaagtcacggacgagtacatgaaaaatatcgattccatccagaagcagaaggaacaggaactgatgaaaatctagatcttcaacaagctgagctgactgtgtatgactgcttggcgccgcgccgccggggactgcgcacgttttgaggtcaggtcaggtgctttgctgcaaccttctggatgcacacatgctgaggcaatgctgttgtgggtcgtttctctttttttttttcgtatttcttttgtaatgctcgtaaataggctctcgctcgtcgccgtgttgtctgactgttgttacgttgtcaatacttgtcgccatctgaatcgaatgtctgaaatgttcctgcccgactctcgtacgcttgtttgtcagaactcagaactctgctgaggttgtcaaagctatttcgcaccagctagcttagctccacgtgctgggctcaagctcaagcagagagtacgtgggctttgatgggcctctcctttggttc

SEQ ID NO: 136558 - DNA, 1129 bp, Zea Mays
acgcgctcgtcccgtctccttccctcccttggtcagcctcagccaccgaccgttgcaccagctcgcatggcgctccacgccgtctcccccgcggcggtctcctccccgctacgcgccctctcgcgcagcctcccccagcgctcaggctgtggttgtttaccaaagcagtccgtcacgatttgctcctctacgaactttgcgagaaaacttcaggatggaccagtggactttgctgctaggcgactggttcttggacactcggacaagagagcagttctgacgcatgccactattgaagaaattgaagcggagaaatccctcatcgaagaccaagctaaagaaaagatggagaaggcgatcgaaacagtccaaactaacttcaacactgtgaggacagggcgtgcaagcccggccatgcttgaccggatcgaggtcgagtactacggaactccagtgaacttgaagagcattgcacagataagcactccagatgcaacttctcttcttattcaaccatatgacaagtcaagcctcaagcttatcgagaaaactatagttgccgcaaatcttggtgtgacaccaagcaatgacggagaagtgatacgagtgactgtcccaccattgacatctgatcgcagaaaggaattagcaaagacagtagctaaattggctgaagatggcaaggttgctataaggaacataagaagagatgcaatcaaagcttacgataaactacagaaggaaaagaagctttctgaagacaatgtgaaagatttgtcagctgacctacaaaaagtcacggacgagtacatgaaaaatatcgattccatccagaagcagaaggaacaggaactgatgaaaatctagatcttcaacaagctgagctgactgtgtatgactggtgagtaataaccgcctctgtaaagcatgaacccctgcatatatgttgggggaatgtatctggtgctcatcagggatacggtactcacgtgtacatttaacagcagcatcaattttataaagaactgttccacccccttcccatggagggaggggttctttgtaaaattagtttctaccattggatacaaggtagatgtcacaaatttaaatatgcactcctttgaac

SEQ ID NO: 136559 - DNA, 973 bp, Zea Mays
aggtccgtgcattattctcaagttgggctcagcccatgtaggaggagcattccatccgggcccacttgtcatcggaccgagtggcgtcttcctcttcccttcgtaaccttccagacccgaccgcagcagcccggggcaacaagcgaaccggcggcgtcatcggaccgagtggcgtcttcctcctcccttcgtaaccttccagacccgaccgcagcagcccggggcaacaagcgaaccggcggcagcgatggggatcggtgagcacttcgagggcgtcaagcagcactgggcgagcaacttcgccttcctcgactacttcaagaaggtctacggccgcgccgagccccctccccaagtgggtccgacgccgacgtcgacgagttcatcgcctccgaccccggtctacgggccccagctcaaggccctgcgggagtcgaggaagttcgcgctcgccggggccctcgtcggcgccgcccacctcggcggcgtcgcgctcaagtactccaaggcgccgcacggcgtcctgctggcgacgggcttcggcgcgatcaccggcgccgtgctgggatctgaggtggcggaccactggtaccagctctacgagatggacaagcagggggccaacctcaggttcatctactggtgggaggacaaggtctcaggccagaagagctgaaccacatcgagtgatgcctattctactgagcacaccagcgtgacaacaaaacattgacgtctctcatgccgagttcttagtttttctttcctagttttctctaataagtgtggaattggttgaggaagccaactggacaatgcatttttcatctccgtcatgggttatgttcatccatggtcaatctggtgtaaacagcaaatcctatccgttttcgagatatgttttctcaaactactgatggagtttagagtgttcattccacctctgctacaaaactgtagctattgctgtatc

SEQ ID NO: 136560 - DNA, 1581 bp, Zea Mays
tggccatgcatgttttggtcttttgggtttcatccatgtactgcactcactatagcactagcaacatgccagtatacctggctgattattgaactcctgatgcatgcatgctctgattgcatcggcgcgcgcattataaatagctgctcccggtgcacgtactctccacaccaattaagtgctcactcactcactcagctcgtcttcttcttcctccgctcggcctctcgttgcggccagggaaagagctagctagctagcgtgtgctcgatcgatggcgaaaacgacgatgagcgcggccaagaacctcgtgaggctcctcgtcctcgtgcaggtgtccttaggccttctgggcggcgtcgcggcgctcagcttcgactactacggcatgacctgcccgttcgcggagatgatggtgcgcagcgtcgtctacgacgccctcatgaaggaccccaccctggccggcagcctcctccggctgcacttccacgactgcttcgtgcagggctgcgacgcgtcggtgctgatcgactcggcggacggcaacacggcggagaaggacgcgcaggcgaacctgaccctgcggggcttcgaggtgatcgaccgcatcaaggagctgctggagtcgcagtgccccggcgtcgtctcgtgcgccgacgtcctggcgctggcggcgcgcgacgccgtgctcctggcccggggcccctactacggcgtgcccctggggcggcgcgacggcacgcggtcggtggactccgacaccttcacggcgctcccgccggccttcttcaacgtgaccatgctcatgaagctcttcggctcgcacgggttcacggtccaggacatggtggcgctgtccggcggccacacgctgggcgtcgcgcactgcgccaacttcaagggccgcctcgccgagacggacacgctggacgccgcgctggggtcgtcgctcggcgccacctgcaccgccaacggggacgccggcgtggcaacgttcgaccgcaccagcaccagcttcgacaccgtctacttccgggagctgcagatgcggcgcggcctgctcagctccgaccagacgctgttcgagtcgccggagaccaggggcatcgtcaacatgttcgccatgaaccaggcctacttcttctacgcgttccagcaggggatgctcaagatggggcagctcgacctcaaggagggcgacgatggtgagatcaggcacacgtgcagggtcatcaactcctcctaggcaaacacagcttactagtgtggatgctgcgaagtgtgcaatggtacgtgtgcttatatatatatggtcccgtaagtgtagcttgtaaaagtaaatgtgtatgatacatgtgccccatgcaaaccaagataggagctaagaatgaagctcttgaagcaaataataataatgcaaggatatacactatattgtgtactatgtgtaaaaattaattggaagaagaagatccagagatccctgctaattgtgtgtaaaaaagaagcatgttctatctggtccgactgcgccgtctgccgtttaatactcttgcagcaaatgtttgaaggaagaagaac

SEQ ID NO: 136561 - DNA, 197 bp, Zea Mays
ggtggactgaaattcatgtcaacttttattgcatgcatggtcaacttttcgcctctcgcagaaacagatgctgggtgacgcaggcgcaggttcttccagcacgcgcgcagtgcatgcggccgtgaacagcgagcgatcgaggcgatgccaactcccgagccattggcagggcggctagcttgttgctgctgctgctg

SEQ ID NO: 136562 - DNA, 1370 bp, Zea Mays
attgtccattttgcaccaccgatcgatcgagctctaggctctagctagcgcgctgcatatgtgaggcaacttttcatttatctgacacacgtacttacggcccacgatggccgccgccgccggcctcccgtggtggctgctgctcctcgccgtggtcccggccgtcaccgctgcggccaccgccggcggagaggggagggcgccggcgctgttcgtgttcggcgactcgctcatcgacagcggcaacaacaacaacctcgcatcgcttgccaaggccaactacttcccctacggcatcgacttcgccggcggccccaccggccgcttctgcaacggctacaccatcgtcgacgagctcgccgagctgcttggactgcccctggtgccaccctactctgaagcctcgtccgtgcagcatgtcctgcagggcgtcaactacgcctctgccgccgccgggatcctcgacgacagtggcggcaactttgtcgggcggatcccattcaaccagcagatccagaacttcgagacgaccgtggcgcggatcgccggcgcggcgggcgcggcggcggcggcggacctggtggcgcgctccgtcctgttcgtggggatgggcagcaacgactacctcaacaactacctgatgcccaactacgacacgcggcggcggtacggcccgcagcagttcgcggacctgctcgcgcggcagctggccgcgcagctggccaggctgcacggcgccgggggcaggcggttcgtggtggccggcgtggggtccgtgggctgcatcccgagcgtgcgcgcgcagagcctcgcggggcggtgctcgcgcgcggtggacgacctcgtgctccccttcaacgccaacgtgcgggcgctggtcgaccgcctcaacggcaacgctgccgccggccttcccggcgccagcctcacgtacctcgacaacttcgcggtgttcagggccatcctcaccgacccggccgcgttcggcttcgccgtcgtcgaccgcgggtgctgcggcatcggcaggaacgccgggcaggtcacctgcctgcccttcatgccgccgtgcgaccacagggagcgctacgtgttctgggacgcataccaccccacggcggccgtcaacgtcatcgtcgccaggctggcgttccacggcggcgctgacgtcgtctcgcccgtcaacgtccgtgagcttgccggcatgtgacaagatgatcggagcggacatatattctcctatatatagcaataataatttgtttggtgaattattgtatcagtagattttgtgctacaagcctccatccacaaaccatgcatgtagtagttatttgttactccgatctatttataaattcgctttgcactgt

SEQ ID NO: 136563 - DNA, 1723 bp, Zea Mays
gtcggttggtccggcggtggcagcgaagccgccctcacagtcacagctacttctgctcgcccgccactcggagtagcgtagtgcggtgcggtggtgagtgacaggaaggatggaagaaggcttcaccggcggcgtccggatcgtgtccaggcgtctcgtccggccggagccgaccgcgagctcgccggccaacaacagcgcgccaccggaggaggaggaggatgagataatgcacatgacgccgtgggatctgcgcatgatcacggtggactacatccagaagggactgctcctgcccaagcccccggcagcaggcggggcgcacgcgcaccgactcgtggacggcctcgcgtcgtccttcgcgcgcgccctggcccgcttctaccctctggccggccgcctcgccgtggatgccgccaccggcggcccgggcgtcgtcgtctcgctccgctgcagcggcgagggcgccgagttcgtccacgccgaggcgccggatgtcaccgtcagcgacatcatcacgccgcccgcaggccgttactacgtccccagcgcgctggtctggtcgctcttcccgctgaacgggctgctgggcacggacgccgccctggacgacgactcccgcgcccccctgctatcggcgcaggtcaccgagctcgccgacggcgtcttcgtcgccatgtcgctgaaccacgccgtgggcgacgggaccacgttctggcacctgttcaacacctggtcggagatcagccgggccggcggcgaggggcgcgaggcggagctctccacgccgcggccggtgctggacaggtggttcctcgacacctgcccggtccccatcgctctgccgctgcgcaagctggaggacatcgtccggcagcccgagtacccgccggtgcgggagtgcttcttcgacttccccgcggagagcgtgcggaagctaaaggcgaaggcgaacgccgagatggcggcgggaggcggcaccgcgccggccgccgtcgtgctgtcgtctctgcagtccctgctcgcgcacctgtggcgggcggtgtgccgggcccgggatctcgcgccgggcgcggagacggcgtacctcctcctcgtcgggtgccgcgcgagggtgcgaggcgtcccgcaggcgtacgtgggcaacgccgtgacgctcgccgtggcaaagtcgaccgccggcgaggtgctgggcggcgggctgggctgggcggcgttgctcttgaaccgcgccgtggcgtcgttcgacgaggcgggcgtgagggccgagctcgcggcgtgggcgcgcgaccctcggttcgcgtacgtggagccgcgcgggtacggcggcgccgcgacggtcgcgaccgggagctcgccgcggttcgacgtctacggcaacgacttcgggtggggccggccaatgagcgtccgcagcggcgccgggaacaagatggatgggaaggtgaccgtgtacgagggccgcggcggcgcgggcagcatggcgctggaggtgtgcctggcgccccaggcgctcgccaggctcgtcgccgacgacgagttcatggaggctgtgagcgctgccgcgccgtgaatgcctccgccgcctgtggctgtgctgagagccacctgtacctttgagagacaattcttctatccatcagttgcatgaaatctgggcttttgttcggcgaccacgttgtccattcatttcgtttgaagaagatttgagttgtcttttgtt

SEQ ID NO: 136564 - DNA, 1017 bp, Zea Mays
atgaaccgaaaccgaggacgtcgacgacgaggggcggggcggcgggggacagtgacgtggtggaacggcggggcgtgcggccatctagttggccttggcgatgaggtcctgggcggtggcgaccgtgggcagcgccgggatggcgcccttcttggtggtgcagatggcgccgcaggcgttggagaacttgagagcctcgcggagcttctcctcgttgtggaagatggagtcgtccttggcgacgttgacgaggagggagccgacgaaggcgtcgccggcgccggtggtgtcgacggtgtcgaccttgaagccgggcacgctgcccttgaagtccttggtgaagtacctgcatcccttgtccccgtcggtgacgacgagcagcttgagcccgtcaaaccacagggacagcacgttcttctcgtcgttggcgtccccgcgcgtgaggaaggccacctcgtcgtcgctgaccttgatgaagtcggcctccttccagatgctgaggatgccctcgcgtgcggcgtcgggcgacggccagagcgggaggcgcacgttggggtcgtaggagcagagcacgcccgcggccttggctgcgcgcatggcggccatgtgcgccgagcggcacggctcggagatgagcgagatggagccgtagtggaacaccctggcgcgccgcaccaggcccaggtccagctccgcctccgtcagcagcatgtccgcgctcgggttcctgtagaacatgaactcgcgctccccgtcgtgcttgagcgtcacgaaggccagcgccgtccgcgcgtgcttgtcgaacaggcacccctccgcgttcacgttgttctgcttcaggatgttcaccagcatgtgcccgaactcgtcgtcgccgaacttgcctacgaaggcggaggatccgccgagcttggcgatggcgcaggcgacgttggggacgaagtcgatcagcatctcgccgaacgacaccaccaggttgttggacgccgccgcggcagcagctccgccgtctcctag

SEQ ID NO: 136565 - DNA, 1083 bp, Zea Mays
atgaaccgaaaccgaggacgtcgacgacgaggggcggggcggcgggggacagtgacgtggtggaacggcggggcgtgcggccatctagttggccttggcgatgaggtcctgggcggtggcgaccgtgggcagcgccgggatggcgcccttcttggtggtgcagatggcgccgcaggcgttggagaacttgagagcctcgcggagcttctcctcgttgtggaagatggagtcgtccttggcgacgttgacgaggagggagccgacgaaggcgtcgccggcgccggtggtgtcgacggtgtcgaccttgaagccgggcacgctgcccttgaagtccttggtgaagtacctgcatcccttgtccccgtcggtgacgacgagcagcttgagcccgtcaaaccacagggacagcacgttcttctcgtcgttggcgtccccgcgcgtgaggaaggccacctcgtcgtcgctgaccttgatgaagtcggcctccttccagatgctgaggatgccctcgcgtgcggcgtcgggcgacggccagagcgggaggcgcacgttggggtcgtaggagcagagcacgcccgcggccttggctgcgcgcatggcggccatgtgcgccgagcggcacggctcggagatgagcgagatggagccgtagtggaacaccctggcgcgccgcaccaggcccaggtccagctccgcctccgtcagcagcatgtccgcgctcgggttcctgtagaacatgaactcgcgctccccgtcgtgcttgagcgtcacgaaggccagcgccgtccgcgcgtgcttgtcgaacaggcacccctccgcgttcacgttgttctgcttcaggatgttcaccagcatgtgcccgaactcgtcgtcgccgaacttgcctacgaaggcggaggatccgccgagcttggcgatggcgcaggcgacgttggcgggcgcgccgccgggtgccttgacgaagccgcccgactcggccagcgacagcccggccacgtcggggacgaagtcgatcagcatctcgccgaacgacaccaccaggttgttggacgccgccgcggcagcagctccgccgtctcctag

SEQ ID NO: 136566 - DNA, 987 bp, Zea Mays
atgaaccgaaaccgaggacgtcgacgacgaggggcggggcggcgggggacagtgacgtggtggaacggcggggcgtgcggccatctagttggccttggcgatgaggtcctgggcggtggcgaccgtgggcagcgccgggatggcgcccttcttggtggtgcagatggcgccgcaggcgttggagaacttgagagcctcgcggagcttctcctcgttgtggaagatggagtcgtccttggcgacgttgacgaggagggagccgacgaaggcgtcgccggcgccggtggtgtcgacggtgtcgaccttgaagccgggcacgctgcccttgaagtccttggtgaagtacctgcatcccttgtccccgtcggtgacgacgagcagcttgagcccgtcaaaccacagggacagcacgttcttctcgtcgttggcgtccccgcgcgtgaggaaggccacctcgtcgtcgctgaccttgatgaagtcggcctccttccagatgctgaggatgccctcgcgtgcggcgtcgggcgacggccagagcgggaggcgcacgttggggtcgtaggagcagagcacgcccgcggccttggctgcgcgcatggcggccatgtgcgccgagcggcacggctcggagatgagcgagatggagccgtagtggaacaccctggcgcgccgcaccaggcccaggtccagctccgcctccgtcagcagcatgtccgcgctcgggttcctgtagaacatgaactcgcgctccccgtcgtgcttgagcgtcacgaaggccagcgccgtccgcgcgtgcttgtcgaacaggcacccctccgcgttcacgttgttctgcttcaggatgttcaccagcatgtgcccgaactcgtcgtcgccgaactgcacgtcgccggagtaggaggaggaggcggggtagggcagggcagggcgtcatcagtagcaatgtgtaattgtataataataataataataataataataatctaa

SEQ ID NO: 136567 - DNA, 2987 bp, Zea Mays
atggcgacggaagaggagctgccggaggcggcggccgcgcctgcgccagcaggtggaggaggcggggacgacgcggagatgcccgatgccgccgtgccgtcgggctcccactcggactcgtccgactccgactccgacgacgaagccgccactgccgccgccgagctccgcatccaggccctagagaaaaccctacaggagcagccactggactacgagacccacgtgcagtatatccagtgcctgaggaaggcaggcaacattgagaagcttcgcgtggcaagggaagagatgaacaagtactttcctctaaccccgaagatgtggcaggagtgggccaaggacgagatctcattgagctcgagtgaggaatcttttggtgacattgaaaagatctacgggcatggggtgcaggaatacctgtccatcaagttatggcgggattaccttgattatgttgaagagcatgatcattcagtgtctcagtgtacaccttctggcctctccaagatgagaaatttgtttgaaagtgctattaccgcaggtgggctccatgttactgagggcagcaagctatgggcagcctatagagaatatgagatggccattttgatcaccatcgctgatgccaatgatgaggagagggaaaagcaagttcagcgtatacgcatgctattccaccgccagttatctgttcctttggctgatatggaatctacacttgctgagtataagagctgggaggctgagcaggggaatgcaaatgatcctggtgcagattttgatggtgtcccctcaaatgttgtatctgcttacaaaaaggccaatgatatgtacaatgaaaggaagcaatacgaggatcaactaagcaatgcaggcacatttgaaggtgacaaactgcagcaatttatgaagtacatcaaatttgaggaggcttctggtgaccctgctcgtgttcaagttctgtatgagcgagctgtttcagagcttcctgtttcaagtgatatatggatgggatatacaagttacctggatagaaccctgaaggtgccttctgtagtcagaagtgtttattacagagccacaagaaattgtacatgggttggtgagttatgggtccattatttgttgtctttggagcgtattcgtgcttctgaagaagagctgcagcatgtatttgaacgggcaatacaatgtaccttttcaaccatacaagagtatttcaatatttatcttactcgagttcatggtttaagacggaggatttctgatggcttggattttcaactgattaggcagacattaacggatgctgcagaatttctctcatctcaactgagtaccaaggagttactgcgcttatatgcttattgggccaaactagagcttagtctcggcaaagatctttctgcagctcgtggagtttgggaaaacgcgatcaagaaaagtgggtctgtttttgaagtttgggagcagtacattttaatggagataaaaatggaccatgtacatgaggcgagatccctttataagcgttgttatagcaaaagatttgctgggtctggatcagaggagatatgctactcatggataagatttgaagaggagaatggcaccttggatgattatgatcttgctgtaaagaaggttacccctcggctaaaggagcttatgacattcaagtctcaagaggaggctaaagttgaggcttaccctaacctcaatgataattctaatgcaaatgattcctctcagaaaagaaaaccaagtaacaataaacagcagccccctgctaagaaaagaaaagagaatccaccaaaaagtaccatgccatcagatgaccaaggatcaaatgtgcaaagtgggcacagtggtgctgttactgatgtagaagtcggaggggccagcagggagaaggtcatggcatctatcgagatgaaagtggacagtgacagccgaacagggaaatcaagttcaaatgaaccaaagccatccttttataatgacaactgtacagtttttgtgtcaaatattgacttgaaagcaaatgaggatgatctcaggcgattcttctctgatattggtggtgccacagcaataagattgctgagggacagattcaccaaaaaatcaagggggttggcctatgtggactttttagacaacaagcatcttgaggcagctattaagaaaaacaagcagaagctgcttggaaagaaagtgagtatcgcgcgatcagatccaagcaagggtaagaagagccgtgaagcaggtcaaacaagccaggataatttacctccgagtggtggtgatgatgcaaaagcaacaggatccagtggaccagacaatgaagtacccaagggtgatgcaaaaaccatagggaagaataccctttttgcaccacgagctctggttaaacctcttggatggacaaacaaggatgagaagaaaccagatgttgcaggggagttgaaatcaaatgaggagttccgaaatctgttactaaagaagtgatatcagttggcaggtgtggatctccatgccccaatccagtgccaagatttgtggtgccttcatctctatgttagaatgatggacctgtagtagcagcttgaactggggatctacaaccgttatgtcttaccccgatgtagacatgaatatttctttctgctagggagattatacaagccatgccgaattgcagggtggtgaaggtgaaaacgggacgttgcgttcgagcagaaaaaccctgcccatgtgaaaagaaaacactgaccttataatatgtgctcactttctttttgaaccatacgtacgcattgctggtgaaacatcactgcatctcaaaaatgtgtaatctactctacgcggcttgattggagatgcagatttatttgattgtacgttgggaccttttggaccttgcaactgcatatgttgagaggctaacatcttttcagagcggcagcccaacgacactttgc

SEQ ID NO: 136568 - DNA, 657 bp, Zea Mays
aaacccactcacacactgtgacgctgctgatgcgcctcatcgtccccgtccccccggcagagcccacccaccctccactccaacccacgccggcgaacccagccagccgcccacgtcgcctcccggtcccggcttagaccagactcagattcagatgcacctgctcgacgacctccgccaagaccgcggcggcgcggccgcccacaccggcagccgcagtcgcaagccgcccccgccccttgccgccgccgccgccgccgccgcgggggtcccggcgggctcctccaccgccgccaccgccacccacctgggcccggaggcggcggcgctgctggcgtgcgtcacggccacgctgctgctgcttccgctggtcctgccgcccctgccgccgccgccgccgctcctcctcctcgtgcccgtcgccatcttcgccgtcctgctactcctcgtgctcctcccctccgacgcccgcgccgccgtcgccacgcccacctcctccgcctcctacttgtagcagtagcttatacgtcttgttgtacagggtactggtacctagctagctgatcgagtgagttgagtgacagagtgagtagagtggattttggtaggcgtgcatgcaaaatgtaaataaaaccaaaccccagcgcggattcttct

SEQ ID NO: 136569 - DNA, 441 bp, Zea Mays
ctactgcttgtcgatgacaacggcgaccaacggcggcggcggcggcggcgcacgcgcacccgcgggtccgtcttttcccggcggcggcggcgcgcgggcgtcggggctgaagcggagcgcgaggcagacgacgggcggggtgccggcgagcacgagtccgagcggcaccatccacagctgcgcgtacgacgggtggaacgcgacggcccaccacgccagcagcgcggcgccggccacggcggccgcggcgaggcacacgtccacggcggcggacccagcggccgccccccagtctccgtggcagcggaggtcgtcgatcttgaccaccaccgacgacgacgacgacgacgcgccatcatctttgccgacggcggccgcgagcggcggcgctctctcgctgctgctcgggtgctggtggtcagtcggctgcatctggcgcat

SEQ ID NO: 136570 - DNA, 1167 bp, Zea Mays
gtggacaccacacgccagtccgtccgtctccgccagtcgatggcacgcacggcacgatatccaaaccggccgcggatagctgtggccgccgtgccacctgctgctgcagaggctctctctctctttctctccagcttcgcgccgctgccgcgacctaccatggagctctgcctcgccgcgcgcgccgggacgacggcggccgcgtgccggaggagggcaccgacgactacaggcgtgccgaagaagaagaggcacggcggcggcaccgtgcgcgtacggtgcgcggcgacggcgcccatgggggagaagacggagtaccgggacggcccgctggagcgcgcgttcatggggctgttcgcgcgcaagatggagaagtacgcggcgaagaagccggcggcgcaggcgaaggaggagagggcggtgtgggagtgggactacgagagcttcgtggacgtgtcgcggcgggtgatgctggggcgcacgcgcgcgcagcagcagcaggcggtgcgcgaggtgctgctgtccatgctgccccccggcgcgccggcgcagttccggcggctgttcccgccgacgcggtgggcctgcgagttcaacgcggcgctgaccgtgcccttcttccgctggctcgtcggcccctcggaggtggtggaggtggaggtcggcggcgtccggcagcgcagcggggtgcgcatcgagaagtgccggtacctggagagcagcggctgcgtggggatgtgcgtcaacatgtgcaaggtccccacgcaggacttcttcaccaacgagttcgggctccccctcaccatgaacccaaatttcgaagacatgagctgcgagatgatatacggccaggtgccgcctccgttggaagaggacccggcgtcgaagcaagcttgctacccgagcctctgttccatgtcgacgccatctgccccggcctgtccgaagcttcagtaggtccatacatgcatgtgcagagtttgccggccggacttgggatggaaaaagtatcattagtatttttttatacagaaatgtagcttgtaaactattagtaaagttacatacaatttgttctgagccaggacagagcactctgtaataaagaatacttttctcaaacccttggtatgagagggtacaatgacgccactacatattggagcc

SEQ ID NO: 136571 - DNA, 389 bp, Zea Mays
cggaaagcaaaagcagtagagagccggcgaggcatgcatcgcatcctgttgtgttgtccccaggcggacacaacaatggaacgcctggaccggacctctgtctttgactctttgaggagtcaagacgttactgctgtgttagcaacctccaatcacatgaacacaacaaccaccaccaaagcaacatgcatacactagtacagagatagagtttgggaagtagcaagtagggaagggaagaagatgaaccggattgagaggtgaagaagcattagaagcacatctcagcggaatgaggagagacgcctaaccgccataggaaggagtagatgatacgagtggtgtattctgaatattcgatggtccccgacccttgccttgtttctgct

SEQ ID NO: 136572 - DNA, 2047 bp, Zea Mays
ggcgcaccacgggactgggagagagagagagagagagagagagaaagaaaaaaaaagcagcaggcaccagtgcatcgccaccgtaccggagggggcagcgcccaaaaaaggcaaacgggagggtgggcgagcctgctcttcctgtctgggagagagaccgaagaagaggagagagaggcgcagcgcagcgcagcgcaggcgcgcatctcccccctccccttgccggctggcccctgctgcagctctgctccggtcggctctgcccccccgctctgctgactgctctgccgctgctgctgtcgcaggcgcgccaccaacccgccgatgcgcgcgtagcggcgtaggtaccatcatcatccatccccgcgacgacccaccacccacccctgcagtctgcagcatccccttccccactcccggctggtctgctgcggccacccctgcgccgatccacctccgctgcttcctgcctcaatatattcgcccgcctcgtcgcgtccgaccccgccacagaaggccttccagaaccctccgacccctcacctccgccccgctccactctcctcctcctcccgggccggccgactccgatggccgtcgtcgaggccgccgccgccgaccacgccgcgccgccgctccaggaggaggcaccgggcgcgggcgcgggcgctggcgccgacgccggggagcgcgagatgcgggatctggaggacctgctctccaagctcaaccccatggccgaggagttcgtcccgccgtccctcgcctcccccgccgccctcacgcccgcgccgctctcccccgccgcctacggcttctacccggccggcgccggcttcgcggtcgcctcgccgggccacggcggcgtcgtcggcttcccggccgtcgcggacgcccacgccgcacgaggcaggaagaagggcggagccggaggagggttcagcggccacggtcaccccgccaggaggcggaccaacagccgcaccagcatggcgcagcgcgacgagatcatccgccgcaccgtctacgtctccgacatcgatcaccaggttactgaagaaaacctggcagcactatttataaattgtggacaggttgtggactgtcgcatgtgtggagacccaaactcagtccttcggttcgccttcatagagttcactgatgaggagggtgcaagggctgctctgaatctgtcaggaactgtgctcggatattatcctgtcagggttctgccatcgaaaactgccattgcaccagtcaatccaacattcctacccaggtctgatgatgaacgggaaatgtgtgcgaggactatttactgcacaaacattgacaagaaggtcactcaggcagatctgaaattgttctttgagtctatatgtggagaggtctttcggctgaggttgcttggtgactaccatcattctactcgcatcgcttttgtggaatttgtgatggcagaaagtgctaccgctgccctgaactgcagtggcgtgatactgggatccttgccaataagggtgagcccctcgaagactcccgtgcgtccccgtgcgcctcgccagctgatgcactagaggtgtcctaggtacaggaggtgcggaaggcactgcttatatatcatcatcatatatatataatagagaatagacatatatgaaagaggggaggggaaaagtggcgtcacttgttctaagttatgggctcggcctttttgttttgggttcttgcttcaccaccgtgtgactgagtactaaagtgcctacgtacgccccgggtcgacgccggctggcagggcccttttgtttactaccttgcacatagaaggagaggagatggagagcttctcactagaaggatcggaagcgcgcgcgggggggtctgcctgatgctcttgtccttgatgcaacaacaggcggaaaactcctggacttttaccctgctgttcagttgtttgctgctgtgtcctggttgctactgaaacaaactggttaaaaaaaacttgggtattggagactatgtgccctgcctgttggtttggttgcta

SEQ ID NO: 136573 - DNA, 704 bp, Zea Mays
tatttgtaaaaatctgctgggcccccttttgttgtaacataactgttacctctctattttttgtttcaagaaacaaaccccgatggtaagagacatttgcttcttaatatttcaggcagaaagtgctaccgctgccctgaactgcagtggcgtgatactgggatccttgccaataagggtgagcccctcgaagactcccgtgcgtccccgtgcgcctcgccagctgatgcactagaggtgtcctaggtacaggaggtgcggaaggcactgcttatatatcatcatcatatatatataatagagaatagacatatatgaaagaggggaggggaaaagtggcgtcacttgttctaagttatgggctcggcctttttgttttgggttcttgcttcaccaccgtgtgactgagtactaaagtgcctacgtacgccccgggtcgacgccggctggcagggcccttttgtttactaccttgcacatagaaggagaggagatggagagcttctcactagaaggatcggaagcgcgcgcgggggggtctgcctgatgctcttgtccttgatgcaacaacaggcggaaaactcctggacttttaccctgctgttcagttgtttgctgctgtgtcctggttgctactgaaacaaactggttaaaaaaaacttgggtattggagactatgtgccctgcctgttggtttggttgct

SEQ ID NO: 136574 - DNA, 1058 bp, Zea Mays
ggcatacgccaccacgcacgcagtaggcagtactagaggcatgggcgttgccgccccccgagttactgaagaaaacctggcagcactatttataaattgtggacaggttgtggactgtcgcatgtgtggagacccaaactcagtccttcggttcgccttcatagagttcactgatgaggagggtgcaagggctgctctgaatctgtcaggaactgtgctcggatattatcctgtcagggttctgccatcgaaaactgccattgcaccagtcaatccaacattcctacccaggtctgatgatgaacgggaaatgtgtgcgaggactatttactgcacaaacattgacaagaaggtcactcaggcagatctgaaattgttctttgagtctatatgtggagaggtctttcggctgaggttgcttggtgactaccatcattctactcgcatcgcttttgtggaatttgtgatggcagaaagtgctaccgctgccctgaactgcagtggcgtgatactgggatccttgccaataagggtgagcccctcgaagactcccgtgcgtccccgtgcgcctcgccagctgatgcactagaggtgtcctaggtacaggaggtgcggaaggcactgcttatatatcatcatcatatatatataatagagaatagacatatatgaaagaggggaggggaaaagtggcgtcacttgttctaagttatgggctcggcctttttgttttgggttcttgcttcaccaccgtgtgactgagtactaaagtgcctacgtacgccccgggtcgacgccggctggcagggcccttttgtttactaccttgcacatagaaggagaggagatggagagcttctcactagaaggatcggaagcgcgcgcgggggggtctgcctgatgctcttgtccttgatgcaacaacaggcggaaaactcctggacttttaccctgctgttcagttgtttgctgctgtgtcctggttgctactgaaacaaactggttaaaaaaaacttgggtattggagactatgtgccctgcctgttggtttggttgct

SEQ ID NO: 136575 - DNA, 1974 bp, Zea Mays
cgaagcagcagaagggaacaggcgcaccacgggactgggagagagagagagagagagagagagaaagaaaaaaaaagcagcaggcaccagtgcatcgccaccgtaccggagggggcagcgcccaaaaaaggcaaacgggagggtgggcgagcctgctcttcctgtctgggagagagaccgaagaagaggagagagaggcgcagcgcagcgcagcgcaggcgcgcatctcccccctccccttgccggctggcccctgctgcagctctgctccggtcggctctgcccccccgctctgctgactgctctgccgctgctgctgtcgcaggcgcgccaccaacccgccgatgcgcgcgtagcggcgtaggtaccatcatcatccatccccgcgacgacccaccacccacccctgcagtctgcagcatccccttccccactcccggctggtctgctgcggccacccctgcgccgatccacctccgctgcttcctgcctcaatatattcgcccgcctcgtcgcgtccgaccccgccacagaaggccttccagaaccctccgacccctcacctccgccccgctccactctcctcctcctcccgggccggccgactccgatggccgtcgtcgaggccgccgccgccgaccacgccgcgccgccgctccaggaggaggcaccgggcgcgggcgcgggcgctggcgccgacgccggggagcgcgagatgcgggatctggaggacctgctctccaagctcaaccccatggccgaggagttcgtcccgccgtccctcgcctcccccgccgccctcacgcccgcgccgctctcccccgccgcctacggcttctacccggccggcgccggcttcgcggtcgcctcgccgggccacggcggcgtcgtcggcttcccggccgtcgcggacgcccacgccgcacgaggcaggaagaagggcggagccggaggagggttcagcggccacggtcaccccgccaggaggcggaccaacagccgcaccagcatggcgcagcgcgacgagatcatccgccgcaccgtctacgtctccgacatcgatcaccaggttactgaagaaaacctggcagcactatttataaattgtggacaggttgtggactgtcgcatgtgtggagacccaaactcagtccttcggttcgccttcatagagttcactgatgaggagggtgcaagggctgctctgaatctgtcaggaactgtgctcggatattatcctgtcagggttctgccatcgaaaactgccattgcaccagtcaatccaacattcctacccaggtctgatgatgaacgggaaatgtgtgcgaggactatttactgcacaaacattgacaagaaggttccctacctacactcatgctataccactaggtgttcattctgtcattgttctgttttaatatatgcacttgctgcaggtcactcaggcagatctgaaattgttctttgagtctatatgtggagaggttggtcattctttacttcaaacttcctttcccttgtgtacagtttgtgttgcttatatgtttgcaaaaaatgacaattcaaccagcacagtatcattggctcatcgcaatgactgctacaggtctttcggctgaggttgcttggtgactaccatcattctactcgcatcgcttttgtggaatttgtgatggttagctagcaaaccttcttcatatttgtgcatttattttgagggaaatactttgcgcagaaattgcatgcagtgtgcggtttaaatatgtttttagcggtttaaaaatgataagaatacgctgcttgagattcgagtggatcatgtttggttggtcagtgcctccaagtgaaggtctgctgttcaaatgtctaagtctgcgtgctaatctacgctgactgtctaagactgagcctttttagtggtcctaactctggtagaaatgttaatacccgcgccttgtcactgtgttcctt

SEQ ID NO: 136576 - DNA, 782 bp, Zea Mays
gatttggtagatagggagaacatgacgactagagaggcaaggtttgcagatgccgcgggactgcccaaacacaaaaaaaagacgacgtggggtgagtagcgcacacacacgtcacaacaaaacgatggcggttcaaggcttgatatttcctggagcagagcaagggtgctgggagttcgcagcggtgctccacgacagccatcactggcgtcgagcaatgagcgatttagcaaggtcgatgacaaacaacgcaacgacgagctggaataccagggtggcccgagcacgacggatgagcggtagccaagcagtgggacgtgactgcgtgcagaggggtaggaggccgagcagagaaacgcggccatggacagagaagcaggcgcgcgcgcacggacaacagcgaagagctcggcgcgttggccacggcgaacgccagggcgcgcggcgagcagcagcctgagcaagcaacccagggcgcgagcagggagcttggccgggcgttggggctgggcgcgatgaacttcagtccgagcaccgacaagccgaggccggatccgaggaagacgagaggggctgcggccgggcgagacctcggcagggcgcgagcgagcaggggtctggcagggagtgacgactgggaagcagggaagctcgccagagggagagggcaagggcgccggcgaggagaaccaaggagccgggggcgagcagggaaggagaggagggagcggctgagctgggcgggaagaacctcagggcgcggctgaggaagcaccaagcag

SEQ ID NO: 136577 - DNA, 782 bp, Zea Mays
gatttggtagatagggagaacatgacgactagagaggcaaggtttgcagatgccgcgggactgcccaaacacaaaaaaaagacgacgtggggtgagtagcgcacagacacgtcacaacaaaacgatggcggttcaaggcttgatatttcctggagcagagcaagggtgctgggagttcgcagcggtgctccacgacggccatcactggcgtcgagcaatgagcgatttagcaaggtcgatgacaaacaacgcaacgacgagctggaataccagggtggcccgagcacgacggatgagcggtagccaagcagtgggacgtgactgcgtgcagaggggtaggaggccgagcagagaaacgcgaccatggacagagaagcaggcgcgcgcgcacggacaacagcgaagagctcggcgcgttggccacggcgaacgccagggcgcgcggcgagcagcagcctgagcaagcaacccagggcgcgagcagggagcttggccgggcgttggggctgggcgcgatgaacttcagtccgagcaccgacaagccgaggccggatccgaggaagacgagaggggctgcggccgggcgagacctcggcagggcgcgagcgagcaggggtctggcagggagtgacgactgggaagcagggaagctcgccagagggagagggcaagggcgccggcgaggagaaccaaggagccgggggcgagcagggaaggagaggagggagcggctgagctgggcgggaagaacctcagggcgcggctgaggaagcaccaagcag
